United States Patent Application Publication US 2006/0134663 A1 - sequence listing, part 53

SEQ ID NO: 124995 - DNA, 1486 bp, Homo Sapiens
  misc_feature (272)..(360): n is a, c, g, or t
  misc_feature (362)..(363): n is a, c, g, or t
  misc_feature (368)..(372): n is a, c, g, or t
  misc_feature (374)..(375): n is a, c, g, or t
  misc_feature (377)..(380): n is a, c, g, or t
  misc_feature (382)..(389): n is a, c, g, or t
  misc_feature (391)..(392): n is a, c, g, or t
  misc_feature (394)..(426): n is a, c, g, or t
  misc_feature (428)..(435): n is a, c, g, or t
  misc_feature (437)..(467): n is a, c, g, or t
agaacatagaggtaggggtgactcccccgggtggagagacacccacgagataaggccagcccaggagcgtctcttttgtggatgtttttatgaggaggcacccgttgagtgccccccccggggttgtgttatttgtggggggggaaacccaaggccccgagggttgcacaccgcgggtttttttcggaagaaagggggtaggggcatttttatttttatcttagggggcccccccgccccgaagaggaggtttgtgtaaaattgttttgggnnnnnnnnnnnnnnnnnnnnnnnnnnnnnnnnnnnnnnnnnnnnnnnnnnnnnnnnnnnnnnnnnnnnnnnnnnnnnnnnnnnnnnnnngnnggggnnnnngnngnnnngnnnnnnnngnngnnnnnnnnnnnnnnnnnnnnnnnnnnnnnnnnngnnnnnnnngnnnnnnnnnnnnnnnnnnnnnnnnnnnnnnnaagagttcataatatgcctttattttgtaatttataaacaacttctgacttgccctttgaaagttaattataattgatgactgcttttcttagatgcttctgaagcccaagagaggggcagaacgtagttcttgatttaaaaaaacagaaaggggaggaggatgaccttaactacaaataatattccactgcaacattattgctgtaaaacttccaagctggctgttcttccagatgctctcttttgatggctgtagtggctgacagatttatatttacatgttcaaaacaattaatgcttccatttattcatagattctctgaggttcccgtagaaccacaccaccttctgtcatggcactttgtagtcgtttcatcgagtctgaggctgcctcccacggggttggttggtagaccatgaagttgattcccgcctctaagcatctctgtgccagcactcgtcctatactctcacaagccaccacatttctggtactataaaggtgctttttaatagcccactcacgagtggaggccgaaaccacaaccttgccattctgatgctccacaagtgcttctacatgatgctgagtccttataactcgcaacctgtgccagaactcacgggagggaaacaccgtccgccagccccgctctttcctggctacagataaaagctccaggttccgggggttccggttggtgaattctggggcgacagcttcattttccacagggtccacttcaggtttcgctgccggctcggagctggttgacagggctgcgaacctgcacccagggttcctgcaaaccgagaacaacccccaaaactgcgaccgaagcgccatcgctgagacgatctcggaaaagcctcgcctctttttcctcacggacgactcagtcgctcgccaggagcagccatataaagtcagggacaagcctttggctgctgtagatccccaaactctccccggccgtaatggccgaattcccgggcatatgtccggtaccgtcgactg

SEQ ID NO: 124996 - DNA, 819 bp, Homo Sapiens
  misc_feature (82)..(82): n is a, c, g, or t
tagttcttgatttaaaaaaacagaaaggggaaggaggatgaccttaaactacaaaattaatattccactgcaccattattgnctgtaaaacttccaagcttggctgtcttccagatgctctcttttgaatggctgtaggtggctgacagatttaatatttacatgttcaaaacaattaatggttccatttattcattagattctgtgagggttcccgtagaaccacaccacctttctgtcatggcactttgtagtcgtttcatcgagtctgaggctgcctcccacgggtttggttggtagaccatgaagttgattcccgcctgtaagcatctctgtgccagcactcgtcctatactctcacaagccaccacatttctggtactataaaggtgctttttaatagcccactcacgagtggaggccgaaaccacaaccttgccattctgatgctccacaagtgcttctacatgatgctgagtccttataactcgcaacctgtgccagaactcacgggagggaaacaccgtccgccagccccgctctttcctggctacagataaaagctccaggttccgggggttccggttggtgaattctggggcgacagcttcattttccacagggtccacttcaggtttcgctgccggctcggagctggttgacagggctgcgaacctgcaccactcctgaggcctggagcaaagccggccgatctgcctcacgctccccgagcagggacaaggaaaagacactaaacctaaaacgcacgactcgctcagaaccccaactctaacttggagaagggcccgcccctccccc

SEQ ID NO: 124997 - DNA, 904 bp, Homo Sapiens
aggccctttaaaccttccaaaaaaataattccccctgtgcaccattaattgctgttaaaaactttccaaggctgggctgttcttctccagaggcttctcttttggatggcttgtagtgggctggccagatttattattttccatgtttcaaaaaccaattaatggtttcccatttatttcatagatttctcctgagggtccccgtagaacccacaccaccctttctgtcatggcactttgtagtcgtttcatcgagtctgaggctgcctcccacggggttggttggtagaccatgaagttgattcccgcctctaagcatctctgtgccagcactcgtcctatactctcacaagccaccacatttctggtactataaaggtgctttttaatagcccactcacgagtggaggccgaaaccacaaccttgccattctgatgctccacaagtgcttctacatgatgctgagtccttataactcgcaacctgtgccagaactcacgggagggaaacaccgtccgccagccccgctctttcctggctacagataaaagctccaggttccgggggttccggttggtgaattctggggcgacagcttcattttccacagggtccacttcaggtttcgctgccggctcggagctggttgacagggctgcgaacctgcacccagggttcctgcaaaccgagaacccccaaaactgcgaccgaagcgccatcgctgagacgatctcggaaaagcctcgcctctttttcctcacggacgactcagtcgctcgccaggcgcagccatataaagtcagggacaagcctttggctgctgtagatccccaaactctccacgccagacgcccccggccgtaatggccgaattcccgggcatatgtccggtaccgtcgactg

SEQ ID NO: 124998 - DNA, 943 bp, Homo Sapiens
gacactgtgatgaaatcactttaatgtccttgccaaggaaatgcccaagacactggcaggtgggcaagtaagtgtccagatgggaccccgcagctctgtctccactcagcagtgtccgcacgccccaggccagcaggccggcccctcctcgggcaacactggtcttcctgagggcagcccgtgctggggtcccacgcttcgtccatagtgcttgtggggtctctagaactcagtcatcttcttgtgggtgtctgccttcctctgctcctgctgcaggccggcttcctgagcccggagctgccccagctggcgctgggctcctgccagcttctcctgcagctgggctgacgccacgctatgccggccagcgttgcgggcgagagcctcctggatgctcctgatgtcccgctgggttcgctcgatcttctcctcagtctggaagagccgcaggctcagggcccgcttggcactcttgctggcatggtacatgtccttgctcctcctccccgctggggccgccccggcttctagggccccaggagcctgaccttgcagcttttcattgaggaagtcaaacacattccgaggagctgggcggcccccaggcctggcccctcttccccggcacctggggggcttgttggtgcagccttgccaccctggtctgcttctgcagggtctcacacactggtccaggacttcctcgaggcacaccaagcatggatgggctcacccggccttcgcgtgtcgggccaaccttgccaactcatagccatcttgtgaggagcgggagctatactcgcgtgtgactcccaccagcaagcagagtgcagtccgagtcacagatcgacccacactcggaagctgggtcacgtacgtccttctggtcgaccttggcctggccatggggcagagcgccctcacacgctctcagaaaggatca

SEQ ID NO: 124999 - DNA, 694 bp, Homo Sapiens
gaatcttaaatgaattatttatttatttttaaaatctgaggaataaatgcaagtttttaaaagtagcaaggacatgtaaacagaaattgcttctatatattttaatacaaaatccacatttattattagcaccaatgatttaacttacaaatatattctgactccctggttttaagagcaatagcttaagttaaatacacagttcatctcttccaaagtcaaaaacaataaaataaaataacaccgacaagcaatagtagcaatggcaatttgaaaacatatactttaagttaatgggacttcaatagctcagtacaaactatataataatatgtagcatagatgtcagttgactttgattcttacagtctgttgtaatcagtttcatagactttagtcacagtttctgtgtaactagagttacctggccttcccagttctgaggggctttctaatacagagctccactgttttttatgacagtaccacagtatcttcctccttctgcggtctctctgtttttgtcttgcttatgcttcttcaactctgcgcctggataactttcatgttaatccattctgagtcatttgttcttcttggcctgtcaagacacccaaaaaaggccaagctgttcacccagggacgcatactggcacattccttctgcgcttgatactatctgttaattccttca

SEQ ID NO: 125000 - DNA, 813 bp, Homo Sapiens
  misc_feature (20)..(20): n is a, c, g, or t
  misc_feature (750)..(750): n is a, c, g, or t
  misc_feature (801)..(801): n is a, c, g, or t
ttcggcacgaggtttttttntgcaaatcctccatcttttaatgtgataactttccacaccctctccacgtagaggcacaaaggagcttgtctgggaagtttgtctggagtgtgcagaaaggtcaggctggactgcctgtcacatcctgagaccacactaaacctttataagccattgtctctgacctgtattgtagcctgaaaaataaagcaaagtgagtcaaacctctggctcccacttcctgacccactgctccccacacccatcttcaaggacccctcccgccacagtcctgcctcctgatgaagcgcagagcttccagagtgactgtagcctcagcagggccggtccagacatggctgagtcctgtgctgccctggaggaggaaggttcctgggatcctgctgccccgggactcaggatccagcctctcagtgcagatggatggactgttcaacttcacaaacttccggtcccttcccctccccagctgcccttgtctaggaaggctcatgctttgcttcaatgaagcgaggagaccacagaaatacccatggctgtggggctgtgaccagcagtggctgattagggtggaaactggaaagcgtcactgtctcagcagaagaaagcaggaccccacacagcctggggaacggctgcccacccacgcctcggtgaagaccacggccctggcgaggccccaaggtgcttctgagagatgaacgagacacctcagtcatggcacactgngtggtgtgcttcccctccaagtcctgtctttgttttacacagtcatatganagacataacccc

SEQ ID NO: 125001 - DNA, 727 bp, Homo Sapiens
  misc_feature (617)..(651): n is a, c, g, or t
  misc_feature (654)..(654): n is a, c, g, or t
tccccagaggcagatatcccagtagttttagtgaaaacaaatttaatatcatcttgtttgaacaaagctttcagaataagtgagcaattaaattcttaaagtagggacagaacaccaacaggctctagactccggaagagctgtaagccgacaaatgggcattgttttgcttaacagttttagcttcaatgtaaatatatattattacttagaatattagcatctgaactatataatgactattttatcattttacttgaattaaaaccagaatttctggaacttccaaatagtctttaaagtttttcaatataaacataaactaacccctattcctctctacatatcaaatgtgaaataactgtcacaatatatcagcattttcacagaaagatgtttaaggcttctggcacataaaatgtgtaatttctgtgtgacaatgtcataattatatacagaaaatatttaaaattcttgtagaatttaagttctaaagattaaaaaaacaagagttccatgttaataaaatattaaaatactatgagcttcccataaaattgacagtgcccggccgtaatggccgaattcccgggcatatgtccggtaccgtcgactgnnnnnnnnnnnnnnnnnnnnnnnnnnnnnnnnnnncgnccgcttcctcgctcactgacttcgctgcgctcgtcgttcggctgcaacagagccgcccaagtagtgttagttt

SEQ ID NO: 125002 - DNA, 319 bp, Homo Sapiens
ctcccaaaagtgctgggactgtaaggcatgagccaccaatccctggccaagaaacaaagttttaatttcaaaaaaatctacaaaaacaggataggcattgtctttcaaatgttcagaccccagtttattaaaggatacttcaaatagttggctaaattttatgatctctcccgttgaaaagtaggtgatgattttaatgtgacatgcacaaaaaatccttgccagtttacttctgcaatttaattttagcctttactaattacccacttctgtttaattccaatttttaacagcaggtacataaagcattatgtgcaca

SEQ ID NO: 125003 - DNA, 1277 bp, Homo Sapiens
tttctgccagagaaaacgtttaattccctcatgaccaagacaaaaaagaactggcttcaacaactagctgggtctgtgctggcctccaagaccttgaatagcccagatatggagaggttaggtaatgtggccatagtgggcgtgggatgagacatcatcagttcacgccaacacccgtggctttcctcagcagcccaggtttctccatttccccctctgggctctgaatttgtcctcctgtcccagactcatagcctcccctaaagggcagaaggtaccagtgaggctgaggctgaaggaacacccagagactccaagatcggaggggagggcccactccctggagcctactgaccccctccagctggactgacagcctgccagggacaaagcaggaccctgaccacaggaccctcgggaatagcccctctactcttgctccccagggaactcccctggaagagggaccctcagcatttctgggagtccaggggcctgctgcccacaatccccaggtagcctcagataaggaaaaagataacaagttggtactgaaaataaagcaagcgaagagggatttaaaaaatctcaacttccttttcatcctgacaggatttccccaagcgtgctgcagaaaaagcagcatttaaatagagtcctgaggtaacagttttccgagtgcccaggcactcgagagcggggccgggctggccccttgttgacagtgtcccacagagccagcctgccactagtcctctagcactgagctcttggcctccacatactccagggccttggccttgactgcctgcacatccttctcagtgccatgctgcttctcgtagtccaggtagcgcttgaagaagaacttcattctcttgggggccaagctcagatgaatgacccgctcaaagatgtcccggacgtccttctggctgccgtgcttgatggtcatgtcgatatagaccgaccagacatctgtgcgctttgggtaggtgctcagcgtgttctcaaaaatggctttggcccgctctgcatcccccagctgaaactcaagctgggcaaacttggcaatgacatccacatgctccttgctaggcaggcactccagggctcgctgcagcacgcggtgactggctgcagcctggctcctccgcagaaggaaggcgccgtatttgatccacacagctttctcctgccggaaacgcttcagcatccggttgtagagttcaccagcttccggaatttctatcccgggaatccggccggtccagcct

SEQ ID NO: 125004 - DNA, 1066 bp, Homo Sapiens
  misc_feature (638)..(638): n is a, c, g, or t
  misc_feature (725)..(725): n is a, c, g, or t
  misc_feature (738)..(738): n is a, c, g, or t
  misc_feature (754)..(754): n is a, c, g, or t
  misc_feature (759)..(759): n is a, c, g, or t
  misc_feature (763)..(763): n is a, c, g, or t
  misc_feature (813)..(814): n is a, c, g, or t
  misc_feature (824)..(825): n is a, c, g, or t
  misc_feature (882)..(882): n is a, c, g, or t
  misc_feature (943)..(944): n is a, c, g, or t
gcaagttttatggttcatattcaaagttcaatctatgtttcacatttttaagttcagacatatcaaagcctaaaagtacagaaggcttgtgattttttattgctttcatgcaaatataccttctttttccaaaaaatgaagccacatcaattttccacacccaaaagagtgaggacaacagttctatttcctttttactaggatatggtttcttatggaaataatctttaagaaattgcttcttttcttcataagaacggccttcatattttttaggatctaatgctaaaatctgaagagcctcgtccttgacaataggtccctctgttctgctttcattcctttgtcttttaaaaggcacaacactcgtcaccttttctggacccggggctgcatcggcatttaggatgggaggctgctcctccccatgccgctggtcttcggcccctaagtggccgtcaggcagctttctcttaacagaaaaactggaatcatgcatcacttcaccactgactaaaagcagttcactgttgtgaataaaacccggctgggcctgcaggtctgagctgctgtccttgggagcacttctgcagcgcaccaaatggacggcgatggcagccagggtcatatttcccgtngtagaccccacagcagtggatgcacttgaaggcgggagacttcaggaccgtgtggactgtgggcatgatgtgggtgctctccttcanatgcagctcatangcctcagttgtcacanagggngcanagcaaaaggggcaggtggacactcgcttgccggtgctcccgggggtgccnntcagctgagnngctcacttcacatacacaggcaccagtgacttggagtgtatccaagcaggattgcangtagacttccgctcccaagctctcctttggcatatggtgatgaatcaaggtgggaagaganngtgcattggatcgaatctattgaaactctgtgctatatcatagcactctctccccagtgcatcctgcggctcgagacttgtacaggagggatgcaacagaccagcagacacatgtgaacctc

SEQ ID NO: 125005 - DNA, 566 bp, Homo Sapiens
tttttaagggaggtgtacctggaagatactctttaataggcaatgcatgtgtggggatatttttaagttttatcggtacaaatgaaatatattgaacacaaatcgagcaaatatgacttggtcgttaacatccctctgattaaacaggagtgctgctatgagaacgggctgtgccattctgcaggcacacgagagtcgctgggttttagggtagtctctgtggagaatggtgactggaccacgtgggagaggggcttgaggcaggaaggtgagcagactccagagttcaagagatgtttgcatacagcgccctcttgtttccccttacagtgtggctgtggccagtattgagaaccaagtgttcaggaactcatgctggcctgccggtcccacctgacctgagagtggcgggcactcagcgtttcagcaagctgcttcctcaacgatgcttttgatctcttattgttgctggggaggctggagtcacccaaatcaagtgggaagtgctgtcagctgctacgtctctcacctaggagctttagaggctcaagggcatgactggaaca

SEQ ID NO: 125006 - DNA, 592 bp, Homo Sapiens
  misc_feature (549)..(549): n is a, c, g, or t
ccaacaaaagcagcttgattttattgcagggaagctaggaaggaataggacaactgagggtctccgcaggaacaccatcacccggcatgactgccaagtcccaggtctgtctggaagccagcgggaggatcagcatcctaggaaagatggaaagttagatggaacaaaggtgccatctggtgtggacatagcgacattgcaaaggcaataaatgcactaagagacaggggtgacgcaggggtgcactaagagtcttgcactaaaaggcaggggtgaggtggaaaacgcagggtgcagatgcaggagcaggactagagccccagtgtccagccctgcacactgctcccatgaagtctgttatacttaggttggctggaacgcattaaccttgctaagccaatcactgccaaagccctcttctggggaatttccagggctgccaggatacccagtcaacagcactctctatcctgttacaggttggaaaggcaatgaacaaaatcatggcaaataaatctgccaagagtcagatgatcaaggtgacttcanaaccaataaacactctatctttgagggttccaagcctggcttc

SEQ ID NO: 125007 - DNA, 990 bp, Homo Sapiens
  misc_feature (698)..(698): n is a, c, g, or t
  misc_feature (735)..(736): n is a, c, g, or t
  misc_feature (763)..(763): n is a, c, g, or t
  misc_feature (802)..(802): n is a, c, g, or t
  misc_feature (823)..(823): n is a, c, g, or t
  misc_feature (858)..(858): n is a, c, g, or t
  misc_feature (861)..(861): n is a, c, g, or t
tttttttccaacaaaagcagcttgattttattgcagggaagctaggaaggaataggacaactgagggtctccgcaggaacaccatcacccggcatgactgccaagtcccaggtctgtctggaagccagcgggaggatcagcatcctgccccctttggtccatcctgtgggctgtggggaccaggcccctgctactcaaggccaaggtaggaaacagtctttcctgttttcttcagggttgcaagcagagtgtccatgctgtgctcagattcaatgcagaccttcttgttgggcaggtcaatgtcatacttaactcctccaagcttattgaggacccgagagacagcttcagcacagcctccacaggtcatgtccacagagaactcgtgcttctgaaacaaacacagggggaccatgacccgagccctgtagagtgacccccacacagtgccagcagacaggcccactcagggtcaagacagaagacagagagactgggcaggacctggttggcatcagactcatcagaagcctgtttctgagcccgtctcttcaactatagagtagctaagagtttctacctcacaagttgtattcaatggaatcatccctataaatcctttagcagtgtctggcacatagtaaatagaatcacctggagatctagtttaaaatgctttttcccagtcctaccttcanaacactgattcttgagctatgagctttgtctcagggnncaccagtactctgacagggatgggccncatactctgagcatgctgatctggtgggccacttatgancacaaaatatttctgcactanatcactacagctgcaaactacaggtctggtcgcangcnggctgggatctgtatgtcaccatacccagtgatctgctcatcagggcgcatctcaagacatcggtcaggaagaagtgctggtcccatggttgagcagagaggatccgtctatctcagtaccaatcaatc

SEQ ID NO: 125008 - DNA, 449 bp, Homo Sapiens
ttttttttccaacaaaagcagcttgattttattgcagggaagctaggaaggaataggacaactgagggtctccgcaggaacaccatcacccggcatgactgccaagtcccaggtctgtctggaagccagcgggaggatcagcatcctgccccctttggtccatcctgtgggctgtggggaccaggcccctgctactcaaggccaaggtaggaaacagtctttcctgttttcttcagggttgcaagcagagtgtccatgctgtgctcagattcaatgcagaccttcttgttgggcaggtcaatgtcatacttaactcctccaagcttattgaggacccgagagacagcttcagcacagcctccacaggtcatgtccacagagaactcgtgcttcccaggtgattctgctttcatccaagggccgcattctcagaggcagcatctgggtcc

SEQ ID NO: 125009 - DNA, 981 bp, Homo Sapiens
  misc_feature (448)..(449): n is a, c, g, or t
  misc_feature (451)..(451): n is a, c, g, or t
  misc_feature (453)..(453): n is a, c, g, or t
  misc_feature (458)..(459): n is a, c, g, or t
  misc_feature (464)..(464): n is a, c, g, or t
  misc_feature (466)..(466): n is a, c, g, or t
agggttttaatcccaatggccccggttttgtggtggaagtgggggtctctcccaatttttcggggccagaaaattgcctttttaattggatttctacccacaccgggttcctggcgaaaataaagtgggcccaagggcccgggggccgtaaaattgtggtatttcggagctctgccgcttgggagcttccctgtttggttaggattccccagtaaatggccctccaggaacttcccattcggggttgtgtttcagaaacggcttgggtttgcccccccgggcggttttttatttggggggggaattccaagccctttagtccttggcccagggttttccttagggaaaccaggctatggacatgtttcacttcaccttctgggccccgcgcgcccaaacgaacggtcttagaaagctttttcgaaggccgagggcgcgccgacaaggnntntnttttnnttgtnantttttttttttccaacaaaagcagcttgattttattgcagggaagctaggaaggaataggacaactgagggtctccgcaggaacaccatcacccggcatgactgccaagtcccaggtctgtctggaagccagcgggaggatcagcatcctgccccctttggtccatcctgtgggctgtggggaccaggcccctgctactcaaggccaaggtaggaaacagtctttcctgttttcttcagggttgcaagcagagtgtccatgctgtgctcagattcaatgcagaccttcttgttgggcaggtcaatgtcatacttaactcctccaagcttattgaggacccgagagacagcttcagcacagcctccacaggtcatgtccacagagaactcgtgcttcggcatgactgaggcagcggcggtgtggcggcggtgtggcggcggtgtcagcagcgcctctctcccttcccccggccgtaatggccgaattcccgggcatatgtccggtaccgtcgactg

SEQ ID NO: 125010 - DNA, 617 bp, Homo Sapiens
ggcattacaagatgttataagtttattctgaatctcattcaattgtgttcaatgtggctcaattctttacaaattaaaattcttgaatatatgttaaaaattaaacaatcttaatgtttcttccttaactagactggatacacgtctgtttaactacgcaaaaggtaatgctggcatggcttactgggaccctaagtgtggcgaagggactctgctccagtgaactggcgagtgtggaacctcctgacaccttctgaggacctcctgcctgccatgttgctgtggagctcgcactcctcaggcatcccctgatgttgagtgatacaaactctatcaccggaatcgatgctgctgcaatgacaagacttctttctggttttcagattctaaagtttaaaacaacgacaacaacaggagcgcttgaaagttacggtgcttctccctctccagtgtggactcgctgatgtttggaaagattggacttgctacagaaggtctttccacagtgatgacaccagtagggcttttccccggtgtggattctgtggtgtttattgaagttggagctgtggttgaaggctttcccacaactccttacacttatatggcttctctcc

SEQ ID NO: 125011 - DNA, 534 bp, Homo Sapiens
tttagtgtagatatagacttttaaaggtaaaaagaaagaataaagatggagggtgtgataatcctatgaagtgtctgggtttgggtcctgagggcagccaattacatcccagactcactggcaatcaacagtccaagccagggtcccatcagctgaatcctgaggtggggatgcttcagtctttacagaacagggtcaaggaagagtccagaaaccgccgtcattggcttcatgaaaaccgagcacgtctttgagatctttttcaaattctgcctctaagtcaagtcctacctggccaaagtcagaagccttgtaaaatgttttatggttgcgaaacatcaggcgcatgtctcgcacaaaccatgccaccgtgtacatttccgtaatcagcctttccttaaccaggtccaaccacattgcttcctgaaagggctcaccgtaatctcgaatcttggggacaaagccaccagaggtgacgttagcacagctgtcatcactggaatggatccaacttaaatacaatccaagccttca

SEQ ID NO: 125012 - DNA, 553 bp, Homo Sapiens
ttagtgtagatatagacttttaaaaggtaaaaagaaagattaaagatggagggtgtgataatcctatgaagtgtctgggtttgggtcctgagggcagccaattacatcccagactcactggcaatcaacagtccaagccagggtcccatcagctgaatcctgaggtggggatgcttcagtctttacagaacagggtcaaggaagagtccagaaaccgccgtcattggcttcatgaaaaccgagcacgtctttgagatctttttccaattctgcctctaagtcaagtcctacctgggcaaagtcagaagccagctggtcctgaggctgcatctgcctctccagggtcttagatacatgatggcactgttggcttcctgaagacctcttcatcctgcagaaggtgcaactccacagcatcctgagaggttggacacaaggtgagcagaggggcaagcccctggaaatggccaccattcccgtggctggcactgtcttccctcggaaggatgggctcagccatgaggtgggacactcccagagtgtcaagaatccc

SEQ ID NO: 125013 - DNA, 889 bp, Homo Sapiens
  misc_feature (61)..(78): n is a, c, g, or t
  misc_feature (573)..(573): n is a, c, g, or t
  misc_feature (595)..(595): n is a, c, g, or t
  misc_feature (731)..(731): n is a, c, g, or t
  misc_feature (741)..(763): n is a, c, g, or t
cagtgcctagccgaaattaccctcactaaagggaataagcttgcggccgcatacgcggtcnnnnnnnnnnnnnnnnnncccggtttatacagtttttattgtggtattaaaatatagcataaaatttgccttttaagcatgtgtaagtgtacagtggagcagcgtgaagtccactcacagtgctgtgcagccgccaccaccttttcatcaccctaaacagaaactccgtacccattaaacactaactccacaccgctccggcccccagcccctggcacgtaccagtccactttctgtctctctgaatctgacggctctaggtgccttgtttacggaatcccgcagggtgtgccctgttgtgactggcttatttcactcagcataatgacctcgggccatccatgctgtagcctgtgtcagaatttcattccttttcatggctgagtaagattctgttgtgtgcttgtaacacatttgtttactcattcctctgctggagcacacttgagtcatttccaccttttggccactgtgaaaggtgctgccatgaatattcatagaaaagcatccatnttgggtccctgtttcacctctnttggggtttatgcttctctggtgattctatgttgaaccttctgaggagctgtcatactgtcttccacagtggctgcaccatttcacacccccagcggcaaagcacagggattatgatgtctccacatccttggcancacttgctannnnnnnnnnnnnnnnnnnnnnnaatagcatcctagtatgtgtaaagtagtatccattgggtctgattcgtatttcgctatgactacgggctggcgcatcttcatgggcttatggcatctgtgttctctctggactgtcctcgtgcgat

SEQ ID NO: 125014 - DNA, 1136 bp, Homo Sapiens
gcacgaggtctacatgagatgctcacttatttaagctcaactggaactaagtgggtgaccccttgattgtgctactacccattatgtacccacccatacccaccactccaaggctgaacagaaagggttgtctgacacccaggttttattgtttccactttattgctcaagcatggaacttgaggcaagcctggaccttcagcaacgtgcagagaagaggctgaggggattttgggacacaacctggccgagaggggaaactgacaggggaaataccagaacagggaacagggggtggtcaccatgacaccagaagacatcatcagccacaccgtcgggggtgaggaagggaacagagagaagaaatggcatagcagtggtttttcccatgtccctagcacccacatggaggccacatttggaaatggactgggagagggaaaggatgaggaaaacggctgcccaggagtctccctctccaccctgggttcttatcagacctcatccctaccacttgcctcttctacccttagaaaatggacctaacagagggagcaaaataaattaacattctgatgaatatatatggatggacatatgttcatgtgcaatggaggaagggaagaggggctgacaccagctaaaatgattccccacctcaatcccccagcctacacctttcccccttcccctaaagccaccatccaaccagatagaaaaataaaggtctaattcactcaaaattcttcagtttttacaaaactaacagggtggagtggggagactggggggcaggcagccgcaggagtagggctggtggagaggggctatgcttctgtctccacctgagactggctccctgccgtgttgctcttctgctcctccttcatctctgtgtcagtgggatggtctcctgaggaagcctctgccttggccttgttctcctcctcagccagcctctcaaacatattggcatagagcttcttctcccgggcaagctgccttcggatccgctgctggcacacagccagctgggtcttggcggctttgttcgcacgcgtgggtcgacgatatcccgggaatttccggagccggtaccagcctgctttttgaaccactgttcatattacggcggt

SEQ ID NO: 125015 - DNA, 959 bp, Homo Sapiens
gtgaatttcatctccccaagactccttgggcctttcaaaaactcttgaggggtaattcatattccagctcagcatttgggtggatttggaacttttccttccccaacactgcccaaagcatagcttggcttgaggtaccacgatggaatgttctcctttctccatgccgctgaatggccctctccagaccataaggcagatccaggttctccccctcgccaatctccaaagcggagctcccgctggtcaaagagcttgtccttgtagtaccccttccagtgcaacctccacgatagcaccctcattgggcttagcatagccttcaccgcgagtctgtattctgcgaatgattccgccatcttcctcttccgtcagatcttctcccttaaactcaaacaactccacctcaaatacaagcgtggcattggggggaatctttggaggactgcctgctgaaccgtaggcatattctggtttgcaggtgatgtggcacacctcccccaccttcatggtggctatggcaatgtcccaagccttgatgacctccccttttcccaggtcaaaggagaatttgtccttgcgatccagactggagtcaaactttgtgccatctaatagccagccagtgtagtggacaaagactcggtccccaatcatgggcatctctgtacctgtgccctctctcttgatgaccttcagcacgccttcgtcctgtttggggctgatgtccactccctccatgggcagcggcgccgactgcgccccgctctcggtcgccttcatctcctcggctgtcatctccgcgcggcgcgccgtttatccgggagctggtgccggcgcgagcgcactctgggccgcgggcgggggcgctacctgcggggcgtgcgggaggccgggcgcggcctcgtgccgaattcgccacccaggcctcgctaccttaaaccgttagagttactgcc

SEQ ID NO: 125016 - DNA, 1017 bp, Homo Sapiens
  misc_feature (281)..(281): n is a, c, g, or t
tagttttcagatgaccacatggcccgggtttgaggtgagaggcccagtcgaaggggccctgtgctttctggggctccctcattggaaaaaactagactcaatattccaagccaagacacgatcttcttatacggtagtaaagcttgcttgtatttactttccttgaagtacacagtgccccgctctttccactatgggtgctctgttcacagcttctcttctgaattcatctcccaagactccttggccttttcaaaactcttgagtgtgtaattcatatnttcagctcagccatttggttgggatttggaacttttccttcccaacactgccaaaagcatagctgggcttgaggtacacgatggaatgttctcctttctccatgcgctgaatggccctctccagaccataaggcagatccaggttctccccctcgccaatctcaaagcggagctcccgctggtcaaagagcttgtccttgtagtacccttccagtgcaacctccacgatagcaccctcattgggcttagcatagccttcaccgcgagtctgtattctgcgaatgattccgccatcttcctcttccgtcagatcttctcccttaaactcaaacaactccacctcaaatacaagcgtggcattggggggaatctttggaggactgcctgctgaaccgtaggcatattctggtttgcaggtgatgtggcacacctcccccaccttcatggtggctatggcaatgtcccaagccttgatgacctccccttttcccaggtcaaaggagaatttgtccttgcgatccagactggagtcaaactttgtgccatctaatagccagccagtgtagtggacaaagactcggtccccaatcatgggcatctctgtacctgtgccctctctcttgatgaccttcagcacgccttcgtcctgtttggggctgatgtccactccctccatggacagcggcgccgactcctcgtgccgattacaccacccgcctcgtactaccatatatct

SEQ ID NO: 125017 - DNA, 1451 bp, Homo Sapiens
  misc_feature (41)..(51): n is a, c, g, or t
tcttcccttgagccccggggttccgggccttccctgccttnnnnnnnnnnntccaacattgcatagcttctttcccgcacgcctcgatccgtgctgcaccaccacttggtctgcgccttttttgggtagactgcagaccttctggaatcacccgtgccagttcaagtcatcacgccaggtggcctctccccgcggagagcccttctcgttgttgctgtccagttctaggccttgttacagctttcaatggcagcagagaaggcctgtagtttcagatgacacatggccaggttgaggtgagagccagtcgaagggcctgtgctttctgtgcttcctcattggaaaaactagactcatattgcagccaagacacgatcttcttatactgtagttaagcttgcttgtatttaccttcccttgaagtacacagtgccccgctctttcactatggtgctctgttccagcttctcttctgaattcatctcccaagactccttggcctttttcgaaactcttgaggtgtaattcatatttcagctcagcatttggtgggatttggaacttttccttccccacactgccaaaagcatagctgggcttgaggtacacgatggaatgttctcctttctccatgcgctgaatggccctctccagaccataaggcagatccaggttctccccctcgccaatctcaaagcggagctcccgctggtcaaagagcttgtccttgtagtacccttccagtgcaacctccacgatagcaccctcattgggcttagcatagccttcaccgcgagtctgtattctgcgaatgattccgccatcttcctcttccgtcagatcttctcccttaaactcaaacaactccacctcaaatacaagcgtggcattggggggaatctttggaggactgcctgctgaaccgtaggcatattctggtttgcaggtgatgtggcacacctcccccaccttcatggtggctatggcaatgtcccaagccttgatgacctccccttttcccaggtcaaaggagaatttgtccttgcgatccagactggagtcaaactttgtgccatctaatagccagccagtgtagtggacaaagactcggtccccaatcatgggcatctctgtacctgtgccctctctcttgatgaccttcagcacgccttcgtcctgtttggggctgatgtccactccctccatgggcagcggcgccgactgcgccccgctctcggtcgccttcatctcctcggctgtcatctccgcgcggcgcgccgtttatccgggagctggtgccggcgcgagcgcactctgggccgcgggcgggggcgctacctgcggggcgtgcgggaggccgggcgcggcaggcactgactgcggaccgcgaggaggcttgagcacctctgcacgcggcgcgagagctggggtaggtgggtcaggagcggctc

SEQ ID NO: 125018 - DNA, 1358 bp, Homo Sapiens
tattcaggccaaccacccgtccggggggttgaggaaaggggacccaggagagaaagaaaatgggcataggcagtggttttttccccatgtcccttagcaccccccatggaaggccacatttggaaatggactgggagagggaaaggatgaggaaaaccggctgcccaggagtctccctctcccaccctgggttcttatcagacctcatcccttaccacttgcctcttctacccttagaaaatggacctaacagagggagcaaaataaattaacattctgatgaatatatatggatggacatatgttcatgtgcaatggaggaagggaagaggggctgacaccagctaaaatgattccccacctcaatcccccagcctacacgtttcccccttcccctaaagccaccatccaaccagatagaaaaataaaggtctaattcactcaaaattcttcagtttttacaaaactaacagggtggagtggggagactggggggcaggcagccgcaggagtagggctggtggagaggggctatgcttctgtctccacctgagactggctccctgccgtgttgctcttctgctcctccttcatctctgtgtcagtgggatggtctcctgaggaagcctctgccttggccttgttctcctcctcagccagcctctcaaacatattggcatagagcttcttctcccgggcaagctgccttcggatccgctgctggcacacagccagctgggtcttggcggctttgttgttggggtagagctgcaggaccttctggaaatcagcccgtgccagttcaaagtcattcacggccaggtgggcctctccccggcggaagaggcccttctcgttgttgctgtccagttctagggccttgttacagctttcaatggcagcagagaaggcctgtagtttcagatgacacatggccaggttgaggtgagaggccagtcgaagggcctgtgctttctgtgcttcctcattggaaaaactagactcatattccagccaagacacgatcttcttatactgtagtaaagcttgcttgtatttaccttccttgaagtacacagtgccccgctctttcactatggtgctctgttccagcttctcttctgaattcatctcccaagactccttggccttttcaaaactcttgaggtgtaattcatatttcagctcagcatttggtgggatttggaacttttccttcccaacactgccaaaagcatagctgggcttgaggtacacgatggaatgttctcctttctccatgcgctgaatggccctctccctcgtgccgaattcgccacccaggcctcgctaccttaggaccgttagtagttactggc

SEQ ID NO: 125019 - DNA, 1562 bp, Homo Sapiens
  misc_feature (687)..(699): n is a, c, g, or t
  misc_feature (953)..(983): n is a, c, g, or t
  misc_feature (1503)..(1503): n is a, c, g, or t
  misc_feature (1542)..(1542): n is a, c, g, or t
ggggtgtgttaggtgtgtgtgcgcgtgccggtttgtggttgcgtgtgctgttacctgtgtggtctagtcgcggcggcctgcgcggtggcgggtgtggcttgccgggagcagcgctcgcttggatggctgcgcagcctccgcactgttcgtcggtgtaatttcagttgttcgtcgcagtgtgcgtcgtgtttgctgcttcagttcgacagcgctgcgcacgcacgtctcgagctgtcccagtcgtatcccgtaccatccacgagacgcagccctgcgccgtgcgtctcgtactatcgcgcttatccgcgccgccagctcgttcgagatggcgtctgcctggatggaggcgtctgctgttgtcgcgctgggcggcctgccagcgtgaggtcgccgcacgctcggttcgccgcggttttataataaaagcaaaggccccgcgcgggtataaaaaaaatgtttgttccacaaagttcaatatactccccgcgattctggcccacaaaagctctgttccaaaggctgcccaagtcgcaatattgcccgcgcggtatgtgtggtaacacaccccggttatgacaaccgcgtttttaaaaaagctttataaaaattgtcccccccttgtagaggccgttttaaaatctcttctgttatggggtgaggttgtggcgcccccagaatattggctgnnnnnnnnnnnnnacagggagagttaaaaggggctcccctcttttccgaagaggccccccaggcggtgccaaggtgttctccccacggtcttacccagacggttgtgtaaacagcgccggcgccaaatgccctatgcgcgttaaataataccgagcgctctccctattatggggcgccaccgttgggacccacaggaaaacctgggggaacgcggtataacaccttgggcgcccctctcggggggaactttttgggcggcgcccccnnnnnnnnnnnnnnnnnnnnnnnnnnnnnnngtgtttcgcacagagtgaagtttattcccaacaaagttcccctcccccctccccagcccgggacagggacggacaggctgggctgaagatggggttccagtggctgaggggcctctgagaaacaaggaagggccctgggaccccaggccaagccatgtccggctcccccagcctggctgagtccacggcgcctccctgcccagccctcgggagaggggagagggcgctggctcctgggtagttccaaagtggagtgtgaaaatagagagatatatatatttatatgcagtgggcagtccagcgtggcactcacacctctgtctggaagtcaccatccggtggttctgtgggctcccaggctgctgcccggtgcaaagtcagccgttctcggggcttggggggcagcgagcccagtgtcatagatttgaaggtgctccagctctgatggcgccgatgttgggacaagctggggcgctccccagggctgggcttatccttggccgtggactggctgcggtancggtcgaaagtgtggaacttctggttgagctcgtggtanagttctgaatgccgtttccg

SEQ ID NO: 125020 - DNA, 939 bp, Homo Sapiens
ccgtttacatttgtcctcgtccatggccatagctcaaccccactccatcagtttaaaattcccgttcccggcacagacaattgcctggcttaaccttgacaagttggcactggacgagacgctccagagccccagctcctgcagagttcaagtatccgacagttccccacctgctcccaggagcgggttacccgggcactcatgtgcccctcattcctgtgttggggccaaggccgaggacctgcgagtagggctcagttgcctggagccccttcagcccatcccccagttcactttgcttgtgggatctccccgttgctcctgcccctggactgagtggcaggccatcctacaaacacccggacactcgacatcagtggtgtcaagacaactctaagaaggttttccgtgatcctgcaagacctgtgttccatcctggtgattctgtcttcaatttcactgcacaggtaccacagtaagccagtgctgtgtgctccgagttccagggcatcccccagctcagccactacactgagcacaaggactctgtggggcccaggagcaggtagtcacccctttggggtccacaacacccggctgtccccagacttgtgtccagggaagatagtgttgagggccctcaaggagagcggggcagggatgcctgagcaggacaaggaccccagagtccaagagaatcctgatgatcagagaacggtccccgaggtcaccggggatgcacggtctgcatttcggcccctgcgggacaatggaggcctctctccctttgtgcccaggcccgggcctctgcagacagacctccatgcccagagctcagaaatcagatataaccagacatcccagacctcctggacgagctcgtgcaccaaccgaaatgccatctccagcttgggggacagagtgagacaccgtctcaaa

SEQ ID NO: 125021 - DNA, 507 bp, Homo Sapiens
ctctagaggatcctctcaggagagagaactgggggatgggctgaatggggctccaggcaactgagccctactcgcaggtcctcgtgccttggcccaaacaggaatgaggggcacagagtgcccgggtaaccgctcctgggagcagtggggaactgtcggatacttgaactctcaagagctgggctctgagcgtcctcgtccagctgccaacttggccaaaggctaagccagcagattgttctgttgccgggcaacgcgccttctaaacctgagggagtgggcgcgtgagcacataatggcaccagtgacagagcgaccataatggattaataagcgcagccaggtacccgcgcaaggcacttgctggcaatggcaggaggcggacgtggggggtcgtgcaataggtactggagggagagacgtgggcacaaaggtcgcgggaggaacaggtgcccacaatggctgcagatctgcccgtggatcactgaagattcctgctctcctgct

SEQ ID NO: 125022 - DNA, 619 bp, Homo Sapiens
  misc_feature (575)..(575): n is a, c, g, or t
  misc_feature (578)..(578): n is a, c, g, or t
tttgcagtcagcaagtttactatgtttattaaagtcacataaatggtttgacaaaagtgcacaatagaatgacatcaccggtttgttataaatcacagtgaattactagaatacaacagtgtagttcctctgcacggaggattgcaggatggggtgaaaaggacagggtcttttccatcgattaggccagtcagattttactccccaactgtgtacctttgaaaagactgtgaggaaagctgagtttctttcctcatcttttctcctctaccagttactaagcaacaacaacaaaaagccatgcacaaattttacaacacctgataaaaaatagatacaaaatcttgttcatttcatcatttggcaagcttgcatcttcgctccttcacttttctgattaggccattcatcacatgactcaccctgaataaaagctgtaaataatttagcaatacttacccctatacacacatcaagatacactcgccataaccatcaagtcactgtctcttccctacacattaacacaaaggtacacaccacaaacctagagaccacatttactttacagtttntanaaattaatatatctccactatcaatagtgtagtatttattc

SEQ ID NO: 125023 - DNA, 1310 bp, Homo Sapiens
acttttagattaaaattcgtcttatgtgaattatggcaaatgaaatcaccccactgtttacctgttttatgagtttttacatttgcttaaaattagcatacttgatcttttacagttcccatctccaccaattagtattggcagatttccactatatgtagaagtcaaaagatcagactgtaaaaatatcagatattgtaattaagagctccaaacaagtcttgcagtttcaaaggtagaaacccacccagccagttcagctgcttggacttcaaagccctccgcctagccatctcagccaggctcaggttccttctcccacccatcaggccaagcaggacttgtcaaacatacacattcaagttcctagcacacagtaggtgctaagtgggaattgattataaacttgaattcttccatcaacaaatatccacctctcctgtccagcttgcctcagatcttcaggttctctcttctctgaggcagctaagcttctacatccttcatgaagtttcctttacttctcgacagaagacagttccctttaggcctatcatctctaaatgcaactggctttccattttccacttactcaacactccacaaagtacacttgctacatggtatttattcaatgactgtatatttagtcaccacctcaatcactgctaagctctcttcatgtctatctgtaccacagtttcccatcttagactgtgacgtcagctggcaagggctggctgttggccgattcatcatgactgacatggtgtgtcacaaagagctccaagtaaatgctgtgaaggaagaggatgaggatggagatgaggatcctgagaagggcccagactggctgcccaacccatggacctgaggcctgagtaaggcctgggagctgctttcccctctgcccaggaactctgtccaggggcgattctaaggcacagtggtgaaggacatgattggtcccccaagtgtggtcctcaggtctcatggcagccactcgcctgggaacagtgcaacaagcattccatttagaagatcttccagaacacacacaagaagcattgtctaatgaaaatggagacaaggtctttcttggaagagagtgcccaagtagatactctctgccccaagactaaccaggtcccttttaaggtccctgagaacagcagcctgggagcaaccaagcctttcaaaggctgacaaggcacagagtggatgaatggaacgaacgatacatgaaaaaaacactttggctgataaaacctccaacctgaggcagggacagtgtcgctcgctgacatgca

SEQ ID NO: 125024 - DNA, 917 bp, Homo Sapiens
tggtggggtgctgcgctgccgcggcggtcgcgggtgttggtggcgtctgctggtgtgtgccgtgtgtgggtgctcgtcggttccgattgtcgtccttgggaccgccgttccccttgacagagcgggccggacccgttgaccgggccttccatcccttttggcgcccggcttagggcccgagttgtttctttgtggggtgtgttgaaatctcttctgtcacacacagatgaactttaataaattacaaatgcacctgaaaatgccttcttgatttcctttcagtttaggcctcaaatgggctctcctcaaggctggacctcaaaggcccagtttgggccttcgcaaatgtctctaacccttgacttagagtttgaagattcattccattctggatgtgaatgcaggtaacacccagtttgctgacgtctacaatattccgcctctcatcatcaaagaagatcatctgggagaaaggaattccagtcttctgctgcaacctctcaaagtgtgtgatcttgctgcctggatagatttcccgatgaacaaagtacctgaagaggtcaaagagctccagtagctggttggccccttctatctcacttgtccttgaagcagccgcaccgggcaccccaaggctctgcaatcgttttaggacctcaggcacctctgggtacagtcggacgtcttggccccgcctatctcgtacagttccatcactgctcttatggaacggagggtctacgtgcgtgtcgacccagaaaggccagagagtgtaatccaaatcaaagactgccagcttcggtagccgcgccatgacccgcaccgcaggctgcgcgcagcagaggtggggcttcacccggggccttagagagtgcggaacctccggcagctaaggcagccaccctgcctgccatccc

SEQ ID NO: 125025 - DNA, 675 bp, Homo Sapiens
taataaattacaaatgcacctgaaaatgccttcttgatttccctttcagtttaggcctccaaatgggctctccctcaaggctggacctcaaagggcccagtttgggccttcgcaaatgtctctaacccttgacttagagtttgaagattcattccattctggatgtgaatgcaggtaacacctaatccctcctagggaccccaaatggctgttcctcatcactcagtacccagtttgctgacgtctacaatattccgcctctcatcatcaaagaagatcatctggggagaaaggaattccagtcttctgctgcaacctctcaaagtgtgtgatcttgctgcctggatagatttcccgatgaacaaagtacctgaagaggtcaaagagctccagtagctggttggccccttctatctcacttgtccttgaagcagccgcaccgggcaccccaaggctctgcaatcgttttaggacctcaggcacctctgggtacagtcggacgtcttggccccgcctatctcgtacagttccatcactgctcttatggaacggagggtctacgtgcgtgtcgacccagaaaggccagagagtgtaatccaaatcaaagactgccagcttcggtagccgcgccatgacccgcctcgtgccgaattcgccacccaggcctcgctacct

SEQ ID NO: 125026 - DNA, 1182 bp, Homo Sapiens
  misc_feature (922)..(968): n is a, c, g, or t
acaacgacgctgagtgtatttatttatctacgcgccctggagaccggcccctaaatttaaatatccagcacggggccttggccctcctggccgtgggtggttattgggacgggtcctggagcccttccagggcagaggaacccagagcccggaggtgggatgcccctgagccagcagctgccgatagcaacaaaaggtgaggaggagatgggagccaggcactcatcccaatcccagagacgccaagcggaagggaagatgcttcgggccccaccgcaaggctgagggttggccaagctgggggtgcacacatgtggaagaactggaggcccagtgccatgagcagaggctgtaccctagatgcccgccccagtgccagccaacccaagacaggagaaagagtttggcagtttcgcctctgaggaatacatgcctggccctcctgtgaggtgaggcggtaggggggaaggcgcaggctccgaagtctgagggcttgccggagggggagtttctgagccttttgcatgggtgcatgccccctgccccccagcccttcagaggctgatgtggaaggcatcctgcagccactggtcacgggcattgtgcgtctggggcacagtaaggggtggcgggtcaggaggcaggctggcatcgggaggctcctcgtcgtcagacaggcccgcatccggtgggtaggagctgtccgaatggagggaggatgacaggtcctggcagaagctcaggtcttggcacaggtgtttgtagtcctggattgactcgtacaggccccacagctggcacaacaaggacatgtccaactgccgcagccccacctgcagacaacatctccttgcgcagcgcggccagcgctgagtcgaggttgacaggacgacgcgggccggctgcgggtcccgcgttggcnnnnnnnnnnnnnnnnnnnnnnnnnnnnnnnnnnnnnnnnnnnnnnntcagctcgtcgtggatgcggctgcgctggctgtagacgcgctccagctcccgccacgagcccccgctcgcattaaggaggccgctgaggccgcgcggcagcggtgggagcccggccaaagcgcagcccgccccgcccggcgcctctgccgagggcagcccgttcatggccgaggccggcgcggacggcgatgccacctccttccctccaacgct

SEQ ID NO: 125027 - DNA, 971 bp, Homo Sapiens
gaaggtgacgtgacatctctttattggttcagtctatgcctggcccagcggcagccccaggtccagggggggtctggttggaggtctctggacagtcaggggcagcatcagcagaaaccctgggtgtcggggggctgtgggagtagcagcactggtccccgcgttgacaggtgccctccttaaacctcttgcaaggaaatgtcttgagccgggcagcccgctgggccacatcttccggcggctccttccgcttgttctgaagcagcctgcgtctctcctccatagcttcgtcggccgccttgccccctgtgcgcggggaggagtcggtgggaccccatttggccctttaccccttctttccctggctgagtccccacccccgggagctggccaccactcaccctggccgggcacgaggccggggaccccagttggcctccgggttagcctggaagcgcttgagtcgtctctgttggtcgctggggtttaccggacattccttcccggatggtgaagttggcctgcagcctgggctccacactgagaatgcggaacgctgggctagtctctgatagtcgctcccgtttcaccggacattccttctcccagcaacgcatgatgtcccagagggcagaggcaggggcatccgtcttcacagcgttcttacaggcgtgggagagtgagacccggaagtcagcgtggaggagggccgaccgcaactgcaggaggcttggtgtgttgcagtggatggtgctgctcagctggtccagggtgtagtacagaggcacgtccgggagctcctcagtgatgacgctcaggacccctcggatccgctccgaggtgtggaagcggccggggttagcgctcacagcctccaggacacggcccacaaaatccaggtcatggatgggctctgcccacatggggccaccaagctggtgtcgatgcagggaattccggaccggtccagc

SEQ ID NO: 125028 - DNA, 1433 bp, Homo Sapiens
taatcgggagaaggtgacgtgacatctctttattggttcagtctatgcctggcccagcggcagccccaggtccagggggggtctggttggaggtctctggacagtcaggggcagcatcagcagaaaccctgggtgtcggggggctgtgggagtagcagcactggtccccgcgttgacaggtgccctccttaaacctcttgcaaggaaatgtcttgagccgggcagcccgctgggccacatcttccggcggctccttccgcttgttctgaagcagcctgcgtctctcctccatagcttcgtcggccgccttgccccctggccgggcacgaggccggggaccccagttggcctccgggttagcctggaagcgcttgagtcctcgctgtcgggagctggggttggcatcttcccggatggtgaagttggcctgcaggacgattctcagggccatctcgtggcaggcccggctcttgagggccatggccccgtacttgctgtagcacgtctccccgctgttccccgccaacaccgccatgtctgtgcaggtcacacacagcaaccctccttcactcacagcctgcacagctgcatccaggaaggtggctgggctgccataggggtccagatcgatgacgtcaaacctctccgacaccctctggtgctggtacatcagcatccgggcatctgcttggctcggctgtaccaggtgggccacgtcattgagctggacattccggcgtatgagatccacagcccgggtggaggcatcgtttgcaaccacagatctgagcccaggcacctctagggcaaatcgaatggaacgtaggcctgaagctgccaggccttccagcacatgcaggccttcctcacagatctcccccacggccgctgtgcgaggttggtctcctgaggccaggttttcactctctttcagttcaaccttttcctcctcttgctctgacaagtccacgaccactttttgcgtgtccttctctcctggaaccttgatctggattcctttggccccaagctgaatgcgagcaaactcggtgatcacagcacatgtcaggtcccgattgaattcctgcaccgggttataaaagacctcgttggcactgggaaaggcgattttggcagccccctcggtgactgtcgtctcctggacttcacgtggacgttcttctccgtagggcccggtgccgttctccatcgctgctgtattcggcagccctggagactgccactcgaaaaaccgggctctagagagcacccgggcggagcggaaagtgaggcttagccacagagacgatccttgcatgagacatccgctggcgcctccgcccgccaagcctgctctcgtagccacagaaaaccgaattagtcaaggtgcacgtttcccgaattaggacctggcgccgccatgttggcacagt

SEQ ID NO: 125029 - DNA, 295 bp, Homo Sapiens
acgggagaaggtgacgtgacatctctttattggttcagtctatgcctggcccagcggcagccccaggtccagggggggtctggttggaggtctctggacagtcaggggcagcatcagcagaaaccctgggtgtcggggggctgtgggagtagcagcactggtccccgcgttgacaggtgccctccttaaacctcttgcaaggaaatgtcttgagccgggcagcccgctgggccacatcttccggcggccccttctgtcgtcttctcgcagccgtatagtagtagtaggcggccgc

SEQ ID NO: 125030 - DNA, 971 bp, Homo Sapiens
  misc_feature (126)..(138): n is a, c, g, or t
  misc_feature (714)..(714): n is a, c, g, or t
  misc_feature (731)..(731): n is a, c, g, or t
  misc_feature (815)..(815): n is a, c, g, or t
  misc_feature (847)..(847): n is a, c, g, or t
ttggcagggtagaaatgactgtgtattccctggttacaaagcggggctgtggcggtcaccagcgagcccagcggtcaacagaccaacagggcctcatcatcgctggcctccagcattggggagcannnnnnnnnnnnnttcctgcagacccccagtggctctggcgagtgggggcccagggtgctgctggcagtggagacctgggggtgcgggtcctgggctgagcagggctcccgaggtgcatctgcaggagctgggccgtctaccagtggctccctgcagacctttctgtccttgtccacgggcctgcactctgggtctcgcaggcccgagggcaagggtggccctgaaggtcccacctccggtgcacggccgggggcactggggggcctgtctccggccgccctggtgctgcctgtgtccatgagcggtgctggggggtcgggggcagcccctggagcaggctggaggaagccatcgcccagcacggtctgtgaggggcgtgctgcggtcagcagtgggatctggcctcggggcgcccgcggccggtgaaagagccggttccagaggcggccgatgcggcggcgggagggcccccggcgggaggcgtgccgacgcatctgtctccgcatggctgtgcgaagattctgcagcacagaggcctgggacgcactgtagacaggaaagtcctccacgggtggaatgaggccctgngcgatgagctgacatangaggggggtgctccgcgcacaactcagctccagcgcgtcatctgggttcgaagcctgtatcctgcgtggcatgagtaagctgangggcatccacgcgatgacacacagcaacacangtgcatgacgcgcgtgatacttgcggacggggcagcacagtcacgtgctctggatctctggctcacgcctccgaaatacagtgtcccatggagtgcggtggagaacatctctgtcggctcggat

SEQ ID NO: 125031 - DNA, 489 bp, Homo Sapiens
tttaaaaaggcccaaaactttatttagttttcagggaaatataagatgcatgtaaacataaaatacaaaacaaaacccaaatcttacagtctagaagcatgccaagacagagcattttctgcagaccaaagagtcccgtcaaagtgataaaggacacctggaaagtggcaggccaaggggctggtcccttccccaagggcactgcatttttgtgatgagattaaaaacaaaccaactccactattaaaaatgctagaaacatggagatagtttagcaccaccattgattctggaaatatttcagcactcaaatcgactgcactgagtttaatgtcctttctccagtttctctgctgaggaggaaagaaggaaaacctggaggaagggaagttttgtctgcagagaaacttgaatagaccccccgactcttcccggagcagaatttgtatggactctctgggtgtggagcccaggcagggctcacttctc

SEQ ID NO: 125032 - DNA, 472 bp, Homo Sapiens
gagaagtgagccctgcatgggctccacacccagagagtccatacaaattctgctccgggaagagtcggggggtctattcaagtttctctgcagacaaaacttcccacaacaggtaccaatctggcctccttcctcagcaccggtagagaaagcaacagaatgggaagtttcctctgggttggagcctcagagctctgcccctcaaggtgacagggacgtccctgtggcttgttccctccacctccagactgtatgcttgctacttcaaccccctatttggtgaatttctgcacagacacagatctctgtgcctggaatgggactgtgccctgtgcgggtctctcccttggcgtatatccatctagatatttagtctttgagaatctcaaagcagagctctctgggaagagaactccccccattgctaaataattaagattaccatcttttttgagggccatgtgttgagaga

SEQ ID NO: 125033 - DNA, 1165 bp, Homo Sapiens
cggttaaaaaaggcccaaaactttatttagttttcagggaaatataagatgcatgtaaacataaaatacaaaacaaaacccaaatcttacagtctagaagcatgccaagacagagcattttctgcagaccaaagagtcccgtcaaagtgataaaggacacctggaaagtggcaggccaaggggctggtcccttccccaagggcactgcatttttgtgatgagattaaaaacaaaccaactccactattaaaaatgctagaaacatggagatagtttagcaccaccattgattctggaaatatttcagcactcaaatcgactgcactgagtttaatgtcctttctccagtttctctgctgaggaggaaagaaggaaaacctggaggaagggctcctcctgaccccacagagcccactaagagctgggaggggaattccatgaggaattctccaaggttctggagctccagagacatccaccagtccccacccagccatgcagtccacatgctcacgcttcagggattactgaagtctgccttgcccgggagtcacttcctgcagacctctgagtacctggtggggaaacccatttcccatcctgtgtcttggatttaaagaaaacctgttgcagataatgagttgtaaattcaaggagggtggctgttttgctgttctttctctgcagtaaactcttatggggagtgtgccttggttataaggcaacgcaaaatggtagggtatatccatggatgaatgttcatcacacccagtctaattcataccaggtggcaggctcagcaaactgaaccaccacaggtgtcagagatacttgagaatgactggtaccaacaagacgacaaaggaggttgccttcctcccagatgtgcccaatggagtctgaactctggttctaatttgtggaggtgggtccctactgtatgaccccttgtggtcactgctctttgagccatacaacttgagagactggctttggattggacagtcaaagggaagtgggcaaaaccagctgagaacccgggagctggatgcatatattctggaatcagggcctgcaaactcaaagattggtttgtcggctggtgacttctctctgctaagtaaatcaatgaccattcattgagaactgatgggccgaactgtac

SEQ ID NO: 125034 - DNA, 680 bp, Homo Sapiens
tcacaacagaaacaggctttatttcaaccagacaagtgaattcttcaattaacatcaacttcttcaagacttgaagatatggaaattaaagacggtgctcagaaggcagagaaaggaagattcatcatggagtaattgttctgtccttcaaaaatccctttcaacaataagctcaatacacaagatcatgggatctcatgcatcccaatatttgtacatgaccctcatttgaaagttacccatcagtcttaatgaaatctttcaaaaagaaaaaattattatagatcagtataaattatttttaattttagaaactgagattgaagtacagtttttagtttaaaatattaaaaatgaaaaaacctttaacattattaaagatgtgttgttacaaagttcctagatatatacatgtacaaaacaaatagatattactatctgacacctcaacccatgacttaccctaaatctcctgatatgaacaattaatctactgggaggcttttcccaataagtttcaaatttcttgcacaaagatttgctgccattcatattctgtgcatggatgaggacatttaatcacagactatttcaacttaatataacctagcataaaataaatccaatgaaacactacatttatacgcgataggacaacttgcatatatttgcacttttgc

SEQ ID NO: 125035 - DNA, 466 bp, Homo Sapiens
ttttagcatttatcagaatttggtgttttaatttatgaattatataattcagtttcaacacaacaagtggagtaagaattattgttcccaatgtacagataaagaagttgaggttatgcatagagtaatcactaggaccaagatgagaacctaagccccctgttctctgtcaatgatacatcattatttcatgttgccccaattaaatgaacaaataaggcttttgaggaggaggcaattccagctatggaaagattaaatccagagcttgaaaactgagtatgcattcagtcttctgctacttttccttcaccatgctgaaatcttaaaggcaacagaggatgacttggattcttgtgatgctagatctctacgtgacatgaaatgttgatatctaggcatgtaggccacttccctcgttttgttggtaaggaacttaagtgcagagaaatggtttattcaaagt

SEQ ID NO: 125036 - DNA, 1626 bp, Homo Sapiens
  misc_feature (152)..(160): n is a, c, g, or t
  misc_feature (261)..(271): n is a, c, g, or t
  misc_feature (404)..(506): n is a, c, g, or t
cccccccgttttcccccggggggaatattttatcccaagggggcacggtggttgagatcccgtggggatttaggttcttaataccccttttgaggggtttcccgtgggcggagaagtttatgaaaaacaacactaccctaccgagtgtcacnnnnnnnnncaaatttatatagagagctcgcggggtcccctggagagatccactgaagaccccccaaatccctctggagattttcagaacgctctgtttcccccccgggnnnnnnnnnnnggagaatacaagcgctagtcttgtgcccggtatcttagggaacacatatgaccacgttctctttcccattggggccccgcgccccaaaaaaagtgttgaaaaattttctaggggcgaggcgggggccacaagnnnnnnnnnnnnnnnnnnnnnnnnnnnnnnnnnnnnnnnnnnnnnnnnnnnnnnnnnnnnnnnnnnnnnnnnnnnnnnnnnnnnnnnnnnnnnnnnnnnnnnncctctctctcctcctaatacacactttttttagtaaggggaataccatgatgtcgctctagcccggcccctggaagaaagaaggagagttaggtgttaacgtgatcactagatagttcagtacaagcccctccccgtaggcccctgccccagttactgtgaagggaaggggggaaaagaagtgttcaagtgtcctaaaactgaccccatgatcccagaaatagtaacgcacctggagaactggggcagggggaggggggcttaacagaaaactttgccaaacagtggcgaaaaagaagcgcatctgagtgagagacaggggcaaggaaaaggaccccctttttatccagttttcagtcctccacagctcttaaaccctaggccatcacaaatagatcctccctaactcctggggataggcaggtagagcttatgaaaagccaaggtttatatgcctaacccgtctatttaaatgtagagacagaagtgaagcaaggcaaaaacctgggcaccacactaggcccagtgagaagttaaccttgcaagactggctcaaataaagaataagtatctcaaaatcctcccacaaggctgttggggaggatcaactagctagcctctggtattcttccaagggaggttcagtcttcaatccctccctaactccgaaaaaagtaacaaatgtccaagcagtgctttcactgcctggaggccctgttcctcccagttttgtccgcaaacaccttcaaatgccaccaactcccaagaaaaaaaaggctgggggtggaagcctctttgaaccaagggagggatgcagcccttatcaccaatttctactgcagaaaagatgatgaggctggccttctggcctggcctgcaactaccttcctcaacctgcacaggcaggagacaaagttcctgaagaccacggggaggggtggggggagggaggttcctcagaccagagaggaggaagcatacggggctcacgggaggcgggggaaagaggagcagcccatctatcctgacctgtagacgcgaccccggggccactcaaaagtgccttcaccagctctacctgcacagctgtacctgtggccttttatcagacagcacacagc

SEQ ID NO: 125037 - DNA, 1079 bp, Homo Sapiens
gtccaggactgtatacttcccaaaatgtctctccatgtaccctgacaatcagtgcccctgataacccgttcagtgcacaacctggttaccctaggctttccctcattgtcccccgttacttccggtcaatagtcagtagaccttatgaaaacccagtggttatatgcctaacccgtcttaattgagatgtatagacagtgactgactctagtcacaaccctggctaccacacctaggcccagtgacgaaggtaaccttggcaagactgcgcctccacataaagcatatggtatctcaaatcctctcacaagtctgtttggtggaggatcaaactagctaaccctctaggtattcttccaaggccaggtttcattccctcaatcccgtcgctaagctccgaataggaggtgactatgtccaagcagtgctttcactgcctggacgatccctgttcctcccagttttgtccgcgaacaccggttcaaatggccacccacgtggcctgagcccgtaaaaggctggaggggtggaatgcctcgtgggaaccaaggggaggggatagcaggccctgtatcaccaatttctacctgcagaaaagatgatgagggcatgcacctctctggcttggccgctgcagagcgtgaccgtgcactcaagctgctggtcacacggcatgaagacaggagttccctgctgtacagcggtgagggcgtgggggtgaagggagcttgctcagccagagagaggacgcatcggggctcccgggaggcgggggaaagaggagcagcccatctatcctgacctgtagacgcgaccccggggcctgctgttaaaaccactgtagaatcgagagcgggagctgttgtagttggtggtccgggcgcggtagcgggctcgtggaaaaccccggtctgttgtgctgatgcctggtctgttggttcgttttgggatcaccttgatttgccttcctctaaatagggactcatctaaggccaaggaagtcctcactgactctttgtctgagaactccccggccgtaatggccgaattcccgggcatatgtccggtaccgtcgactg

SEQ ID NO: 125038 - DNA, 1011 bp, Homo Sapiens
  misc_feature (727)..(784): n is a, c, g, or t
  misc_feature (837)..(965): n is a, c, g, or t
ccttctttcctctttttttcctctctctcctcctaatacacactttttttagtaaggggaataccatgatgtcgctctagcccggcccctgtagacgcgaccccggggcctgctgttaaaaccactgtagaatcgagagcgggagctgttgtagttggtggtccgggcgcggtagcgggctcgtggaaaaccccggtctgttgtgctgatgcctggtctgttggttcgttttgggatcaccttgatttgccttcctctaaatagggactcatctaaggccaaggaagtcctcactgactctttgtctgagaactctatatacgcaaaccctttgggatggccactaaatttgtcacacagtatggtaacacggttgactgaaccacagccatgaaagtgagcttccagctcttctgctgttgcaccatagtccacattgccaacatagatggaacgggcatcagcctccatcttctcctcaatggacatgatcaccgggccagcattgcctggaggtggactcatattcatctgcttctctacctcgttctgtagctcctttagcttctcagcttcttcctccatctccctgactcgagctttgatagcttccagctccgggtcctcaatggcgccgtcccccgggtcaccctcgaccagtcccggctcctcctcctcctcttggctgccgggggctcccgaaccaggcccagggcccggagctccnnnnnnnnnnnnnnnnnnnnnnnnnnnnnnnnnnnnnnnnnnnnnnnnnnnnnnnnnnagcagcagctcctcaggctccagttcctcagactccaggccgttcccgtagtnnnnnnnnnnnnnnnnnnnnnnnnnnnnnnnnnnnnnnnnnnnnnnnnnnnnnnnnnnnnnnnnnnnnnnnnnnnnnnnnnnnnnnnnnnnnnnnnnnnnnnnnnnnnnnnnnnnnnnnnnnnnnnnnnaacggacgcgtgggtcgacgatatccctgaattccggaccggtacc

SEQ ID NO: 125039 - DNA, 1151 bp, Homo Sapiens
  misc_feature (420)..(420): n is a, c, g, or t
ccattccccccggggaacttcttttttgggccccttttcccccaggagtttcgaattccctttaaggttgggggttgggaccccacgaaatttggaattcctaaccccttttcacaaatttaggctaatgcctggggttactaaaccccccttttaaggaacccctgacctggggtttagaagaaaatatttggtaaccaggccttttcttcttttggtcctagggtaaataaaactcaaagtgaatgaggtatgattttacctaaaatcaaaaccattttttggtaaagtactaccttagctctattgtaaggtaagtgtaaattagatttgctttgacttagttgctacaggccacaattataaggcaactaactgaggaatttattcacttgtcccttcttttgaacctcactgtgnttctggcttgccaggaggtgcaagtgtcgtccccgctttgtacttggcgctccaggcctgggtcacttcacttgagttatcagaggcaaccgtctagtttgacaaactaccggaggctcctgatagagaagggcgtgggcgccaatctaggagacaaagcctgagccgctgcggtgagccaacccaaacccatccgcgggtcttctttccagagacattttcggagccgagggcgcctctgcgagagcgctgcgaacaggttccgacgcgccggagatcgcgcgacgaatctgcgcctcgaaccctcgctttccagcagtcgccggattgctgctccacagggagccaacgcgcttgaggaccagcccagccggggctctctggatcagtaggctgtgcaggctgcgagctcgttgacgcatctcagcccactcccttgtcctcccgcctggcgaagatgtccgccaagcctgaagtcagcttagtgcgcgaggcttctcggcagatcgtggccggtggttctgcaggtaaggacagcccgccctgccccgccggaggctagtcgctttccccaccgcgtgtcctgaaaccgttgcccagacaggtctccttactgaagttctgccctcttcctcaaaattcagcgctcccggagcagtgcttgagcccctagaggcgcgagagcagaggaggccgggagatcccgaggaattccggaccggtccagcctc

SEQ ID NO: 125040 - DNA, 2408 bp, Homo Sapiens
  misc_feature (96)..(124): n is a, c, g, or t
actgagaaaaagtgaatttttaattatcttgtgaatctacttagaaaaacacacacaagcaatgttcacaactataaatttaaaccttttgcactnnnnnnnnnnnnnnnnnnnnnnnnnnnnncacaggcatgaactgtaaacctgtattaactatgaactggtcttaaggttaattcttagcagtcattcagtattttcctccttggcaactgtaatgttttagcaccggatgatctcccgcagaggtactagtaatgactggctgccagtgtagggagatgcttccatatacaccacttcacacacataccgtccactctcacacccacccagacgggaggcacatggagatggggccacacgccgactctcagggtaacggaagtagggcagggggcgcataggttgcacatctttaatgtagtgcattcgtagaaaaaaggccagctttcgctcccaggcgtgctctcgtcctcagactttaatttcatgatttagaagatgcagacgttattgcctaaatattattctatacatttccatcagtgttcaggaaaacactttaattgctacttaatttacatcataatcactgggttacagctttagctcattggcaattttggaagcaatatttttgaaggctatggatgtccccgatatccgcttaaaccggaccccgttcagagacagtcttggcagcttgcacacttccatttcccactgcacgaggttctccgcgtgcccatctccgtggacgcagaagagcaagaagcgctccctctgctcatagtcgcagttattggcgtccaacactttgcggatttcccgcatcatgtccccgggatccattgaactagtggttttcatgctccaggtgaagcgtagggatcgaggctttgcttctttgttttcatctttttgctcagcagatacattgcgacttgagccctcatatctcccgttcctctcatattcagttggaagccttttgataaacctgaatgacatgtttctccttgtgagttttgaagttaatttactaaagagattagtggagcctcggcttcgagtctgggacaatggtgtggcttcatgggacaggctgggagaggcaggagggccattatatgttgcggttcgccgttcccggggctggccgtggaaagtgctacgactggcagtgcctcttgggaagcggattcgatctggggtggctgcactactgatactgtgtgttgaagcaactggagttctctgatcaggaatagtgctgttttctttgccattctgaatcactgagtgtctatcagctgtagttctctcactgcaaacataagtatttcgtcgtgtcattccaccagatgctgtgttactactagggacagtggagcttttcttgcgttcaggaatatccgccttattaggattacttgcattcccaagcatgggactggctggagcaattccctttcctccaacagcactgccacttgatttccgggaggaaattccatcttctttgaggtcactatctgcagtgctggtctgactccttttcggatacgccacaacagaaggaatagctggtccagcatggtcactgtagcgtctttgcttttggcttgaagaaacacttctctgcactttgtggtgaggagactggccagtactgttgttgagatcactgctcggcctaaccttagcaagtgaaagattgctgctagaactggaatcactagcatccagctctgaagattttctccccaataacaaatatgtagctgtgatttcatcgtatttcatcttactaagagattcttgaatttcttcttgtgaatatcccattcccaccataatatctattcttttttggtctgagatgtctagctctggttcaacaaatggtttgagttcatcttcttcatgccctgcattgatccacctgtccttcatgatttgctctagagtgccgcgtttaattggatttagcaccaggaaacgtttgagaaggttttcacagtctgtagacatgtagaagggaattctgtatttccctcttaatactctctctctcagttcctttaggttttgcccatcaaagggaagtgagccactgactagtgtgtataaaatgacccccagactccacacatccacttttggcccgtcatatttcttgccctggaagagctcaggtgctgcgtatggaggactgccacaaaacgtgtcgagtttaccgccaacagtaaattcattgctaaaaccgaaatctgctattttaatgttcatatcggcatctaacaatagattttcagccttgaggtctcgatgtacgatccgtttctgatggcagtattgaactgcagacacaatctgtctaaatttagatcttgcttcttttt

SEQ ID NO: 125041 - DNA, 486 bp, Homo Sapiens
  misc_feature (105)..(105): n is a, c, g, or t
tttttactgagaaaaagtgaatttttaattatcttgtgaatctacttagaaaaacacacacaagcaatgttcacaactataaatttaaaccttttgcactaaaanaacacaaaacaacaaacacaaaaccacaggcatgaactgtaaacctgtattaactatgaactggtcttaaggttaattcttagcagtcattcagtattttcctccttgggcaactgtaatgttttagcaccggatgatctcccgcagagggtactaggtaatgactgggctgccagtgtaggggaggatgcttccatattacaccactttcacacacataccgtccacttttcacacccacccagacgggaggcacatggagatggggccacacgccgactctcaaggtaacggaagtatggcagggggcgcataagttgcacatccttaatgtggtgcattcgtagaaaaaaggccagctttcgctcccaggcgtgctct

SEQ ID NO: 125042 - DNA, 3517 bp, Homo Sapiens
  misc_feature (103)..(127): n is a, c, g, or t
  misc_feature (3398)..(3432): n is a, c, g, or t
tttgtttactgagaaaaagtgagtttttaattatctggtgaatctacttagaaaaacacacacaagcagtgttcacaactataaatttaagccttttgcgctnnnnnnnnnnnnnnnnnnnnnnnnntgaccacaggcatgaactgtaaacctgtattaactatgaactggtcttaaggttaattcttaggagacattgagtatttgactccttggcaactgaaatgttttagcaccggatgatctaccgcaaaggtactagcaatgactggctgccagtgtagggagatgcttacatatacaccacttcagacacataccgttcactctcacacccacccagacggtaggcacatggagatggggccacacgccgactctcagggtaacggaagtagggcagggggcgcataggttgcacatctttaatgtagtgcattcgtagaaaaaaggccagctttcgctcccaggcgtgctctcgtcctcagactttaatttcatgatttagaagatgcagacgttattgcctaaatattattctatacatttccatcagtgttcaggaaaacactttaattgctacttaatttacatcataatcactgggttacagctttagctcattggcaattttggaagcaatatttttgaaggctatggatgtccccgatatccgcttaaaccggaccccgttcagagacagtcttggcagcttgcacacttccatttcccactgcacgaggttctccgcgtgcccatctccgtggacgcagaagagcaagaagcgctccctctgctcatagtcgcagttattggcgtccaacactttgcggatttcccgcatcatgtccccgggatccattgaactagtggttttcatgctccaggtgaagcgtagggatcgaggctttgcttctttgttttcatctttttgctcagcagatacattgcgactccttgtgagttttgaagttaatttactaaagagattagtggagcctcggcttcgagtctgggacaatggtgtggcttcatgggacaggctgggagaggcaggagggccattatatgttgcggttcgccgttcccggggctggccgtggaaagtgctacgactggcagtgcctcttgggaagcggattcgatctggggtggctgcactactgatactgtgtgttgaagcaactggagttctctgatcaggaatagtgctgttttctttgccattctgaatcactgagtgtctatcagctgtagttctctcactgcaaacataagtatttcgatcgtgtcattccaccagatgctgtgttactactagggacagtggagcttttcttgcgttcaggaatatccgccttattaggattacttgcattcccaagcatgggactggctggagcaattccttttcttccaccagcactgccacttgatttccgggaggaaattccatcttctttgaggtcactatctgcagtgctgttctgactccttttcggatacgccacaacagaaggaatagctggtccagcatggtcactgtagcgtctttgcttttggcttgaagaaacacttctctgcactttgtggtgaggagactggccagtactgttgttgagatcactgctcggcctaacctctgaagattttctccccaataacaaatatgtagctgtgatttcatcgtatttcatcttactaagagattcttgaatttcttcttgtgaatatcccattcccaccataatatctattcttttttggtctgagatgtctagctctggttcaacaaatggtttgagttcatcttcttcatgccctgcattgatccacctgtccttcatgatttgctctagagtgccgcgtttaattggatttagcaccaggaaacgtttgagaaggttttcacagtctgtagacatgtagaagggaattctgtatttccctcttaatactctctctctcagttcctttaggttttgcccatcaaagggaagtgagccactgactagtgtgtataaaatgacccccagactccacacatccacttctggcccgtcatatttcttgccctggaagagctcaggtgctgcgtatggaggactgccacaaaacgtgtcgagtttaccgccaacagtaaattcattgctaaaaccgaaatctgctattttaatgttcatatcggcatctaacaatagattttcagccttgaggtctcgatgtacgatccgtttctgatggcagtattgaactgcagacacaatctgtctaaatttagatcttgcttctttttccttcatcctgccatgtgcaaccaaatagtcaaatacttcacctccacttgcatattccatgattaggtagagtgttttttcagtttcaatgacttggaataacttcactatattgggatgatttaaaatcttcattattcttacttctctgaagagcttttgtagacttgttggattcaactgagttttgtcaattatttttattgcaacctctctgcctgtaaggatatgtcttgccaattttacttttgcaaaattccccttgccgattgttttcaacagtctgtagtttccgatgtgaggttgttcatctgcacaggaggctatagagtttctacaccgagctcctgagcggctggtacgagaggtaacttcttgacgcccatctccatgtgacgtgtggttttcagtgtctcgttcattcaccgttggcaatggggtcctagtggacattttactgcactttaattctgcacaatgcgagggtcaaaacaaaacagcacagccctaggaggccggcgaccagcgtcctcgagtccacggcagttccgaaaaggcgccgtggggagggcggctcccttccccctacggccgtctagatcccgggcctggcccgggccgtcccccggcgggtcccggggctcattctctccctgcctcggcggccgaggcgaggagaccgggagggcggcagtggcggagccgagcctgcgggcggcgggctgcgcttcggcccgccggcgtccccttgcctcagggcgccccgcgatcctgggccccctcacctccttctccactccctcccgtcgcaccgcgaatttcagctcgcgggcctcccacacagcgccgccggcggcgcctgaaaacgaggaggcggaggaggatgtgaaggaagtggagcgcaagacaggccgccgcgggctgtgggcgccgaccatggagcgggctgcggaggaggcgcctgcgcccgactgcttctccctctctagcgagcttgctgcctcagccctccgccctgagtggccgccgctgccgccgccgcaccaccccccggaccgtaatggccgaattcccgggcatatgtccggtaccgtcgactgnnnnnnnnnnnnnnnnnnnnnnnnnnnnnnnnnnncggccgcttcctcggctcactactccctgcgatcggttcattcgcatatataagagcttagcgccctatagtgattaacagtctt

SEQ ID NO: 125043 - DNA, 1279 bp, Homo Sapiens
  misc_feature (110)..(124): n is a, c, g, or t
  misc_feature (134)..(231): n is a, c, g, or t
  misc_feature (284)..(306): n is a, c, g, or t
ggggggaacccagccctttttatggccccggtttccttgggaacaagtatggccccgtttcctttccttttggggccccgcgcccaacggaaggttttaaaaactttttnnnnnnnnnnnnnnncgccaagggnnnnnnnnnnnnnnnnnnnnnnnnnnnnnnnnnnnnnnnnnnnnnnnnnnnnnnnnnnnnnnnnnnnnnnnnnnnnnnnnnnnnnnnnnnnnnnnnnntgggcagagttggagtttatttgctgcagttccttggcgctagtttacaaggnnnnnnnnnnnnnnnnnnnnnnnttagaataattatttcttaaaaaccctgtcaacaactttcagtcatttctttatatttttgtattttgacaaaacttcttttaaacaaatacaaaataatctaaaaggagaaaaactatacatagattatttacacctctgataaatagactaatactgacccaggtgcctctctgtctaggaaacacttgagaaccaggccagggcccgggccagctggacaggctccagcaccggcccaaacacgcccagacctcggcaggcaccacctggttctcccacccagaaagttcaggtttccagcctggaccctcttctgtcaccctcacaagctctggcacaaaagtgcctaaagccattccctccaggtaggatctacacaaagtggcggggagggaggtgacagactgtccccctctattcctcccaccactcctctgcaaaagctatttccagagatgctcgccaaccctaaaggatcagaggagccgtggcgacgcggccctgtgaaaacccgcagctcctccacctgcctcctcggggctgcgccctgcaccgccctggtccagggtcctgtggatgggcggtgcgatacagcactcagtcaggcacctgctctgcctgtactggcatgctggccctgacggaatggcaagagctgccctgacagtcgctgacagaacgcatgacatgctgcgtgtcacggctccctcatactgtaatgaggaagggcaggccagtaacacaagcgctgcaagggaaaaacatatgctaaatgcatccggacacctcctcactcgattgcacccacagagtagatatatgccatcttccctctagggggccacacaaatgcatcacaagtatcagctatggtagtttgatgagaaagcgagctacgggatcggaatctactcttctcaaacaggctggtctggagaggagaacaatgacagtacggactcgccatacc

SEQ ID NO: 125044 - DNA, 1128 bp, Homo Sapiens
  misc_feature (995)..(1045): n is a, c, g, or t
cagtcgacggtaccggacatatgcccgggaattcggccattacggccgggttatggattctatgatgaatgcaaacgaagatttaatattaaattgtggaagaccttcactgattgttttaactgtctgcctatagcagccattgtggatgagaagatcttctgttgtcatggaggattgtcaccagacctgcaatctatggagcagattcggagaattatgagacctactgatgtccctgatacaggtttgctctgtgatttgctatggtctgatccagataaggatgtgcaaggctggggagaaaatgatcgtggtgtttcctttacttttggagctgatgtagtcagtaaatttctgaatcgtcatgatttagatttgatttgtcgagctcatcaggtggtggaagatggatatgaattttttgctaaacgacagttggtaaccttattttcagccccaaattactgtggcgagtttgataatgctggtggaatgatgagtgtggatgaaactttgatgtgttcatttcagatattgaaaccatctgaaaagaaagctaaataccagtatggtggactgaattctggacgtcctgtcactccacctcgaacagctaatccgccgaagaaaaggtgaagaaaggaattctgtaaagaaaccatcagatttgttaaggacatacttcataatatataagtgtgcactgtaaaaccatccagccatttgacaccctttatgatgtcacacctttaacttaaggagacgggtaaaggatcttaaatttttttctaatagaaagatgtgctacactgtattgtaataagtatactctgttatagtcaacaaagttaaatccaaattcaaaattatccattaaagttacatcttcatgtatcacaatttttaaagttgaaaagcatcccagttaaactagatgtgatagttaaaccagatgaaagcatgatgatccatctgtgtaatgtggttttagnnnnnnnnnnnnnnnnnnnnnnnnnnnnnnnnnnnnnnnnnnnnnnnnnnncactagaataatggcaaatacttctaatttttttccctaaacatttttaaaagtgaaatatgggaagagctttacagacattc

SEQ ID NO: 125045 - DNA, 539 bp, Homo Sapiens
  misc_feature (227)..(269): n is a, c, g, or t
  misc_feature (459)..(467): n is a, c, g, or t
tcttaaatttttttctaatagaaagatgtgctaccctgtattgtaataagtatactctgttatagtccaccaagttaaatcccaattcaaaattatccattaaagttacatcttcatgtatcaccatttttaaagttgaaaagcatccccgttaaactagatgtgatagttaaactagatgaaagcatgatgatccatctgtgtaatgtggttttagtgttgcttgnnnnnnnnnnnnnnnnnnnnnnnnnnnnnnnnnnnnnnnnnnnactagaataatggcaaatacttctaatttttttccctaaacatttttaaaagtgaaatatgggaagagctttacagacattcaccaactattattttcccttgtttatctacttagatatctgtttaatcttactaagaaaactttcgcctcattacattaaaaaggaattttagagattgattgttttnnnnnnnnntacgcacattgtcctatccagtgattttaatcatacagtttgactggcatactttacagctgatactgatat

SEQ ID NO: 125046 - DNA, 1228 bp, Homo Sapiens
tttttttgttctcatacaagatttattccccagcacacccctcccctcctcagttcacagtggagactatggagattcagggcaggatccctcaggtacaagaaacaccttccgaagattttgctctccttccttccctccctcttgccaactcccaaggcctgaagcgcacactcatgcaaacacacgaaatccccctccttccccacacctcctgtctttccacatcagagctctgaacttgagaggtgtcaaaagtctgtttgagaagcctaaagtggggagatgccattacccctgaccaccccactatgagtgactatgagacacctaactcttccctcttctgtcaaccattttcactccctggcctctgtaccttctccatcaaccaagagcaaacatgtcagcacacccccacctgcagtacatgaaaacaggctctgtccaacatccctcacccaagtacaggggtgttgggggagtggcccctgaggatcagcaaagggttaatgcagaaggaaagaggacagaagcgtttggcttgagctctgcttggggaggcagaggctatagactggcacaggtttagaatcaagtaccatgtttaggtttctgtctcacatcacatgatttcactaggggctgcagaacagatacccctcagaggggtctctgctgattacagccacattcttactattggctcatccttaaaggaggccccaccaagttgggaagcagttggaaataaaagctgtaaaggagctgaacaggaagtaagaataggtggtgcaagagattatggcccctgggatgaatgacatggagccatttgtaaagtgctactgtatcatcccccatgaattattgcttctccaaaggaggagcagaggaaggaacaggaacatagaaatgagtatggtattgctttgctcactgctgaggctgatggccagatggacccaggggttatcagaaaccgaagattaactacacagctccagaagactcagacctcaaaatacagaggtgctcactaatcctcccagccagctgatccccctgggccaaggtaatgtagaagaggcccatccccacatcatattcacattttttaaatttcacaagcaatactttggaccactggggttcaggccccaagaaatggtgggctagatgagagggagcaggcctgttctgcaaaaccaaaggacaagtttgcttt

SEQ ID NO: 125047 - DNA, 1005 bp, Homo Sapiens
  misc_feature (140)..(140): n is a, c, g, or t
  misc_feature (947)..(947): n is a, c, g, or t
  misc_feature (960)..(960): n is a, c, g, or t
  misc_feature (964)..(964): n is a, c, g, or t
  misc_feature (970)..(970): n is a, c, g, or t
  misc_feature (976)..(976): n is a, c, g, or t
  misc_feature (982)..(982): n is a, c, g, or t
tttttccgtattccctttggcgcttccttaaaagggagaagaccggccttacttttcccccgaaaagccgggtttttttgtttgtttggactcaaaaggtcttatgcattgaaaaaggcctcagcttcaggtggacagantgggaggactgcttgccccagctcataccatagactctgtattccggtctcctgatccccatggcctccatcacctcctcctgcagtgtctttagacagggcacataggttctttcttaagcatcttccactgatgtgtctttggggccatcaatccacgtttcagggacgatgccatcagctctgggaaattcgggtttagggataattctccctgatcgtgtggagactcgtacccgctctcctgcttcagtaaatctccactcgatctcagtgggtttcctgtccataggatccacaagtttgacctggcggtggagcaagggggcttcactagggatcatggttccccggtaatccatggtcttgccaatgtagcggtaatgtgtgttcagccctcccacgaccacccagtttcgctgccggataacttgaaccactttgccctgcttcccggcatccttgccttctaggatctccaccgtgtccccacagaacagataccagtcttcatcagagatgggttccacaaccactgggcgccgcctgatccatggggggttcttcctcttgtctgcaacagagcctggggggctcatcccatagcggtaatgggggggcagagtgaccttggatgccaaggccagcagggcagaaagacgcatgcctggaggttgtaagaaatccctttgccagcaaaacgctcgaaaccttccttgtcagctctgcctctcggacgggcacctctagggcgggcggccctcacctccactttccgcggcacttcggatttcctcgtgccgaatnttctaacacaacncgcncagggncctacngctacnctttagcgccgtatagggttttt

SEQ ID NO: 125048 - DNA, 1117 bp, Homo Sapiens
  misc_feature (185)..(187): n is a, c, g, or t
  misc_feature (208)..(209): n is a, c, g, or t
  misc_feature (212)..(213): n is a, c, g, or t
  misc_feature (215)..(215): n is a, c, g, or t
acccccctttatgttcacatgggcccccgaggggtgtttttccttataggagaaaacccaagtcttattggcccccatggtttccaccttacccctttgggggggcccgcggggcgccccaaaccggaattgggttttggaaaaagttttcttgaaggggcccgagggcgggccgcacaaggggnnntttttttatttgtgtgggatnnccnngnccaaaaaagtgctctttattggcatctgaaaaagaagtgcctcagccttcaaggctgggacagaagttggggaggagctgctctgccccaggctcaataccaatagaccttcttgtatttccgggtctccttgatccccatggcctccatcacctcctccttgcagtgtctttagacagggcacataggttctttctaaagcatcttccactgatgtgtctttggggccatcaatccacgtttcagggacgatgccatcagctctgggaaattcgggtttagggataattctccctgatcgtgtggagactcgtacccgctctcctgcttcagtaaatctccactcgatctcagtgggtttcctgtccataggatccacaagtttgacctggcggtggagcaagggggcttcactagggatcatggttccccggtaatccatggtcttgccaatgtagcggtaatgtgtgttcagccctcccacgaccacccagtttcgctgccggataacttgaaccactttgccctgcttcccggcatccttgccttctaggatctccaccgtgtccccacagaacagataccagtcttcatcagagatgggttccacaaccactgggcgccgcctgatccatggggggttcttcctcttgtctgcaacagagcctggggggctcatcccatagcggtaatgggggggcagagtgaccttggatgccaaggccagcagggcagaaagacgcatgcctggaggttgtaagaaatccctttgccagcaaaacgctcgaaaccttccttgtcagctctccactttccgcggcacttcggattttcagcacatgggccctcagcgtcccctccccctcgtgccgaattcgccacccaggcctcgctaccttgga

SEQ ID NO: 125049 - DNA, 751 bp, Homo Sapiens
  misc_feature (68)..(68): n is a, c, g, or t
ctccctccctgccaggtgtcttttagaacaggggcacatagggttctttttaaaagcatcttcccacntgatgtgtctttggggccgatcaatccacgtttcagggacgatgccatcagctctgggaaattcgggtttagggataattctccctgatcgtgtggagactcgtacccgctctcctgcttcagtaaatctccactcgatctcagtgggtttcctgtccataggatccacaagtttgacctggcggtggagcaagggggcttcactagggatcatggttccccggtaatccatggtcttgccaatgtagcggtaatgtgtgttcagccctcccacgaccacccagtttcgctgccggataacttgaaccactttgccctgcttcccggcatccttgccttctaggatctccaccgtgtccccacagaacagataccagtcttcatcagagatgggttccacaaccactgggcgccgcctgatccatggggggttcttcctcttgtctgcaacagagcctggggggctcatcccatagcggtaatgggggggcagagtgaccttggatgccaaggccagcagggcagaaagacgcatgcctggaggttgtaagaaatccctttgccagcaaaacgctcgaaaccttccttgtcagctctgcctctcggacgggcacctctagggcgggcggccctcacctccactttccgcggcacttcggattttcagcacatgggccctcccc

SEQ ID NO: 125050 - DNA, 452 bp, Homo Sapiens
  misc_feature (272)..(324): n is a, c, g, or t
tttcacaacttgctcagtgctttattgaaccaaggccctaacagatgactcagcagggccttcaagcacagccctgcccccatcttgagattcagaatccagagggtgctcagtccttggtttagctgcttctgtgacatttcctcttgaatagctccaaaccctaagtgtaaatatttttgtccacacaaataggcccccttatattcctgctgcaggctgtcatgttcaacaaaaggctcccacctggtttgggtatgcaaggcactgcnnnnnnnnnnnnnnnnnnnnnnnnnnnnnnnnnnnnnnnnnnnnnnnnnnnnncgcaacaagacagcagcaagttctgagcagtcaggccccagggttcacagcagtaggggctgggcttccagcaggctcatgattcagggccttaacccctgccctgggaggccccaagggataataac

SEQ ID NO: 125051 - DNA, 1744 bp, Homo Sapiens
agctggtattaacccaacttaactaactcaacagactgggctcttccaggggtggggggcaccaggatatggaaaatgatgggatgacacaggggaatctgggctggggcagacaggcaggacacccacaccatctttcccatggacagcacctgaggcctccagcaggccctcagcccggcaggcccatagggcagctggcttcaggcctcgaaaggcaagggaggtagcaggactggcgcaggcccctcactggtcctgcagccggctacagagctcccgccggctccgctccccagcccagctgcgagtcttgaggcggaaggtctttagctcatccttgaaggcctcgtggttcatgggccggtagtcctggggttcacagaagttcgggtgctgagggaagaactccttgtagccgcctttcaggatatacatctcagggtagtagaggctggggtagtcgttgacagcacggtctcgttccctgatgaaacggcacatgcggggcccacgctcagatgagaattcacagtggaaaatgaggatgactctcttgtccaggctacagggcgcaatggggctcttcagtaggaagctctcggcgtcgcgttccaggggcaagttcaccgcagtcttgatgtgcccgccttcatattcataggggtatctgcagtctacaatcacaaacttatccacgatgttgctgaacttgcccgtcaatagggccaccatcgtttctggtgagatgtacttgaggtcttggtgctttccgtctactgtctgtaggaggaaggccttagagtaatctccaatcagctctcggtggtcactgtccaggaggttctcgatctcatcgtgacacagtgattttgagcggaggacgcgggctttaggttcctcagcctcctgctgctcctcaggaggggtcacgctccgcctccgcttattctgcacgggcgtgtccctgtcctggggccgctccagcctcttgaggatgggccggatcacgctgcagggcatggacggagagcggaagagccgctggcacttgctgtacatgacgaggtccttttcctcttccttttccaaggtcttgaccagtggggcactaatgagactctccatgcctgggggaactgcatcatcatcctttaagtcactctctaggatgtccacaaatccatcatcttcctcagtatccccctctgcaggggtcagagagaagcgacctagggccagggggctgagctcctccacttccatcttccggtcaggactgagacacatcaggtcgggggccgagctgggtctctgggcaaaggcttccctgcggctggcccactctgccagagcatgggtggagctgggatgtgtgggcttccatggcatcttgaagacaaatccatcattctccttgtcttccccagagctgctggcagctccactgcccgcctcgctcttcctccggccgtcgggcgcctgggagttggtgatgttccgaagcacggggctgtggcccagcagcctcaccggcatagactggaagcgtctgatggcaaactgctcgtttcgaatgatccggctggctgcctggatggcctgttcaaacgtctgctccgccatgtgggggtccatagggctgggggaatccatgcagagacctgcatcagaagattcggaggattcagacgacagggaggattccctcgtgccgaattcgccacccaggcctcgctacctt

SEQ ID NO: 125052 - DNA, 1693 bp, Homo Sapiens
aatttgacccccgcttcacgacattccggggccacaccttttgggcaagtagcatggcccgtgtcagtagcttccccgacagagtttcatggataacctggcaagggggtaaccatggtgcccgaagcatcgtaatattcttagctcgtggaatatatctccggggtccctccgcacgattggctcccggggatatatgactatatctcgcgtctgtttgattgtttgtatcaacttgctcagtgctttattgaaccaaggccctaacagatgactcagcagggccttcaagcacagccctgcccccatcttgagattcagaatccagagggtgctcagtccttggtttagctgcttctgtgacatttcctcttgaatagctccaaaccctaagtgtaaatatttttgtccacacaaataggcacacatatattcctgctgcaggctgtcatgctcaacaaaacgctcccacctggtttgggtatgcaaggcactgcgcatccacggccatccacggccatccacccatccatccaaccttccatccatccgcaacaagacagcagcaagttctgagcagtcaggccccagggttcacagcagtaggggctgggcttccagcaggctcatgattcaggccttaacccttgccctgggagcccccaaggataataacatccctttctggggcaacaaaactgggaccgagtgggtaactgatatttgacaggggaacctaaacagtctacggaagtgtcctgagatgggcgtaaagtcaaacagaccaagcacacaggtaacactgaaataggaaagagtaagagcttctgttcaggctggaggtgctcgtatggtgggacaggaaaggggaaaagagaaaggggcaacatggcagacataccacggttcctacagagattaggggcagccctggcccgggaagtacacagggcagagagctgactctcaggccaggaaggagtttagctctgacccatcctcagggaccacggctctcccccagcctcagctgacacacacacaaaggagcgtttcaggacacaggaagatgaagggttaaccctaacaaggaaacaagaagctcctggaggacacaaaatactgcctttaagctggtattaacccaacttaactaactcaacagactgggctcttccaggggtggggggcaccaggatatggaaaatgatgggatgacacaggggaatctgggctggggcagacaggcaggacacccacaccatctttcccatggacagcacctgaggcctccagcaggccctcagcccggcaggcccatagggcagctggcttcaggcctcgaaaggcaagggaggtagcaggactggcgcaggcccctcactggtcctgcagccggctacagagctcccgccggctccgctccccagcccagctgcgagtcttgaggcggaaggtctttagctcatccttgaaggcctcgtggttcatgggccggtagtcctggggttcacagaagttcgggtgctgagggaagaactccttgtagccgcctttcaggatatacatctcagggtagtagaggctggggtagtcgttgacagcacggtctcgttccctgatgaaacggcacatgcggggcccacgctcagatgagcctcgtgccgaattcgccacccaggcctcgctcctt

SEQ ID NO: 125053 - DNA, 1146 bp, Homo Sapiens
  misc_feature (1003)..(1019): n is a, c, g, or t
  misc_feature (1021)..(1082): n is a, c, g, or t
ccccactggtcaagaccttggggcactaatgagactctccatgcctgggggaactgcatcatcatcctttaagtcactctctaggatgtccacaaatccatcatcttcctcagtatccccctctgcaggggtcagagagaagcgacctagggccaggggctgagctcctccacttccatcttccggtcaggactgagacacatcaggtcgggggccgagctgggtctctgggcaaaggcttccctgcggctggcccactctgccagagcatgggtggagctgggatgtgtgggcttccatggcatcttgaagacaaatccatcattctccttgtcttccccagagctgctggcagctccactgcccgcctcgctcttcctccggccgtcgggcgcctgggagttggtgatgttccgaagcacggggctgtggcccagcagcctcaccggcatagactggaagcgtctgatggcaaactgctcgtttcgaatgatccggctggctgcctggatggcctgttcaaacgtctgctccgccatgtgggggtccatagggctgggggaatccatgcagagacctgcatcagaagattcggaggattcagacgacaggggaggattcggatgcccgtcgagacagggataggtgcgtcaggcggctgcggctgcggaagagcagggtccctacctgactctttggggtttcgctgccgagcccggcgaggtcgtgcatggtctgggtgagggtggtgaccggcgaggaagcggccgcccgcaccggggaccccaggaggccatgagatcccagcaggaggcccgggaggtggcccggacgctgggcgccaccgcacacgcctgctggactgagagccgagcctggcgcgggctccggctggggcacctccatcgcggcggggccggcagaaggctggctggagggccgggcgcagggcagccaacaaacgccggcacagctggctgggccgagggaggcagcgggcgannnnnnnnnnnnnnnnnannnnnnnnnnnnnnnnnnnnnnnnnnnnnnnnnnnnnnnnnnnnnnnnnnnnnnnnnnnnnnggggggcgagggacgccgggctcagctcgtgccggaatcgccacccaggctcgctcctagaccg

SEQ ID NO: 125054 - DNA, 779 bp, Homo Sapiens
aatggagcttattagaacatttatttttttctgaatgacaggccgggagtgggagtagctgaacagggcatgttagtggtgtgagtgctggcttaagcgaaggagctggagtgggggtttgtgttgggggagcagtgggatgggaaacacacctgtggggcagctgaactagaaagaaggatgcccaggatagctatgagacacctacaaagcatgggaacccagttcccctaagcccaccccatccccagatccctttttttctcccttaagttaaaaaaattccttgaggcagcttaagtcagaggctgtaagggtcagactggtcacaggttagacagcagagtttgctccggccagcagagccacgttctggctggatggcagctcaggcctcctcagctgtggcatcaatgcccgcgtaagtgaagttctcaaacagcgacatgttcacataggccttcctggcttccagcatgcggcctagctgtagcgcaatctgggcaaaggggggtcgctcatagggacggtcccgccagcactgacgcatcagctcgtacacttcatcgtcacagtttcgaggctgctccatgcggtagccctggggcagcttttcatagagctcggcacaggtcatgccacagtagggtgtaccttcaaggctcactatcttcccaaagaggacttcaaaagaccagacattactctttgtggtatagacaactgtgttcaaggactcaatgggcattcagcgcaacaggaggacgcccaatcggctt

SEQ ID NO: 125055 - DNA, 595 bp, Homo Sapiens
caagttctcacaccaaaggagtgtttctagggaagctatctgagcaagaggtaaatacttagtcattcggaatagtccataaatgacgactgcttcatcttcaacaaggggaggtctgattggaaagtgctcacagaatgattggattgcatttctgtcttcaatccacctttgattcacaatatacattcctttgttaaaaaattgaagaatgtctgtaatcaaacccttgttaacagatgtaaagagctacaatttgcttgctggacattatttcaacaaaagttttttcattcaaaataatttgtcaaaaaaggacccatgcccttacgtggtttcagatagtgtgctgtccaatttgtatgcttttccacctactcccccagggccatcagggggtacgtgagtttaatgattctacttcttaaccatttcttaaatctgcctccttggtcgggcgcagtggctcacacctgtaatcctaacactttgggaggcgggaggattgctttgaggtgggaggattgaggtgggaggattgcttgagcccaggagttcaagaccaccctgggcaacatagtgccctgactctact

SEQ ID NO: 125056 - DNA, 690 bp, Homo Sapiens
agtaatattttttaaggtgctatatgtttatttttggagaacatcagactcatgtttattagggagtgagggagcacaaagggaggtctccttgcccttgttctccttaacacagctcagagtccccaagcctgggcccgtccaggtaggggtgggaggtgggcgagcagaaggccctagttctagcagcaagccaagaccgacaggtgtgcctgcctcatcacagaggcccaggacccaatccgcttctccgaccctcgccctccggcaggctcagacatcaatgggctcccgacctcggttctgcctcttcaccacaaacaccctctgtcctgacaccgtcaccagcagtgtgtgttctccaaagaccacagacaggcgcttgaagggcacattcatgccgcggtgcagccggaaaccgcaggctgtgctgaccagctcagagatggcactggctgcctgctcatcattctccaggtccccagatgacgccagcactgcaccttcactcagtaccaggtagccgagctggtctgggattcgctccagcccctgggtcagtgcagaagtcatcgcagtcttcggtgctgggggagctccctaccagataggtagcttccggcttcaggccccggtcacccccggccgtaatggccgaattcccgggcatatgtccggtaccgtcgactg

SEQ ID NO: 125057 - DNA, 1310 bp, Homo Sapiens
  misc_feature (77)..(190): n is a, c, g, or t
tgggctcaagcgatcctcctacctcagtctcctgagcagctggaattacaggcatgtgccacaatgcttggataatnnnnnnnnnnnnnnnnnnnnnnnnnnnnnnnnnnnnnnnnnnnnnnnnnnnnnnnnnnnnnnnnnnnnnnnnnnnnnnnnnnnnnnnnnnnnnnnnnnnnnnnnnnnnnnnnnngtatgggccaccatgcccagccacccatctccctcctcttgccaccagatgccctgaggcaacttaagtcttcatgactttctcaccaattacaaaaaggctttattatattttgccaaatgttaatcgctttcattatgtctccaaacattatttcaccactcatttttataacaagtgcagtgaagatatgcttatcgaatattgtacaatactgttgtgttctgtaacactctttcgggaacagcttagatgtaggtaacaagagatgcctgcgtatgaaagtgcttcataaactgtactgtataaatgtaaactactaccattttcaggtaaaatcagagaataaatgtctcttgttggaagtgtcctctcaggactcctctagtccaatctccccagtgagtggatgagggaaaagactgacgccagaggcaggaggctctggattggagagttagaggccaacgcaagtatagaatctgcagtcctagcacagggatctttctcctcccttgtgtaatttatctttaaaaacactgatagttttctggtgctgggagcaccatgccctttaaaacttatgaattaatggacgattacaacaaaaagaactttttacctagccctcaataaatagttgttggtgaaattagaaatttgaggttgaattgttaaagatcgtcttggtcactcctctctcgtgaagaaacccatcgcactcagaatcacctcctgaactttaatccttttcatacattctggtgactccatttccttgtcagtcatagtagagggtttaatcaaatagcacagcataatgttccttagagacattaacggaagactctgctcaaggcagccagggacttccaactgagaggcctgcggagagagccttcaaacatggtcatccaactaggctcgatctatgacagaataacttgcatggtaacatggagggcctttccgatatagcagtaaatctgtcccgtacttgagtcccactttgggcacccagcccttgcttcgaaagtaatggtaggccatgtaggtgattctgaacgtgggctgaactacagtgaaagctttccagagcttcactatcgatcccgggaat

SEQ ID NO: 125058 - DNA, 1142 bp, Homo Sapiens
caaagatgtggtgaccctcttggcagagggcctacgtgagagccggaagcacatagaggatgaaaagctcgtccgctacttcttggacaagacgctgacttcgaggcttggaatccgcatgttggccacacatcacctggcgctgcatgaggacaagcctgactttgtcggcatcatctgtactcgtctctcaccaaagaagattattgagaagtgggtggactttgccagacgcctgtgtgagcacaagtatggcaatgcgccccgtgtccgcatcaatggccatgtggctgcccggttccccttcatccctatgccactggactacatcctgccggagctgctcaagaatgccatgagagccacaatggagagtcacctagacactccctacaatgtcccagatgtggtcatcaccatcgccaacaatgatgtcgatctgatcatcaggatctcagaccgtggtggaggaatcgctcacaaagatctggaccgggtcatggactaccacttcactactgctgaggccagcacacaggacccccggatcagccccctctttggccatctggacatgcatagtggcgcccagtcaggacccatgcacgggtgagaccctgccaggccaggatggaggggtgggggaccccaggagactcaagcctctgaagcctcctgtcctgtccccctgcccacccccagctttggcttcgggttgcccacgtcacgggcctacgcggagtacctcggtgggtctctgcagctgcagtccctgcagggcattggcacggacgtctacctgcggctccgccacatcgatggccgggaggaaagcttccggatctgaccccacagcctttggcctgctcacccgaccagcctgggccgcattccctgcaggacctcccgggtcaggcagggcggccccctgctccacacacttctgcatcttgggtctcagggacccagacagatggacttacatggagctgggcactgccctgcctcaacagggtccattgcctcctcgcctccagaacttggagcagggaagtgggcaccctgaggcctccagcaccagttccgtcattctcgttcctggggaacccccactctgacctgttattaaagttcacattttg

SEQ ID NO: 125059 - DNA, 1836 bp, Homo Sapiens
ttttttttggcattcaaaatgtgaactttaataacaggtcagagtgggggttccccaggaacgagaatgacggaactggtgctggaggcctcagggtgcccacttccctgctccaagttctggaggcgaggaggcaatggaccctgttgaggcagggcagtgcccagctccatgtaagtccatctgtctgggtccctgagacccaagatgcagcagtgtgtggagcagggggccgccctgcctgacccgggaggtcctgcagggaatgcggcccaggctggtcgggtgagcaggccaaaggctgtggggtcagatccggaagctttcctcccggccatcgatgtggcggagccgcaggtagacgtccgtgccaatgccctgcagggactgcagctgcagagacccaccgaggtactccgcgtaggcccgtgacgtgggcaacccgaagccaaagccgtgcatgggtcctgactgggcgccactatgcatgtccagatggccaaagagggggctgatccgggggtcctgtgtgctggcctcagcagtagtgaagtggtagtccatgacccggtccagatctttgtgagcgattcctccaccacggtctgagatcctgatgatcagatcgacatcattgttggcgatggtgatgaccacatctgggacattgtagggagtgtctaggtgactctccattgtggctctcaatggcattcttgagcagctccggcaggatgtagtccagtggcatagggatgaaggggaaccgggcagccacatggccattgatgcggacacggggcgcattgccatacttgtgctcacacaggcgtctggcaaagtccacccacttctcaataatcttctttggtgagagacgagtacagatgatgccgacaaagtcaggcttgtcctcatgcagcgccaggtgatgcgtggccaacatgcggattccaagcctcgaagtcagcgtcttgtccaagaagtagcggacgagcttttcatcctctatgtgcttccggctctcacgtaggccctctgccaagagggtcaccacatccttgtggtcatccagcagctgtcgcaccagctggcagtactgggcctcgtccgcctggtccttgatcggagggaagtctgtcagcttctggaaggcacggatatatagctcatgcacgtgcagtatggtggggttgcagccaatgatgaaaggaaggcagcggaagcccttgatgcggtgagcaatcctcactggaagttcttgctgcaggtaccgagcacttttcagaaggtggctgccgtcctgagagcggccagcgtagagcatcatggtgggcgttaggcggactgagggcttctccgctgccgcgtcgatggccgactggttgtaaaaggaggtgacggtcttggagcgctcccgagccatctccacgtggtgtgtgtcggtggccgacgtcgagcgggcccggagcgcgagtgcgggtcccaggaggggccggagcggaagcccgcccccgggaccgctcctcagcaccgacgccaggatcatcgtcttgctcctttcagacccggtggccgctaggactgaggatccgctaggactgaggacccaggcgacccaaaatggggcaagggggtgtgggtgggtaggggctcttctccgacttcagggaccagggtgcgtcgaggatgctgacaggctcagcccgcggagagcagctcccatcgcggggccggagccagggcccgggtcccagcggaagggctcgaacagtccactcgccaggcgccccctcgtgccgattaacacccagcctcgtacctagccgtatattt

SEQ ID NO: 125060 - DNA, 1137 bp, Homo Sapiens
  misc_feature (1)..(1): n is a, c, g, or t
  misc_feature (1019)..(1053): n is a, c, g, or t
  misc_feature (1057)..(1095): n is a, c, g, or t
ncattttattagagtacagggatatcagctttgggcagaagcagaaggcagcttcacgtaactcttcatggggggtagtggccgaatctttcggccagcccagccccccttgcggtgccaccgcccactgttaggcctcttgcccagccagcggttgcgacctgccttgccaatgacccgtttgttatgatcaacgttggatactcggcctactgttgctacgcacgtttccagcacctgcatctgcctcttagagggcagctggataatggctgtgccattcaccttccgcagtagcacaccacacgtccctgcagctcggatatattgggcaccccggcctggctcactttccacgttgttgatgagggtccccacaggcagagccccaagaggatgcgcatccccttcccgagcagcaactgccattcggcctatgtggttagagttcaagattgtatctccagcctgcatgttttctgtggcgatgatccagcgtttccggctgcccccagcaaccagagctatgtctgctgacctacagggatcatagcggacttggataaccttctcctcaaagggtcctgacttggtctcctcaggccggaaacgcagaaagtcaatcattcgataacgttgcttgtggcccccgccaataccatgcacccggattcggcctgtgtggtctcggcccccagacttcctcatcttcactggtgtaatggtgtacttggtacgactcttccaggacacaaagttggcattaagggccacagaagtaagaactgggcggcaggggagcaacatcaaggcagagggctgttggaggaggccattgttcatcatctgggcggcggggaacagactcggggcaggggcggcgacggtcgggggcgccaggttcagagagcgcagagcgcgggtcagtgcgcacagggccatcagcacgacacccttacttttagccccccggccgtaatggccgaattcccgggcatatgtccggtaccgtcgactgnnnnnnnnnnnnnnnnnnnnnnnnnnnnnnnnnnncggnnnnnnnnnnnnnnnnnnnnnnnnnnnnnnnnnnnnnnnctatgacgacgctagcgccctatagtgagtcgataattctat

SEQ ID NO: 125061 - DNA, 436 bp, Homo Sapiens
tttgccaaataagtgctttttaattacattcctctgccttacaaggtacaagtgtgtcaatatacaagtctagggtcttaacatgtttttccttttgactgcttaaatccccctgtccttgttcccacctgtgtggtctcggcccccagacttcctcatcttcactggtgtaatggtgtacttggtacgactcttccaggacacaaagttggcattaagggccacagaagtaagaactgggcggcaggggagcaacatcaaggcagagggctgttggaggaggccattgttcatcatctgggcggcggggaacagactcggggcaggggcggcgacggtcgggggcgccaggttcagagagcgcagagcgcgggtcagtgcgcacagggccatcagcacgacacccttacttttagccaagctgctcggtgctccc

SEQ ID NO: 125062 - DNA, 736 bp, Homo Sapiens
  misc_feature (628)..(644): n is a, c, g, or t
  misc_feature (722)..(722): n is a, c, g, or t
ttctattaatagtctttattccatatggaaaagtacagtagttgtgcagaaacaaaactaacaaaggagtaagactttcacaaatattaaagaaaataaataagccatagtagttacagcaaaactcatggaaagcctataaaaatgataaagctgttcatacaaagtacaattgtacacacaggaacaaacgttgaagaatgacatcagaggttcctatttgtacaaaaccataatgatgttcacaggaacttcattacaacaattcactttaaaacattctgcaaatatataacttccttctcctcaattttagaaaataaatttcacatcccaacatataaaacagatacactcctacttctctcaaattagcattttaacatcttccaataacacaccattttcatataaaaatacctttaaaccaaggttcattcctgtaccttatctttacaaatgaataatacatcagagcttggacttaagtagcacctcaaaggtgttcatataaatgagataaagtgctgttactggtatactgttaacatgccctaataatatatcattcagtgcaataaccagcatggatgaagcttacagagaacatgcaaatcgtgactggggnnnnnnnnnnnnnnnnnagattaactacattgaaatagttctatttacaagtctgaataaaactgggctatttaatatatacaacatgtgactantaagtactaatgta

SEQ ID NO: 125063 - DNA, 1008 bp, Homo Sapiens
  misc_feature (315)..(323): n is a, c, g, or t
  misc_feature (354)..(880): n is a, c, g, or t
  misc_feature (956)..(956): n is a, c, g, or t
ctattaatagtctttattccatatggaaaagtacagtagttgtgcagaaacaaaactaacaaaggagtaagactttcacaaatattaaagaaaataaataagccatagtagttacagcaaaactcatggaaagcctataaaaatgataaagctgttcatacaaagtacaattgtacacacaggaacaaacgttgaagaatgacatcagaggttcctatttgtacaaaaccataatgatgttcacaggaacttcattacaacaattcactttaaaacattctgcaaatatataacttccttctcctcaattttagnnnnnnnnngcctacagccgcgcctcgtgccgaattcttnnnnnnnnnnnnnnnnnnnnnnnnnnnnnnnnnnnnnnnnnnnnnnnnnnnnnnnnnnnnnnnnnnnnnnnnnnnnnnnnnnnnnnnnnnnnnnnnnnnnnnnnnnnnnnnnnnnnnnnnnnnnnnnnnnnnnnnnnnnnnnnnnnnnnnnnnnnnnnnnnnnnnnnnnnnnnnnnnnnnnnnnnnnnnnnnnnnnnnnnnnnnnnnnnnnnnnnnnnnnnnnnnnnnnnnnnnnnnnnnnnnnnnnnnnnnnnnnnnnnnnnnnnnnnnnnnnnnnnnnnnnnnnnnnnnnnnnnnnnnnnnnnnnnnnnnnnnnnnnnnnnnnnnnnnnnnnnnnnnnnnnnnnnnnnnnnnnnnnnnnnnnnnnnnnnnnnnnnnnnnnnnnnnnnnnnnnnnnnnnnnnnnnnnnnnnnnnnnnnnnnnnnnnnnnnnnnnnnnnnnnnnnnnnnnnnnnnnnnnnnnnnnnnnnnnnnnnnnnnnnnnnnnnnnnnnnnnnnnnnnnnnnnnnnnnnnnnnnnnnnnnnnnnacgcgttccccctggagtcctcgtgcgtctctgttcgacctgcgctacggaactgtcgcttctcctcgggaggtgngcttctcaactacctgtagatccagtcgtgtagcgtcgtcagctggtgtggc

SEQ ID NO: 125064 - DNA, 1013 bp, Homo Sapiens
  misc_feature (295)..(312): n is a, c, g, or t
  misc_feature (355)..(758): n is a, c, g, or t
  misc_feature (762)..(864): n is a, c, g, or t
  misc_feature (877)..(877): n is a, c, g, or t
aattaaatgagcattttattccattccaaaaggaagcaaaacaaaccaccctggttctgaacttcgaaggacctaaagcttccttcctttgatttggtaaaaagctgagtgagctctgcccctcaggagctagtgaaataagggcagccccacctcaaagcctcaccaccagctgcgaactctttccatagagtcctgagtgtggacattgcaagcagctctcaccatgcacagtcctgttttgcaaggtaaatttccactagtagggaggagggagaaaaacagagttgtcttnnnnnnnnnnnnnnnnnngcctacagccgcggccgctccaacacctcttgccgaattcttnnnnnnnnnnnnnnnnnnnnnnnnnnnnnnnnnnnnnnnnnnnnnnnnnnnnnnnnnnnnnnnnnnnnnnnnnnnnnnnnnnnnnnnnnnnnnnnnnnnnnnnnnnnnnnnnnnnnnnnnnnnnnnnnnnnnnnnnnnnnnnnnnnnnnnnnnnnnnnnnnnnnnnnnnnnnnnnnnnnnnnnnnnnnnnnnnnnnnnnnnnnnnnnnnnnnnnnnnnnnnnnnnnnnnnnnnnnnnnnnnnnnnnnnnnnnnnnnnnnnnnnnnnnnnnnnnnnnnnnnnnnnnnnnnnnnnnnnnnnnnnnnnnnnnnnnnnnnnnnnnnnnnnnnnnnnnnnnnnnnnnnnnnnnnnnnnnnnnnnnnnnnnnnnnnnnnnnnnnnnnnnnnnnnnnnnnnnnnnnnnnnngggnnnnnnnnnnnnnnnnnnnnnnnnnnnnnnnnnnnnnnnnnnnnnnnnnnnnnnnnnnnnnnnnnnnnnnnnnnnnnnnnnnnnnnnnnnnnnnnnnnnnnnnggaaggactaaangatacaagcgttccccctggaagtcctcgtgcgtctctgttcgacctgcgctacggaactgtcgccttctcctcgggaggtgggcttctcaactacctgtagtaccaatcgtgtagtcgtcctcaacgggctggta

SEQ ID NO: 125065 - DNA, 676 bp, Homo Sapiens
ctactttcctaaacttttgccctagtgacatacccttttctttaattattattctgacgaagctttctggaaatacctcataagtgtctcttactttgtcatggtctgccccaggtggttgagacctggcagctccctcccacctttcccactctgccctttgccacactgcattttctgtaccctggcccaactcacatgtccctctcctgtcttagctgccagcatctatcttttctctaattcgctgggttcttttcatacaaatctccttagtggttgactctcattttcagtgaatcctcaccagaccagcttaatttcagagaacagttttaatgcagatcttcagggcattctttcctgattctctttggtatttgccttgctttgtctgtgtaactctcatatttacattatggcagtgcattcagtattttcttgccatggaaaggcccccgcatcttgcctcctcgccccatttcgtcatcctctccagcagcttcgacagattactgcctagacttccttagatccctgtaacctctcattgtatcaatcacaccatttaagtaaaaaaattcccactaaggtttcaggaacattatctctactaaaccattcgtatttacttccttaatctctttctctgtatcaggtccttacatgtaagtgt

SEQ ID NO: 125066 - DNA, 1862 bp, Homo Sapiens
  misc_feature (53)..(67): n is a, c, g, or t
ctggtactggtccggaattcccgggatatcgtcgaccacgcgtacgccgcccnnnnnnnnnnnnnnnaaaagggggggccaaattattattattttaaaatttgattacaaccaattttgttggcattaaaattagaggcattaagctggaatggatatataccaaaaccagaaattgagtttagcaaaaatgggaataggagttgttcagtaatttcagattacaaatcaatttagagaaacaaaccccatgcttacattgattgtgccacagatttaaacttcagtagtgcattagtaaactgttcacatttagatcttcaccttgagatttgacagctgtttcttgaaaaaaatctcagtaccttgtgcaaataaaatcggtcttccatgtgccttagcacacacttaaaatttatccattgtatatatacaaaacacctgcaatgtgggcagggcaaaatacatactttcataacaaaactataatatacctctcaagtatgaacaatatacacataatacatggtatacagtatttacaaaatataaaatataatacaagctgtttgtatgtaattttttaaactcatcttttgcaattgtatgttgcaacaaggcaaatttccatttctgtaccaattttctcaagagtccagggatatgggaaaaattatgttttacacacatactgaaatctgaaatctaagtttgaactttgaggagcgtttttaagtgtactgccatcagctccctgttttggttggaattttcaacagtgcttcccatccagtgactaggaggctttggaagaacactaggagaaggtggatcactaaactttgccccagcataattttccttttggctcacttcagttagaaatgctgatttcttcaaatgcgaatttttaatgttctcggtatttttaaaaggctttttttcctgcttctgaattctgtcagatgaaacagaatcctgccaaaagttgttttcatttctttttgcagaggtgatcttggttagtggcaagttatatttgcttttctgtctgtttatctttggttgctcatacaagtgtataccatgaacaagctggccatggggaagggcaattttctccgattttcccatctttgattttaaaacctctttcctgaggggggtttggccgggagccgcgggccgcagcggggcaaggtcggggctggctccctccgtgccggctgcggctgcaggactcgggcccaaggcggcggccgggcccgggacctcctgcgctccgctcgggccggtcgcggggctccggccgccctccagactcggccggtgctgctggtactggtggaagcggctgggcagctgccctgcggggctggcccgcaccttcttctttcgccgcttcttcggcgctgcccgaggagtgcctcccgccacggcgaggctgcggttgggcagagctgctggagcgcgaggctggggggtcagacacgggccatctccccctaggaaatgagggaggaagagggtcgggggcagtgcccgggggtccgggatccggggtaaaggaggcggagccgtggtcaccatcgggagggccccaaagtaacctcgggaggaaaagccaagcggcgcaaggcggccacccaggacgagcggctcccgctgcgggacggagacgacagtcatagcgctaggaagcttgtcgctcagcaacgaagagagaaggagaaggtgaatgaagccagtgaagatagggtggcggcgatggatgctgctaggagagcctgagaagatcgcggaacatgactcgggcggcggacgcgtgggtcgacgatatcccgggaattccggaccggtcc

SEQ ID NO: 125067 - DNA, 780 bp, Homo Sapiens
tttccttttagtaagaaaaactttatcaaaaatttaaatatataaaataaggccagaggctgcactggaggccacttcccagtggtgcactgctgcgctgggtgtccctatgcagctagatacatgttaactgcatagagtaccataaaggagcccactggtgagcttcactgtcacctggccctgctggctggggcttccattgtctactgggtctgtccacaccccagattgccttgtggtcctttcccctggccaagaagataacagttttttaaaaatccccttctgatatggatgtgagcaagcagtggggttcagtttgggaccaagtagtgccatttacaaagagcatgggaagcacctccttaggaggggagcagggccatctccacgttgtcaggggccgcgccgttgcctgccagaccctgggcccacttgtgcaggcggctgtagagtgggaggccctggttctcacggtacaagtagacgccggtgatggcattccactgtggccgtggctgcgtgccttccactgggaagttggcaatcagttcctcatcatccttgttgagcgccacaaagccaaagaagcggcgcacattgttggcagcgagcacccgagagtgcacctcggccgtgcgctggaacagctggtcctcattggcgcggtactgcgcccagtaggcctcctggcggtagctgagtggtgagcagtaatgcttgaggcacttggtcaggaacaccaggatggccaccacgccgatgagcagcggccgc

SEQ ID NO: 125068 - DNA, 1394 bp, Homo Sapiens
ccacattggtgatcctttcagtgaagaggccaacaggaggtttgaacgttaccctggccagaccagcaaccagattatttaagtgccactgccctctgcaaaccaccactggcccctaatggcaggggtctgaggctgccattacctcaggagcttaccaagaaacccatgtcagcaaccgcactcatcagaccatgcattatggatgtggaactgtcaagcagaagttttcaccctccttcagaggccagctgtcagtatctgtagccaagcatgggaatctttgctcccaggcccagcaccgagcagaacagaccagagcccaccacaccacaaagagcagcacctgactaactgcccacaaaagatggcagcagctcattttctttaataggaggtcaggatggtcagctccagtatctcccctaagtttagggggatacagctttacctctagccttttggtgggggaaaagatccagccctcccacctcattttttactataatatgttgctaggtataattttattttatataaaaagtgtttctgtgattcttcagagcccaggagtcagtgctggtggttggagggacctgcccccactggttcatttaaccctctgtctcggtgccctcagaacctcagccagaaaggcaaggaggaaatcagagcaggagcctcatactcttggtgatctattcattctgtgacctcaggggtcacatataaggtcagtgtttctcgtccccgccggatctgcactgccaactgggattgggttcgaacagcttcataaacatcttcagcattttgtaccatctgctccccaatggccaaaatcacatcaccaggccgcagaccagcccggtgtgcaggggagcccaggatgactttatggatgagtacaccatgctgaacatcgggaaagcttggttctcgaagctgtagttcagcaaggatgctgggactcagggtcagcatcatcaccccaatgtagcgccgctgggacccactgattccggaggaggaattcttcttttccccacgatgcagaaactctcgaagacgatcagaagggatggcaaaggagattccagctgtgaccttcatggtgttcactccaatcacctccccatccaggttaaccaggggacctccagagtttccaaaatcaatagctgcatcagtttgaatgtattccacattggtttgggggagtcccaggtctctggctggacgctgagcagagctaacaatgccggatgtgatcgtgttctgcagtgcaaagggacttcccatggcaacaacaaactccccttgccggacatcagctgagcgtcccagaggcagcgtggggagaggctccttagtctgaatcctcagcgttgccc

SEQ ID NO: 125069 - DNA, 1524 bp, Homo Sapiens
  misc_feature (246)..(246): n is a, c, g, or t
  misc_feature (259)..(259): n is a, c, g, or t
  misc_feature (324)..(324): n is a, c, g, or t
gcccttcagaaccctaaaccccaaaaaggccaagggggaaattcggaccagggaccctccatacttctgggggatctattcctttcgggaccttcagggggtccacatataggtccagtgtttttcggtcccccggccggatttgcactccccaactgggaatggggtcgaaacagccttcataaaacatctccagcattttgtaccatctgctcccccaatggccaaaaatcacatcacccaggnccgcagaccagcnccggtgtgcaggggagcccaggatgactttatggatgagtacaccatgctgaacatcgggaaagnctggttctcgaagctgtagttcagcaaggatgctgggactcagggtcagcatcatcaccccaaatgtagcgccgctgggacccactgattccggaggaggaattcttcttttccccacgatgcagaaactctcgaagacgatcagaagggatggcaaaggagattccagctgtgaccttcatggtgttcactccaatcacctccccatccaggttaaccaggggacctccagagtttccaaaatcaatagctgcatcagtttgaatgtattccacattgttttggggtattcccaggtctcatggctggacgctgagcagagctaacaatgccggatgtgatcgtgttctgcagtgcaaagggacttcccatggcaacaccaaactccccttgccggacatcagctgagcgtcccagaggcagcgtggggagaggctccttagtctgaatcctcagcgttgcgatgtctgccacgggatccacagctgtgaccacggcctcatacgtgtcgccgcttagcagtctcacacggactctgcgccgatcagccaccacatgggcgttggtgacaatgagcccatcggcagccaccacgaatcctgagccgttcgagatagggacctcgcggcccaagaaagggtgccggtccaggatctcgatatagaccacggcaggtgctgtcttctccaccacatctgcgatgaagttgtactgactccggggagaagcgggcggcgggctagggacggcggcgaggacggccggaggaccccgacccccgccccacaacaacaacagcactgcccccccagcgcccagcgccaccgccagccacgcgcgcgaacgggttccagagttctctgaggcctcccgggtcctggtatctggggtcaccgcagtcagttgtgcccggggacccggggtcccagacgtcaggcatgctcggggttcagtgaccccaacagacaaccgggcccagagactgggggtcccataagtcactcgggcccgggggtcagaagttcctgacgtcagcagggcccggaggtcaggggtcaaacggggtctcctcccccagcgaatgccccccaaagcccgccatgcccgaaggctccagcctgcaccccgccccgccctcggcgcagccatcagctccgccttggctgcctcctcgatgccgggaatccggaccggtccagc

SEQ ID NO: 125070 - DNA, 673 bp, Homo Sapiens
  misc_feature (546)..(546): n is a, c, g, or t
  misc_feature (584)..(584): n is a, c, g, or t
tttttttggctaaaatattgctttattcacatttttgtccttggaggaaaatctaggcacactgcaacttggatcgtgtaaataaaggtacaaggaatgttttaagtcagaaaagggcatcacgcagtcagggggctgtgtggacgagctcaatttcgatgcatctcgggagacccgggcaaaaggccgcttggattccgggaggcaacgcccccaagtcaggatcccttgctcgccgcccccaaccggtcaggatccctggctcgcgtccccaaccggttccgtgtctcacctgggtcctgcaggcgtccactggaggaagccggatggcgcgggcttggtctttcaggaaggctggctggcaccgggcttccttctggctccagggggaaccgtacagaacggggagaaagggggaagctggtgagaggcagaaggggcgtcacaaggtggctctcccacccccaagtgcaaaggcaggcggatgcggggacctgttcgccgtttgagcctggagattgcgggcctgaggggccctgcgctggncggccggggcgaggcgggagcaaaatggggatttctangccgccgggtcgggctggtgggcggcgcccgggagctgagggtcccgccggccgggagggaccgagcgccccgcgcatgcccggcgcag

SEQ ID NO: 125071 - DNA, 510 bp, Homo Sapiens
  misc_feature (18)..(18): n is a, c, g, or t
ggtggggtggaaggctcncaaccgcccaatctgagcccgaggcctgctgagaagcatgggggccttgggatagttccagaatgaggatgtgcgtttctagctgctttgcgccctcctcccccaaaaatctgctaccacaattccaccccggcggcacgcccccaagactcctttgtcgccccaggggcgggacctgagctgtcggtttcaggagcccttcgtgacttcaaaagtcctgggcactgttgctcatgagtgctgcacaactgtcgccctctaaagccacctccatccctcactgggctggcctcctgagccttcggtgaggaaacggggttccgagttgcccgcctgagagcttaacagtctgactagaaaagggctaattcgctttctgtgcaaatctcttgagctaattatttaatctgaaacatggacaggtaaaggaccattggcgggcgtggggagggaggtgtggaatctttcccacactttttgtcaccttaaaga

SEQ ID NO: 125072 - DNA, 2854 bp, Homo Sapiens
  misc_feature (905)..(916): n is a, c, g, or t
  misc_feature (2598)..(2598): n is a, c, g, or t
ttttgttactgcaagcaattttaatacaaaagtgtgtcttgtttctaaacagttcattggtagagcttcagtttctgcctcaattaaaaccaattgagataatcacacagcaacatggtcggagctgaagaacagcagctaaaaaacaggagccccagacagccccttttcatggtcacttggtcagttgactttattacgcacaaaaaaagacgaaagcaaacaggactggttaacaagtgtgctggtgaactccattaaaggacgagcacgtgtttgtcttacgtccacattttcagaacaggctcgtggaattcattcctcagtttgtgggaagttgatcgaccatttaaataaatagcaaaaaaagtggataaaacaaatctgaaattcacaatgtcaccaacgagcctatcccttgccaagggtctgggtcctggtgaacacaagagttactggtgtctaggctggatagggagcaacaaatcagtttaaaaccccaaatgttctgacgttttctgaacacttacatttacccctgaattctagcagctatttgtcctttaaacacccagtactgaaacaatatccaaagacagtattgcaatgaactccttttgctgtatcatgtgcaaatgttacttagatgaggttccctctctttagctaaaaatcacaaaacattaaacaatggaaaaagccctcccctcagttcttgctaattgaggtgtccgtgatttacaaaaaaagagttccttaaacactgcaggattcttatttttttaatataatttatcttgctgagatagcaagtcaagtttataaagaagatgcatttaggaataatcctaaaagataaagcaggtttacaaccctgcaccgcgcagaaaccctattaataggcnnnnnnnnnnnnaatacacatttgtatcttgaccttttcacttgtttttctcaaatatttcatttctgggccccatccattacagggttaccaggaggcaaattttatctacataaatattcacatgaaaatagtaacttacataaagtaaaaaaataaggcagcttcataacacaattattcttttacacttttaacaatataacttctcccgttcagaataaatatacacccaatgtatggagcaggattcaaagtggatagtggcttgggggtgcttagacagtgttatcgcttgggacctggagtcctgggggaggcagtggtggtcttcttagacatggttgggattttggaaggtttgtttagccctctcctggagttgccttggccccctgcagcgctgctttctgaagtgtcggaacaagcagactgcgtctctaagaggtcaaagtcagaagcgtcacttcctcgccggctgctggctcgactcccggctcgactcccagcccgactcccagggcgactggcagactttttagggtctgcccgattagttttggcacctgtggaggccggggaagaactattgctggtatcaccagcaagggatgtccgactagaatgaaaagttggtgttggtcgtttcaacttgctacctgatgatgggataaccttggttccactggctggggtggctggagaagatggcatggatgtacagctgtggttactctgactagcactggagctggaacgagtaggggaagctgcccgggaagatggtttggaccttcgaccccgtgagcggaagggggtcattccctgggatgctccctctggtaggatgaatttctctctaagttcaatgttagttctacctcgtgctcggcagggatcatttttcactaaaaattcatccaaggccatccatcctccaccaacgcgaaccatcacggtgttgcgcagaatacggaccagccgcaactgctgagaatccccaaactgattgccgaggaagaaccggtatttattctctccgatctgctccacctgaaacctttttgcacatttgcactgagccacttgtcttgtaacctcatcttcgattttatctgcatcggttgttggtcgatacgcatccttgttgggatgaagagcagccacaaattcataataatcaatgtaaccatccccatctcggtcgaaaatgtcagccacagcagtcatctctaacttggtggtggggaacttggatgctaaaatgccatcgataaactcctgacgtgttatcttcccatcctggtccttatcaatgcgccggaagaaatccatcactcgagactttttgtgattcatccaacgcatatactttttcctccagacatcaaagtcaaagttggcaaattctttcaactcctccagccgatcccaggcatcattcagtttcctttgccgctccagtgctaacagccacacctgctgccagcgggcagaaagctggttgatccgtgggttttttgcttcagactgtgaaaggattggcatgggaggaggggttggctgacttagggatttcctgcctccgctgcgggatttctctatgaaaggcgcgtgagtaggctctatgtttttccttttgtatgtcttggtgacccggtccacgtcaggctgtttgcgagtcatctcctccnataaatgtctgatgctcagcgataagggctttaactcggtcaatgttctgcgggattggctcctgatcccgctgaatgagggtggtctcagcccactggatccatgccagaagttcttccaggagctcagcattagccaccagttctgacaaggccgtttcaagacgctgctggtgctgcttagcccatgtcaggacctcctcgaagcgagctcggatgatggtgatccagtgtttgatggttgtgatgcaatcgg

SEQ ID NO: 125073 - DNA, 947 bp, Homo Sapiens
ggcatctggcgcagaactttttttagggggtctggccccgaattaggtttttgggcacccttgtggagggccgggggaaagaacctattgcttggtatcccccagcaagggaggtcccacttagaatgaaaagttggttgttggtggtttcaacttgctccctgatgatgggataacctcgggggtgggcagctgggggtcaggagaatggctgtccctgatagggggtgccagctttactgtttaccaaccagggtttgtcataacagcgagagaactgaagtgaagtcttggttccactggctggggtggctggagaagatggcatggatgtacagctgtggttattctgactagcactggagctgggaacgagtaggggaagctgcccgggaagatggtttggaccttcgaccccgtgagcggaagggggtcattccctgggatgctccctctggtaggatgaatttctctctaagttcaatgttagttctacctcgtgctcggcagggatcatttttcactaaaaattcatccaaggccatccatcctccaccaacgcgaaccatcacggtgctgcgcagaatacggaccagccgcatctgctgagaatcccctaaccggtatttattctctccgatctgctccacctgaaacctttttgcacatttgcactgagccacttgtcttgtaacctcatcttcgattttatctgcatcggttgttggtcgatacgcatccttgttgggatgcagagctgccacaaattcataataatcaatgtaaccatccccatctcggtcgaaaatgtcagccacagcagtcatctctaacttggtggtggggaacttggatgctaaaatgccatcgataaactcctgacgtgttatcttcccatcccggacgcgtgggtcgacgatatcccgggaattccggaccggtaccag

SEQ ID NO: 125074 - DNA, 1125 bp, Homo Sapiens
  misc_feature (1107)..(1107): n is a, c, g, or t
tttttttcaaaataagtaacctgtattctttgaaaatgtcaaggtcgggaacaggtaggatacacagaaaacaaataggtggaagatttaaatcgaaatattttagtagtttcattaaatgtacagaggagagtatgtgcctatcattgggagtctgagacaagataaaagcacggatctcataacaataaattactttgaaatcttctttcttgctcagtacaggtcccgccgccgcgccgcctggctctcgtattcctggttctcggcgggctgtggggcttccgcgccgcagccgttagtctcgtcgggtaggtgactccttcagcgagcaggcgcagcgacgagaaaggcctggcggggttgcgctgtcttcccgcccaccggaaggccctgaggagaagcctcgggccctgagggagggcttggggtcgggggcggccgctgccgccgccatgttgggctggaggtacacacgctcccaacgctctctggctgcgctcccaacggtatctggctgcaaatcacggcgggagcgcctcgggcctcttgtcttttgaccctgtcttttgaccctgtccttggaacccgaggagacttgccgttcccgggggagggtgtgtgtgagtcgggcggcggaggccgtctacgccattgtaggggcggggggagccgagattagagcatcagcctgagagaagtggtgcttctggttctccgctctgcctcgcatcttttcagcgaggcctcgtacctcagttttcccatccgtgaagtggagcttgggccctgcctgactcattcattcatcaggtggaggccttgacgctctaggagccctttcaaaggacttttgccttacacgaaatagtacctatcgttattcactctgcagtaaccacccggatttgagtggccgggtgtttgcacagtaattcagtttcctcttcaccctcctgccattcgtcttcccctccagtttatctcccatatacagattgaattgtccggtcagtgtttcatcccctctgcattctgagggcgagttagcatctgggtgcatgagttccaaactaacagccaggaccaggcttggagccaagaatncctttggctcgcatcgtg

SEQ ID NO: 125075 - DNA, 901 bp, Homo Sapiens
tctttgtctgggccatgtgtctgagaagtcccaatttgagcatgattatttcaggcctgtcccttggcatctgggtttacgcgttcgtcttcattcagcacaggtcctgtgaaccaaagggctatatcatccgatgaagaatcatagttgctgaatttgttctggaccaccgtcattagcttgtggtgtatgaaattcacaagctatgttactagagtccctgggtccttgttccgtttggtataaattggcaagactgtgtttcccacaccacagccaacctgcagtattcggtagtggctgaggatccaggatactcatcggcacgaagtttccaggtcactaatttttctgaggtacattctcctccacaggagtgttctgttttttatgctcaaggctcttcgaagaacacttgtctgttcttccattattaaaccaggtccatcctcattgtttctacattgcacatacttcactcttgttctccaagtaaccaatccttcaaatgattttgattttggctaggtgccagctcagggaattcggtaaaaagccaatgtctatccttgaataacccatgtttcgtggattttgtagaagtcattccagtatttgtgggcattgatctcataatcaacttgtttctcctggcacacccgctggatactgttctcctggacttttcttcttcgcgcacgcggcttgctcttccgaccactccacattgtcccaggcattgtggtggaagacgcgcgccggatctctcaggaaccaggcttccgaactgctgcctcttatcggcgaggattgcaggtgcaccttcagggtaggagccggccatgacaccccccggccgtaatggccgaattcccgggcatatgtccggtaccgtcgactg

SEQ ID NO: 125076 - DNA, 1003 bp, Homo Sapiens
ggctttacggctaacgctatttcagacctccccgtcagccgccgccgggagcgggcacttgggccatgcgaagcccattgggggtaattcaggcgcctggcatggagcttcttgtgcatcacaccggtcgtgacaggcaacccccgagaagatcatattcggaattggtctgaccagttctatacctgtggaaggaaatcacaccattaaacaagagtcctgggtcattgttcgtttgtaaaagttggaaagactgtggtttcccacaccacagccgacctccagtattcggtaggtggctgaggatccaggaaactcatcagcacaatttccaggtcactaattttctgagttacattctcctccacaggaggtgtctgtgttttatgttcaaggctcttcgaagaacacttgtgctgttcttccattattaaaccaggtccatcctcattgtttctacattcaggtacttcactcttgttctccaagaaccagtccttcaaatgattttgattttggctaggtgccagctcagggaattcggtaaaaagccaatgtctatccttgaaaaacccattttcgtggattttgtagaagtcattccagtatttgtgggcattgatctcataatcaacttgtttctcctggcacacccgctggatactgttctcctggacttttctctccgccgccgcggcttgctcttccgaccactccacattgtccctgagaaaatcaaacgggcagcttaggggcttcacgtcctggctgcgggcagggtgagtcgctggcctaggagtttctctccccttggagagtgcctcgggtagggcagcttgactcggtggccggcggtcaggggcttttcggagtgctccgaggcggcgggacagagggtcagcgacaggccgggcgaaggggcagagtgattaccaggcattgtggtggaaacgcgcgccgatctctccctcgtgccgattacacaccccagcctcgtactagc

SEQ ID NO: 125077 - DNA, 1672 bp, Homo Sapiens
  misc_feature (488)..(537): n is a, c, g, or t
  misc_feature (555)..(563): n is a, c, g, or t
tcaggaaaatatctgatctgattcttcccagcttgcttcccctacaacttaataagcccttcactaacccctgtatgtattaactgcaattgcctagcccggcatttacactctcaaaagatttaacgcaattacaatcaaaaaacacttgtcatatataacactttttcacatggaaataaattggtggtttaaggtttacaattcctttgaataaaatttcagttattagttacaaaatgctaagacagattgaggtctcaaagaaagaacttgagaaaattatgttttaaaggacttcacaaatatgaagcataattgttagaatcctgatacaaagtaacttttcctaggtttaaggttcaagtctgaattcttgaattgtccagcatcaacgagacctcatttatattctttttattttatcattactttcagattcagggtctctcgctattttgcccaggctggactcctgggctcaatgnnnnnnnnnnnnnnnnnnnnnnnnnnnnnnnnnnnnnnnnnnnnnnnnnnatgcccggtgctacaaannnnnnnnnaaaaaagcccggaaacacaatgggcttgcatcgtgttggcagcaggtgcctctcagctggtgctggacagaaggggcttgcagtatttgcactgaatccaaacccggtacattgtcagttgctttcctcggttcacctgcagtcggcgatccaccaggttctgaactttttccagtccagcagtggtgaaaagcgtgtccagttcctcttgtgtgaagaagtaaactctggttccatcacctctcacgtagaaatttccagatagacactgaccttttttaaaccgaagctgagccatgtcatagcggccgtaatctcgcagaagcatcatcccgccaggtttcagaagcctgctcagcctgttgatagccttctgcatcttgtctggaacaattgctgaaagaacaaatatgagaatgataatatcaagactgcccttgggcactgggtaactcttctcttcatcacacaggtcgtgaacaaaggcaaaacaccgagaaggatcatattctgaatttgtctggaccagttctatagctgtggaagaaaaatcacagcaataaacaaagagtcctgggtcattgttcgtttgtaaaattggaaagactgtgtttcccacaccacagccaacctccagtattcggtaggtggctgaggatccaggaaactcatcagcacaaatttccaggtcactaattttctgagttacattctcctccacaggaggtgtctgtgttttatgttcaaggctcttcgaagaacacttgtgctgttcttccattattaaaccaggtccatcctcattgtttctacattcacatacttcactcttgttctccaagaaccaatccttcaaatgattttgattttggctaggtgccagctcagggaattcggtaaaaagccaatgtctatccttgaaaaacccattttcgtggattttgtagaagtcattccagtatttgtgggcattgatctcataatcaacaggcattgtggtggaagacgcgcgccggatcgctcaggaaccggcttccgaactgctgcctcttatcggcgaggattgcaggtgcaccttcagggtaggagccggccatgacaccggaccc

SEQ ID NO: 125078 - DNA, 991 bp, Homo Sapiens
  misc_feature (708)..(708): n is a, c, g, or t
  misc_feature (742)..(742): n is a, c, g, or t
  misc_feature (776)..(776): n is a, c, g, or t
  misc_feature (844)..(844): n is a, c, g, or t
  misc_feature (849)..(911): n is a, c, g, or t
gctcttaaatgattttattaaaaattgtaccaattgatggggggaaagatatacacacatacacacatatgcatgtgaagaacataaacacataaagccaaaggctctgtacagatttttaaaaaatggggcccctttcttcttcctctctcccagaggcagagtgcccagaccccagggcagctaccctggggatgaacaaaatgctacattctcactgggtctcctcgatagcccctgtggatccagggatggggtagaaggctagcaatgctcccagagcagggaggggcactggccacctgcacagagagagggggcagtggggctctgagcacctttagctgggaggctggctgggcacctatgagctcagctttttccgctatcccctcaagactcaaaagtccccaccagccctcaggctgcctaagggtgacaggtgagccccttcctgctagggtgtctggccaggatggcctgcttccaagagtcctcaccttcacacacagagctgtttccagcccaggccagcactgatttgcagaaggcctgcagagccatggtgaccaaagtcttcccgcttctgccacgtcccttctgcctaccccacctccccatcaagtccctcaaaaagaagtgctcactggggtagcatgctccttgctgtccaggacagtcaccgtggctccacagcactcttcctgngaggccctggctgaaccgttccgaataaccccangcaggggccacctgcgatggggctgggctgccangagcagtgagacaggtcagctgggcccctctgggtcctttcaacaagcctgccctttggctcgagggnccaannnnnnnnnnnnnnnnnnnnnnnnnnnnnnnnnnnnnnnnnnnnnnnnnnnnnnnnnnnnnnntcaaattccaacacatacgagcgggagcataagtgtaaagctggggtgcctatgagtgagcaactcacattattgcgtgc

SEQ ID NO: 125079 - DNA, 1437 bp, Homo Sapiens
acatgagaaattaatgtacttcatgatataggcacaacagcatctttttaaaaaaactggtatatttatcactagatacagacttctttaaccattagcaacacagcgcagtaaaattttctcaaaactttttaagcttgatttaacatgccaagaaaatgattatttttccaccgagatgcatttatgtaaattatgtaaattggattgaggtcagtgtaacacctggaatttacaacccctagcagaagtaccagctgctaataatgcttatactatatttgtagcttaactagatgttaaactatggaactgttggtgccaatctgcttataaaggcaatgctctggagacaaagtcttctcacaaacagtgggcaagcaggtttcattattatgtgttcaacaacaatcctcagttcattaaataaggtccgacaatatgggtttcttcgagacgaatatcgaagggtaagaaatctatagtatataaaaggttggagcaaacttccttgaccactaaaaagcataaaaactgtcgcaggcatcaggaatatttcattgcaagcaatgaatttcagaatattttgttgattagcacttaatttgtccaagacagatctcagcagaggtaaactatttgagccccttgcgtcaaggacctttttcgtatatgtggcagcatgaagcaaagagaataacaagactgggaagatactcattgtaactggataggaatttacaaagatgagtgaatacaacaggtagtggcagctgtcctctaacaaagcctgggccaggaatgctctgcttaactggaagtgtggtaatctttgatgcagcctcagagcactggtaagagcatttgccagcaaagcacgttggtaaaagcttgctgcttcatgcaacccaagaagaggcagaacaaacagagcagagcagtaaactgtgaacaagcgagaaagccacattgccgtgtccagtttattggtcatcatgaattgcacagcgcccgccccttgggggccgttcggggtcgtatctgccatgggggctcacactagcgtctgcgacgccgcaaccgcgaagagagaagaaaggggagagaaaacgtcagcgctggggccaggacccgggtaccggcttccctgcctcgcgccacacacaggccggatgcaccctgccggaactctgagcctccaccagggaagggtctcgctcgcctggtgcagccgactggatccagggcacccgcagcagccgggaggtacctgtcccgcaccgccgagatcaaagcggtgtttccagaaagacgggagcgaaggtggagcttcggggtgaagccctaaagagccaacctacgcccgacgcgtgggtcgacgatatcccgggattccgaccgtaccagcctgcttttttgaacccactgttcatattc

SEQ ID NO: 125080 - DNA, 664 bp, Homo Sapiens
tttttttatactcctggataacggaatttattacatttacatactctaagttcaagaatgatttactcacaatttagtaatgactttggaaagtacagtaaaatgtgtgagcagttttagttacattattatttgttggagtctaaagtactccacaggtgttttgatacatgcctgtttggggttagcaatgtacttttctggttaaacatcaatgggggttacacatttatcttctcaacaaaacaggctcctctaatatatgtaaatatgactggtcacctttttctcttaagctaaatgtgatagttctggctttgcttatttgctttctagcagcctccccatgttagtcttgccacatggtcagtcttctgtttggtaggttttataaatcctaaaagttctagttcagaaacagctctaataaaccgagcatggataatttcattcatttcttctgaggttgcagaatttgcatccattttttcagcagctgtcacaactgttgcaaaagcctctgaccagtccacgaggttgatgagcctgctacactctaggtgcagtttgtatgctatgcagatgtctggggcgatattcggaatgcagccttcttcgcttttcagtgcttcattcttgagataatagtaaggattgttgagtg

SEQ ID NO: 125081 - DNA, 594 bp, Homo Sapiens
cattaaaacagactttgttttagtcgaccttcagctgtcgtccctccttcccagccaaggctgtgactggggccctttgccacagcctggctgcaccttctccgtagtccccgccccacctcccaggaagtagctaggttccatgtctctgtgctccagtttgtgggctcctcccaggcctgactgtcaccaacctcctcctcgtcctcctttaaacagaagtcctcaggaagaggtctgctggcctctgtgtggggagagatcaggaatgttccagtttcagagactttgtctccacctccagcagactcgcctcccgagccttcacctggttctgaagcctccatatccttgtccggcttgctatcttgcagcagctcgtggatggtccatagcttcatgttcagaagctcctgctgggctccagccagagtagtcacactgaagaaatgtccactcagtggctcgcaacctatgtccccattcctcgctcctgccacaaattccccaaaaattcacagaatcattgctctcctcaccgctcaaaaagggggtccagctgggccatcaggttgttcaggtgctgctctgtct

SEQ ID NO: 125082 - DNA, 893 bp, Homo Sapiens
  misc_feature (46)..(62): n is a, c, g, or t
  misc_feature (881)..(881): n is a, c, g, or t
gtgtatagtttctatcatttatttttccactggatttgagtaaagnnnnnnnnnnnnnnnnngggaaagacccttctgtctcagttttgctatgagaaaagggatttttgggccctgaacgcgggcatgctggtggcctcaggaatacgaggaaaagagctggagctccctctatcttctctgctgtcacactggaaggcagcctctttttgtcctaataaggacagctcttcaagaaggcccagttgtccttaggcacctagtatgggtgtgtacaaccaactaggatcgaaaaaacacacaggagcactccatcatgaaaacagactttgttttagtcgaccttcagctgtcgtccctccttcccagccaaggctgtgactggggccctttgccacagcctggctgcaccttctccgtagtccccgccccacctcccaggaagtagctaggttccatgtctctgtgctccagtttgtgggctcctcccaggcctgactgtcaccaacctcctcctcgtcctcctttaaacagaagtcctcaggaagaggtctgctggcctctgtgtggggagagatcaggaatgttccagtttcagagactttgtctccacctccagcagactcgcctcccgagccttcacctggttctgaagcctccatatccttgtccggcttgctatcttgcagcagctcgtggatggtccatagcttcatgttcagaagctcctgctgggctccagccagagtagtcacacgctcaaaaagggggtccagctgggccatcaggttgttcaggtgctgctctgtctgggccagctgttgtgtcaactgggccagctgttgctctgactgcagtggctgctgcttgcttgcctcctncgtggagaaccg

SEQ ID NO: 125083 - DNA, 1100 bp, Homo Sapiens
  misc_feature (206)..(245): n is a, c, g, or t
  misc_feature (942)..(942): n is a, c, g, or t
  misc_feature (1082)..(1082): n is a, c, g, or t
ctcagtgttgttcaagatgttggttgtggctccggggcttgtttgtgtggtgttgtgttctccgtcggatggtttgtgtcccgggttttcctgtggcgggtggctgttgtcctgtgtggcatgtgtgggcgctttgcggctccgtgtgggctcctgctgtttgggtctgtgaagtgttctctgggtccctgtcctgccggagactnnnnnnnnnnnnnnnnnnnnnnnnnnnnnnnnnnnnnnnncagactttgttttagtcgaccttcagctgtcgtccctccttcccagccaaggctgtgactggggccctttgccacagcctggctgcaccttctccgtagtccccgccccacctcccaggaagtagctaggttccatgtctctgtgctccagtttgtgggctcctcccaggcctgactgtcaccaatctcctcctcgtcctcctttaaacagaagtcctcaggaagaggtctgctggcctctggttctgaagcctccatatccttgtccggcttgctatcttgcagcagctcgtggatggtccatagcttcatgttcagaagctcctgctgggctccagccagagtagtcacacgctcaaaaagggggtccagctgggccatcaggttgttcaggtgctgctctgtctgggccagctgttgtgtcaactgggccagctgttgctctgactgcagtggctgctgcttgcttgcctcctcgtggagaaccgcagtttcatctttcccctgcaaacacttgtacagcacaaaagccgcgacggccgcggtgtacagcgcccccagaggcagcgacccggcccgggtccgctcgcgttgatccttgagcggtggtcgccgccggggttccgtggctccagagccggggtgggctgcgttccctgggtgtgcccggaggtcgggattggcgcggtctcctagngaccccggacagcgcagacacaagcagcagccccaccacacccaagagcgaaactgcgcccgccattgccggcccacgggtggagggatcgggcgggcggagccgaagcggtccggcatcctcgtggaaaattcgccacncaggctcgctcttagacc

SEQ ID NO: 125084 - DNA, 671 bp, Homo Sapiens
ttttagacagaaatagaattttattttcttttaagcactgtattttttatttcttcattatagcacattaccctaatgtaatattcataagactggcatagatttgaaacttacctatctcccacctagaaatgggaagagcctaaagatatgggtcataagaaacaaaaaaagggctggattagggcactccttaggggaaggtagactcacatgggccactgaaataaaggaacctgggtggtcagctagggggcaggataaagttttttgacatctggagggggcaagaggatgaaccaatgaagatacttcatgtactttaaaattttggtgggaccaatcagttacagtaattcaaagaaaggtagtaagggaaggagaaatggagaagaggcagattatcagggtaaatgatggtaaaaattaatgagagactgcattatgatgtttaacaacaaaaacagaaccaaaaaagagagccaaaaccaattcaaggcatcagagcctgggcaaatatgaatcaggaaactgtgaaagttaaaagttagggcaatcctagctgaagaggaactgaagctggtctttcccacattaactgtaaactgtggtagtacattaaagtagatatgtccttatgcaaattaagatggatgatgaaggggtgtttg

SEQ ID NO: 125085 - DNA, 506 bp, Homo Sapiens
cttatctcatacaaacattatgtatctttatttaaatttgcaaatgaaaacaacacatatttcatgttagttttaataagagattccctatcctctgccccagtaaaacctaaccaagccagcctgacaggttatatcaatacagggagctggagtgggagccaagggtggtgttagataggggtggggtacagatcaagggggcctgggagactcagtgactggaagtctctgcccctcactcttggtgagtagctaatttcagcagctggcttcataaggaggagtcaggggtgggtggaggctcctcccaattccagatccacttcctcttctccttctgtctcctggacacttaggtcttactgagatggttttcccacagtaaagagaggtgggggcagagtactaagggtcaggagtgtctgagctcttgggccagggcagggtccggggagcaatggcatcctccttgatatcattggctggctcctccagggccttgc

SEQ ID NO: 125086 - DNA, 1593 bp, Homo Sapiens
ttttctcatacaaacattatgtatctttatttaaatttgcaaatgaaaacaacacatatttcatgttagttttaataagagattccctatcctctgccccagtaaaacctaaccaagccagcctgacaggttatatcaatacagggagctggagtgggagccaagggtggtgttagataggggtggggtacagatcaagggggcctgggagactcagtgactggaagtctctgcccctcactcttggtgagtagctaatttcagcagctggcttcataaggaggagtcaggggtgggtggaggctcctcccaattccagatccacttcctcttctccttctgtctcctggacacttaggtcttactgagatggttttcccacagtaaagagaggtgggggcagagtactaagggtcaggagtgtgactctttcccatgactcaggcctctgtgctagaggtgacccttataggaaggagagaccccaaatcctttagccaatgagtggtggggtcatcataccagagagccagcttgactctgggcaggcaccatcacaggcacagcacccatgcggctcaagccagaggaagaaaccccaccagggatgggggatattggttgagggtgggccccatctgtcgtgggcagtcttggtgagggcagggcctggctggagagactgggcgtgggggtcaatgcaccaggcctgggagggccatggggtggccggagggctcgtgcggaggtgacagaggaaagggtcccattcttggagattgtgtctgagctcttgggccagggcagggtccggggagcaatggcatcctccttgatatcattggctggctcctccagggccttgccccggcggtggtacaagaggaccagcccagccagcaaccccagtccaaccagggtacccacaacagctccagcaaccactgcagctccaggccctgtgttcacttccagcgtcacattacattgggcagtgcccacctcattgtgggccttgcagacatagactccagccatggaagacgaaaggttggtgaggcttaaagacccacggatgacatctaatgctggtgcaaagaaagtctggaaggatggaagctgccgatcccactggtattggacagcgggcttactccttggagactggcagctcagggtcacgtttgcccccacatggggcacaccctggagacggcaggatggaggagctggaggaaccagtacattgagttctaaggttttgatgctgtggcccctagatttgccttgtttgtcttgcacattcacggagcagctgtaggggccagagtctttctcctggagaccctccagccgcagggacaggttccgggagggcatggagtagaccaaggatactccaggtttgcttgttgtgaccccattgatgtaggacaacacctgatcctccttttctttctgtttgaagaaccacatcacaaagggcacctcccatggctgggatgaagacacctccccgtgcaaggtgtaccacgctggaagcaccacttcccctccctccaccgcctgcaaccggttggcgggcaagtgcag

SEQ ID NO: 125087 - DNA, 1026 bp, Homo Sapiens
ggaagtttcttcccggggaccttttggccactggggcggggggttccattgaggaaacatgccccaacgccagccaaccccgagtcccaaactcaggggtagccacaaacaggttccagcaaaccactggcagtttcctaggccttgtgctcacttccaagcgtcacattacattgggcagtgcccacctcattgtgggccttgcagacatagactccagccatggaagacgaaaggttggtgaggcttaaagacccacggatgacatctaatgctggtgcaaagaaagtctggaaggatggaagctgccgatcccactggtattggacagcgggcttactccttggagactggcagctcagggtcacgtttgcccccacatggggcacaccctggagacggcaggatggaggagctggaggaaccagtacattgagttctaaggttttgatgctgtggcccctagatttgccttgtttgtcttgcacattcacggagcagctgtaggggccagagtctttctcctggagaccctccagccgcagggacaggttccgggagggcatggagtagaccaaggatactccaggtttgcttgttgtgaccccattgatgtaggacaacacctgatcctccttttctttctgtttgaagaaccacatcacaaagggcacctcccatggctgggatgaagacacctccccgtgcaaggtgtaccacgctggaagcaccacttcccctccctccaccgcctgcaaccggttggcgggcaagtgcagttgcagctgggcccgcgaggggggcgcgagggcactcagccccaggaacaaaaaccgcagcaagttggtcaccaggggccccgggagggaaatcatggccctcctggccgggacggagtcaggggcgccagccgcgggacgcacggacctgcaggtgccgaggctgcgcgacggccggagcgtgcgcgggagccgagccgctgacacccagggcggctcatcccgggaattccggaccggtccagcc

SEQ ID NO: 125088 - DNA, 308 bp, Homo Sapiens
ctggtgcaaagaaagtctggaaggatggcagctgccgatcccactggtgttggccagcgggcttactccttggagactgtcagctcagggtcacgtttgccgccacatggggcacaccctggagtcggcaggatggaggagctggaggacccagtacattgagttctaaggttttgatgctgtggcccctagatttgccttgtttgtcttgcaccttcgcgtagcagctgtaggggcctgagtctttctcctggcggcccgccaagcgcatcagtcggtggggggtgctctatctacagtctgcctgc

SEQ ID NO: 125089 - DNA, 767 bp, Homo Sapiens
tttgttgctgtgatattgatagcttttattttctaatttttaaaaaatggtcatattatgagtcaaagagtatcaaatcagtgttggatggaccacccaagggtgaggagaggggctggaacatgggcattaggagaagggagtgggtgctggcatggacatgactggatagaattttctcaggagggagcttggtggattttgaaggtaaaactttctgggtttatcatgttttaattttagagacagggagtgatgaatcatcaccggttgtccccttatctaactccataaaagtgggaatttcaaaagaacacctcatccaaggagctggggcagacttcattgattctagagagacctgtttcagtgcctactcatccctgccctctggtgccagcctccttaccatcacggcttcactgaggtgtaggtgggtttttcttaaacaggagacagtctctcccctcttacctcaacttcttggggtgggaatcagtgatactggagatggctagttgctgtgttacgggtttgagttacatttggctataaaacaatcttgttgggaaaaatgtgggggagaggacttcttcctacacgcgcattgagacagattccaactggttaatgatattgtttgtaagaaagagattctgttggttgactgcctaaagagaaaggtgggatggccttcagattataccagcttagctagcattactaaccaactgttggaagctctgaaaataaaagatcttgaaccc

SEQ ID NO: 125090 - DNA, 1760 bp, Homo Sapiens
ttttttttgcacttaaccactaaatctttattgaatttttattgtaacagcaatgcaatattagcaaatagagagaaatatagagtgaagagaatacagcaataaagttagaaggaggggtaggggcaatggggttcagtggtaggaggagggctactgacaggggtaaaagcaagggtttttatttatcacttttataacttccatgaaaatttaccatccatcattgacaagttcattctagcagtaatttatcagaggtcactcatcctctattaaattattaatctaatcacctttgaactttctcccactggggtttttatccatgtccaattcgctctaaataagttggtctccctgcagttccctccgagtttatttgaaatctttaaggatagcaattatagggtaaagggttacaagtaagtacgcatgtccacttatagcgatatctaatacataatattattctaacattctaaataaccccacccacttaaaattacttaatagtccctcccaccctaaaatgcttatgattatatatcccctattacttaaacttgattacacaaagaaataaaagcaatgcaattttccacagaccaattcaataccattctacaatctaaaacaacaaagaactttcagtctcatcagatgtgcattctctctttagatgaaaatgtagcatggttcccgcagggctctccatttctgcccaggtctttccagcaggttgttctctgttgtcaatcttggaactgtctgtatctgatgtgagatgtctgtggtggatgacaactggatcaattcagaagtccaagaggtacctacaaacttacacagaattccagactgcaccatatagatgtggccctcttattttgtgcacctgcaagttcactgtattacttcacgatttgatcagactaattctccttttttccactaagacaaatacctcactgtccaaactaaattgacccttcataaatgtatgtaaactttctgtgtttcaatatcctagcatgataaatttagctagttctctctaggcttgcctatcaatgggagctcttagatcttcttccttcttgatttaattaacaatgtaaatttgggctaaaagtcaattaattaattttgccagtttgaaaaactcgactactgatttgcttactaattcatctatctcctttatgttttttattttgctccctttctaacttctttagatatcaaattccattgatttttttcctttcttatgaataaagccatttttgttggaaaatgccaaaaaaaatttaaaggatccaattaacataaatttgattaacaacaaaataaatcaattgagtgaaaggaaacttaaccaaacttcaaaactatagaataataaatttagaattacttatccttaacatctacatttatagatagcatatatagcaatagagcatagtacacactgccaaaaagttaatcacaagctttagtaaacagccaaatgtggatcagggactttctgagttgttaacccacagcagcatattttccctaatcgttcttgtcgttggtgaacttctccagacttttgcttgcagtggtggcaaatgtccgtgtgcacatgccagggctacagacaacggcccatttctaggcaccctgcagcttgaagatcaattgacaactgtaaatttgacaaaaaacaacttgaattcaaatgtatggaggatgaattgatacttgag

SEQ ID NO: 125091 - DNA, 1509 bp, Homo Sapiens
ctgccccacaagtgtttattgagcacctgtatgtggcagggatggttgtaggcatctgggtacagcagtgtacaaaaccaggaaggccctgccccgcagaggcacatgaacagggcagtgcacagtgaccacgtggcatttcgggtggtggtgactgcggtggggaaaacagcaggggcgctgtcgagggaaacgacggctgggttgggaggggcaaaggcccaggcccaagggtcagagctcacctggcttccccaactgggatggggccatgtggctgcaaggcaaagccccagttcctgaagggcctggggtgtgaagggtttctccccctgctgggaacgctcggccttgcgccactcagcaaggccccttccaacctgcatctgaccaccaggcagagagtatgtccggggagccccacaaaacaccccccaaacttcgccccgccagcccccctcacctcccctgctgggcattggtgcgcagcaaaaggcacttgaagctgcctctgaggttggggtccccagaggttatggtgatggcacagggtgggtgtcatcagggagcccagcccctggtactcagtggtctcagctcagtagttgggtgcagcagcagcaaggcccaaggcagggtcagtagtgctccagcttgagactcctgtacaggcagcacgtgaagatcatgccaaagacctgcacacaggcaatgccgatccccacagccccaatgaccctcaggtgctcctggatgaaggtctccaacttggtgatgcagccgccctccaccttgtagatgttggaggcatggtctcgctgtccacaaagagccaccaccgtcttgcagcagctgtctgggaccacacggccaccggcctcctgtgagcggatccactcactgtctcgccagtcctgtgagttgttgctgccacagcagtggaactcctgctgcagctggtccacagcgctggtcacagcctcatggcccggctggtggtagcgcttggtcatggtgtccttcaggttctccttgagctccgtgttcagctgctggtagtaggcgtaggcgaggataccagcgatgatctccagcagaaagatgatgaggagcaggatgaagtacaggcgcagcaggttccgacgctccttgaaggtggcgcagcagcccaagaccccagtcaccatgacgacagtgcccgccaccaccaggatgtaggctgtggccaggtaggtgcctgaggccagcaggctgatgtagtcactcttgagggccagcgtccagatgcccactgccatgacagccaggccagccagccagaagcagcaattgtaggtaaacagcaggtacttgaggcaaacggtgccacatgttgtcttcttctcgttgaactcacccatcctggggcagccgggctggaaacgactcctctgcaggacaggtggacagaagctccccaggactctaggctaccacgcgtccgagtccgggcctgcgcggcgacagctg

SEQ ID NO: 125092 - DNA, 1539 bp, Homo Sapiens
accagcacagcgagctcgtccatctgctctacaagtgtttattgagcacctgtatgtggcagggatggttgtaggcatctgggtacagcagtgtacaaaaccaggaaggccctgccccgcagaggcacatgaacagggcagtgcacagtgaccacgtggcatttcgggtggtggtgactgcggtggggaagacagcaggggcgctgtcgagggagacgacggctgggttgggaggggcagaggcccaggcccaagggtcagagctcacctggcttccccaactgggatggggccatgtggctgcaaggcaaagccccagttcctgaagggcctggggtgtgaagggtttctccccctgctgggaacgctcggccttgcgccactcagcaaggccccttccaacctgcatctgaccaccaggcagagagtatgtccggggagccccacaaaacaccccccaaacttcgccccgccagcccccctcacctcccctgctgggcattggtgcgcagcaaaaggcacttgaagctgcctctgaggttggggtccccagaggttatggtgatggcacagggtgggtgtcatcagggagcccagcccctggtactcagtggtctcagctcagtagttgggtgcagcagcagcaaggcccaaggcagggtcagtagtgctccagcttgagactcctgtacaggcagcacgtgaagatcatgccaaagacctgcacacaggcaatgccgatccccacagccccaatgaccctcaggtgctcctggatgaaggtctccaacttggtgatgcagccgccctccaccttgtagatgttggaggcatggtctcgctgtccacaaagagccaccaccgtcttgcagcagctgtctgggaccacacggccaccggcctcctgtgagcggatccactcactgtctcgccagtcctgtgagttgttgctgccacagcagtggaactcctgctgcagctggtccacagcgctggtcacagcctcatggcccggctggtggtagcgcttggtcatggtgtccttcaggttctccttgagctccgtgttcagctgctggtagtaggcgtaggcgaggataccagcgatgatctccagcagaaagatgatgaggagcaggatgaagtacaggcgcagcaggttccgacgctccttgaaggtggcgcagcagcccaagaccccagtcaccatgacgacagtgcccgccaccaccaggatgtaggctgtggccaggtaggtgcctgaggccagcaggctgatgtagtcactcttgagggccagcgtccagatgcccactgccatgacagccaggccagccagccagaagcagcaattgtaggtaaacagcaggtacttgaggcaaacggtgccacatgttgtcttcttctcgttgaactcacccatcctggggctaccacgcgtccgagtccgggccctggcggcggcggcagctgcgggggcggcggctcccccggccgtaatggccgaattcccgggcatatgtccggtaccgtcgactg

SEQ ID NO: 125093 - DNA, 487 bp, Homo Sapiens
tcgtccatctgctctacaagtgtttattgagcacctgtatgtggcagggatggttgtaggcatctgggtacagcagtgaacaaaaccaggaaggccctgccccgcagaggcacatggacagggcagtgcacagtgaccacgtggcatttcgggtggtggtgactgcggtggggaagacagcaggggcgctgtcgagggagacgagggctgggttgggaggggcagaggcccaggcccaagggtcagagctcacctggcttccccaactgggatggggccatgtggctgcaaggcaaggccccagttcctgaagggcctggggtgtgaagggtttctccccctgctgggaacgctcggccttgcgccactcagcaaggccccttccaacctgcatctcccctgctgggcattggtgcgcagcaaaaggcacttgaagctgcctctgaggttggggtccccagaggttatggtgatggcacagggtggg

SEQ ID NO: 125094 - DNA, 895 bp, Homo Sapiens
gcaggcccggactcggacgcgtggtagcctacagtctggggagcttctgtccacttgtcctgcagtaggagtcgtttccagcccggctgccccaggatgggtgagttcaacgagaagaagacaacatgtggcaccgtttgcctcaagtacctgctgtttacctacaattgctgcttctggctggctggcctggctgtcatggcagtgggcatctggacgctggccctcaagagtgactacatcagcctgctggcctcaggcacctacctggccacagcctacatcctggtggtggcgggcactgtcgtcatggtgactggggtcttgggctgctgcgccaccttcaaggagcgtcggaacctgctgcgcctggtcaggagggcgcagggccacggggtgggggtggtgcaagatgggcccaaggaggttgtcgctgcaggctttgaacctgtgccttgctgtgctcacctgggggggcggtcacggtccttccacacctgcctagtcctgtgggtccccacgttcctgctggaccagctgagggaagacaccagctccgcaagaaagcttcagggagggtggccgcccctcagaccccacctggagcctggggagtcctggtgtgtgggactctgctctgaggtgcactaggtctagagcactaggcctcagaaccaagggtgcccttgatgctggcccccccaagtacttcatcctgctcctcatcatcttatctgctggagatcatcgctggtatcctcgcctacgcctactaccagcagttgaacacggagctcaaggagaacctgaaggacacctatgaccaagcgctaccaccagccgggccatgaggcctgtgaccagcgctgtggaccagctgcaagcaggagttcca

SEQ ID NO: 125095 - DNA, 1068 bp, Homo Sapiens
  misc_feature (46)..(55): n is a, c, g, or t
gggttggggggttcccccagaggttttatgggtgaatggccacacnnnnnnnnnntttcattcagggaaacccccaagcccccgggtaatctccaggtgtctcaagctcagtaattgggtgccagcaagcaagcaaggccccaagggcaggtttcagtagtgttccaggttggagactgcctgtacaagggcagcgcgtgaggatcatgccaaaggacttgcacacaggcaatggccgatccccaccagcccccaatgaccctcaggtgctcttggatgaaggtctcccaacttggtgatgcagccgccctccacccttgtagatgttggaggcatggtctcgctgtccacaaagagccaccaccgtcttgcagcagctgtctgggaccacacggccaccggcctcctgtgagcggatccactcactgtctcgccagtcctgtgagttgttgctgccacagcagtggaactcctgctgcagctggtccacagcgctggtcacagcctcatggcccggctggtggtagcgcttggtcatggtgtccttcaggttctccttgagctccgtgttcagctgctggtagtaggcgtaggcgaggataccagcgatgatctccagcagaaagatgatgaggagcaggatgaagtacaggcgcagcaggttccgacgctccttgaaggtggcgcagcagcccaagaccccagtcaccatgacgacagtgcccgccaccaccaggatgtaggctgtggccaggtaggtgcctgaggccagcaggctgatgtagtcactcttgagggccagcgtccagatgcccactgccatgacagccaggccagccagccagaagcagcaattgtaggtaaacagcaggtacttgaggcaaacggtgccacatgttgtcttcttctcgttgaactcacccatcctggggcagccgggctggaaacgactcctctgcaggacaggtggacagaagctccccaggactctaggctaccacgcgtccgagtccgggccctggcggcggcggcagctgcgggggcggcggctcccagcgctgagaatgc

SEQ ID NO: 125096 - DNA, 919 bp, Homo Sapiens
caaggggtttcaggtaagtgcttcccagcccttgaagaattcctggtaccaggggcagccacgtgaagattcaatgcccaaaggaccctgcgccacagggcaatgcccgatcccccaccagcccccaatgaccctcaaggtgcttcctggatgaaggtcttccaacttggtgatgcagccggcccttccaccctgttagatgttggaggcatggtctcgctgtccacaaaagagcccaccaccgtctttgcagcagctgtctgggaccacacggccaccggcctcctgtgagcggatccactcactgtctcgccagtcctgtgagttgttgctgccacagcagtggaactcctgctgcagctggtccacagcgctggtcacagcctcatggcccggctggtggtagcgcttggtcatggtgtccttcaggttctccttgagctccgtgttcagctgctggtagtaggcgtaggcgaggataccagcgatgatctccagcagaaagatgatgaggagcaggatgaagtacaggcgcagcaggttccgacgctccttgaaggtggcgcagcagcccaagaccccagtcaccatgacgacagtgcccgccaccaccaggatgtaggctgtggccaggtaggtgcctgaggccagcaggctgatgtagtcactcttgagggccagcgtccagatgcccactgccatgacagccaggccagccagccagaagcagcaattgtaggtaaacagcaggtacttgaggcaaacggtgccacatgttgtcttcttctcgttgaactcacccatcctggggcagccgggctggaaacgactcctctgcaggacaggtggacagaagctccccaggactctaggctaccacgcgtccgagtccgggccctggcggcggcggcagctgcgg

SEQ ID NO: 125097 - DNA, 1066 bp, Homo Sapiens
  misc_feature (581)..(699): n is a, c, g, or t
gcggccgctccaacatctagaatgaaatctatttcctttcatcatgctaaaaattgtgatttttcttttactggacttcaacacgttactgataaaataataatgaaaaaggaaaaagaggaaggtattgagaaggggcaaatcctgtcttcagcagcagacattgctgccacagtacagcacacaatggcatgtcatcttgtgaaaagaacacatcgggctattctgttttgtaagcagagagacttgttacctcaaaataatgcagtactggttgcgtctggtggtgtcgcaagtaacttctatatccgcagagctctggaaattttaacaaacgcaacacagtgcactttgttgtgtcctcctcccagactatgcactgataatggcattatgattgcatggaatggtattgaaagactacgtgctggcttgggcattttacatgacatagaaggcatccgctatgaaccaaaattcctcttggagtagacatatcaaaagaagttggagaagcttccataaaagtaccacaattaaaaatggagatatgatttctgctgttcaaaaaagtccctaannnnnnnnnnnnnnnnnnnnnnnnnnnnnnnnnnnnnnnnnnnnnnnnnnnnnnnnnnnnnnnnnnnnnnnnnnnnnnnnnnnnnnnnnnnnnnnnnnnnnnnnnnnnnnnnnnnnnnnaatgtttcttaaggtatacattttgggtcttagaagacttatacatttgtaatatttattactaaatatctcaaagtattacaataaatgttaccatgtgagctactttgaatcaggcttcttgcacaccaatttaaaaatgttaactcttgatatatacactagttataccactcatgtcagtcaataaattttaaggtttaagtgcaggcctttgtttacagaaatcctaattttttgaaaccataactctgacctgacactaaattcctgtagacatgctaaggaaaatctgcttagtatcgagatcaagaacttccattcaaaaagattattcagttatgttatttgcatattaccatctctt

SEQ ID NO: 125098 - DNA, 902 bp, Homo Sapiens
  misc_feature (819)..(849): n is a, c, g, or t
ccgcccacgactcagcaaaactcccaacttaggtctttaaacctacatttcccgttattggggaccccgccaaaaccggttccttcccaaaaatatccccaaaaatttggaatttcctcattaaggggactgagcttccattaatcctggactggaggtcccggtaatatttgtaagtaatttaggaatccaccaccaccatatgatgaatttaaatatttgatattaatcccatccggattcctagcaaatagtctgcagaaactagtgatgcatcatgagcaaataaataataccgattggtctgcttatgaggtagatgtcctctggagtagacatatcaaaagaagtttgggaagcttccataaaagtaccacaattaaaaatggagatatgatttctgctgttcaaaaaagtccctaaaggtagtattaaggttaaaattaagtctttattgttttgtgtatcaaattgtagaagatatataatattaattattcatcaagattttatttttcttttatatttgatgttttacctgctcttctgagatactataatgtgttaaaagtcttacaagggaagatagtttttttcttttaattattaaaaaccaaaataaaacatcttttgagaaaggaatgtattgatgctggcaggtagaaaggaagctttgaaagaagcacagtaattttgctgaattctggccctgtatcatacaggcctaggactttcccccacttcctcaaatcaggataggagaagctattttttaactcctactgaaacaagaacctgactttataatgagagagcagnnnnnnnnnnnnnnnnnnnnnnnnnnnnnnngagataatctccctctgcactccagccccggtgacagagtgagactccatctc

SEQ ID NO: 125099 - DNA, 583 bp, Homo Sapiens
cacattttcccagatcatctttacttaaagattttttgggagaaaaaggtagggagcaaacatttttatattaaaacaaatgcagatagtaatattgaaatagtatataaaattgacattactttttgagacaaaggaagagacatcaaagacattttaagccgagctcctcatgagcttcctaaaccccaggggagggaagagacccctgcattctctcgagttgtctccttgataacgtggtcaaaggaagatgagacttctttctgtacatttccaggtcctaactcctcacccttgtcactctcctggtaatgctgtaaaactttaccatggaccacagtttcaaggactcccgaacacagtcttggagttaagcctgtgaacaacccgcgcctcccatcgatactggcaatgtgctgagcataactaaagagaccaggaagctgacacacttgccgcccaaaaatatttcgtcctattgttggaggaagaggctcatatcccacctggatgagcactttcacgtacatgagcggctgggacaggatggtgagaccggagcccaggagcacctgactgg

SEQ ID NO: 125100 - DNA, 937 bp, Homo Sapiens
gtccacacacattaagtttttcccaaaagggggacctttcgggaaaaataaagctattttctggggttcaaattccccctctttttggtaggcttgcaccaccagttatcccaaggagtaatatatgggggagtaagggaggggattccacccagcaaggcccacagtttttgacagccataagattggagacaagcccaaagggaataggtcaacatactcgcaaaaatatcctgtgacagctggggaataactcttcatttcattcatggtagaaaccccactgtccagtgcataggtattgacgaggtaggccagtgagttacacagccacaaagaaaggatgtcacctagaaggcgaggaccaagacccgcgaaaaatcctagaatgccctcttcccgatagatggttattatggaatcacaaagtccacagtacttggattctctgccaatgaactgtaccatagatctcagagtgatcacatggaagggatgtgtgatgagggtagcagcagaacgagcgatcatctctcgagttgtctccttgataacgtggtcaaaggaagatgagacttctttctgtacatttccaggtcctaactcctcacccttgtcactctcctggtaatgctgtaaaactttaccatggaccacagttccaaggactcccgaacacagtcttggagttaagcctgtgaacaacccgcgcctcccatcgatactggcaatgtgctgagcataactaaagagaccaggaagctgacacacttgccgcccaaaaatatttcgtcctattgttggaggaagaggctcatatcccacctggatgagcactttcacgtacatgagcggctgggacaggatggtgagaccggagcccaggagcacctgactggccgcgtccgccatgatggcacccgcgggcggacggccc

SEQ ID NO: 125101 - DNA, 2542 bp, Homo Sapiens
  misc_feature (601)..(645): n is a, c, g, or t
  misc_feature (1398)..(1398): n is a, c, g, or t
acatggcacattttcccagatcatctttacttaaagattttttgggagaaaaaggtaggcagcaaacatttttatattaaaacaaatgcagatagtaatattgaaatagtatataaaattgacattactttttgagacaaaggaagagacatcaaagacattttaagccgagctcctcatgagcttcctaaaccccaggggagggaagagacccctgcattctcgttctgtctaatattatcagtggggctgttttgacagagaagtctcagaagcagcgaattaagtgcttactcatttggcaatgtcccagtgagttatataaataagtgaaaccacaggctttctcattttagagcattttaacctgctttttagaaggcctgagtaaacagaagctttatgcttgagttgaattttattttctcccaaagtgatttttttcctcctataaatgttaacatgcttaactgagggtatggcatgtgaggtggtcagtgtcctaagacccatgtcgacttgggttggcattaccagacatggagttacaaatatactttccaaggctgtcatcagaaatgcaaaactactcaccttcggnnnnnnnnnnnnnnnnnnnnnnnnnnnnnnnnnnnnnnnnnnnnngattatatataattagaacgcgtatggtgtaatttaagcactggcaaatacttggctcttaaagaagggggttactcctgcaggatctgcttttcatatttttatgtgaaaacaagaacttcctttgaggaaaaaaagtgccattatacttcctttccaaatcttgcttattttctgtaattgtctttttctttgttgttgctgaccctttatcttatttattttttttcaggtagcctcttgaactagagtaggctcagaggctccctgtaggtgacattttattactttgcaataacagactgaaggggcagatcctcacacagactttctagggtaatgtagcaatgtactgtccttttcttgaagtatgagagacaaggtcaatgaaatgtgcttagaagcataatgggagtcagattctggtgcatgctactgacattttagggtctacccaagaaaaagtaattcataacctcccatatagtttaatttagtgattttgttaagttttacaaaattatttctcatttttcttggaattctactcttcattttacaaagccttaaattgagactcaaaaatcacatgacaaagtgcctgtagcttcaggaaaatacaactttttttcccttctggttaagtaaaataagaatttggagcaaaaatatcctaattcagaataactaaagggggagtatcagtggtaagttatgttgtgctggaaaaaagaacaaaaaggcagacacaanacacctgaattttcccaagattaaatgattattaaaaaagcgcgccacactgtatagaaatcaacattctctcccataattctgtgcatctgggactacagaaatgtcactgtccctgccccacatcttcaaattaacattttcaggtcacaacaataagtcttcccaaaggggaccttccggaaaaataagctatttcctcggctcatattcccctctttttgtagcatgcaccaacagtctatccaagacgtatatattggggagtaaggagggcatccaccagcaagaccacagttgttgacagccataagattggagacaagcacaaagggataggtcaacatactcgcaaaaaatcctgtgacagcttgagaataactcttcatttcattcatggtagaaaccccactgtccagtgcataggtattgacgaggtaggccagtgagttacacagccacaaagaaaggatgtcacctagaaggcgaggaacaagacccgcgaaaaatcctagaatgccctcttcccgatagatggttattatggaatcacaaagtccacagtacttggattctctgccaatgaactgtaccatagatctcagagtgatcacatggaagggatgtgtgatgagggtagcagcagaacgagcgatcatctctcgagttgtctccttgataacgtggtcaaaggaagatgagacttctttctgtacatttccaggtcctaactcctcacccttgtcactctcctggtaatgctgtaaaactttaccatggaccacagttccaaggactcccgaacacagtcttggagttaagcctgtgaacaacccgcgcctcccatcgatactggcaatgtgctgagcataactaaagagaccaggaagctgacacacttgccgcccaaaaatatttcgtcctattgttggaggaagaggctcatatcccacctggatgagcactttcacgtacatgagcggctgggacaggatggtgagaccggagcccaggagcacctgactggccgcgtccgccatgatggcacccgcgggcggacggacagacagacggagccaccaagcgacccggtgagccggtcctaggtcacgtgccagggccgccggtttcactggcccgcccc

SEQ ID NO: 125102 - DNA, 788 bp, Homo Sapiens
  misc_feature (52)..(54): n is a, c, g, or t
  misc_feature (66)..(66): n is a, c, g, or t
  misc_feature (83)..(83): n is a, c, g, or t
aggtcaaccatactcgccaaaaaaaatccctgtggacagcttgagaatactnnncttcatttccanttcatggtagaaaaccnccactgtttccagtgcataggtattgacgaggtaggccagtgagttacacagccacaaagaaaaggatgtcacctagaaggcgaggaacaagacccgcgaaaaatcttagaatgccttcttcccgatagatggttattatggaatcacaaagtccacagtacttggattctctgccaatgaactgtaccatagatctcagagtgatcacatggaagggatgtgtgatgagggtagcagcagaacgagcgatcatctctcgagttgtctccttgataacgtggtcaaaggaagatgagacttctttctgtacatttccaggtcctaactcctgtaaaactttaccatggaccacagttccaaggactcccgaacacagtcttggagttaagcctgtgaacaacccgcgcctcccatcgatactggcaatgtgctgagcataactaaagagaccaggaagctgacacacttgccgcccaaaaatatttcgtcctattgttggaggaagaggctcatatcccacctggatgagcactttcacgtacatgagcggctgggacaggatggtgagaccggagcccaggagcacctgactggccgcgtccgccatgatggcacccgcgggcggacggacagacagacggagccaccaagcgacccggtgagccggtcctaggtcacgtgccagggccgccggtttcactccc

SEQ ID NO: 125103 - DNA, 684 bp, Homo Sapiens
  misc_feature (548)..(548): n is a, c, g, or t
tagaattcaaaatatgaaaatttattttgcataggaaacaataatctctggtaaacatcattactgcatctaacaaaacaatgccttcaattaaagggggaaagtgagtttttaaacattagggttaatttagaagaaaatacagtatataataatctcaacatcatgtttagggtaaaaatgctataatgtgaaaaaagtccctaagaactggacagaacctacctaacaacaccatttaccgtgtatgttttcaatagacaaaacatattttgtaccaaattccaacagtggtaattctatagttgtggccctttaaaaaatggcagcattgtacttgaatcagaaagcttactgggatttcctcatcgaaagtagagattgcagctaatcctagtaccttttgttagtaattacttaaggcacagtgcaaagttgaaggactgttttggtacaaactcaagccagctacatgtatgcttgccttggtatccttgctagagcacatgcaggtataataccgtattatatacaacacggccaccctngttgtatctgtgttacaattaaacatcagtcccagaaagtgaaccctagtcatttattataggtgcccacctctgacttggaacaaatgcactccattcatgttcatttttgtcctggagaggtttatttcctaaa

SEQ ID NO: 125104 - DNA, 887 bp, Homo Sapiens
  misc_feature (61)..(99): n is a, c, g, or t
  misc_feature (150)..(239): n is a, c, g, or t
  misc_feature (379)..(465): n is a, c, g, or t
  misc_feature (537)..(554): n is a, c, g, or t
cttgttccaatcgttcctcttctttacgcttggcttctaattcttcaagccgttttatacnnnnnnnnnnnnnnnnnnnnnnnnnnnnnnnnnnnnnnntaagcttagccagagcttcttgcatagctttaacagtggctttgctaggtnnnnnnnnnnnnnnnnnnnnnnnnnnnnnnnnnnnnnnnnnnnnnnnnnnnnnnnnnnnnnnnnnnnnnnnnnnnnnnnnnnnnnnnnnngcagctgtgggagtctctgctttctcttcagaggcaggaattactccagtatcaacagtcactttggattttacagtttcttcttcaaatttcctttgagattccttttgtttactctgatcctttttacctgtttctannnnnnnnnnnnnnnnnnnnnnnnnnnnnnnnnnnnnnnnnnnnnnnnnnnnnnnnnnnnnnnnnnnnnnnnnnnnnnnnnnnnnnngggccactgtcttaattttgaaggaggcgtcatcatcttcattcccactttctatgttaggacctggcttgnnnnnnnnnnnnnnnnnnctgtccttttctagattgcaaaaattcatctgattcatcaccactttcaccagaagaatttattcttgaacgctctttaatttttttactgttatcctcatcctcctctgacccatcccacttcttatttgatttttgagctttccctttagcttttttaggaagtttgttaaaatcatcatcatcatcactcccagagtacatttccactttcggttttgcagtcttttttgattttgaatctttatcttccaattcttcgctatcattatcatcaaaactctgttttttgcccttctgtcgtcttctcgcagccgtatagtagtagtaggc

SEQ ID NO: 125105 - DNA, 799 bp, Homo Sapiens
  misc_feature (398)..(491): n is a, c, g, or t
ccacgagaaagaagaaagaacgcttgaaaaagagggaaacttttaactaaatcccagagagaagccagagccagagccgaagctactcttaaactgctacaagctcagggtgttgaagtgccatcaaaagactctttgccaaagaagaggccaatttatgaagataaaaagaggaaaaaaataccacagcagctagaaagtaaagaagtgtctgaatcaatggaattatgtgctgctgtagaagttatggaacaaggagtaccagaaaaggaagagacaccacctcctgttgaaccagaagaagaagaagatactgaggatgctggattggatgattgggaagctatggccagtgatgaggagacagaaaaagtagaaggaaacacagttcatatagnnnnnnnnnnnnnnnnnnnnnnnnnnnnnnnnnnnnnnnnnnnnnnnnnnnnnnnnnnnnnnnnnnnnnnnnnnnnnnnnnnnnnnnnnnnnnntgaaggcagtgaaggtgatgaggaagatgaaaaggtgtcagatgagaaggattcagggaagacattagataaaaagccaagtaaagaaatgagctcagattctgaatatgactctgatgatgatcggactaaagaagaaagggcttatgacaaagcaaaacggaggattgagaaacggcgacttgaacatagtaaaaatgtaaacaccgaaaagctaagagcccctattatctgcgtacttgggcatgtggacacagggaagacaaaaattctagataagctccgtcacacacatgtacaagatggtg

SEQ ID NO: 125106 - DNA, 611 bp, Homo Sapiens
  misc_feature (106)..(172): n is a, c, g, or t
  misc_feature (338)..(391): n is a, c, g, or t
  misc_feature (492)..(508): n is a, c, g, or t
cttgttccaatcgttcctcttctttacgcttggcttctaattcttcaagccgtttaagcttagccagagcttcttgcatagctttaacagtggctttgctaggtcnnnnnnnnnnnnnnnnnnnnnnnnnnnnnnnnnnnnnnnnnnnnnnnnnnnnnnnnnnnnnnnnnnngtctccttcattgtcatcttctgcagctgtgggagtctctgctttctcttcagaggcaggaattactccagtatcaacagtcactttggattttacagtttcttcttcaaatttcctttgagattccttttgtttactctgatcctttttacctgtttctaactcnnnnnnnnnnnnnnnnnnnnnnnnnnnnnnnnnnnnnnnnnnnnnnnnnnnnnnctcgcgctccttcttttctgccttcttttgggctactgtcttaattttgaaggaggcgtcatcatcttcattcccactttctatgttaggacctggcttgnnnnnnnnnnnnnnnnnctgtccttttctagattgcaaaaattcatctgattcatcaccactttcaccagaagaatttattcttgaacgctctttaatttttttactgttatccatcatc

SEQ ID NO: 125107 - DNA, 720 bp, Homo Sapiens
  misc_feature (83)..(120): n is a, c, g, or t
  misc_feature (172)..(238): n is a, c, g, or t
  misc_feature (402)..(486): n is a, c, g, or t
  misc_feature (558)..(586): n is a, c, g, or t
gctttttcctttctcttttttcttgttccaatcgttcctcttctttacgcttggcttctaattcttcaagccgttttatacgnnnnnnnnnnnnnnnnnnnnnnnnnnnnnnnnnnnnnntaagcttagccagagcttcttgcatagctttaacagtggctttgctaggtcnnnnnnnnnnnnnnnnnnnnnnnnnnnnnnnnnnnnnnnnnnnnnnnnnnnnnnnnnnnnnnnnnnngtctccttcattgtcatcttctgcagctgtgggagtctctgctttctcttcagaggcaggaattactccagtatcaacagtcactttggattttacagtttcttcttcaaatttcctttgagattccttttgtttactctgatcctttttacctgtttctaacnnnnnnnnnnnnnnnnnnnnnnnnnnnnnnnnnnnnnnnnnnnnnnnnnnnnnnnnnnnnnnnnnnnnnnnnnnnnnnnnnnnnngggccactgtcttaattttgaaggaggcgtcatcatcttcattcccactttctatgttaggacctggcttgnnnnnnnnnnnnnnnnnnnnnnnnnnnnnagattgcaaaaattcatctgattcatcaccactttcaccagaagaatttattcttgaacgctctttaatttttttactgttatcctcatcctcctctgacccatcccacttcttatttgatttttgagctttcc

SEQ ID NO: 125108 - DNA, 457 bp, Homo Sapiens
  misc_feature (140)..(176): n is a, c, g, or t
tttatcttttgaggtgaattcctcttcattgttttctgttggcttcactgcaacagtttctctgtcagctttgatgccttgagcttccaaagacaattcttccagttctttcaggatatcatcttcatcaaagtcctgcnnnnnnnnnnnnnnnnnnnnnnnnnnnnnnnnnnnnngaggctcctgttctttggcagcaccagctccttctatttctgcagccaaggcatcaagatcaatgtcatccttggtgctgtcttcgctcttgtttttctgtttcttccccattgcttgtcaatggcgctcgtggccccagcccctctattcggtctctcacagacccactgtctcccggctgactttggtctccgctcagctcttttcccctcgtgctgccgccgctcgcacccggctctccacagacccgcgcactggaacaggacacatatggtgtccc

SEQ ID NO: 125109 - DNA, 1713 bp, Homo Sapiens
gagtttttctggccctgtcagctgctgtggcatgacagatttatacagcatttgcaaaaaaccagcggctgctttttctttaacaatttttcttaaaaactccagttcctattctccagcttctttgtccagtctcctcccctctcctagccaccccccagactctccagatttggggctggtgtcatcaatccaatttattaagtcctcaatgagggggaggaagggccacatctccctctgcaggccctttgaccatcttgatggcttctgctcctccctgtcccctcagctctgccttggtttccccactgacaaaggggatcttctgctgtcctgtgtgccctgaaactaaaacccagggggaggccagaaatcctcaggaagttttccagctccctgcaagaatagccaaggacagagaaatcacaggatcaggacgagcagggcaagctggagcagggggtagaacagaccaagtcctttaccgcagaggaagaaaccacactgtggaagggaaataaatagaggggtccagggcagcagagcccaggcccccagggcgcagtggctataggcgcagcaggcgagtgggagcccccggccgcttcagccactgaggaagagacgcttgtaggccttgttcatctgctccaagaagatgaaggtgaggacggtgtgggggcccaggcgggcatagtacggcgtgaagcccttccacaggctgaagaagccctcgtagcggacaactttgaacagcacgtccagcccgttcttgtattccggcttcccatcaatcatccgcatgttctggattcgggtcttggcaatgtccacaggcatggaggcagcagtggtgacaagaccgctgatcatgctggcacagaagtggcacaagatgttgtcagagaagtagcctgagtccagtaagaactgcttggattgggagtaggaggcgagctgggcagcattgacgacgacggcccgagccatggtagggatgcagccccgccacagtgtgaggacaccctcttcccgggtgattcgaatcagggcgttaaacacatttttgtagccacggcgctggtcagctggaagccggccatcggcagtcatgcggataagagccacttcggctggtgttcccacaaaggcaccagtggcacctgcggtcatgccaatcacagccttcagcagaaagccagggggagtaccatcagccccagtcaggcgctcaaacagcacggtatagatgccaaggcgggtagtggtgtaggtggcctgacgcagcaggccagccgacagcccagtgtaaatgcccctcaggccttctgccttcaggatactggtgagggcatggaagctggttttgtactctcgagtcttggccccttccccgctcaactgcatccggttcttcaccaggtccaggggctggacaaaaactgtagctcccatcccggccaggcccccaaacaggaacttgacggacttaggggaggtacggggcttcccgtctatcccgccggccccggcactcgccgtcgccgccatcgccactcaatggccctcggctccgggtcccgtgcgcgcgcggccccgctcgcgcccaaggtgacaccgcgcgcgcaacagagcgagggcgcgcgcacgcccctccagctctcaggtccgcctcgtgccgattagaacccagcctcgtactagctagtt

SEQ ID NO: 125110 - DNA, 913 bp, Homo Sapiens
atacgggcgggaaggccctttccccagggtggaagaaggccctcgtaggcggacaactttgaacagcacgtccagcccgttcttgtatccgggcttcccatcaatcatccgcatgttctggattcgggtcttggcaatgtccacaggcatggaggcagcagtggtgacaagaccgctgatcatgctggcacagaagtggcacaagatgttgtcagagaagtagcctgagtccagtaagaactgcttggattgggagtaggaggcgagctgggcagcattgacgacgacggcccgagccatggtagggatgcagccccgccacagtgtgaggacaccctcttcccgggtgattcgaatcagggcgttaaacacatttttgtagccacggcgctggtcagctggaagccggccatcggcagtcatgcggataagagccacttcggctggtgttcccacaaaggcaccagtggcacctgcggtcatgccaatcacagccttcagcagaaagccagggggagtaccatcagccccagtcaggcgctcaaacagcacggtatagatgccaaggcgggtagtggtgtaggtggcctgacgcagcaggccagccgacagcccagtgtaaatgcccctcaggccttctgccttcaggatactggtgagggcatggaagctggttttgtactctcgagtcttggccccttccccgctcaactgcatccggttcttcaccaggtccaggggctggacaaaaactgtagctcccatcccggccaggcccccaaacaggaacttgacggacttaggggaggtacggggcttcccgtctatcccgccggccccggcactcgccgtcgccgccatcgccactcaataagccctcgctccgcctcgtccaataacgcaagactcacta

SEQ ID NO: 125111 - DNA, 645 bp, Homo Sapiens
aatggttgtgggtagcagtgctgggcctgtgtcttgagcctggagggagtctgctcctgccgccctctgccctgccagagacagacccatgcgctgcctgcccaccgtgcccctttgtccccatgtcaggcggaggcggaaggcccaccgtgccagaggctgggcaccagccttaaccctcactctgctagcacctcctccctttccccaaggtagcacatctggctcactccccactccgtctctggagcccaccagggaaggccctcatcccctgccgctacttctctggggaatgtgggttccatccaggattgggggcctctctgctcacccactctgcacccaggatcctagtcccctgccctctggcacagctgcttcctgcaagaaagcaagtctttggtctccctgagaagccatgtccctcgtgctgtctcttgcctgtcccacctgtgccctgccctccagcttgtatttaagtccctgggctgcccccttggggtgccccccgctcccaggttcccctctggtgtcatgtcaggcattttgcaaggaaaagccacttggggaaagatggaaaaggacaaaaaaaattaataaatttccattggccctcgggtgagctgagggtttttgcaagga

SEQ ID NO: 125112 - DNA, 766 bp, Homo Sapiens
ttttgtggaaccattgatttttattaatttcataactgggaaattccatgtgaaagtgaaacaagcatgagtcaagtcaaccagggaaggaatctggggacaggccaaggagcgggaggtggggcagcgaggcagtcctgctggtaggagccctgaggatttcccagcttgtgtgcgctgcctctggcatcctagagacccggatttactcagctaggagagaggatggatcacagggtctaagggtggccattcagaggtagaagatggaggggcggcagattctggcagggcagcagagggctcagtggccatggctagaggggtaaaaaattcaggacatcccccaggtgctgcctcagccagggctgcatgcggaagagattgatgtgaaagtctcgtggcggcgggaccttgctacgaggggcccttttgcgggagtttttgtcagcagagccaaggcaggggttgtaaagaccccagctcaccagacccacctgaaaaaacctgaatctccgctcaaggaaaactgctcccccagattctcccttgcagggactctcatcctcctgggtcccactgcataggaactggtctgtcaccacctccctgacatctgtcaagttggggtacatggttttttcatgggagacaacctcggcacagctagtcacactccactcccatcttaaggttaatgttcagttgctcccattcaaggcgacaaatgagcagaacacttagtttgttgagcagttctctctac

SEQ ID NO: 125113 - DNA, 745 bp, Homo Sapiens
agtaatagctgtttttaccctagaagttgtttcacataacattttgcaaaatttccaaggaaaacaaggcaacgttctgtaatatgccacaatttttattgcaacgtggccatttttgtgagggtggggagtttgatctcaaaacaatgttccatttaaggctcttttatacagaaattgccatcatgactgatattcaaaatatctttagtgttgcaggactcacatggtaaacataaaactcctacacttattcagtagtgtacactcaatggaaaacaaaaaggcattaataacagctatttcttttaagaagatatgcaggtaacaggaatgaacactgaggtactaggataagttgatgacacagttaacaaaacttaattggcattccttttaggatattaaacttattacaaaaagtgcttttaatgcatagtgttatatccgtgctgccatatcactaaaataggcttgccaaggcaggtgaggtgtatgaatgctcaagcctcacagaactgcaatcaagtgccaactataaataatactgaaaaaagttgaccatctgaccagtggataatactttcaaggcattcaattagcttatcctttgcagtattctaagctattcacattgacgatcacatacattgtagtgcttgactgtcattttataatggttttccttcaagtgaaactactaggttgcctcccaatttctctccaagtgtcgaacggtccttaa

SEQ ID NO: 125114 - DNA, 1432 bp, Homo Sapiens
tttgtaatatgccacaatttttattgcaacgtggccatttttgtgagggtggggagtttgatctcaaaacaatgttccatttaaggctcttttatacagaaattgccatcatgactgatattcaaaatatctttagtgttgcaggactcacatggtaaacataaaactcctacacttattcagtagtgtacactcaatggaaaacaaaaaggcattaataacagctatttcttttaagaagatatgcaggtaacagggaatgaacactgaggtactaggataagttgatgacacagttaacaaaacttaattggcattccttttaggatattaaacttattacaaaaagtgcttttaatgcatagtgttatatccgtgctgccatatcactaaaataggcttgccaaggcaggtgaggtgtatgaatgctcaagcctcacagaactgcaatcaagtgccaactataaataatactgaaaaaagttgaccatctgaccagtggataatactttcaaggcattcaattagcttatcctttgcagtattctaagctattcacattgacgatcacatacattgtagtgcttgctgcaagggaggcatactaccagttgttttggctaaaatatgacaggaaggcattccttgggttctatatacaagtaacagtattcaacagtctaatggcaatccctgataggctgcttaaataaatgatatttccttcattcattgtgttggaagggcccagtggaaagggggaaatacaacaaaaaacccaaaaccctatatactattccaatggactgagctggagaaatggaagctccttaagatccagatggcacttgactgtcattttataatggttttccttcaagtgaaactactacattgcctcccaatttctctccaagtgtcgaacggtccttaatatcatccaagccatttacttgccactcatgtttaatacctgtaaatttctttttaatggcatctttagagctagcataaatcatcttgctttttaaaggtgcactttcaggagcccagaatataaatactaggtcttctttcttagactcttttgtttcgtatgtggcatcgtacaaagcatatcggcaatcattcagaggtagcaacttcacaaaagatgtgtaggggtcctctacagtatcaccaatgtcacccaccaagatctgctttgcttcctctacaattatttgtcttttgtcatcgcttaaacagaagagaactgctttctttctctttttgatctcctcttgtgtagaagatttccttactttcatatcattaaaaactttgatgacttcatcattcactgtaactccagaagccatagtgccctcggctgtggctgcggcggcagctcgggcttcggctctgcctcgtgccgaattcgccacccagc

SEQ ID NO: 125115 - DNA, 1816 bp, Homo Sapiens
  misc_feature (52)..(243): n is a, c, g, or t
  misc_feature (765)..(808): n is a, c, g, or t
cagtcgacggtaccggacatatgcccgggaattcggccattacggccgggcnnnnnnnnnnnnnnnnnnnnnnnnnnnnnnnnnnnnnnnnnnnnnnnnnnnnnnnnnnnnnnnnnnnnnnnnnnnnnnnnnnnnnnnnnnnnnnnnnnnnnnnnnnnnnnnnnnnnnnnnnnnnnnnnnnnnnnnnnnnnnnnnnnnnnnnnnnnnnnnnnnnnnnnnnnnnnnnnnnnnnnnnnnnnnnnnatgagccaccgtgcctggccttattggcttagtttttaaattatcctccaaaaattttgggcctttttctgtggggaaacaagtgaagctgctcttcagcatagacactacctttatcccatcattttagtaaaaactaggtttgtttcacttctgaggtgtcttattaatgtacttcatctgagaatttgttgatcttaatgttcgagctatataagaactgccattaaaacaaaatgggatcatcagatgattttatcagtatacctgtggcaatatgtacaaactggatctatagatattttgaactggaccaggtgggtattgacagtaacccatcaaaatatgctctgcagtgattccgctttatgtttcaacttcagtcaacgtccttgaaaaggcaaatttcagatgcttttgttatgttggcaggagggcttactgatgcgttgctaaggaccgatttctgattgagggatgacccttgggctccatttttttcttgtgaagtctctttctagnnnnnnnnnnnnnnnnnnnnnnnnnnnnnnnnnnnnnnnnnnnngaatgtatcatgtcttcattaacaacagaaaatccacatggtgtttactaaacttgtttacgacattaaaaatttcctttttatttttagtagcccaggttgagtttttcacaagagatttttttcttagctgaggtatagttgtatagcaagaagaattaagccagatttttgtgtgtggaaagacagttttctatccacgtctttttctgtttgtcagaaggtgggagtatggtccaaataaatccattaggttactcctgcagcatgcgcttttagcttctctcttgactgaggatcaaatatccctttgtgagctggccctcagctcctttgctcatgtgtacaaacctcagatgttactacattttatatctaccagagctattcaagcaatagtatttgaaccactagccttttaaataaaattctgccccattactgatgtgcagatattgagttcactttcattttttgccagatttctttgcactactttaggtaaaaatagttaatctatttttctttgacatcctagtttgcgtcagtgacagaacttactgcttagtctttgtactttttaaaaaatctataaatttaatgcactgtccaagtgaaatgtcctagttgtcattgtgattaaggggccaactttccaggcagctagcagagatactattctcttcctctcccagcaaatttgtattccttcgcccacgcattcctgctatactagatggcagccagtgatggaactataaagatgtctgtggtcatatgttgaatgtggcagcttgaagatgtactgccacgggtgatctagggcaggctgtcttccagtccatgtgttctcggtcgccgtagacagcgctctggctaccaccgtgaggctacttgaactgtcaggggcatctgcctaaaccagaatcttttgtcagaaaccttaacccaacaaaacaaatcttgagtagctcatgcccggctcttaggaattttgtctgtttaaaa

SEQ ID NO: 125116 - DNA, 682 bp, Homo Sapiens
tagaggctgagccaaaccaaagcagaatggccttagagcaacagcaggttcctaggtggtttttatattgtatttgaaaacagccctgggcagggatatcataatttcaaggccaaactaaacatcatcttccctacaatctgcatcccccaaaggaattgcaagatgagggggaacagactgtttctgcataatatacatagtttcatttacgaacattggaatacagactttctatacacacattacctatataataaaaatgtacatggcatgagtatatgtcactgtataaatatagagttttagaaatcttgaacccgcgcttcctgttcacatcagtttctcttcttcttcctccccagtcaggtccgtcatttaagagttggacaaaggggacaagtgtcatttgtgttggtctgggcccagaatttgatacactccttgtgcaatacatgggtacacgccattggatgcagctcactgggctggacgagtttctggcacattagacatagcttacaggtggctggagcatgtgaagaccttccaggatatgaaacttgggcagaaggcacgaacattggggtactgatttgggccagtggagcagggaacaaggcccggatgcgaccaagtggctgagtacttgctgccacccgctcatgttctgccagtcgtg

SEQ ID NO: 125117 - DNA, 1049 bp, Homo Sapiens
  misc_feature (196)..(205): n is a, c, g, or t
  misc_feature (889)..(889): n is a, c, g, or t
  misc_feature (966)..(990): n is a, c, g, or t
gcccggccagctaagcgagagctcacaggggctcttctagatgtaaagacagtgagtggggacagccaggtttcagatatcaaataatattttaatttctgaatactttcaattttccttggaatataacacacaaagactcgaccaaacagttcagttattataacttttacagtatacagaaatgttgcacttnnnnnnnnnnccttcagtttttttaaaacacaaactgtaaactctaagatactgaatcaatcacgttacctataagtgccaacagtgttatttttgtcatgctgatttcaatggtattttttaaaaagggaaaatatcaacaattataatacaaagggtttgcaaatatacaaacagatataggattttcataacaattcaagaactaagcgggacccaattcaaattacaaaagttcactttttattcaaaacctcagcatgtgtcttggacacattccttggctgccaataaattccacagttcattctctttcttaaaatattttttaaaagctaggtttgtcatggtttcttttggggaggggcagggtaggggaagttaagtgttatatgtggttcctccagttctctaattagagtgctcgacttcacctaaaaattttggtcaccacttgtaagtgcgtttccatcatctttgagttgccttttaaagttttatgtcttcctatggtattttcatggactcagttttaattcttgcagaacatatattttaatgatacacagtttttaagaagccaagattatatcaaaacttattatagaaccacagaataaactggtttggaaccagaaaagtacaaaaaagaacagctagaggtacatagacacaggacaattaataatttggnaaacaaaaagacttactttctccattctgctaattgtctcccaatctccttaaatgcacttttagcaatatttttcnnnnnnnnnnnnnnnnnnnnnnnnnactaatttcctttttatacaaaaatgataagtagcaagttgttctgaccgacacaggag

SEQ ID NO: 125118 - DNA, 700 bp, Homo Sapiens
  misc_feature (126)..(142): n is a, c, g, or t
ttttgcacctaaatagctcatttatttaaaaggactcttttggaggggccctaggtaatggggagtaatgactccccttctcacccccagccctggcaggggttctaggcaactcaaccaaccctnnnnnnnnnnnnnnnnnccactggggtgcacccaaaggtggcctcacgtgggagtcagagctgttatggccgttggagctcaggggccaccccagctcctgctgagggtggctcaggtgccctgaagtgagggtacagaggtggccccagtttgggttcggcctctgcgtctccacgtggcagggagggtggcctgagcccctacagcttatctggcaggacctctcgccgtgccccgtctgcccgagggcaggatcccctcgtcctggttgcgggtcttgtgcgacttctgcatccaggctcgccactggtcgtagaggcggaagctgaggttggagcagtacgcgtgcttcttgagccagcccaggaactgcttgagctcgcgccgcaccggccccgagctcggctctccgccccgcggttcgcacgccccgccgcccgggcccgggcgctcactgcggggagtggaggcggctgtggggtggctccactcactccagatcccggctttcttggagccatagatgccacaggggttgcagcgcacttgcacgaagtacacggtgccgggtttc

SEQ ID NO: 125119 - DNA, 1741 bp, Homo Sapiens
  misc_feature (343)..(352): n is a, c, g, or t
  misc_feature (938)..(950): n is a, c, g, or t
  misc_feature (1048)..(1065): n is a, c, g, or t
  misc_feature (1096)..(1528): n is a, c, g, or t
  misc_feature (1598)..(1598): n is a, c, g, or t
  misc_feature (1614)..(1614): n is a, c, g, or t
  misc_feature (1635)..(1635): n is a, c, g, or t
ttttttgctatctagactacagactttattcagtatcaccagattttacatgcattcatttgtgtgtatgtaggtccatacaacttcagcacaggtaaagattcatgtgcttaacctcataatcaaatgttataatcaacatcgtaatcatcataatcatatagaactgttccatcagcacaaaggaactccttgcgtcatccctttatagtcatacataccccacaccccctccagtccctatccctggcaaccattaatctgttcttcatttcaataattttgtcacctcaagaatgttatataaatgcgatcatacagtatgtgaccatttgagactggnnnnnnnnnngttcaccataatacccctgaggtacaaccaagttcttgtatcaacagttagttccttttcattccagagcagtattccaagttatggatggtttgtttaaccatgtacctgttgtaggacatctgggttgtttccagtttggggctattacaaataaagctcctatgaatatttgagtacaagtacaatataggttttcatttctctggaatgaatgtccaggagcacaactgctgggtcttatgtttaacttgattaaaaaattatgtttaacttgataagaaattcataaactctttcccagagtggctgtaccattttacattcctgtcagcaatgtataaaatatccagtttgtatcctcatcagtatttggtattttcactattttttctttagccattgagataagtaagtcatagcctcgctgtggtttcaatttgcattccctgatgacttatggagtttaacagcttttcatatgcttacttgccatctatagatcctcttcagtgaaacatctattcatgtcttttgcccattttctaattggactgtttgtttttattgttgagttttgtggccnnnnnnnnnnnnngagatgaggcctcactctgttacacaggttggagtgtggtggtgtgatcacagctcaccgcagcctcaaactcctgggctcaagtgatcctcctctcnnnnnnnnnnnnnnnnnngcctacagccgcgcctcgttccgaattcttnnnnnnnnnnnnnnnnnnnnnnnnnnnnnnnnnnnnnnnnnnnnnnnnnnnnnnnnnnnnnnnnnnnnnnnnnnnnnnnnnnnnnnnnnnnnnnnnnnnnnnnnnnnnnnnnnnnnnnnnnnnnnnnnnnnnnnnnnnnnnnnnnnnnnnnnnnnnnnnnnnnnnnnnnnnnnnnnnnnnnnnnnnnnnnnnnnnnnnnnnnnnnnnnnnnnnnnnnnnnnnnnnnnnnnnnnnnnnnnnnnnnnnnnnnnnnnnnnnnnnnnnnnnnnnnnnnnnnnnnnnnnnnnnnnnnnnnnnnnnnnnnnnnnnnnnnnnnnnnnnnnnnnnnnnnnnnnnnnnnnnnnnnnnnnnnnnnnnnnnnnnnnnnnnnnnnnnnnnnnnnnnnnnnnnnnnnnnnnnnnnnnnnnnnnnnnnnnnnnnnnnnnnnnnnnnnggcgcgtgctggcgtttttcatagctcgcccccttacgagcacacaaatcgacctaagtcagaggtggcngaaccgacaggatatnaaatacaagcgttcccctggnagtcctcgtgcgtctcctgttcgacctgcgctaccgaactgtcgctttctcctcgggagcgggggcttccaaactaccgttggttccaatcgggtgaggcgtcggc

SEQ ID NO: 125120 - DNA, 1829 bp, Homo Sapiens
  misc_feature (523)..(536): n is a, c, g, or t
ccaacgggtcgtccgttgcgttcaccccgtgtagcgtttgttgatacaccccaaggtctctgtactctcacaggtgtgaagggcatttcaccccaccccgtgtgttggaaaatatggcgtcaaagacctggaagcactgaatccaccgaggcgtcgtgcacacatggtaagccacctcgtacgctgccctgtagtgacggtcaaggttcccaggttagctaattatcatggggaaggacgaatttttgagctacagacctttctggacgtttgtaaccggcttttccgaagaggatgtaccagaaccctgatttcaaggaaccctaaaggatcagggaggaaggaaccactgaccggttttttctgggatgttttctgtggggcaacagggatgaacaaaaagaaatgttagcatgtcagagcatatgacaagtgaggggagacagaggtaggaagagggtgttctagccacaaggctaatgcatttgtgttcaaagagaagtctgggcaaaggaggggaaannnnnnnnnnnnnntaataaaactaaactagaaaaccaaatcaaaggacaaaagggtttcatacaacacagtatcaaaaagtaaaaggaacacactaaatgcacaagctggtggcaagtaagtccacagcctattgtgataggtccatccagcatcaatcagatttcttctcatctgttatctcaaggttatttacagatgtgttgactaacaagagtctctcatgggaggatgggcaggcttcaatcattggtttcgggatctgtctgcgccatgtaggcatccaactcagcatccaggtgtccttttgttttcgacatatatgcatccaattggttgtccagctgctccttggtcaatacagggcgagcaagggcacctctccctcgtccacggcctcggcctcggcctccaaagccccctcttccccgacctatcataccccgacctctaccaccgattccgccacgacccatagctccacgccctaggccccctctcccaggacctccacgacctcgaacaccacctcttcttaagcccattcggggagctacggctcgtccacctcggagcaggttttgacctcggagtgacatcccgcccctaagtagggttctggtggcacgtcccccacgtagtcctcctctgggcaagcctctctggattatgggtaggcctcgtcctccgattgctcccctggccagggcccctatgggtcggcctaaccgtgcctggatgttactcttacccaggcgctgctttaagctctgcttaagttttaatgctgcctggacagagggtctattctccatctgctgggccagtcttctgtttctggcactggctagctgctgttgttgctgcatcgaagcccgaatattcactggcgtcggctgtttgttcttcagcatattagtaaagcgctcatttagagacatcttggtggtgctttttagcacaactttcggcgctgactgtgcagccatcttcgaatcccgagaatcgaaggaaacagacgccagtgctcctcccggggctgccaccacggctccggcaggcgggccggggaccggccgaacctgagttgacggtggaggggctcgggttagctagatgggcggttggttagatgcgtaagcggtagtatgcgagctcagttcgttgttgctggttggctgtctagtcggccgatccgtctgctcacccggcctgccctttcctgcctttcgtctgcagcggccgccagctcctgctcggtgtccaaaacaaaatggccgccacgtccagtgcttgtctgaccggct

SEQ ID NO: 125121 - DNA, 732 bp, Homo Sapiens
  misc_feature (380)..(392): n is a, c, g, or t
tttcgctttctagcgttttattgttttctcgcgtttttgtcgtttcgttctcgctccggagcgaaaagtgaaaacctgaggtggagcccgcgggccaggcgagccaaacccgggcggaggggccgaggggccgaggggtcgaggggccggcggggtggtggctcctccagggctctgggccttctcccgcagccaagggcccccccagccctgtacaatatagatgctcacgtaaaatgaaaaaaactttaaatgtatgagttaatctctaaatatatgtacacagcaatgtacacctttgaataaattaataccaatttgcatattctgggaaccttaaagcttatttacacaaattaccatttatttcataaatatcnnnnnnnnnnnnncccctggggactcaaggcagaagtgccactccctccgttgaccacggctgggaggggtgcctgtctcttcagggaagaggtggggagactaacaggttccctcccagctcaggtctacactgacttcagtcgtaactggttccagcatccctcaacccagttttatcacgcggtctaggcccaaggtccagggctctgggactccctccgatgctcccacccctggcccctgcaccttctggcttctgcagggaccgctgggccctggatgaggcctctcccacctcgctggaagaccagagacaccttcggatgccaccttggtggcttcgataaacac

SEQ ID NO: 125122 - DNA, 1318 bp, Homo Sapiens
  misc_feature (50)..(66): n is a, c, g, or t
ggaaccttaaagcttatttacacaaattaccatttatttcataaatatcnnnnnnnnnnnnnnnnncctggggactcaaggcagaagtgccactccctccgttgaccacggctgggaggggtgcctgtctcttcagggaagaggtggggagactaacaggttccctcccagctcaggtctacactgacttcagtcgtaactggttccagcatccctcaacccagttttatcacgcggtctaggcccaaggtccagggctctgggactccctccgatgctcccacccctggcccctgcaccttctggcttctgcagggaccgctgggccctggatgaggcctctcccacctcgctggaagaccagagacaccttcggatgccaccttgacgctggagcggatctggacctagcccagcagctcccaagtgactgtgtttccagcagcctgatccttgttgaggcccagggaagtgtcccaggccccgacttgccagacgaggctctattccggctgctgcagcccacttttctcctttatttaaataaatactcattctgtgctgtacacgtcccaagcagcaggggcaggcagcccgggtggcctgcgtggcaggggagcagctgggcagcccctcacttgggcgactcccggcctggggagagggctcgctggctctccagcccactcaccagtctctggatgctctgcagttcattggccgcctccttggccgagccactgggcgacagggcaccgcgggatggggcccctactttgcggagagccagctcgggcagggggctaggctcccggctgtttccaccagcggccttggagccctcagaggccagcccggtggtgaggaggctagtgctaggcgggatggtgaccgggatctgataggggctgaaacgcagtcggggccgggcactgcccaggaagggactccgggagagggagccggcggctgcggcggcggcagctgcagcactagtggcgggcaaagccgaggcggctgcggctgctgctgccatgtaggtgtaggggtaggggaagaggcctccgaaagtgggcacttggaattccctggaagaaacagaacaagacgagggttagacatcttgcctgaagtctttctgaagttgggctgggtgctatcccctggacaccgtgcccttctgttttagggatgtaaaaccacagttcgcataactataaccacaggcagcacaggtcagcatgagccagtgtgcctgtggccacacccagttagaagggtgagatcgcttcaggctaccatgcaaggcctgccatca

SEQ ID NO: 125123 - DNA, 496 bp, Homo Sapiens
  misc_feature (50)..(66): n is a, c, g, or t
ggaaccttatagcttatttacacaaattaccatttatttcataaatatcnnnnnnnnnnnnnnnnncctggggactcaaggcaaaagtgccactccctccgttgaccacggctgggaggggtgcctgtctcttcagggaaaaggtggggagactaacaggttccctcccagctcaggtctacactgacttcagtcgtaactggttccagcatccctcaacccagttttatcacgcggtctaggcccaaggtccagggctctgggactccctccgatgctcccacccctggcccctgcaccttctggcttctgcagggaccgctgggccctggatgaggcctctcccacctcgctggaagaccagagacaccttcggatgccaccttgacgctggagcggatctggacctagcccagcagctcccaagtgactgtgtttccagcagcctgatccttgttgaggcccagggaagtgtcccaggccccgacttgccaga

SEQ ID NO: 125124 - DNA, 1228 bp, Homo Sapiens
tttgggtcctatgactgctctgccatgttgctttgccgacctcgcccctgggaaggggaccgggcaaggccacttccagagggttgtgggtgatttttttaagggtctgcgggtcccttgggggtcgatgatcacccttccggacccccgagaccttgcccctgacgtcttcactggtccttcttcgggggagttcgctcccgaacatgcgcagcacgtccactgccctttccttgacggccctgggccgagtccctggtgccctccggctcagaggtgctgccgcgtgcggtcaccgcacctctgggctcaaagcggtttgctccatcttgatgggccgggccgctccaccggggctgccgtcggggtcggccgggggcgcgggctgcgagcgcgctgccgcctcggccctgcgtccggatccccggcgggcgccgtcgtctgggacccggtgcaccggccgtttgcgaggcccgggaggggtggggcctgcggccagagctgcggcttggtcgcgcagcagccgcaccaggaagccgatgtacttcatggctaggcggagcacctcgttcttgctcagcttccggtcgggcgggtgcgtcggcagcagcttcctcagctcggcgaaggcgccgttaacgttctgctgccgccagcgctcccggctgttggtgaacacgcgccgggccaccttctggggctggtgcccctcagccaggtccagctcacagtggcttggtctccgcttcaaccggctgctagggaagatgctaaaaggtcctgctggcccaatgtagacactgttgaggaaggggtgagggtggtagtgcagggccaaagtgggcggggcagttcccagggtggagagttgcagcagcgggggccgcagagtgcccagctctgtggtgggcatggctacccctgggggcctgctgtggcccaggctgatcactggtacaccaggtggcagcctggggggcgaggagcctcctcggtggcccacctcctccaccccagcactgttcttgcagcctggtgagtgccctggctctgtcccgtcagggctggcagtctgggccagggtgtggtttccagcgtcaggccaggctctgctgtctcgcgagggtccggcctcaatgctccaggccccggcgttgggccgcgcctcctcgtgggcctcggaaggccaggatagccgaggtctccgcgatcccgggaattccggacc

SEQ ID NO: 125125 - DNA, 1006 bp, Homo Sapiens
agaaaaacaagcataacttaagtaaactttattttcaaaatgcttcaggtacaaaagaaaacaatggcaaagtctaacaataattaacaaaccagctcttgagcggcagagtgctccagggatgagaggggctggggatggaaaggtggttgggagacacaacatttttctagcttcagaaagtcagggagcccagatcacagcctgaacttcatggtattggttacagattctttacaaaggtgtttacctctctcatgaggtcttcttgtttggttacttcctcagaaaaatcatcattgacatccaacaccagcactggaatgttcatcagagcctcaaagtggagcttcgttgtcttgtgaataagccaggcttcgtgttggccatgcagctgctctagataggccagctcaattcctttctcctcctccctggccctctggtacagtctcttcaaacaaacctggggagaagcctggaggtagatgaagccatgtaatgtgatccggctggcaaactcccacaggagaaaagaatgccagtcctgatagatatgccactcgatgtcactgagggaaccattttcaaaaagattctttgcaaagatatacctgtcactgtacacagacctctcaaagatctgtactggcttcctggcctgtaagagtttctcagggaagggctccagctgtactttcaggcggctcaaaaaggaaaatgtctggaatgtgtaggaccatcgtgctggctcccggtacatcatatccagcaagtttccaagactttgggcagtgcaggccaatgttgccttcgatggagagccttcggggcccgcgccccgcgtgcaggcctctggaggaggaaacgccctcgagtgggctcttggccatggaactgaagggtgctcgaagccgacttagaaagaggcggcccgcggccatcccacccacgattcaccggacgcggggtcgacgatatcccgggaattccggaccggtccagc

SEQ ID NO: 125126 - DNA, 742 bp, Homo Sapiens
cataacttaagtaacctttattttcaaaatgcttcaggtacaaaagaaaccaatggcaaagtctaccaataattaacaaacccagctcttgagcggcagagtgctccagggatgagaggggctggggatggaaaggtggttgggagacacaacatttttctagcttcagaaagtcagggagcccagatcacagcctgaacatcatggtattggttacagattctttacaaaggtgtttacctctctcatgaggtcttcttgtttggttacttcctcagaaaaatcatcattgacatccaacaccagcactggaatgttcatcagagcctcaaagtggagcctgtcactgtacacagacctctcaaagatctgtactggcttcctggcctgtaagagtttctcagggaagggctccagctgtactttcaggcggctcaaaaaggaaaatgtctggaatgtgtaggaccatcgtgctggctcccggtacatcatatccagcaagtttccaagactttgggcagtgcaggccaatgttgccttcgatggagagccttcggggcccgcgccccgcgtgcaggcctctggaggaggaaacgccctcgagtgggctcttggccatggaactgaagggtgctcgaagccgacttagaaagaggcggcccgcggccatcccacccacgattcacacagcgatcacttccgccggacgcgtgggtcgacgatatcccgggaattccggacc

SEQ ID NO: 125127 - DNA, 1025 bp, Homo Sapiens
cttcccccaaaaccgggtttttttagagagcttttcaaggggagcaaggacagccaagtaccaaatccacggttttgacgcaagagctccaggataaggcctggatgaaagttgttgggaacccaacatttctagctccagaaagtcagggagccagatcacagcctgaacatcatggtattggttacagattctttacaaaggtgttacctctctcatgaggtcttcttgtttggttacttcctcagaaaaaatcatcattgacatccgacaccagcactggaatgttcatcagagcctcaaagtggagcttcgttgtcttgtgaataagccaggcttcgtgttggccatgcagctgctctagataggccagctcaattcctttctcctcctcctggccctctggtacagtctcttcaaacaaacctggggagaagcctggaggtagatgaagccatgtaatgtgatccggctggcaaactcccacaggagaaaagaatgccagtcctgatagatatgccactcgatgtcactgagggaaccattttcaaaaagattctttgcaaagatatacctgtcactgtacacagacctctcaaagatctgtactggcttcctggcctgtaagagtttctcagggaagggctccagctgtactttcaggcggctcaaaaaggaaaatgtctggaatgtgtaggaccatcgtgctggctcccggtacatcatatccagcaagtttccaagactttgggcagtgcaggccaatgttgccttcgatggagagccttcggggcccgcgccccgcgtgcaggcctctggaggaggaaacgccctcgagtgggctcttggccatggaactgaagggtgctcgaagccgacttagaaagaggcggcccgcggccatcccacccacgattcacacagcgatcacttccgccgagagcacttccgccctaggtatcgctgctcactcgctccagcgcaccctcgtgccgaattcacaacccagcctcgtactaagcctt

SEQ ID NO: 125128 - DNA, 486 bp, Homo Sapiens
gtgggtattgcgacctaagtaaactttattttcaaaatgcttcaggtacaaaagaaaacaatggcaaagtctaacaataattaacaaaccagctcttgagcggcagagtgctccagggatgagaggggctggggatggaaaggtggttgggagacacaacatttttctagcttcagaaagtcagggagcccagatcacagcctgaacttcatggtattggttacagattctttacaaaggtgtttacctctctcatgaggtcttcttgtttggttacttcctcagaaaaatcatcattgacatccaacaccagcactggaatgttcatcagagcctcaaagtggagccaatgttgccttcgatggagagccttcggggcccgcgcccgacgtgcaggcctctggaggaggaaacgccctcgagtgggctcttggccatggaactgaagggtgctcgaagccgacttagaaagaggcggcacgcggc

SEQ ID NO: 125129 - DNA, 812 bp, Homo Sapiens
gggagtgctctcggcggaagtgatcgctgtgtgaatcgtgggtgggatggccgcgggccgcctctttctaagtcggcttcgagcacccttcagttccatggccaagagcccactcgagggcgtttcctcctccagaggcctgcacgcggggcgcgggccccgaaggctctccatcgaaggcaacattgctgtgggaaagtccacgtttgtgaagttactcacgaaaacttacccagaatggcacgtagctacagaacctgtagcaacatggcagaatatccaggctgctggcacccaaaaagcctgcactgcccaaagtcttggaaacttgctggatatgatgtaccgggagccagcacgatggtcctacacattccagacattttcctttttgagccgcctgaaagtacagctggagcccttccctgagaaactcttacaggccaggaagccagtacagatctttgagaggtctgtgtacattgacaggtatatctttgcaaagaatctttttgaaaatggttccctcagtgacatcgagtggcatatctatcaggactggcattcttttctcctgtgggagtttgccagccggatcacattacatggcttcatctacctccaggcttctccccaggtttgttttgaagagactgtaccagagggccaggggaggaggagaaaggaattgagctggcctatctagagcagctggatggccaacacgaagcctggtttatttccaagacaacgaagctccactttgagggtctgatgaacattccagtgctggtgttggatgtcaatgatga

SEQ ID NO: 125130 - DNA, 1617 bp, Homo Sapiens
  misc_feature (999)..(1037): n is a, c, g, or t
  misc_feature (1083)..(1323): n is a, c, g, or t
  misc_feature (1325)..(1341): n is a, c, g, or t
gaaaatctttaccaaaaaatagtttattgcacaaaatttaaggaattcccaagcacacttacatttgtaaaaaatcaacgtgctttttaaagttacactttgtcagacacggtgacccctttcccaagaacagccacaacttgaggactctcttttgtgaggaaatttttaataaaaacaagtaactcaaaagcactgaattttccagaccctctaacacatttccctccggatcctgtgagagcctgagatcacttatgacgagattcacctggaccttccggtcagtgagctcagaacacctcacaccacagcgtcactcaactcaagtccctcctcacatcagagggctcctcgaagggaggccccaggacggttctctcagatttgctggtccctcccctcctagaatcttcacgtacaacattctgtttttgtttttaaagacctcagggaactagaactcggttgtgggaaccctgcaccaaggagagttgagggccagctccttagcgcagcacagcacggactgtgttctggtgggcagggcccctgctggacccacccgaggagagtccatttcacatcctatcagaaacactgcctgatccatattgcagagagtgggaacgggtgtgagtccgtaagacccgtagcatcaatctcacatataccacggaaaaacacatgaaaaccaagttacgttgtttttggaacgtcagaaaaacaagtagtgacatcgtgaagtgccctagcctgttgtgacacacggtgtggggatgaacacgccgccctagcccgtgacacacggcgtggggatgaacacgccacataatgcactggtgaccctgttttgtaagcagtactcccaacttcactgccttttccgtgaggatattccatcattcccacttctgcccacaagaacaaaataattcaaactttatgcactgaagtaactctggaaggtagaagtgccgggagagtcccttggagatnnnnnnnnnnnnnnnnnnnnnnnnnnnnnnnnnnnnnnncaactgcagccgggggcggtggttcacgcctataattccagcactnnnnnnnnnnnnnnnnnnnnnnnnnnnnnnnnnnnnnnnnnnnnnnnnnnnnnnnnnnnnnnnnnnnnnnnnnnnnnnnnnnnnnnnnnnnnnnnnnnnnnnnnnnnnnnnnnnnnnnnnnnnnnnnnnnnnnnnnnnnnnnnnnnnnnnnnnnnnnnnnnnnnnnnnnnnnnnnnnnnnnnnnnnnnnnnnnnnnnnnnnnnnnnnnnnnnnnnnnnnnnnnnnnnnnnnnnnnnnnnnncnnnnnnnnnnnnnnnnnttccaacttcctcttttaggcgtcttcttaaggaaggaagtgtccgcgtgaacacgagaggcctcagatccagaagcacaagccgtgcatgaaaacaccaaaagactcactgcagggagcaaaggcagccaggccctgccaaaccagagggggccctggcaccggcgaccacagagcgctgggggaggcatcgcacccaagggcacacacgcaggaaaaccggggtgagaacatagagctacttttccttcggtattttcagaattagtctgtcct

SEQ ID NO: 125131 - DNA, 1237 bp, Homo Sapiens
  misc_feature (114)..(135): n is a, c, g, or t
  misc_feature (137)..(406): n is a, c, g, or t
  misc_feature (1141)..(1141): n is a, c, g, or t
  misc_feature (1183)..(1183): n is a, c, g, or t
ggggagagagtatgaagtcacggcgcgccgaattcggcacgaggtgtttttttggatagccatcccaccataggatgtgtacatagatactgaatatcataatccaatctttgnnnnnnnnnnnnnnnnnnnnnngnnnnnnnnnnnnnnnnnnnnnnnnnnnnnnnnnnnnnnnnnnnnnnnnnnnnnnnnnnnnnnnnnnnnnnnnnnnnnnnnnnnnnnnnnnnnnnnnnnnnnnnnnnnnnnnnnnnnnnnnnnnnnnnnnnnnnnnnnnnnnnnnnnnnnnnnnnnnnnnnnnnnnnnnnnnnnnnnnnnnnnnnnnnnnnnnnnnnnnnnnnnnnnnnnnnnnnnnnnnnnnnnnnnnnnnnnnnnnnnnnnnnnnnnnnnnnnnnnnnnnnnnnnnnnntgcgcccggcctgtcacccagtctttaagaagcatatgctcatgttattgaagaagaacctacttattattgattgccttttgaaaatttgttgggaataatttacctgcaggatttagggatagtcagaaaattctaagaaatataattattttatttaccttctaaagccaaatattcttacacagaaaggtcctctgttgttctggttttactttgttgctgaggatctttccttcctgctggtctcttcctctcaggccactggccctgtgtgattccaccgtggctggccactgggaaggggcagcttggacccttggtcaggcctgacggccatcaggaggcacaaggacactgaggccccatatctgatctgacctttgggggggcacagggagaggccggtggaggaggaggaggagagcagaccaggggctccctgcagcgactcccgcggtttcccctggagtcagccaggtgtaggtcgcaggcggtaacaaacctcacactcctgttccccaagtgaaaatctttaccattgtctgtgggagcgcctgtactcgtgtgtaggagcacctgtacttctgcagtcatcgagaagtcctgggatcttttgtggttacaccagcatcatgtggccaagcagaggcgactttcggaagagacaggcaggcaccgtgaggaaggtggctgtgctctcccaggtgtctcagagacagatgccttatttanaatcagcacgacatgtgtgagatcttctgtttcctaccccanatcctgaaaccctgcagacactggctgactgggagaggtggggtctggtagttg

SEQ ID NO: 125132 - DNA, 640 bp, Homo Sapiens
  misc_feature (402)..(402): n is a, c, g, or t
  misc_feature (579)..(587): n is a, c, g, or t
  misc_feature (603)..(603): n is a, c, g, or t
  misc_feature (625)..(625): n is a, c, g, or t
tatctttaccaaaaaatagtttattgcacaaaatttaaggaattcccaagcacacttacatttgtaaaaaatcaacgtgctttttaaagttacactttgtcagacacggtgacccctttcccaagaacagccacaacttgaggactctcttttgtgaggaaatttttaataaaaacaagtaactcaaaagcactgaattttccagaccctctaacacatttccctccggatcctgtgagagcctgagatcacttatgacgagattcacctggaccttccggtcagtgagctcagaacacctcacaccacagcgtcactcaactcaagtccctcctcaccacatgtcgtgctgatttttaaataaggcatctgtctctgagacacctgggagagcacagaccnacttttctcacggtgcctgcctgtctcttccggaagtcgcctctgcttgccacatgatgctggtgtaaccacaaaagatccaggacttctcgatgactgcagaagtacaggaaaaccggggtgagaacatagagctacttttcttcggtattttcagaattagtctgtcctaagagnnnnnnnnntacatggtgaacatcnctcacttgaggacttcccatangcaaggagaagtcgc

SEQ ID NO: 125133 - DNA, 662 bp, Homo Sapiens
  misc_feature (45)..(83): n is a, c, g, or t
  misc_feature (113)..(369): n is a, c, g, or t
  misc_feature (371)..(387): n is a, c, g, or t
agtaactctggaaggtagaagtgccgggagagtcccttggagatnnnnnnnnnnnnnnnnnnnnnnnnnnnnnnnnnnnnnnncaactgcagccgggggcggtggttcacgcnnnnnnnnnnnnnnnnnnnnnnnnnnnnnnnnnnnnnnnnnnnnnnnnnnnnnnnnnnnnnnnnnnnnnnnnnnnnnnnnnnnnnnnnnnnnnnnnnnnnnnnnnnnnnnnnnnnnnnnnnnnnnnnnnnnnnnnnnnnnnnnnnnnnnnnnnnnnnnnnnnnnnnnnnnnnnnnnnnnnnnnnnnnnnnnnnnnnnnnnnnnnnnnnnnnnnnnnnnnnnnnnnnnnnnnnnnnnnnnnnnnnnnnnnnnnnnnnncnnnnnnnnnnnnnnnnnttccaacttcctcttttaggcgtcttcttaaggaaggaagtgtccgcgtgaacacgagaggcctcagatccagaagcacaagccgtgcatgaaaacaccaaaagactcactgcagggagcaaaggcagccaggccctgccaaaccagagggggccctggcaccggcgaccacagagcgctgggggaggcatcgcacccaagggcacacacgcaggaaaaccggggtgagaacatagagctacttttccttcggtattttcagaattagtctgtcc

SEQ ID NO: 125134 - DNA, 693 bp, Homo Sapiens
gcatttcaaatattttaatagttttatttcgcaaagagaagcctaagaatttttttaaaaacatttccagagagaacactttataccataaaataaacttgtttaatttggggggacaaatcatctcaaatgtatatttttgaattatgtgccaattttataattagtacaaaaatgacagctgaaatattttaaaaatgtaaaaaccagtccaggcaacataactataccatcttgctgtaaaagtacttatatcgaattccgcacaaaatatttttgcaatatgctaaatttagttcttcaagtcactcttcactgccggctggcttttccattttctgttgtctccatcccattttcctctttaagatgttgatatagttcagctctgttattaacagagttcaaacgtccagcaaattcctgatgttttctggaattggcagtattgattctattactccacaaggataataacgacactggcccttttgatttttccacttgtggagtttcatccatttcaacaaggggttttttgtttggaggttctggggaatcaggcgaatcttttataatctcagcttcagccaattcttcttttccacgttctaagattccttttaatctctctgagtcttgccaagacttttcctgttcatatctttcactgctttctctgacttgtcctct

SEQ ID NO: 125135 - DNA, 1363 bp, Homo Sapiens
tttcagagggacaaataaccttttatttaaaggtattatatttagagacttgtatatttcaattttgtgtaggagaaaggaaagccattcttctagaaggcactaactggtttaaatgtgtgagtgaattcctaaagaaaacatgtgcaaagtatagtcaagaaggctgcctggttgtgtgttgtattcactactcttcatcacagactatgaattattgctgaacaactatatcagtcaccaggttttcccatcagagcttcagtgtgttcagtccacagtgtcgcagatctcctttactttctggttgaattcttctggttgatctgcatatacataatgtcctgccccaagaatagctattgtcttcacatatgaatgtggtcgtaaggactggatgctggtgccagaattgccatctatgcaggatcgggcgccaaagatcactgaaactggaatgtcagggtgcattttaccaattcgctggagcattggcctttttgcccatccataaggaatagtcatattcttgaaagctgtctcaccacttggagtctgcacattacagtggtagatgtattctgtcacagtatcgtcttcgaacattgaagaatactttcgtttgaaatcaggccttaaacgctgcactagacttaaaccaaagggtcctgcaatccttaggccagctaaagggttaaagggagtcaatgctgctcccaaggctctgatccaaactggaattggtctgtcttgatcagcaaggtctggtcgttcagggaaaccccaaggctccactaaaatgagatgattaacccttgatgggtacttcagcgagtaagcagcagccaagaatccacctaggttgtgcccaagcaagatcattttgtccaatcctagggcacatctccactcttcaatggattccacaaactgattctccacttcttctgcatcactgtcaaacctgggtctactacttcgtccaaaacccaataggtcaaaagcatagacaggtctgttggtgcaaagatctccaaaattcagtgcccagagcccaagacctcctccaaaaccatggagaaggacaagtggagtcttatttgaaatattatgaagagaacttcaagtgtccatattttatttccattagatatacgaacaggttcttttttgtatgtgcaaggcacacattttaacatcttctcttcagcttctttaaggtgtgatatagacgtagggcacccatgtggggagccaaccagttagccatcctgacctctctccggtgtcggcagagtccacctcctcctcctccgccgccatagccgccgccgcgcaagcgccgggacttatctcgaagccg

SEQ ID NO: 125136 - DNA, 373 bp, Homo Sapiens
ttttttttaacacagcactgagttttattagggatttcattaaggttaaatttctaggaatgagggagtcctagttagaggacccaaaagcccacgaagcctcctcagatctcatagtgaaccacccgctctggttctttggagggatcaccgcctcgttccaggtacagattattgtaaggatactgctttggtccctacagaaaaaaacacaggtcagcaagaacatacattcagtcaatacctggctacaccccactctgagttaacaatcacgcatggtaaatgggtacacagtagcctctggtcagacccagctgggctaggaaggcaggaacagcactcctcttcctcactcagcccaaggcagaga

SEQ ID NO: 125137 - DNA, 1057 bp, Homo Sapiens
  misc_feature (179)..(179): n is a, c, g, or t
  misc_feature (185)..(186): n is a, c, g, or t
  misc_feature (920)..(954): n is a, c, g, or t
aggttccaaaggccccttttgtccatgggccccagggttctccccgagggaaaacaggttatgggcccagaggtccccctttcctcactggggccgccggcccccaaacggaaatggttctaaaaagcttcttggaagggcccgaaggcggccgaccatggttttttgtgggttggttnttttcnnctctcctgggttaacacagcactgagtttattaggggatttcattaaggttaaatttctaggaatgagggagtcctagttagaggacccaaaagcccacgaagcctcctcagatctcatagtgaaccacccgctctggttctttggagggatcaccgcctcgttccaggtacagattattgtaaggatactgctttggtcccacaggctggtagacagggtacacgtcccccacccagcacatgaatatcatgaaagccaggaaaccgaagagctgcatacacatgacatgccaagaaacaggtgtgggggatgtatccacacggttcctgttgtacatgtctaggtgccagtgcatcggttcaccccagttcaacctcaggcccggctggtcccagctataccatggatctctctcatgctgtgagcggtcagggagcttcgggtagtcgccataccccatgccatcatccgggtaaggttcgtagtcttccacacgcatattatacttcttggcggcggcggcccgttcttctggggtcctaggatagggccccgggaacatgtccttggtcatgtgggaggctgtccgtgcgcccagcggcatcacgttccgggatgccctttgcagccactggactcccaagaccccggccctggccaccgccatcttcaccttcttcccccggccgtaatggccgaattcccgggcatatgtccggtaccgtcgactgnnnnnnnnnnnnnnnnnnnnnnnnnnnnnnnnnnncggccgcttcctcgctaactactcgctgcgctcgttcgttcggctgcagaggatggcgccatatatggtgatcggtctttttttcccaagcgagagaagtgcg

SEQ ID NO: 125138 - DNA, 867 bp, Homo Sapiens
  misc_feature (79)..(83): n is a, c, g, or t
  misc_feature (85)..(85): n is a, c, g, or t
  misc_feature (89)..(89): n is a, c, g, or t
gtactggggcccggcccgcccaaaacggaaatggttctagaaaagcttcttggagggcccgaaggcggcccgaccaggnnnnntntttntgtgttgttgctctgttaacacagcactgagttttattagggatttcattaaggttaaatttctaggaatgagggagtcctagttagaggacccaaaagcccacgaagcctcctcagatctcatagtgaaccacccgctctggttctttggagggatcaccgcctcgttccaggtacagattattgtaaggatactgctttggtcccacaggctggtagacagggtacacgtcccccacccagcacatgaatatcatgaaagccaggaaaccgaagagctgcatacacatgacatgccaagaaacaggtgtgggggatgtatccacacggttcctgttgtacatgtctaggtgccagtgcatcggttcaccccagttcaacctcaggcccggctggtcccagctataccatggatctctctcatgctgtgagcggtcagggagcttcgggtagtcgccataccccatgccatcatccgggtaaggttcgtagtcttccacacgcatattatacttcttggcggcggcggcccgttcttctggggtcctaggatagggccccgggaacatgtccttggtcatgtgggaggctgtccgtgcgcccagcggcatcacgttccgggatgccctttgcagccactggactcccaagaccccggccctggccaccgccatcttcaccttcttcacgcggacgcgtgggtcgacgatatcccgggaattccggaccgtaccagcctgcttttttgtaccaactttttctataggtcactatgcct

SEQ ID NO: 125139 - DNA, 928 bp, Homo Sapiens
ttttttttggtcgttatgctgcatttattatgagaatcaacagtcaacagttaatgattgactaactcttgttgttcactctggacattaacgaaaaagactggaatagggctacagcgctgcttttatgctacacgggttatgcttggactctgactcccagcagcaggtagattcaggaattcatggcagtgacattcaccatcatgggaaacaccttcccttttcttcaggattctctgtagtggaagagagcacccagtgttgggctgaaaacatctgaaagtagggagaagaacctaaaataatcagtatctcagagggctctaaggtgccaagaagtctcactggacatttaagtgccaacaaaggcatactttcggaatcgccaagtcaaaactttctaacttctgtctctctcagagacaagtgagactcaagagtctactgctttagtggcaactacagaaaactggtgttacccagaaaaacaggagcaattagaaatggttccaatatttcaaagctccgcaaacaggatgtgctttcctttgcccatttagggtttcttctctttcctttctctttggttagtcttcgttctctttttcaggttccatcagatcttgcccccacacaccactggaatctcagagggtgcttctttctcctttccatctttactcctactttctggaatagccaatacagcatgtcacaatacggcactgttcaaaatgccccctctatcacaatttctgagtctggtactgggggggcctgctgaactgagtcagttccgttttggaaaaaggtcacccagcaaggaaaagggtgggaagccttcggctggcggaactggcaagggggccaaaccgtctgccccctgggcgggccgattggcgccccgatgcgggggccccccggg

SEQ ID NO: 125140 - DNA, 1125 bp, Homo Sapiens
  misc_feature (106)..(106): n is a, c, g, or t
  misc_feature (108)..(133): n is a, c, g, or t
  misc_feature (1033)..(1033): n is a, c, g, or t
aggagccgcgcttggagatcccgggttgatgtaagccacgggtaagtgcctccgagaaacccctcttttggaattttgttttaaaaacactctcggttttgccccncnnnnnnnnnnnnnnnnnnnnnnnnnnatcccgagcccctagtccagggtcccggagtttttttgggaagcacacttgtggcccaggtttccgttaccataatgggcgccgcgggccccaaaagaaaatggttttgaaaaagtttttggaggggccgggaggggcccaccaaatttatttgggcttggtcgcgcgttgtgtgcttgtgtggggcgggctcgcggtgggcggcttttgtgggggaagtaaaattacttttattttcataaataaaaagacaacccattatacacttttagttgaagtaacatgttagttgtcactgcctagtatgaaatccatgtaatagttaacaaacagttacacctctctataaccttcatgcaacttctatacatttgataattccccaaaatttccaacatttcaaaaaacattatatataatgggatactttagtcacaaagtgtcacctttgctgagtcaacaaaatatttatatgctcatgtcaaagatgcctactgatgtaaagtaataccagtattgctgcattttacagaagcactgagcatattacattttccatttcgtatatggtagtatcatccccaaaaatgtcaatgtgaaaatttagtaagtagattaataagcacaagtacctaaaagaaacaggtcccacagccacagagtagagagctggcatcaagtactgtttaaagttttgtcagtaagtggcacacaacaaacagacaagtgattctgtaataaagacaacataaaatacagggagatttaataagtgttttttccatagatattgaaataaaattaaatgtctgtttagttattactccacttattctggaaactgcagcttccaatatcaatattatactgcaagcagtatttagtacttctgtatgttangaaaaaaactcactgaatttatgtacctttttttaaggagtgtaactatgatatatgatttaagtatcacttattttgatgcatattgattc

SEQ ID NO: 125141 - DNA, 550 bp, Homo Sapiens
tttttagtacaagtggtttatttctcttccaggtgaggccgcatgtatataagcaaaggtttgcccacctggttccttcaggaactccccgaggaatctgtttagtttccatgcattaaaaacaaccctctagttgccaataatgaaactttaagaagcaacactttgacgtcgcagagttcctctctgcatgtgacgcggatataccaaagtgagtttatggcatacagtatgcatgggttaatgtaggtgagacagggagtcccggctgccctgtggccccattctgttgtggaggcttcgctgggagctgagaacaccctgctgtccatgttttgatgacaggtggttcttccaaaacagaagcaccgagtcaccgcacgcccctgcttcagtgtgcgaggccgtggggctctggtgttgtgaactccaggttggcaggaggttggaagcaccaaagaccccaactctggtccctcaacaggcagtattgggggacattattccctcctggccaataagctcctgtggcctgggacactgggtgggg

SEQ ID NO: 125142 - DNA, 763 bp, Homo Sapiens
  misc_feature (64)..(82): n is a, c, g, or t
gagtgcctacgcgaaaattaaccctcactaacagggaataagcttgcggccgcatacgcggtcnnnnnnnnnnnnnnnnnnncctgcttttctgcttagaacaaatatgggctttctctttgccccctgcttcgatcacttcctatctgacagtagcagtggaagtgctataaccagccgacagcgggcacgagggggggtactaaggatgaaactgggcttcctgagagggagaagtggagcacgcacccagggacgcttcctgcccagcccgatgacatgtgaccaggggccgctaaggaaactgttccctgaatgccgagatgagagaataatggggtcccaccatccatgggaaatgaggggggatctgcagaggctggaggtgcagcctaagaggactgactcaaattcagctgttaaagattccccaaagcatctgagacaccatctggggtgcagcacaacagaagacgtttaagatgggaccagaaagaagaatgtatagctcttctctaaataaacgaatggtctgccccatgccttcaggaaggagaatggtctatggtgactggggaaagttctctttgcaggctcacagatctggccagcatgtttataaactgagaacgctggggagctggagggtaatggagtggttcctgcaagagtcacaagggaggttatgcatgttatacagcactaaggggttgctggtcaaggcaggttctggctcctggtacccactcatgtggatccacag

SEQ ID NO: 125143 - DNA, 661 bp, Homo Sapiens
agaacacaaaagaagaaaacaaagagtttcatttttctgcttgctgaaagtacttgggtaaacttagctttaagatgggtcttctttcaaagattttaaatatatttttgaaagggtattgataaactttgaaaagcagatttgatcaacttcattttgcttggttttgaagtgatttatcttagatttccttttgaaatatttcttccaaattttctaaccatgcttggatttattttacagatgtttcttttatgttccattgttggtttgttttcttgtaagtgcttctcacttgaattatcttgtcgaacacgtttggcaaatccagaatttacgtctgcagttaacgaactgtttgatgtagaacttgttaatttccgtttccttttggcagcagtagtcattgccatgtaggatggcaccatgcttggtacaggcatagaatgcttagttgagaatgaagaaggatcaagccgttgtaaaatgtctttgttatcatttggtagtgattcttgttcgggtaatttacacttcgagctcttgatgtcttcacatatagtaaatgtagagtccaagtcctcctgtccacattcttttcttctattatgagggatagctacttcacacaacattttcagacaattatcactgtttatgt

SEQ ID NO: 125144 - DNA, 1238 bp, Homo Sapiens
ttttttttccagaaatggtgttccatttattcactgaaaaagagagagattaggccttcttcattcattttctccattcttgccaaactccctcccctcattttttccaaaataacaacacactgagaaacatgtttgtacaaaaaccacatattattcccccccctcacaaaatcaggtggctgaattacaggaataaaaccagatcaaagacatgaaaagaaaaagccaccacttatactgaaatataacagtgttaagaattcaggtattttgtagaattattactatagtaaaaatatttccacctggatcttttaaatttgaaagtgatcacattaaagacctgaggttacaagggaccacagtatgaaccagaattccattttccttctcggactccaggggaaaaaagaagtatttggaatgagtttcctttgggaaagactggcaggaagtaggtaaaaccctggccattgtcaaaaggcactggggtctttctggagccaaatgcattggaactaagctccagtaggaataaactcattctcatttccactcccaagagtccagaacaaaaacaaaaggaccaaggtctcctcggttcccgtattccagtactctgatggtgaccagggacacctggttagaggcaaacctgagggtttgaaaggcaaatctcaattgtggttttatttttttgctttctgatattaaggaaaaaagttctcaagtgttttataaacacctccctataccctctcatatgtaaagctttagaaaatatatagaaaaagatatccaaaagatgtccaccttgcattctaaataatgaaactgccacttgagaatgtgaagtgagaaagccaggcgctttggaaaccaagctctaccaaaaacaccctttccccacacatggaaggacagaagggagggaaggacaagaggaaaaaaccgggaactctcaagtcacttatcagcaggggtaaatacgagctcaaattaaggcatttttgtggcttgtcctctggaatggcattctaccctcccagcctgagcaccccaaacctcaaagcatgatgctctgactgccaagtgagttccttgttaccctcagcatctctttgaaaaccctgtgatagatggaatgtgagatctcagaaatggaagggagaaggtataaggagctaatatcctgcttcacttttcccgtcccatcctaaccttaaaagtaccgg

SEQ ID NO: 125145 - DNA, 1355 bp, Homo Sapiens
tccgctttcagttagggccctccaaaaattccgttggggagaggaaagtttttcttagccaaatgcggaagtttgtacaattatgggcttgggagggaagccaaattcaacaagtaatctgaaggttttcatcaaagtgccctgatggaattgcattttactctggaagatgacttgggaattgtcagaaagtaaggacactttttttcaagagaatattaccctaaactaaggtagtacatggggaatataagtgataagttctagatatacttgggaaatataattggaaggacttgtggactgataaagatatatttaagatgtgcagtcagtaggacttgttgattgaaggtggggtgaaaagatgacacaggtttctggcttggttggaaaaagcatagcatcatttaccaagaagaaacgagatggaattgtttggggttgggaaggtggacgatgaaatgttgagtatcacgcatcttacatttgaggtatcaatcattattggatagaaagtcttatttagtgagatggtaatggttgtagatgtcagtgatttgttccaggggacaatgagtaaactgagaagagcaaaaatctacaaatggagcaatgaaggtcagcattccatgaagaagcagaaattgatgagagaggaagacaagagtagtcagagaagttaagacctggaagctaagtaaggagagggagtgggcaactatgatggaaaggccataaagcaaagattgagaagtatgcactggaggccattgtttctggatgtcagggtaggaaagagtaaacggtgacagtagaggtctccttgcagtgaattggggaatgaatatcaagtgaaatagtgcacagagtctgtatacaaccctttggaaaagcctgattgaaaagagaaagatgagatgcggagggagaggcattcaaaaaatgctagttacagcatcttattgaggaatctaaggcaggagtagggagacctgagtatgatggagcatggtagggttgggagtcaagtcaagctcacagcatttcagggttagggagataagctgtctgcagcagtcaatagttgagggttcagcagggcttccaacagggcagaataagggactgaactgccagcttcagggcagggtacaagccatctctcctgataggaaagggtcaggggttgagtagagtcttcagcaaagctgggaagttgggtgttccccagcctgttacaggatcccagccaggaccagagcagaaacctggccgctctacctcttatccagacaggactcatggcagcacgggtacatcaaaggtcctgccccatgcgtggtatcaggggc

SEQ ID NO: 125146 - DNA, 1928 bp, Homo Sapiens
  misc_feature (850)..(850): n is a, c, g, or t
ttttttttaaaccaactttgtgatttttattgatgggcgacaactttatactcctagatatcactaaactgtgtacaattagggacgcagcattagagaagagcagacagcagaattaaacagagcagactgaaggagagatcttcattatttgcccatttttcattatgtgtacacagaagcatgaatgcaatttgaaatcttttaatggcaataaagttacaatcacccatctatgtagactaacattttaactccaaatatttgatctgcaatgtgtacgtaagcagtttctctcagtacaattattaaaatttttcctgttaggaaccagcaacttattttttatgtttatttttcttttgaagtaagaactagttcttctttgataactggctcatttttatcatttatcaaaaactaaagggtagggaagaaaagtgtgatggattaaaaaatttcttttttaaggaaagataaaattcattttcacaaatttacaagtgttgttgctggtgcaggatttattctactaagcaatgagactggggatcaaatccactttcttatctcaggaatcagcattatttcagaaatatgggtttttgtgtattttctaaaatcaagcaacagtctgtttcaaccaaatgattttgatttggaagttagagtcaacagaagctgtgttgtgcacgaaccgcaaggcatctccttttcattctagcccatttttgcaaagggagaaagagtttctctctaaagagccactaaagagaggcgggaagtgagtgtgaggtggtgtcctacgaagcgggcactgggcgcacacacagcgcacacagggtttacnagcaggtccactcgggcggtaatacaggagggtaggctgtgcgttcagcagttggtttcaccacttggtactggttgatcaccttgactgtctggtcatcgatgcgcagccagccattcagaccgatctggaagacgtctgtagtgtaatggccgcccgtcgcactgttgccgtgatggtagaccactgcaaagagccgataggttcggtggcatttaaaattcttatttttaacccctggagaaagcagttctttactaatttccaagtccacaggatattcaatatttttgataagcttctggcacccaccagtcttctcataaacgaatcgtttcaggtgcagcacgaggacaggagggagtttttccagagtcactcttcgacttatctcaacctcttgtttggtttttgtggtataaccttggacagattctcttgccaccaagctctccagtgcatcctggactgtgcgtatcttgtctgactggatatccaactgcaacgtgaaaaatggctgcaaagtggcagattcttttgaactctgctggtaaaccacagacctgatgtgtccaccaaaaatgccggtgattggagtctgaacaaaatccgcctggcgggtgacggaagtcttgttccgggggcccacttgttcccattcatcctcgcttccttcaccttgttcttcctgctcttcttcattgaccgagtggtttttggggccgttggaaatcgtaagtttttcattacttggtgagagaagcttctttaggttcaacatttcctcatgaagtccatttagaatgaagcctaagtattcctcagcatcttcttgtcgacccttttcagacaggcttgacttgttaactgtcaggagtctgtaaatatatgtgggctcaaaggcagctccagggcgaatatccctcacgattttatctccaagagcttgtcggggttttggaggtactggcatattagtgaactcattcattagccgaacaaagctgtctatcatgggtgttgacgtacaaggcctttgcactttggaatacagaggaatgaacttcatcaggtgtac

SEQ ID NO: 125147 - DNA, 531 bp, Homo Sapiens
tgcggccgccattttaaatatgtggttaatatgcgttcttgcacacatgtacttatctgacttaggcttaccttgcagttatagaaaagtttttattatggattgcttgcgtgtttgagttgaaatagcattggtttgtgtgatgacatctctctgtcccacctgctttggagaggggttttacacataggatgcatccctggagggaagtcggcggagacctgtaatgattcgtgtgcagtgctgttctcactctgctgcctgctgggctctcttccagtggtctaccatcacggcaacagtgcgacgggcggccattacactacagacgtcttccagatcggtctgaatggctggctgcgcatcgatgaccagacagtcaaggtgatccaccagtaccaggtggtgaaaccaactgctgaaccgcacagcctaccttctgtattaccgccgagtggacctgctgtaaaccctgtgtgcgctgtgtgtgcgcgcagtgcccgcttcgtaggacaccacctcacactcact

SEQ ID NO: 125148 - DNA, 1506 bp, Homo Sapiens
  misc_feature (1113)..(1149): n is a, c, g, or t
agctggcatccaaatacattttatttacaatatgggctatgatcagttggatattaagttctaaaatgatttacttcactgctacattataaaggtaaaagcaatgtgtagaaaaagtgtgagattgtgtttttacatactgcttttgtagttgccatcgctggttcagttcgacttataacatatgtcttgcttgtagatttaacacctccaataggaattcttctaacaattccagaagaattcttaggaatcagagcattatcatcagtatattcttctttcgtctgcgcattggtgatctgcaggtcgcagtcggcagctttcagcttctctctccccataatctgcttctttaagtcgcagagggagatgtggagcccatcaaaggtgacggtatcatagttgagtttagaggaaaatttataatgcacacaggacatggtgccaagggattcctaaggttcagcgaggagacgtggacactctcaatatacgtatatttataaactttaagagcaaaatatgtacacacaaaacactcaaagacaccgaaggaccctaaggcctcagattaaataccccccaaccacaagcaggggttcgtcagaacaataatccagagaccccccgatactcagaatcacttcatgggggaggaggaggacgaggacggggaagaggggaaatcgagaatccgccaacgggcacaatgtcacccggctgggtccccctcgctcatgctaaggggccggcagagacggggggattggcggtgcagtcagtagcggtcagtccacacgttaagagtccgagcgaccccacggggtcaggggtccatagcgcggccgcacctcccggcgggtctctctctccgtggattggggtgacccaggccccgggagaaggttgaggggagagggcctaggcccggagtccacgagcggcctcacgcctcctcctggcttccggacgaccggcgtcagcttccccaggcccaggcccaggcccccaccgcacacaaacccctggcgcctgctccccggaggccacgagcggccccacggcctaggccgaaaacgcgcggtcggcggaggagaggccttcccgcannnnnnnnnnnnnnnnnnnnnnnnnnnnnnnnnnnnncgcctcggacacaaagccggcgctaggcctcggcgaggcctcggagcacttcctcaccaccccgggccccagccggcggccgggtggcttcggcggaccccggggacaccgccgaggctccctgacgcttcttctcgccggatcctccgcgcttcgctcgcctttcgtttccgtcgccttgaggcccggaaccgcaagaacacgcccgcaagctgctgggcagcggctagggcttctccggctccctttttgtgttggccccctgccgctcgggggctctcaccgagcggcggcgacacctccaagccaggcactatggcggaccctcgtgccgattccacacccagcctgtcctgc

SEQ ID NO: 125149 - DNA, 621 bp, Homo Sapiens
  misc_feature (560)..(561): n is a, c, g, or t
cattttaaaccccttaaatcctttactatataccttatatatcagcgtgtgtcagttgtatattttttaaaaccactacttcaaataaataagcactaaagtattaaaaacatttttaaaaacttctgcccttaaggaacttaagtccctacatcaactcttaagggatttattaatcttaacaagtaacagtaaagtatatggcaaggaggtaaggaaatgaaatatacataagcaccagatcatatgggatgtggatatactggcttcagtgtaagcttcactctattccagggttcacactcaacaattgatggtgtttggtaagagcacctgtctcaaagcagcccaggggcctgaaataccctgattcacctacagtgttcccctgggctcagcaggcaacaacattcttttttgttcttttgcagccttttgaaagctgtttacaaataatctaatgtgatatcacaacaatcctataaggttttgattcctcttctgttaaatggagatactagtatctattcattcacctaatggctttattcctatcattnngcagataggaaaactgaattgcaaaagcggttcctggagaacagaatgtgagtttttaag

SEQ ID NO: 125150 - DNA, 2544 bp, Homo Sapiens
  misc_feature (1155)..(1213): n is a, c, g, or t
  misc_feature (1315)..(1378): n is a, c, g, or t
gcacggtacccaggcacattcccgaaagtccaggccgctttctccatacacggaggttctcggaaaatgagcccgcctggagcccgggacttagagggggatggcgggcatcctcgctgggggtggggggtttccaggtaggtggtggaggggctccgcggggctgcccggtgtggttgctgagcagtccccggcggcagtgctcctggaactcccggatggtgaccttgctcccgttcacagttgccttgcaggagcggcagcagctgggccaggatctgctcgtctctcctctcccgcttggaggccttgggcgtctgctcctcctgggccggcagggtctccaggaagcaggctgcgaactgctgcagtaccttcaggtcatcgcctgcgcagtctctgtcagccgcccacacgcagccgatcttcacaggttgcaggacgcgaaagcgcttccccttagccaggaactcgtcccactccttggccttcagtttctggcggaccttatggttctcagggtcggcacactcctctgtcacaccttcgtcctcagacaggtacccatggggcacaaagaaaccatcgtcctcatcttcatcctctcccatgtcgtcatcatcatccccctcactgtgggacagggactccccaggctcctcttcttcccactcctcatcactgtccacctcatagtccaggagcttcgtgtcctgggcccaggggtctcgcgcgcggatgagtgccgtcttcttattccaggtaccccagtaggcaggccggtggttctcacagaactgcaggagcttcatcctgccaaacttcctcctctcgggaacaccgtcgcccttcccacgctccacgatgacgacatcactgttaaaaatatctgcattccgggtggaaacgtgcgtgggtccggacctcaggggctgccggcctttgaggtctttcaagaaggagaactcgccgctctgctgctggaggagctggtccagctgactgcagaggtctggatggaaagcggtccgacgccgaggggccaggaccatgtgctctttaatttcaaagggggcaaacttcccacaggagccggccagggtcttgggggcctgtggagtctttggtttctggaagaacctcgtgatttcggcnnnnnnnnnnnnnnnnnnnnnnnnnnnnnnnnnnnnnnnnnnnnnnnnnnnnnnnnnnnttttttcctcaagtttagcctccagggcttcctgtctctccttgcgccgctcctccttgagccgctgcttctccgccttctccttctcatccttctcccgcnnnnnnnnnnnnnnnnnnnnnnnnnnnnnnnnnnnnnnnnnnnnnnnnnnnnnnnnnnnnnnnntggcccgcttggcctcctctttcagcttctccttttcttccctttctgcacgtaacttgagctgcttgcccagacgctcctgatctctttgcagtctgagcttgttcttctctgtagagcctttgacgaatttcttagttattctgcggaggggcgtggaggtggggaagggactggtactgctgtgctgctttgggggagcaggcggcccctcgggcgagctggtggaagagggagagctcagggacgaatggctgagtacagagtcttcttcggggaaagattccagcacctcactctcaggggtcatgttcttgcctttgggtgtggctggaagggacttgatttgcggtggtctcacagccaagatgtcctgcaagaccaccataggccccttccctttgaacaggatgcccccagcttcactccaactgtcctgctcctttctggggcacattctcgggccactcgtcagctccgggcagctccgtggcgaacattcctgggagtcgcctctcctccctgcacctccacagccaacaccctcctcctctgttttgcaaggaatgtctgaaagggtctctccaggaaatgccaacttgtcgttctgaatggccttcaacaacccctgctgatccccagtgtcttctcgctggccatttattgcctccctggagggagaggcttcagaatttagtttattgtggtccacaagactgtctggctgctcattcgagtcctctgtcaaatcaatgatgactgtgctctggccaatactggtttcgattctatttcttaaaaagttatctaagggacccttcccgttgacaagtttcggtctaaagtctatgtcagaacccacatgacagttgttttccaaggtgtccaaagaggcctctaaatcggggcttttactttgcacagaagtaccctgatcgtctgacatgtcatcggctttcccctttgggacaagattcaggcgcttaaacggcagacgggcttgtattaacttcttaactggaaaagctggtctatctttgcaatccatggctgtggcggctcccctggcgccgggcgccccgcactccagctcctccagcatcgccccggcggcagctcgacctcctctcaggcggcggaggcgcgggctcccctcaggcggccgc

SEQ ID NO: 125151 - DNA, 789 bp, Homo Sapiens
  misc_feature (97)..(160): n is a, c, g, or t
accccccaccctacggctaggtctgaggccctggtttaattcggcacgaggggagaagctgaaagatgaggccaagcgggccaaggagtgagtgccnnnnnnnnnnnnnnnnnnnnnnnnnnnnnnnnnnnnnnnnnnnnnnnnnnnnnnnnnnnnnnnngatgagaatggagaagtgcggagaagcagcggctcaaggaggagcggcgcaaggagagacaggaagccctggaggctaaacttgagtgaaaaaaggaaaaaggaagaagagaaacggttaagagaagaagagaagcgcattaaagcagagaaggccgaaatcacgaggttcttccagaaaccaaagactccacaggcccccaagaccctggccggctcctgtgggaagtttgccccctttgaaattaaagagcacatggtcctggcccctcggcgtcggaccgctttccatccagacctctgcagtcagctggaccagctcctccagcagcagagcggcgagttctccttcttgaaagacctcaaaggccggcagcccctgaggtccggacccacgcacgtttccaccctggaatgcaggatatttttaacagtgatgtcgtcatcgtggaggcgtgggaagggcgacgggtgttcccgaggaggaggaagtttggcaggatgaagctcctgcagttcttgtgagaaacaccgggctgctactggggtactggaataagaggacggcatcatccggcgcgagaccattggccaggaagaaggtattgatataggtgaagtgatagattg

SEQ ID NO: 125152 - DNA, 1093 bp, Homo Sapiens
ggtgggaggaaattccagaagcccttaggtcctgtggcccgggggttctcccttagggaaaacaagcttatgacccatgtttcacctttccctttctgggccgccgggcgcccaaacgaaatggtttaggaaagctttttggggggccgagggcggccgacaagggttgtgtgtgtgtgggggcggatccagggggcggacaggacaaggtttattgggggtcctggaaacactggggagagggacgagggggcaaggtcgaggctcacaggggcaccccctagccaaatgcccccttcccctagggattgggaggaagacagagacagacaaaccaacagagatggagagaaagaccaacggatgctacggagagagggaaggaaaccccagtgtccaccacctcccactcagatgagttcacaggataaagaattgcgtggaccggtccacacgctacaggaaaagagaggagtgtccgccctattcactctaaggaaggtggcaggccacagcctagaccagcccattccatgtgatgggggtgtgtgcacatagatcagtccattctactgggcaaggggatttcaggccagtctattctagtgtttggggcggggaagatcgttagggtcgatccattccacagtcggggaggggggattcgagggcagggggcatctaccctggtccctctttcagcacagggaatgaaaaaggggaaaggcagatttcggctatatccattttctggggtcaccagtgactctggtgggtggcatttggagggatctaggaaaattcagggacatgctccctccacattctccagatcaaggtcgttaggaatgatggctctcagggaatggggcagtcttcccttggtgggggtgggtgcccatcttttagtattagggctctcaagatgagaggtacttgtggagacccattgctcactgcaaagtccccatgtcttggggacttacggctacccacactcattccagggacctcaggctcaggagtctctccctagatttgggctcccctgccccagctaaggaccctgtttgtttgtggtcccccagctccc

SEQ ID NO: 125153 - DNA, 1901 bp, Homo Sapiens
cgttgaaaaccaataatttatcaaaacgctgcgtgtgtatgtgggggggagggtgtcgcaacagacagggcagcggtgggcggacgcacaggcaggagacggtgcccggagagtgggggcggcagcttgccactggctggccatgcgggcgggcaggctagacattcttgccgcgcaggcgcagttcgtggcgtcgcaggtggttgtagagcgactgcacataggtgaagacacacttggggtcaggcttcttgcccatgatcatcatgtcgtccacctccaccaggggcacacagtccaccagcatccgtggggccccgagcaggggttaggactttttggtttttaccagccccttctggaccagacagcggtagaattcctggatgtacgtgtacacgcacttccagtcaggctctcgaagccgcaccatgtcctctgtatccaggagctgcgggcagtccgcatgggtctccgcagatgagaaggccacctcgaagttctggcgtcggttctgagggctaagctgcccatagtcgaaggcctcagggaagaagttgtgcaccagggcacagaaggccatcccatcactccagctggaggagaagttctggatgtcgacgtgctcgtagccgcgagtcttggctcgacaccagtccagcagcatctgcttgatgctgttggcgttggggaccccgaagctggtggatcgctgcacggctgcgcggggtccgccagggctgccggccgcgccctccttctccagcttctcaatcatggccttgcgcgcctgggaggctgaggtcttgggcagactctgcgccttcatcagctctttcttcttctcggcctgccgtttctcgagcgccgccaggctgccggcccgtgggctggcctggtcctcgcggtcgaagatgctgcccatcttcttggatgaggaggaagaggagaaggtcttggtttgcatcatggtgctgccactgccattctccgagcgcctcacgaaactcgactccactgtggtggtgcgggccgtccgtgtgccatcattggagtggacgagccgctcagtcttggtaacagtgctgacagcagagccatcagctgcccgctggctgtgcctcgtggtggtctcagtggctgtgttgccgcgcccctcccctggccggccccgtgcctcctgcagccgccgttcccgctccttgtcccgctggtctctcttcctttgtcggagctcacgaagtgcagcccggatgagcttccgctcttcaaagtccgtgctctgatccagcatcttgtccaagactccttcatcctcaatagtcatcagctcctcagcgctcagagggctccgcccttctggtgctttgttcactcgggtctgctcagccccattggccacttccactgctgcagcgagaggctctgctggctctggttccatcttgatgctgcagcctcctcggctactggggggggcatggctgaagctggtgacatgagtgacactgcccagccgagccagggtcccagggctgttgacacgggtgatggtgctcttgcccccactactggtgctgagtagggtcgggggcgcccgcagccccagtgtcagttctgccctctggttgcctgtgggcagcagcacccggcctgtggaggcctggccacggccgtccttgatctcgatggtgaatgtggtcttcatactgccccctggctcggcagtgccgacggccacgggcagcggggcaccaggctcctctgaacgtgccacaggcccccctgctctgttttcaaggggcctagcagccaagccccgccccctggggccctcctccctcgtgccgaatacgccactcaggcctcggtacctaggaacgttggggacaagtcggagg

SEQ ID NO: 125154 - DNA, 1631 bp, Homo Sapiens
  misc_feature (115)..(115): n is a, c, g, or t
  misc_feature (167)..(167): n is a, c, g, or t
  misc_feature (219)..(219): n is a, c, g, or t
  misc_feature (277)..(277): n is a, c, g, or t
  misc_feature (293)..(293): n is a, c, g, or t
  misc_feature (303)..(303): n is a, c, g, or t
  misc_feature (314)..(314): n is a, c, g, or t
  misc_feature (555)..(555): n is a, c, g, or t
  misc_feature (673)..(683): n is a, c, g, or t
accgcatgcgggtgcgcgcggccataactatcgcggtgcgcgtcgacgtgacaagagtcgtcttgtctatatatttgcggagggctcgcacacgcagagggtgtgtggttcttantatatcgccgatagcgcggggcgcgagagatatagaacttgctctcgtgagnctcgtatcgcgcggagagcggagcgcggtgcggatcacgtgatagtcgcgtngtcttcgttagtgacgcacatgtcacgcgcgctgtgtcgccacaggagttgtagtcgntgcgtcttctttccgncgtagcgganggtcgtccacncgctctcgagagattggagagtgtggaccctcgtcgaccgcatctgtgtctcgtggggccgacagagaagagggcgcctctttgaattgtgcacgcattgttctgccagcaccggcgggtcggccgtcgtctcccgattgcagacacctccgcgcctagaggggctgcctggcgtcgtgcgcggcgttcaaattcttcactcagtcagtcgcgggagtgcgttccggcgctttgggagaanaatcgcggagcgtttgcgaagacgccgttcgccggggttaaattgcacccctttcaacgaagcgttccgcattccgggggactccgggttgcagtacaagggcttgtgggtatgaccnnnnnnnnnnncggtttgttttggtgggggggacgagatcgccccggccccttggtccaaggccgcacgggatctcccttcggggacccaagattagggaaccagtgttcgggtctaccttcggtggggcccggcgcggcgcaaacagaaatggtcctaggaaaggtttctccgagggccggaggcgggccggccatgttcctcctcgcccgcgccctcgcttccctggggttcaaagtttatttcaagtcacagaaaatatacaaactaagacaataaaatgaagtgattttgttctgagagaaggtgatgggagtcctccacctggcactgatttgagtcattcaagggttaggatgcaggtcatcttttttcaatatttcaacaaaattatagaatttccagatttcttgccaggtatttttgaaaacctatcaaggtgctccagtggatttctgtatttgttcctttaaaatcaggatactctgcctttgctcaggaggcaacatggcaatctggtctgcagtcagttgtagaacctgcataatcaaagcagccttctcatgatcctgtggagtgacttggttctgcccgggactaaagccgccaggctggcttccaccctgtatacttgctccttgcattcctgttccctgcatgactgggacctgtctggatccctgggggacaaccgcccccatgttaattggactgggaccctgcattccactaggtataggtcctctggggccaggcactgggcctctggtatccatgcctctggcctccatccctcggacttccattgcacgggcctccatcgctcgggcctccattgcacgagcttccatcgcacgggcctccattgcacgggcctctaatcctctggcatctaaccctcttgcctccatggctcgggcctccaatcctcgtgcatctaatcctcggggatcccttcc

SEQ ID NO: 125155 - DNA, 783 bp, Homo Sapiens
  misc_feature (281)..(319): n is a, c, g, or t
cttatacttttgggtaaacttttattttgttatacaaccaaaaatcttaaaactatcttagtacattaacgttttaacaggtcaacttttagtctttatgagcagttttcactaagttttactcgacatttaaaaaatgtagttaacatactgtagatgcttcaatattgctgcttattctttgtaatcttatttggcataatataatcatgttcagagttattttaaagtaacttaaagtgaacagacgcactccctcctccccccaccctcaattaatnnnnnnnnnnnnnnnnnnnnnnnnnnnnnnnnnnnnnnntaagattaggttctaggaggagggaaaccctaatccaagtgtggggatacagaagtcagctttttgcacccattctccatgctacagaataaaatttgagactacagccaaatattttcttaaacctttcaagacgctccagtggatttctggatttgttccttttaaatcaggatactctgcttttgctcatggggcagcatggctatctgatctgcagtcagttgatgaacctgcatgatcatagctgccttctcctgatcctgtggagtgacctggctctgcccaggactaaaactgctaggctggcttccaccttgcttgcttgccccctgtatacctcctccttgtatacctcctccttgtatactgactccttcggacgcgtgggtcgacgatatcccgggaattccggaccggtaccagcctgcttttttgcccactgttctatagtccattgcctt

SEQ ID NO: 125156 - DNA, 1436 bp, Homo Sapiens
  misc_feature (11)..(11): n is a, c, g, or t
  misc_feature (644)..(653): n is a, c, g, or t
  misc_feature (666)..(674): n is a, c, g, or t
  misc_feature (1053)..(1143): n is a, c, g, or t
  misc_feature (1324)..(1324): n is a, c, g, or t
  misc_feature (1394)..(1394): n is a, c, g, or t
  misc_feature (1401)..(1401): n is a, c, g, or t
  misc_feature (1421)..(1421): n is a, c, g, or t
tttaaaaccanaagcaggataataccatttaagtgggtaacatacacaggaaacccggatacagagtatatttccaaacacagtattgctgctttttcccctcctcccatttcacatcaggacttctaatctaacacggatctcattttcctgagaattttagtctccatgccaacctccctcactataaaatgaatttcttgcaacagggatcttacttgttttgcgtccccagtggctagcacattttgttgagaattcattcaaaatattcaggagactcaaccatataaagatggtgccaattgcccatgtgctatttgggctgccatctgtaggatgtggcttcaagttagagctcccttggcagttttaaaggatccttgttagtagatggttccattttttactttgtgcctacttctcatttgtgaataaatgtccccccccaaagtcaacactagtctaataaaagaagcaaaggaaatgtgcgttaacatctacatacaaattttgtgaaattgctacttgttagaataacataatagagcttatgacataacaatataaaaacaaaaatgatttttagtgaggtctgagttaattattgcttttttaaaaaaccacagttttaaaacaaaggnnnnnnnnnngaaggctgtttannnnnnnnnctttctcatggccagaattgaaaattttctcatccagaaatttagggcacccaattattgaatacccttatcatattgctttaaatgacagaaagattaaagctggcatcctctatagtatactaagcatgaatgtaaagtatgagaataaataggagactttcctaaatgtcaaattacaaaaccgctcaaaactttgtaattgtgactcatgcaaataccttgttaggtcaacttaatattacaaatactgcatcagctcggtgcctttatatcccttttcataaaaaagaaattctcactccactcctgaagccagcaaacagctctggaggaattacctgtacacccaagtgccacggtcactctggaattttannnnnnnnnnnnnnnnnnnnnnnnnnnnnnnnnnnnnnnnnnnnnnnnnnnnnnnnnnnnnnnnnnnnnnnnnnnnnnnnnnnnnnnnnnncccatctttaggatttgtagctgattccaagcctgcacttatttctattctatatttttctttgtatcatcctgaaacacactggttgctcagcaaaaatagtatctcttacctccttattttattcccattctttctccttccctcgctttttctctctctaccttcctgacttttcttntcgtgtttcctttttctgattgatcaaaagggatccatcattcttcttcctatctcgtaggccactttantatacangatagttatacacacctttntattttctatcatct

SEQ ID NO: 125157 - DNA, 1022 bp, Homo Sapiens
ggcttttcttcctccttcatttttcttccaaaattgctgctggtgggtgaaaaaaaatgccgcagctgaacggcggtggaggggatgacctaggcgccaacgacgaactgatttccttcaaagacgagggcgaacaggaggagaagagctccgaaaactcctcggcagagagggatttagctgatgtcaaatcgtctctagtcaatgaatcagaaacgaatcaaaacagctcctccgattccgaggcggaaagacggcctccgcctcgctccgaaagtttccgagacaaatcccgggaaagtttggaagaagcggccaagaggcaagatggagggctctttaaggggccaccgtatcccggctaccccttcatcatgatccccgacctgacgagcccctacctccccaacggatcgctctcgcccaccgcccgaacctatctccagatgaaatggccactgcttgatgtccaggcagggagcctccagagtagacaagccctcaaggatgcccggtccccatcaccggcacacattgtctctaacaaagtgccagtggtgcagcaccctcaccatgtccaccccctcacgcctcttatcacgtacagcaatgaacacttcacgccgggaaacccacctccacacttaccagccgacgtagaccccaaaacaggaatcccacggcctccgcaccctccagatatatccccgtattacccactatcgcctggcaccgtaggacaaatcccccatccgctaggatggttagtaccacagcaaggtcaaccagtgtacccaatcacgacaggaggattcagacacccctaccccacagctctgaccgtcaatgcttccatgtccagctttctgtcttctaggttccctccccatatggtcccaccacatcatacgctacacacgacgggcattccgcatccggccatagtcacaccaacagtcaaacaggaatcgtcccagagtgatgtcggctcactccatagttcaaagcatcaggactccaaa

SEQ ID NO: 125158 - DNA, 1986 bp, Homo Sapiens
gaatgcccaataagcaataacttttattattactacagagttccaggtgcaaagctgaaaaggcataaatgaaagcacagcagatattgatgtagaagaaagctttttaatgcaacagcttaaacacacagttcaacaaaatcagtcaattcaaattaacttcaacatattacaaagaactatgaagcccggagaaggccactgttggaacaaaaaaccaagtccctgcccagaaagcatggacactgaccaaggaggcctcttgccccctcccacctctaggaggagcagccacaatcactgggctctttaaacagcttaggtgcctctctgcagaaggcagcagcacagagtcaaggacaaccattcaagggtcagggctctgccttcccaccaaaggagggcccgaacagaaggcactggggctcagacataggagactgtgcaaggacaggacagggcagggacagcagctgtacacctggagagactgcagccctggagaaccagctcaacaggctgctttggatcagggccttaggtttatccccctccttccaccccggcccaggagctcaggttgttcagatgaactgcagtgagttggggtctggggaagctacaagggcagcactcagtctgcagcccacttgggcaggacaaagccaaatgctttgctgatgaggatctgttggtgtgatcagctagctgggctgggggaatagggacagagcttcagcttcacgcttagctctagtggggacctttctggtgcaacaaccatgtctgtgtttgactacactgagtttaatttgaacaagcaaagcctcttacagggtgggaggccatcaagggattgaggagggggcttcagagctcacttggggcatgctgggtttcaggagcgggcacagagcaggtggcccatggcttctctgggtaaggtcaggcaggggttccagttgccctgttgggtttttagtgtaggttctgcttcacttcctgccgcaacttctgtgcaggaccattcctaggctcaatctgtaggaggttgctgatgtctgcaaagctggatttatagtccttgagtgctttgtggggcttgagccccgtctgtagaatgccttcacgttctttccatccagcttgagggcttctgtgcagtccttcactgcttctgtgtactgcttcaggaccaaatagcagagtgctctgttgctgtacgtggcagattccaggttactacacaagaggctttcactgtacttctcaatagctttcttatggtttcccttctttacaagctcattgccttcttccttcagaactctggctttctccacatccccagcagaaggcactctgttctttgtagctgtggtttctttggatttgcttttagccatctctttgtggttctccgaaggcaaggaattccacctcttctgagctgaaacaggcaccaaggggattgagggcagcttcaggcgccactcaggcccaagcgagtccatgagagctctggtcattctgttgatgccttctacggctgacgtcacattatcatcaatctgcagcacagtcttatagtcaacataggccatagggtacttctccagagcctcataagcagatgctcgccgcagcaggggcttaatgctgaagggaaccaaggccagtgctgaagtgcaatctttgatgcagtctctgcagtttccatccttcaagtgacatgctgctcggttggagtagagaacactttcttcttctgggtctgaagaaccttgcgcctgcagcacccgcagcgcgcggccgtagagcgcggaggcctcggcgtactggccgttgcggaaactctcattgccggcggcgcggagctcctccacagagtctgggaatttgggggccatcccgtggccaggccggcgagttgggagctccttccttcccctcgtgccgaattcgccacccaggcctcgctacctt

SEQ ID NO: 125159 - DNA, 861 bp, Homo Sapiens
  misc_feature (52)..(52): n is a, c, g, or t
gttcccagttgcccctgttggggttttttagtgtaggtttctgcttcacttnccctggccgcaactttctgtgcagggaccattcctagggctcaatctgtaggaggttgctgatgtctgcaaagctggatttatagtccttgagtgctttgtgggcttgagcccgtctgtagaatgccttcacgttctttccatccagcttgagggcttctgtgcagtccttcactgcttctgtgtactgcttcaggaccaaatagcagagtgctctctgttctttgtagctgtggtttctttggatttgcttttagccatctctttgtggttctccgaaggcaaggaattccacctcttctgagctgaaacaggcaccaaggggattgagggcagcttcaggcgccactcaggcccaagcgagtccatgagagctctggtcattctgttgatgccttctacggctgacgtcacattatcatcaatctgcagcacagtcttatagtcaacataggccatagggtacttctccagagcctcataagcagatgctcgccgcagcaggggcttaatgctgaagggaaccaaggcccgtggtgaagtgcaatctttgatgcagtctctgcagtttccatccttcaagtgacatgctgctcggttggagtagagaacacttttttcttctgggtctgaagaaccttgcgcctgcagcacccgcagcgcgcggccgtagagcgcggaggcctcggcgtactggccgttgcggaaactctcattgccggcggcgcggagctcctccacagagtctgggaatttgggggccatcccgtggccaggccggcgagttgggagctccttccttcctccccc

SEQ ID NO: 125160 - DNA, 763 bp, Homo Sapiens
ttttaggtgttttataattttttgtttaatcaatttgaaataactgctgatccaatcaaattatctttaagtaacaaagatgatcaatctgatttcaatattagattagtacattagctaccaatattgactcaaatgattattacataaaatcttaggaagtcaatgaaaatagcaattacccatgataaatattttcaaatatttcctattgcgtaatttgtccatttgaatacaaataaatccttgtacaagtatgggagaatcaaatgcagataaacctatgaagggaagaattttctaatttatctacaggatttttcttcaatttaaaaaaagattgtaaaatacacataaaatttaccatttttaagtgtaccatttaagaacagtattaaatacatccttaatgtgccaccatcaccactatccagctccataactcatcctgtaaaactgcataacgtcctcaaggttcattcatgctgtagccagtgtcagaattttcttccttgaagtggaataatattccattgcatggatatactacattttgcttatccattcatctactgatggccgattgggctgcttctatgttttagctattgtgaacaatggctgctatcaccatggaacacaagtatctcttcaagaccctgcttttaattttttttgagtatatatgtcgactgggattgctggatcatggtattccattttattttatgaggatcacacattttccatatggtgtacattc

SEQ ID NO: 125161 - DNA, 1322 bp, Homo Sapiens
ttttttagccagcaacttttttttaatgttacatatactattctcaaggcacatctgatgatatattttataacacagtaggtgtcaaagtatgtttaacatatgatttcttcaggatccctcccctttttgaattccaaatggaggaactgaaagtgcgatgtaaagactggcgatccatattctatctttggcaagcttgtacaagcactattgtaaatgtaatgtaaaagaactgtaaactaggaacttcttcagtttatgaaacaccattcaggactgctgcttcttgagtgttttcttcttttaaggtattaatcttttcttctcctggagtacgctgtagcttagaaatgtcatcgccagaagcactagttgggccgtttattgccttttctgaaggaccatgctcttcaatcacatcttttgccatttctttcttgtttttagccaaagtttcccttgggaggtttctttgtctgctctgagactcagctctagaaatataatctgcaactgtgactagcccattttcattaactgaagctgtatcagattcagtcattccatccatcagaacagcatcttcatcagtccttcgtctacgagaccgcctacgacggttagtactgtgatgagattcgctggcatcagtgtctgcagtctgatctgattctgtattatcaagtaagctgtatggattgctgtctggatctttgagcacagaactgatgggggatttgccaccacgtggtccaccacgacctcgaccccctgaaccacttttgcctcttcctcctgggcgtctcctgctgtcacgcttatgtcggctgtctcgatcatcttctcctgccaatgaccaatcactcagctcgtctttacgctcagattccgtttcagaggggttagacagctcagaatttgtaccataaccggaggtgtaattaggtccccgacgacctctgcctcttccgctataagacctagaaccttgtacagaagagacggtactttcatcagtggcatatcctttctctttttcaggccctctggtggaagaaggtctgaaacccataccaatctgtcgcagctgttcatcaatctgtaggcgttccattcttagctgttctacttcctttagataggcaatatgatactctagaagaacctgcacatttccaatgctttctttagtgccaacaaatacaaatggaaccataccgtcttctctgggtaatttattttcattgtccccttcaattctcactcgaaccacaccagatttgtccactatttcttgaataactttgccattttttcca

SEQ ID NO: 125162 - DNA, 292 bp, Homo Sapiens
  misc_feature (142)..(150): n is a, c, g, or t
tttttcacaggaaaaaatgtaattttaataatatacaaatctcctttaaattgttaaacatttgctacaatttgttctgaacttcgcttttctcttcagtttgtgtcttgtagatcctaccttactatgaagatctactcannnnnnnnnagacgggtgcttaaatggccttgtagaaagccccgttagagccgcgaacctccaccgtcagctccgccatgttggaaccgcaaaggccgctgggaagagattctagaaactttccaaccagaggggaggaggggggaggggc

SEQ ID NO: 125163 - DNA, 2123 bp, Homo Sapiens
tttttagtcattaacttttttttaatgttacatatactattctcaaggcacatctgatgatatattttataacacagtaggtgtcaaagtatgtttaacatatgatttcttcaggatccctcccctttttgaattccaaatggaggaactgaaagtgcgatgtaaagactggcgatccatattctatctttggcaagcttgtacaagcactattgtaaatgtaatgtaaaagaactgtaaactaggaacttcttcagtttatgaaacaccattcaggactgctgcttcttgagtgttttcttcttttaaggtattaatcttttcttctcctggagtacgctgtagcttagaaatgtcatcgccagaagcactagttgggccgtttattgccttttctgaaggaccatgctcttcaatcacatcttttgcctagcccattttcattaactgaagctgtatcagattcagtcattccatccatcagaacagcatcttcatcagtccttcgtctacgagaccgcctacgacggttagtactgtgatgagattcgctggcatcagtgtctgcagtctgatctgattctgtattatcaagtaagctgtatggattgctgtctggatctttgagcacagaactgatggaggatttgccaccacgtggtccaccacgacctcgaccccctgaaacacttctgcctcttcctcctgggcgtctcctgctgtcacgctgatgtcggctgtctcgatcatcttctcctgccaatgaccaatcactcagctcgtctttacgctcagattccgtttcagaggggttagacagctcagaatttgtaccataaccggaggtgtaattaggtccccgacgacctctgcctcttccgctataagacctagaaccaatctgtcgcagctgttcatcaatctgtaggcgttccattcttagctgttctacttcctttagataggcaatatgatactctagaagaacctgcacatttccaatgctttctttagtgccaacaaatacaaatggaaccataccgtcttctctgggtaatttattttcattgtccccttcaattctcactcgaaccacaccagatttgtccactatttcttgaataactttgccattttttccaattacttttccaacgagattcctaggaacctgaataaaatcctccacaaattccaagaaacctctagccttttttacagcatcagcactctctccgtagattctgaatgttccagtatcttcatctagctcaatggcggtaactccaggaaccttcctagcttgctggatgttactaccatgtgttcctattgccaggcccattaaatcttctctcacaacaaattcctcatgaaaagctgctgcaagttgttttgtgcattctaaatgcttagtggcctcttcatttctggacataagcatcaacttcgtacgaatacttcgcaaatgcatgtcacttaagatgtttactctcttcacagttgcttcactggcagacagtatcattagctgtgttgtttctggatggtaaaaaattctgcatgctcctactgctttcttaaaatctttatgtgcattttcattagcacacgcctctctcaaatcctcaggaacatccactgtgcatttaaagaaggtattttttttgacagttttattttgattgacaggccgaagtcgttcaaatgtgactatttcattgtaagtagcgtcacaagcagcatattcaatgacataaaattctcctttcatcatccgaactttagccaaccaccacccacatggctcttggtcatttgctcttgaatatacctctacttcatctccttcactaatttctttttttatatcaggtggtggtggtaatctaacttcattaaatggaacctggcgttctggttgccaattattttcaaaaacaactgtaagggagtcttcatgaacatctttgataaatcccttgtagaaagccccgttagagccgcgaacctccaccgtcagctccgccatgttgcgacgcgtgggtcgacgatatcccgggatttccggacctgtaccagcctgctttttgtaaacacggttctatagtcacagaggctgt

SEQ ID NO: 125164 - DNA, 616 bp, Homo Sapiens
  misc_feature (423)..(423): n is a, c, g, or t
  misc_feature (429)..(430): n is a, c, g, or t
  misc_feature (432)..(432): n is a, c, g, or t
agccagcaactttttgtttaatgttacatatactattctcaaggcacatctgatgatatattttataacacagtaggtgtcaaagtatgtttaacatatgatttcttcaggatccctcccctttttgaattccaaatggaggaactgaaagtgcgatgtaaagactggcgatccatattctatctttggcaagcttgtacaagcactattgtaaatgtaatgtaaaagaactgtaaactaggaacttcttcagtttatgaaacaccattcaggactgctgcttcttgagtgttttcttcttttaaggtattaatcttttcttctcctggagtacgctgtagcttagaaatgtcatcgccagaagcactagttgggccgtttattgccttttctgaaggaccatgctcttcaagtcagcgagtncttttnngncgcatgttcggttgtcgttgttttcttagccaaagtttcccttgggaggtttctttgtctgctctgagactcagctctagaaatataatctgcaactgtgactggctgtctatcttctgcctgacccctgaagcgacgcctgcggctacgattgcgtcgctggggttttttttcactatcatct

SEQ ID NO: 125165 - DNA, 666 bp, Homo Sapiens
tttttttggcttttaaaaagtaaatttattaccacacataataagtccagagagtagagagattccatcatgtcatcaagacccatgataaatctttaaatattttgatttttttgaactttacactctgttactctcaatatatgggtctcatactttggccggttcctctgcagtgcctcaaactctgtcccctgagcagaaagccggggctgtatttacccaagtggctctgcgctgcacttttcataattgtctcacatttaggacaaagctgcaggtagaaacagggagaaaagagcagttgtatatgtcccttggtttcacagctcctcaaagaaacagagaattaattacatggtagatctacactatactgaatgccaagagggagccatcaccagccctctattattgctgctcctacgtcttgaaccaaagcagcatcctgttctcagacactaacttgggtttggagacctgagtgtttggagacacgatgtctaaataataaagcttggagaatgtgggcatcgatcccactacctcttgcgtgctaagcaagcgctctaccacttgagctaattccccacatcagggcagcattatttattgttagcaggtggcctggaacacaggtgatttcagggccttcagcaggaaagc

SEQ ID NO: 125166 - DNA, 1002 bp, Homo Sapiens
accaggtgcatagtgaaaaagtttatttatgacagattcgaaaactcagaagagatgacaaagaatgcacaaaagcatcacaaaactgttacctaatataaaacgcaagaactgagctacttgaagaagcacagctcagaatcatcagtgtaatcgcagtaacacacccagtgccacagggtgataaaaatggtattttaaaagaaaaaccactcagcaggacacaagaattaaagtaacaatttggtaagactcttagaaatcacagatgttgatagcatttctcatgataggggacatgtaaaacaagctgaccataataaatgattagttgggatacttttgtattttaaagaaaaaagataaaacagtgacacggtttcccttccagaccctttttgtaatgtcagcaacagtacatgatatagaacagtaagaaaataatgtctttgtagttgccaattgcttaaatctttacgaagaaaacatgatcatctttcagtcaactgactgatctgagtacatggcaccaaagaaagcccttcagaaaatagaagctaaatgacataaagtagtttggaaaatcttcaagcacctccctttattccaattatccttttccaaagtctggctttcttattatccatcactttgattacaaaacagctctcttcctgggaatttcaaaacacttcccgttacgttaagggaaaatgggtacaccagattcatgggttacaggattgctttctctagacttggcttctctttaacatggctaaatggaaataatttagcttggttaaatgaaagctacttcacttacaggataatctcaggagacatgagtggagtttttcatatggaatttcttagtaaaatgtactgtttaggatatgagagacggaattaagataatgttttccagatgattcttggcctgatcctaagaatcaacaataacagtcaatagcaaggaacattacacattcaaccctgacc

SEQ ID NO: 125167 - DNA, 589 bp, Homo Sapiens
  misc_feature (347)..(371): n is a, c, g, or t
  misc_feature (381)..(476): n is a, c, g, or t
  misc_feature (528)..(528): n is a, c, g, or t
ttttaacaattaacagtgtgatttattttaatttcaccatattacattagcatacaaataatttgtacatttaaagggtagctccactggtgtaagacagcaggctgtagttcaaggacccaagatagggagatagatttcctctatcgcagtagtgaacagagacaaagtgcttactaggcaagttcacattcacacagaatttgaccccatctattatctaatcccctccctatcccagttgtcagctttctcaatggaatgacaaggggatatagcttaaaaaaatgtcaatgagctgaaatcatctctactgattctaccaggaacctataaaggaacaaggnnnnnnnnnnnnnnnnnnnnnnnnncttcaagacnnnnnnnnnnnnnnnnnnnnnnnnnnnnnnnnnnnnnnnnnnnnnnnnnnnnnnnnnnnnnnnnnnnnnnnnnnnnnnnnnnnnnnnnnnnnnnnnaggaacaagttctttgaaatacgccagagaattaacattatcagtgggccanatgtgtggaagatgtattatcctagtctcttttcctgttctctagaagtatgttactggct

SEQ ID NO: 125168 - DNA, 725 bp, Homo Sapiens
  misc_feature (343)..(367): n is a, c, g, or t
  misc_feature (377)..(472): n is a, c, g, or t
aacaattaacagtgtgatttattttaatttcaccatattacattagcatacaagtaatttgtacatttaaagggtagctccactggtgtaagacagcaggctgtagttcaaggacccaagatagggagatagatttcctctatcgcagtagtgaacagagacaaagtgcttactaggcaagttcacattcacacagaatttgaccccatctattatctaatcccctccctatcccagttgtcagctttctcaatggaatgacaaggggatatagcttaaaaaaatgtcaatgagctgaaatcatctctactgattctaccaggaacctataaaggaacaaggnnnnnnnnnnnnnnnnnnnnnnnnncttcaagacnnnnnnnnnnnnnnnnnnnnnnnnnnnnnnnnnnnnnnnnnnnnnnnnnnnnnnnnnnnnnnnnnnnnnnnnnnnnnnnnnnnnnnnnnnnnnnnnaggaacaagttctttgaaatacgccagagaattaacattatcagtgggccaaatgtgtggaagatgtattatcctagtctcttttcctgttctctagaagtatgttactggctcttaaaagatttcacaaaaatacgctttgaggagaatcacagctttcttgattagtatctacaaggcacttaatgcacattttcagtgaggaagctgatggagagagaaagagtacatgaccattctcttatactgaacg

SEQ ID NO: 125169 - DNA, 1457 bp, Homo Sapiens
tatttttgagccctgcgttgtataacaatagttgtggtcctggataaactaatacatatgggtgccctaaaggaggggcacacagaaggcttcaaagataatggatgcagttctacttcttaaactctgggtagtaggaccacataatttgccagcccttgcttgatatcatgtacatatttatataaatattcatctctatctattacagatatttaattcaaatcatctaaaagcaaacaaaaagaggacatacttaatacacaaggttctcatgtaatatccatcctttaatttgggatcttcaggtacatatatatctccaccacataacactttagcaccctgctcctttggccactttgacaaacccaaggactcgctccaggtgtggtcggttgatgagtggacccatccttgtatcttccagaaggggatctccaattttaatcctttgggtctgtttcaccacttcctctgtaaatttatcaagaatttctttctgcacaaatactcttgtgccattacagcaaacctggccttgtgtgaggaagttggccatcagcgccccctttacagcattgttcatatcacagtctgagaagatgatgagtggagatttgcctccaagttccaaggtaacaggtttgattcctttagctgacatctccatgatcttcatgccagtgggcacacttccagtgaaggagactttggccacatcgggatgctgacacagaaactggcctgtggcagcccctccctgcaccacattgaagagcccaggaggtacaccagcctcactgtagatttcagccagtagcaatgcagaaacaggtgtaaagggagaaggtttaaagaccatggcattaccacaggctaatgctggagccgacttccaagaggcaatctgaaaggggtagttccatgctcctattcccacacataccccaagtggttctcttctggtataaccaaacgatccacctgggagctggatgtgttcaccagccatggatgcagccaagcccgcataatactccaggcactgccaggaaatgtcgatgtccaagcgggcctcaaagatggacttgccattgttgatgcactccatagtagcaatttcatcctcccgttcccttattatcctggcagcctccaaaaggattcggcaacgctccatgccagatttttgactccatattttaaaagcagcctttgcattttgaacagccaaatttacttccttttctcctgaacatgtgaaagtagctatcactcggccggttgctggctcgaaagctttctcggtaccggaggcgtccgccggctccacgcgggccccgccgcggtaattgagcggctgcgcacacgacgaaggtgccagtgctcatggcggcgacaggagaggggcgaagactgcgaagaagcggggagagcgcggcccggacgcgtag

SEQ ID NO: 125170 - DNA, 1559 bp, Homo Sapiens
  misc_feature (338)..(362): n is a, c, g, or t
ttaacagtgtgatttattttaatttcaccatattacattagcatacaaataatttgtacatttaaagggtagctccactggtgtaagacagcaggctgtagttcaaggacccaagatagggagatagatttcctctatcgcagtagtgaacagagacaaagtgcttactaggcaagttcacattcacacagaatttgaccccatctattatctaatcccctccctatcccagttgtcagctttctcaatggaatgacaaggggatatagcttaaaaaaatgtcaatgagctgaaatcatctctactgattctaccaggaacctataaaggaacaaggnnnnnnnnnnnnnnnnnnnnnnnnncttcaagactaggcaagtgaagcagtgggaatggagaaggaacaaagaaatctacaaactggttgtgatcaattagttgtaaataccactgcacttggatcagccaggaacaagttctttgaaatacgccagagaattaacattatcagtgggccaaatgtgtggaagatgtattatcctagtctcttttcctgttctctagaagtatgttactggctcttaaaagatttcacaaaaatacgctttgaggagaatcacagctttcttgattagtatctacaaggcacttaatgcacattttcagtgaggaagctgatggagagagaaagagtaacatgaaccattctcttatactgaacgccaaaattctggatgtaaaataacattcagttgtactgcctctgtaaacagggccaattcacatcattccacagcgtggccatgtcaataggtttcactgcaggttttcaaaaagcagattccacatcacccatctccacacacacagtcttcagctgtgaataatattcgattgtcacacggccgttctctctgccaaatcctgacttcttatatccaccaaagggcaactccactgggctgacgttatagttgttaatgaagcacgtcccagcctgaagctcagctaccactctatgagcccgttggatgtccctggtaaagacgccagctgctagtccaaaagtggtatcattggctctttctagaacctcagcttcagtgtcaaatgataaaatggacataacaggcccaaagatctcttccttcacacaggtcatgtcgtctctgcaattagttaatacacaaggtctcatgtaatatccatcctttaatttgggatcttcaggtacatatatatctccaccacataacactttagcaccctgctcctttgccactttgacaaacccaaggactcgctccaggtgtggtcggttgatgagtggacccatccttgtatcttccagaaggggatctccaattttaatcctttgggtctgtttcaccacttcctctgtaaatttatcaagaatttctttctgcacaaatactcttgtgccattacagcaaacctggccttgtgtgaggaagttgcgacgcgtgggtcgacgatatcccgggaattccggaccgtaccagccgcttttttgtacccacttgtttatattactatgc

SEQ ID NO: 125171 - DNA, 1734 bp, Homo Sapiens
  misc_feature (1235)..(1236): n is a, c, g, or t
actgatatattgtagtttaataaaacatagtttatacagttcattgaaaagtattttaatacaaacaccacttatacacaaaaccaaatgttgatattcttgtttttaaaaattcttgatttctctaaaacactaagatgctatctcaatagagattgcttcacattttccagtttcttgatctgtgcatgtcacatgtaaagatccatcccttttcatagtaagaacagctaatatatcacgtaatccattttcttttttatctaaatcctggagtacaacctgtgcaaacttggtttcctctttggcagagttcttcccatcagactcatagagttcaaggcacactgaagatatgcttccaggggcttgcaatgtgtgttgtcttcgagctggcaaaggagtccctgatggaaacagcactgtgaatctactggctcctgattcgtccacacccttaactaaaatatctctggctgaacactctatcataagagagtcttccaccaacaggttttctttcccaataagaattcctgcttctatagctgcaccaatagggatcacttcatcaggagggatagaattgagaagctcaacagctgggaaaagatctttaatcagttgctgtagctttgggattcgagaagaccctccacaaaggacaaccttgttgatatcatctgctgtaaatccattttgatctaagagtcctctgattgcttctatacacttattaaaaagtggagaacaaagaagttcaaatcttgctctggacacattgcaatcaaaatcttgaccttcatataatgagtcaagaaaacagttggcacttcccaaggttgacaaagaatgtttcgctacttcagcactgttcgttaatttcatcatggctcgcgcatttcctctcacatcatgtttgaaggatctttggaactcagaagctagatactgtgctaaggtttctgtgaaatgtgcaccaccgatgttatcatcagtgtttgttgaaagaaccccgatatattccactgttaacttccatgacgctgagagataaggatgttcctccaagcttaaacaccaaaatattgctttttccagtaggggagtcttgtccaaattccataagcaagaagagctgcagacggttcgtgaattaatcgcaaaacattaaatccagcagctctagctgcttctccaagagcatttttttgcttttctccaaaatcaaacgnnggaccagtaataactacatcatttgcatctgagcccaatacagaatgtgccgtttctttcattttactaaatatcagtctggcaacatcttctgggttaacaaattttgtttcttctccagtatctatttcatatcgtaatttcccatttttttcaatgactaaacatttactttccgcgatgtatttctgagcttgtggatcactggagcttctgcccaggatctgctttactttcattactgtatttgaaatatttcttattctactttgttttgctgccaatccaacaatctcttcattttctgagtaagcaacaacagctggagtaactcggtcaccggcatcatttgcaaccacaccagcccggccatccttatagacggccacacaggctgaggtgcagcccaggtgaactccgatggccgccatgaggcagcagggacggcagcggcaggaatgagggggtcccccaacagcaacagctaccggccgcccc

SEQ ID NO: 125172 - DNA, 885 bp, Homo Sapiens
tggcctccaaaggccactaagttctgatcacagtgcttggcccaagcagcatccctcccattaagttgtctgggtcagtcactatctgatttcggagaaagctgatccaacgtatcataaaaatggacagtgtgttggctcacccatacttgtggcatgggcaacataggccttttaaatataatgcctttcagacctttaaacttggaagcggccactgacgttcggtgcggcggaagccctccctgctgcattcgcttagacacagcctgatagacatctgcattgtgatgcacagtctggaggcgctgaatatactctgcctcgcctagtatggggagaagagttcgtgtctcctgtctggaccaccggatgcccgcactgctattggcactggccattgtgggttggaaaggagggctaggcagcttctggacagcaaggtgcaagtctgaaggtgtggggaagctctgtgtgctctcaggatatctccaggatcttccctctcagggataattgctgagaagccaggtccaaggaccgcatttctggcttctgcccaggatctgctttactttcattactgtatttgaaatatttcttattctactttgttttgctgccaatccaacaatctcttcattttctgagtaagcaacaacagctggagtaactcggtcaccggcatcatttgcaaccacaccagcccggccatccttatagacggccacacaggctgaggtgcagcccaggtgaactccgatggccgccatgaggcagcagggacggcagcggcaggaatgagggggtcccccaacagcaacagctaccggccgcccaacggccccatcaggcaccgcggagcttcacgttcccgccagcccc

SEQ ID NO: 125173 - DNA, 1115 bp, Homo Sapiens
  misc_feature (1038)..(1072): n is a, c, g, or t
taaaggaaatctgcctattttatttccattagaaaaatattatctatataacattttgttccactatcttctccttgatctcaaatttaaacactttaattttactcaagtaaaagcagaatcacataacggacatcaaaactaaatagttcacatcattagtttaaattaaatatgttcttgattatttctcaggaatagtaactcttctttcctacctggtatttctcttttgtttactgagtaactatgtaatgggtatctctttcctatattcagtaatacaggtgcacacaggtgtaatttaaaaaagtaactggattccttctctaatattcatgttcaactctccctattacatggtatttccataatagcttcagatattttcatcaaactcacactgtcatcaattgtgaaaattaaaaggttaattaagatgttacatcaattgtaaaaattaaaatgttaacaattccagactacacagcactgggcccacttatagtgatgccgttgtcagtggtccttggatagctactgcttcaatttcaattcggctgcctttgggtaaagcagcaacttggtaagcagctctagcaggaaaattactcttgaaatactgtttgtagatttcattgacagtattgaagtcatttatgtcagccagaagaacagttgttttcaccacgttagtgaagtcacagcctgcagctttcagaatttcacccatgtttttaagagcttgtttagcttcttctgctacccctcctgacacaagctgtccacttgaagggtccatgcctatctgtcctgaaatgtaaatggtcctgtcgactaatacagcttgactgtagggtccaatggcccctggggctttcgcggtgctgatcacccttctgatcaaggacgacatggctaagccttccctcttgcagccccttcaggagaagaagccccagcaccagccctgctggcttcttactccccggccgtaatggccgaattcccgggcatatgtccggtaccgtcgactgnnnnnnnnnnnnnnnnnnnnnnnnnnnnnnnnnnncggccgcttcctcgctcaatgagctcgctgcgctcgtccagtt

SEQ ID NO: 125174 - DNA, 1639 bp, Homo Sapiens
  misc_feature (807)..(807): n is a, c, g, or t
tttaatctttataaaaaatatttattcaatcttcaaattaaaattataaaagttcatcattttaagctgttttaagaaagcaaaagaaatatgtctatattttccaaatgaactaaagtggtattcccctcctcccaactactcagataagaatggtaacaacccttttaatctttaaacccaaattagtttcaggaacatttcaaaaaattgttttggtgacaatgtctcaacagaaagcctctccgtttatatttcaaaagtttcaaatagtgtcaataaactgactagtacaaaaaatatacactgtatttttaaaggccttttggattgcgtttagtagtaagcaggctgctggtgtatcttgggagaggtcaaacggcgctggggaaggggaaaaggagctcgctttccattcctgtgtgcatgcaacaagcagcaaaacagcaaagttactccagttagcttgtactcagctgtgctttctgccagcagaagatccatttaatgaattctgaagacttggaatatttgaacctagggaaggatttgaggttccctgctgaaaactcccattgactgggctcccattacctttcaaaaataccagtacactttccaattgtccatataattagctttccacaattttacacacccatcatctcctgaagatgctagcaccgttcctgttatattccaactcactcgccagacctgagaattatgattatcgaactgagccactatatggatttcaaactttgttggcccaccagaggaagtcagttctttcctcacaggctntaatgtaaaaattctcacatctttggtcgctattgctagaatatggaaagatcttcccaaatttggagcgaatgcaatatcatgaacaggatcagtgacctgtcatcagacgtttcagcttttgcatatttcctggtgttttcattatattcccaaatctgaaccttggccattgccgttggggctactgtcatcacttcctacggcgatccatgggggaatgagcacgagagcttgaagggttccaagaaatacaactacagcttagcttacatgagatctcatgctgcaaaagaccactggctgagattcataacatctggtgcctcatagattcgttactataccatctgcggaacaggtttgctaacataagacccatgtgcttgggagcaaacttcacatcagtaacagatgttctgctatccaccagagttgtccttttaacccagtggctctgtcctcgcagtttatcatttgattctcctactatttcttcccatacagcagctgttcggtcaaaagaacaggaagccaaaacctgcccaaattcaggatgggcccatgtcacacgccatacagatccactatgtgtcttccagctagcagtacaatgccaaatcaccactttcacttttatcccagaccttaacgctctgatcgctggagcaggttgccatccgccgcccgtggaagtcgaaagagacatcgtggatgagatccttgtggtccgccgcgatgctgcgagccacaaacatggtttccgtcgggcccgcgcctccgaagaggacagtggcggcggcagcgcagcggcgcgtggcccgtagcctag

SEQ ID NO: 125175 - DNA, 731 bp, Homo Sapiens
  misc_feature (617)..(647): n is a, c, g, or t
agaatctatcagagttgtgataaggggtaagtaaaatattacaatgaaatacctaggatagtgctttgcataccataaatgtattacttttgtcttctactagccaaaagaatgtcaacagaaatcagaacataacactaagtaagtttaacatgtacttttattaacaacttaatacaagactgtacactgtaggtgctgaaatcaacccactcctgaaaactgaaaaaccagcatttctataccactttgggctttggttataagtgccatcttctacagcaaaatcacgtcttaagaacaggaaaaacgttccacgggaatggagagattatctatgcataaacagctggggatcatttctagctttacgtgattcactacacgctctggaatgttcagttcccttttctacagtcctaccacgagacatacagcaactaagaacttggccacaggtcctgcctagacacacatcaatatgaaacaaaaaaaatttatataaataagtcaattaaacttcacaaaaactaaagaaacacaagacaaaaatccaacaagcaataaaaactgtacaatattggtcagtcttttatatctgaaaaatgtgtaacttnnnnnnnnnnnnnnnnnnnnnnnnnnnnnnngtcttttacatctgtgttagctggagtgaaaacttgaagactcagactcaagtggaaacagatgaatgtccacctcgctttcct

SEQ ID NO: 125176 - DNA, 1499 bp, Homo Sapiens
  misc_feature (84)..(192): n is a, c, g, or t
tctatataaaaatctcttcacatataaaatcctgaagaaggtgcaaggtgagacccagtgcgaggggcgtgctcagatatgcannnnnnnnnnnnnnnnnnnnnnnnnnnnnnnnnnnnnnnnnnnnnnnnnnnnnnnnnnnnnnnnnnnnnnnnnnnnnnnnnnnnnnnnnnnnnnnnnnnnnnnnnnnnngtgggtgcaagtgcacgtgtggcccacagagggtggggagaaagcttggctttttacttccatccaggagggaaggagggcggctggtcctccagcctggagggtctgcagctgggcgggacctctactcagccaggctgttgcgcatcgactccttctcctggagggcggccatggcaagacgcaggtgctccttcagctgctcgatctcccgctcagaccgtgtcttgatgtggctcagctccacatagacgtcctggtactttcccgaggtgaagcgcttgtccttctgcatcatctggagctcgtcccggaggcactgcacctccttctttaggtactggagttcgttttcttttacgcgaagcaggcacttctagctcgcaggaactccgctcgttgctgcgcccgcagccattgcccatgccctgcgaggcaatgaagccgcgcagctggtctatctcctctgacaggcggccatgcagctcctggttgtgggcgcagcagctcctggccctcctgctggcagcggcgcagcgtgtgctcgcgctcctcagcctgccgcatgagtgccccaatctccaggcacttctgcgagtactgctccgatagcacctgcagctctcgcttcagtgcctccacatctgactggtgctgcttccggaggccatccgggccctgctggagactccgtgttttgctcagctctcggctcagctcttcctgataggccttcttcatggcttcaatggctgaggccgtggctgccgtctcctcagccaggagccactccttctcctgctgcaggcgctgcagctcccgctcgtggtgccgctgcagctcctccatcacctgctggtgcgaggactccatctctgccaggctgcgctcacatgcctcctgtgagatgtagcccggggggatgtggccatcctcctgggatctcagtgcactctgaggagcctccccttggagacgccacgcctccagctgggcccgaagagcctgaacctccttctccagtgcctcgtggccgtcacttgggggccctcggcgctctccgcggctttggttgagcagggcagtgaggggcacccgcttattctcccgcaggggcagcttctccagctcctgccacttcttctcgatctcctcactaagccggttttgctggtcctcagtcaggggggcacccaggccccggcgcggcccctcaccagcaggcacctctggggtcctgctgtctgtggcctcaaaccacttgcgccgctcctcggagcgccctcgtgccgaattcgccacccagc

SEQ ID NO: 125177 - DNA, 622 bp, Homo Sapiens
  misc_feature (84)..(190): n is a, c, g, or t
tctatataaaaatctcttcacatataaaatcctgaagaaggtgcaaggtgagacccagtgcgaggggcgtgctcagatatgcannnnnnnnnnnnnnnnnnnnnnnnnnnnnnnnnnnnnnnnnnnnnnnnnnnnnnnnnnnnnnnnnnnnnnnnnnnnnnnnnnnnnnnnnnnnnnnnnnnnnnnnnnngtgggtgcaagtgcacgtgtggcccacagagggtggggagaaagcttggctttttacttccatccaggagggaaggagggcggctggtcctccagcctggagggtctgcagctgggcgggacctctactcagccaggctgttgcgcatcgactccttctcctggagggcggccatggcaagacgcaggtgctccttcagctgctcgatctcccgctcagaccgtgtcttgatgtggctcagctccacatagacgtcctggtactttcccgaggtgaagcgcttgtccttctgcatcatctggagctcgtcccggaggcagtgcacctccttctttaggtactggagttcgttttcttttacgcgaagcagcacctctagctcgcaggaactccgctcgttgctgcgcccgcagccattgcccatgccctgcg

SEQ ID NO: 125178 - DNA, 661 bp, Homo Sapiens
aacagctcatggtcacttctttatttttgatacaaatgtacatgacacgtcttgacagcccacccaccaccacacaggtagggcctggcccccagggaagaagcgggatggggagagagctggtgggtcccaccgtctgcctctccagccttcccaggctgcagccaggttcccaggcctccagagggtgggaccacagcaggtgcaggtagtgatggtgggtgctggccttgcagaggttacggggaggggactcagctccacagccaccagctgagtcggggaccccggggagccagccccaggctcaggtgctcagtcctccaccctagccagcacacattccccctccacgcaggagcaggaggagatggagggaagtggtttttgatttaagttcatagagaaggggcgagagtggggagggatcagggaggcagctggcaggaccaaaactggctacccggacagtccctggctccaggtggggaagggaagctgatccccatgctggtcccactgctctggtcccctcacccctcaaaactccagatggaccaggcctccggaacggcactgccgcccacacactcaacacgcaggcacgcgggggcactcagttaccacaaagttaaaattaaggggtggggaagaagaaaga

SEQ ID NO: 125179 - DNA, 766 bp, Homo Sapiens
  misc_feature (602)..(602): n is a, c, g, or t
tagatttttaaaaactattttaatacaagattaatagcaattttctatccaaatcagaaatgaaaaatcttaacccaaataatattcatttgacagtcacataaaattttagatttgattggtgcacacatttatcctgcatatatattatgtatatgcacagagagacctcactattatgccattgttaggggtctttttttggaagtacctcattacaaggcaatgtcaaaggttccagtaactactcaactttgaatgaagttcaaaatgtccccatgctaagctgagtctgtgccatagcaaaccatgatatagcaagtctccagaatgtgtacaaatcaatactctgtttgtataagttggtctaaaactaaacactggctaatgtctccaacaaggaggaacacattacaaatttataagttatggtttcctttactcttctgttggcaaagctaaattgtgtttttaaataaaaatcaggtctgttcgttagtaagtaaatggaaatgtgtttaaatttctgcaagttttaggtaaaacttgcatttcctaatgcgtctaggtttaatcaaatcatttgataattagctttgcanaaagaagtaataaaagaatcacatctcaggaatatgttaaggttttttcctccttagggactttagttcgtgttcagtctgtagccgaaacatgtatgtaatggcaaaagaattaaagaaggctaatgtctgcagcagggaatataattaaaatcagggttctg

SEQ ID NO: 125180 - DNA, 372 bp, Homo Sapiens
cttgatgtaaacgtgtacagctgttttattagttaaggtctaatttttactctaggtgccttttatgttcagaactctttccactggactggtatttgctcaaaaattaataatggtagagaagaaaactataaaaatggacaaggctttcttctatcagtagcgtttaccctttgtcaccagtggctttggtatttccatgtctggcattgcataaacttctctggtgtgaaaggataaatatgcctttctaaagttgtatatcaaaattgtatcaatttttattttctatgatttctacgcaacaaatgtaataaatatttttaaaatctcctttctactggttatgtaaataaatcaaataaatatatc

SEQ ID NO: 125181 - DNA, 1145 bp, Homo Sapiens
tcacgatagaaccgagataaacctttttatttatttatgcttctccattttgtttaaaacaacaacaacaaccaccttaatgtaactgacagcccttccccctcaccctgcctcgggctgggggtagttaatggggaaatggcccccagggtggggctgaccagaagagcccctcaaggagctcatggagcccaaatcccctgccctggggaggggacctgtagtgtgtgacgggagcctctcccgagcctctgcttgtaccatcaaagatgcccttggccaacaagggtcaggaagcatgggggagggatttcggcctcctctgtccctacccagcccaatctcacgagcagggctggggggtttaaaaagggtggagcgggtggggttggctcacacgaaggagtactggttgttaatggccctggggtggcccccttcctctccatcaccccctagtggtgactgctgcagctgcaccattgggggcacccccgcgtccccaccagacccagcgccctgggcctctgagcctggggctatggcctcttccaattcaaccacggggaccagctcaaccacggggaccagctcttccgggacccctccaccgcccgctttctctttctcttgcctctctttggctgctgcggctgctgctgccgccacttctggcgccctcgacgcctcttctgccccaggctgtgggggatctgtccatgaagggggttcaaggggctggggtgggtcatgggaggtggtcggttacacagtcactcgctccgaagggcatgagggtgcaggaggcatcggggtggcatccatctccctcgcacacccccgcatggctcccagcctgctcccggccctgctgtcgctgggaggatgggacatagctgacaaggacaacatcactggagcctcccgactccaaagggatggggtgcacccggaagtgctcgagcatatcgaaaatggactggaaccacaggtgctggacccggcactgaccctcctcgttcagcgacaaacgcaggtgcttggccttgcctggaagttgaaggtgaggacgtattcaccccgccttgtctcactctggcgcaccaggaagacaccgtgggagtcacagtgccggccagtccctc

SEQ ID NO: 125182 - DNA, 828 bp, Homo Sapiens
  misc_feature (617)..(628): n is a, c, g, or t
  misc_feature (660)..(768): n is a, c, g, or t
ttttcacgtttccaattgagttttattctagaacaaatggttttacaacaaagctgatcttaaatagtacatttccccgctgataacagcgccatcttccttcgacccccagaccaagggatcaaagctactgctcaattgagtttgacatcagctaccgacttttaaggaatctagaacaaagttctggagccaggccagaagtggtaaaagattcagttagccccttcctctgtgctgtgctgacagggagggagccagtgactggacaatctatgaccccaagtttgtggaacgtggggcttcagctgagggtggggtagtgtgatttcagcagtgtctccacctccctgacccctgcgctgctttgctctgttgtcacctcccgcacagtgtcgggacactgaccggaagccaaacctgtgcctggtggccacagacaagacacacggatatccgtgaaccttgctgctgtgccctcaccgaggccagcgccccacctgctggaacagccaagccggagcagttctgtctgggccacagctgctcagcctgtggactcaggtgttatcctgaagaagttacaacaaattctcaaagaataaacaatgggcttnnnnnnnnnnnngggggataaacagaaactcacagtagctgtgnnnnnnnnnnnnnnnnnnnnnnnnnnnnnnnnnnnnnnnnnnnnnnnnnnnnnnnnnnnnnnnnnnnnnnnnnnnnnnnnnnnnnnnnnnnnnnnnnnnnnnnnnnnnngaccgcgtatgcggccgcaagcttattcccttgtagtgagggttaattttagcttggcac

SEQ ID NO: 125183 - DNA, 734 bp, Homo Sapiens
ccatgaaaattcagtgctttaatgtatctaatatcaagcaggtgaacctgataacacatacaaatctccatttgtgaattaaaacatttccttcatcatttggacttatcacttaattgagaatgttctgcactccaaaatactgtggtttacattccagttgttcatgacaacagagcttaatgtccagttttaattaataaaagtcttgttggcaattagaaagattttctataggcaggaaagatgaagtgcaaatttaccatgaatgttctgaagcaagtatttcccaacttctatgccttagtgggtaaaagttttttgggtgttactggtcttttggtctgccataaatggctatgaatggtaattgcatcaacactggcagataaagttttagcgggtatgtggctaaactgtttcctgtcagaattatatttgtaaagtccttcaatcatttttttagtgatagatttagggcctatcccagtcagtttattgatttcttcagtttctgggcaataagtgtataaagatctgaactggcatcctgaatcccggaacaagattaagaagttgttggcatctgatttctccatttcctccagtatttttttcttctgaccttcatttacttttccagccaaacagcaatgagctaaagcattttgtattatgtgcttattggattttgcactgggttctttgtagagctttggtcctgtatatctgtt

SEQ ID NO: 125184 - DNA, 995 bp, Homo Sapiens
  misc_feature (759)..(759): n is a, c, g, or t
  misc_feature (814)..(814): n is a, c, g, or t
ttctggttttcttttatttagtgaaacattcctttgtaagtgaatcttcaatgaagacgtcccgagtgtgtgtgggggcggagggggccggcaggggaggaaagcgagcaaactgcgctcatccccctcccccggggcctgctcactcctcccaactggtccgggcctcctggcctccctcccgcggcctcccagccaatcattcttccaggccccggcccaagtcccaacttgctcaagagctcaacctcctcggggagaagcaggggtgggaaaattcgggtgacccagagactggggaaggcaggggctgagacccgatcgccccgcccccgagtcacggccaacccagcaccggggacgtgtaccacaactgcagcctcccaggggagcctggggtggttgcggggagggaaggaagcgtccctgtgaagctgcagggaggggtgggggtcttatttgccccccgcgctgctttaggggaggaggtgcgaaggcaaacactgacaggacggggaattttgaatgctgttcttctaaaccctaggaaggctcagggcacagcaagatagtctcagttggctgcagagaccctccactgacagtcacctcttttgggtccgaaacattcggaagagccactggacgacgaagggcacaggaggaagaagagcagcgcgggccccgggagcccaaggggccatggccgagcactgggcctgggctgcggctctgctcaggggggcgggcatgtctcangctctgcacctcgctgcactcctgcagctctcctgtatgtcgactgtcccagcancaacgtccactcctgggcccgggggctgccgcaccctcttcttgtgggggacgggctgtctgggataccttcctcaaatgtggcgtctcttccaacaaataggtcactgtccaggacaaaaaactcgatcagtctggtgaggacttgagggtgggaattttgcccagaatggttggggcgc

SEQ ID NO: 125185 - DNA, 580 bp, Homo Sapiens
  misc_feature (405)..(440): n is a, c, g, or t
tttttgttttttctctagttttattatttgtcaattttcccaacacaggaactataactcattttgaggatttttttcagtgcatttcacagcaaaaatgaacaagggaatcattaaaattgttgtacacaaaccaactctttttcttataatttacaatttgttgaaaaaattattgttttgctgttttcatcctactaacctctttaacagaacacaatttatcagagcacaaagcttaaacttcttatgatgatgcaacagacacagccacctacaatggctgataaacaacaggtatgttacacacactgattggaagaccatatcagaaaaaacagagtaaggcaccactcttgggaaattaaggtagcttgcagtaacaagtgttgagcaccataatannnnnnnnnnnnnnnnnnnnnnnnnnnnnnnnnnnnagccataattagctctattcttttaattgccagcaattcttcaacctcaacaaaatacttatttaaaaaaagatttgtacctgaatacaacttcctgatctttttttcctgataccttttcatttcgttggttctttagc

SEQ ID NO: 125186 - DNA, 595 bp, Homo Sapiens
gtttgtactctagttttattatttgtcaattttcccaacacaggaactataactcattttgaggatttttttcagtgcttttcacagcaaaaatgaacaagggaatcattaaaattgttgtacacaaaccaactctttttcttataatttacaatttgttgaaaaaattattgttttgctgttttcatcctactaacctctttaacagaacacaatttatcagagcacaaagcttaaacttcttatgatgatgcaacagacacagccacctacaatggctgataaacaacaggtatgttacacacactgattggaagaccatatcagaaaaaacagagtaaggcaccactcttgggaaattaaggtagcttgcagtaacaagtgttgagcaccataataagtaggtgctcaataaatacatgaatgaatgatgaaagccataattagctctattcttttaattgccagcaattcttcaacctcaacaaaatacttatttaaaaaaagatttgtacctgaatacaacttcctgatctttttttcctgataccttttcatttcgttgtttctttagcatttaaatttcgcgcaaaaa

SEQ ID NO: 125187 - DNA, 3523 bp, Homo Sapiens
  misc_feature (159)..(159): n is a, c, g, or t
  misc_feature (167)..(167): n is a, c, g, or t
  misc_feature (171)..(171): n is a, c, g, or t
  misc_feature (176)..(176): n is a, c, g, or t
  misc_feature (2107)..(2121): n is a, c, g, or t
gggggggaactccaaagccccttttcacttgcccgcggtttttcctttggaaaccagttattgagccctttttccctttccttaatggggccccggccccccaaaggaagggttttgaaaagtttttccaggggccgagggcggcccgccaagaatctntcttctcnttcncattntgtggtgtgccaaaatcagaaacttacagtttattgtgaataaaccactcaactttgagcagatgacattgcctcaattaactttttcgttgaagaaaaacaaagatatatggtaaattcatgaaaatactgtgtcctttctcttccaccctttgtagggcagaaaaattctgcctgacctttcccatcttcctgatgatgttaacaaacgacagccactgagggcacaggagggggctctacacaggccaagagctacaggctacagtctgagcacagaaaaccctccagctccagcatccagggccacagctggacacaagtacagaacctggcagccctgcagcccagacaatgcccagggtgtgatttagggtgcagagctgcaactcagatcctgtgccatggcagtatcacaggaaggacttgacggagaggtgaaggctccagacgccaggatatttattccctgtgccaatacagcattcacacctgacctccaggtcctgcagcaggtactctcctcattcacagttagctccccactgttccattctgggttcatttgctatactcctaatctgttctcccaatccaccccacagtctctcccttgctggggacaacacaggaagagacaaaacctgaggaaggaaaaagggaacctgcaaccagccatggacctcatgatcccatgagtcacagctatcctctgtctttaagaatgactgttttatagcttacatggtacctgggaaattgctgacttgcagctgaaatgtatgaataccaaagaatttctatcacaatattcacagatctctgtatcagctctacttggaggtcaagcaggcttgggagagtatagactgctctgcctgccctagagtggaagcattgaacaaagccacaaaaaccccagagatcacagatctaacttttcaatggcccacaggaccaggttcaggacaggtaggacaccaggcaaaccacttgttcccttgcgcttcattgtgcaaaagctggtctgttcctctggccagaccctccttagtacaggatctcggaccacaaaccaaggagtctcgtggcccttggattcccagaccctaggatggtatccctctgacagctggaaccaggcaagggggaacacacctcagcctcagagcagcctctggacactctccaggtaacatgaaaataacttgtgcaaacacagcccccatgccagaaagtccagtgccctaggaagggctatcctgaattctgaccctgatgtttgccaaaggagaatgcagcaagacagtgtcaggtttggcccaaatgtgaccttgctcagagctataccacttgaatactggcacaaaagaaagggaccaaggtaaagcaaatttatttgggaggaacaattcccttcaaaagtagatccctatctttaggagacaaaaggcaacactgtgatgaacccacaccccctagtttggggggccacaggcccaaccccattctgctgtgggctctagcctcagtagccagatccaggtaaacctcagtttcaagaataaaggtgagccacagacatgcagcaccaccagagacaacaacaccccgtggcaagaagaccatgttctggactgtctccgtactgccacggtaaggcaggaggcatgctgtgaccccttgtgctccatgcccattgcacaggccagttcaattccctaccatctgccacccatgctcttctttgggactacaactctggccaaacgtgaatatggaaagcagaggcccagggccctcttgcagtacagacattttgaggtgggtaggcagcatatgttacattctaagtaaaacagctagagggtaaaacactccaatgccaatttattttcaaaaagggctctgtgttatcctatagtttgccnnnnnnnnnnnnnnngtataattgtacaacctttgaaagttacataagttgtaatgatctaatactattaatagccattcagaaaacactttccctccctcccaacaaccatccagggggaaataaaagtcctgaaaagaggccagttcaacatggcctctaccctggtagaaacaaaaagtgaaaagagaagaaaacagaaatcaactaagaggtgttgccagtgtctctcaggagtggggccctggctgttgcctggggtcatgaaaggcagagcctgcagcatgcagtatggcagccgggagaccttgcagccacatcttcctcaccccggcacatccacatcccaacttaggtgtcatggaaatctttcagcagggttctcctccgctgctccgctatatgcatctggttctccaagtcccctctgtcatagctgtctgcacgctccactttccatgagaggttttcgatctcagcctccagctgagcctgctggtattcaaacagcttcttcctgggtccggactccatgtaatatgcatatgggtaggtgtattgcagggtgtatcgacacttggccaagagcttggcagcattctgtaggtactgccagtcgatccatgtccccagattgttcatgaccctctcctgaatcttctcgtgaatccgctggtatgtctgtgcctctagctgcaagcttttattgtggttttcccacctctcaaagtagaataagtacttcttgagggcttccctcgcctgggcttgttggctctggttcacgatgtcaggattctccttgtaacgactgcactcatagtattcactgccatgagtcttccaatctcctagacacatccagcagaagtcgtgtttacatttggagcattgcatgtgattgcagcctccattcttctcaatgcagatgttgcacttgggacagtctttagtgtgagcactaatgtagttggctgtttcagagtcgtctgcacacttcgtgagccatttccggattgtggcacagtctgtgggtgcgtgatacatctgacgacacttgaaacagaagacctcgttgcaccgattgcactgtactcggcgagctctaggctcctgtacccgaataaccatggggcagtctgcaccagggcacagctggagctggtaatgactctccacatagtccctgaagaggtagcgcctgtatttctctctcaattcttcattgggaagcaatggaaacacaaagtcctctggtgtacggagtggacagtcctgagccatgcaagagactcccacgcccacgccgtccttgacgagaactgagcagtgctgctcccagcagctgcggcaaaactggtgctgacaggccagagagagtaggttttcctttcgcacaaactgcatacacactgca

SEQ ID NO: 125188 - DNA, 444 bp, Homo Sapiens
agagacaacaacaccccgtggcaagaagaccatgttctggactgtctccgtactgccacgggcacagaagaagaagaaaaccacaggagtcccatgaaggtgcagaggtctacacaggagttcaggatagacaccttgctggcaggacatggccacagactcctctaacttattccccaaagtgcaagagcaggtcttcttcagtccatccttctaacctgtccagagcagctgtatgcttactgccagatcgctctacccttctggggcaacaggactcgagccctgaggactctgcaaagctaggcccctgatggtctactatgcttagagaccattatgcatggggctctttgggcttctaaagggctccctgggagaaactgcctatccaaatctgactactaagatgatactatgggaacagattgtgaggacagaaag

SEQ ID NO: 125189 - DNA, 1480 bp, Homo Sapiens
  misc_feature (66)..(108): n is a, c, g, or t
  misc_feature (134)..(171): n is a, c, g, or t
  misc_feature (177)..(177): n is a, c, g, or t
  misc_feature (179)..(179): n is a, c, g, or t
  misc_feature (184)..(185): n is a, c, g, or t
  misc_feature (187)..(265): n is a, c, g, or t
  misc_feature (277)..(277): n is a, c, g, or t
  misc_feature (281)..(349): n is a, c, g, or t
gtgggggaaaaaaaccaccccttctttttgtggccgcgttgttttttggagaaacgacaaagatgnnnnnnnnnnnnnnnnnnnnnnnnnnnnnnnnnnnnnnnnnnnagagaggggttaaaaaaagttttttnnnnnnnnnnnnnnnnnnnnnnnnnnnnnnnnnnnnnntttgtntntgggnntnnnnnnnnnnnnnnnnnnnnnnnnnnnnnnnnnnnnnnnnnnnnnnnnnnnnnnnnnnnnnnnnnnnnnnnnnnnnnnnttggtgttgttntttnnnnnnnnnnnnnnnnnnnnnnnnnnnnnnnnnnnnnnnnnnnnnnnnnnnnnnnnnnnnnnnnnnnnnctaatttaaaattttaatgttgcatatatgccatagtaccattatcacatgatggtgctggttgcttcttgaatactgttggttatttcatagcttggatctccaactttgtaaaagtggtcttatatattcctcataggcagggttctcctgagtattggttggtgacttctgagcccactggaacaggcgttcgtagacgtttccatcataacagccaagtgctgaatttaaacactgatcggtgaagtcaaaagcatcagttaacaggatggcatccttccggatcaggcggagcaggtccaggtaggctgttcttgccatgtccacttgggcaccagacaggaaggcgtcatggagaaagtcacccgagttagtcaagattccatgtatggcatggaggtcacagaggcgcttgagcacctgctgaatcgctggttcattttctagtttctccagagcttctgtaaaacccttcacagtgacatagtagcagtgcaccttagcagcctggaggtgtatgacagtggtctggttccaagcctcgtgctggtcagctccggattgcgtcagggtctgtaaatgctgcactgagtcctttatgagccttactgccacatgtgcccaggccgtggtgtagagctccgggcagaggaagtcggctgccctctgggctggacacctggccaggtcaggtgcggtgagatatgcgacagatggagagagagatctctgtggcgtggagccaggggacatctgagtctgcaggtagctcttcaccaggaacctggccacctgcaggtagagcactgtgttctcaccctcgtaggtacaggaggccgacaatttggtgaccagtgatggcaggccactcagctttgagtagccatgtccgccacaggccctgcggcacatctcagctccctgggtgcagaattctgacatcatggccttcatgcccgtgctcagtgcgtggagctgtgagaacatggaggggggttgggcggtgttagggggcctccaccatagggaccaaccctgtgcaccacttactgagcatctactcatgccccgacgcgtggcgacgcgtgggtcgacgatatcccgggaacatccggagcgtaccagccc

SEQ ID NO: 125190 - DNA, 696 bp, Homo Sapiens
  misc_feature (658)..(658): n is a, c, g, or t
acaaacaacagaaatttatttaccacagttcgtggggacagggaaatccaagatcaaagcacaacagatgtggtatctggtgaggactcacttcctggtttacagatggccatcttttcactgtagcctcacatgttggaagggacaagggacctctctggggtatcttttataaggatactactcccattcacgagggctccaccttcataacctaatcactttccaaaggccccacatcctaatactatcacattaaggattaggtttcaacatattaattttgagaggaggcaaacattcagtctgcagcaagctcaatgttaaggtcttctgggaccacagtcttctgtactccattcagtcattaatccaccaatttatttattcattcaggcagtcagtcaattcatcaagcattttttgaataccaaatttttctgaatgcattttttgaatgccaggcactgtgtaagaaccatgtatatacaacgagcaagagacacaatccctgccctaaaggattgtagtccagtgactttgtgtcttctaagagtgagccacctaagggcagtgttcagtaatagcaatcagttttcagttgttattgcaattgatatttcaactgtgataaaaattctgtgaattaatctttcanaagaatcacgtctccctttcatcagtcctttttgtatc

SEQ ID NO: 125191 - DNA, 1247 bp, Homo Sapiens
  misc_feature (898)..(906): n is a, c, g, or t
  misc_feature (1075)..(1083): n is a, c, g, or t
tttttttatgtgtttaagagtttattaggataggcacataacagaaagctcaaaggacaacaaagctgcaccttcctaaaggctgaccctcaaagcaccattttgttagaactcagaggagaagctcgatctctgagccttccctcctcacagtttgggaaacatgcacaggatgaaggtaaatcctgcatagaaatcttgtaattccagaattagtcaaacaaatttgaaatacacacatttaaaaatacttacattctcatttagcgttcatgaagtgattactgacatttacaattacatctgacatcacagagcaagcctttgcagggatctaattcaagcttaagccaaatctatgcaaagaacttcagctcagaggaatagtgggcaaaatctgctgaaaagaactgcttgccaccttgcagataagagcaacagcacaataaagggattccagagcttctacctaaaatagaagggcattatctacaagaacagaccaaaacacaatttatttttaaacaagcccttcagtgagtatttgtctcaggaatctagtatgaaaatagtgtctttgattagtgaatatatggagaattcggattatcatctctatttttagttgagaaaatgcacaaaccatatagatttaaaccatgggttttgcagccgaagtagagacagatgttttctgggatcatatctcagattcccaagctaaagctattgttcaaggtgatggaaatatgtagggggcattaaaccattttgcagctgctagaaagctgtgttttcctgttttcctgatttagacaatggagaagctaagaagagaaataataggaaaggctttcctatgttagttttaaaaagactgtgttatttttaattcaannnnnnnnngtcaaatctcatctctgttctcctagttttcacagaaatatttacaggaataaaggttgaaacaaaagtacctaatgatcatctccatccatcgaaagattgctcagggataagacactcaaacaagggcttgtgatgaggatggaaaagacaaagcaacttgaagagnnnnnnnnnttcttttaaactcagttcatcctgcaaaatggacataacacatgcatataaaggtttgactttttaattccacttttttgcctgatcgcagggaagatggcatgtggctggccccccggccgtaatggccgaattcccgggcatatgtccggtaccgtcgactg

SEQ ID NO: 125192 - DNA, 1621 bp, Homo Sapiens
acagttgcctgtttattatttttcaaaacaaaacaataacaaaacgacattcaaaattcccctgtggtggacaactgagttgatgtggctgatccaggctgtctcccaggttgtctcagggagcatcagttgtactagggggtgggctgttgccctggcacggctggatgaacacttgcaccagggatggccatcagaagagctgcaggccagttttgagcccatgcagctgcccctggctccagagaaggccctcgaagttgctgctgctgctgttgctgcagttgccactgccgacaccacagctcaggcccaaggtgtcagtcttgcatgttgagggttccagccgctgctctagcacaggctggtccaaaagatacatggtgtcataattctccagcatgagctctgctgggtcctcggtctgacctggcattcggcctaggggaaatgtgtcccatcgcacgtcttctgagctaacctgccatgcagagccctgcaaagctcctcttttctgggccagaagcctagcattctcggcagtgggggactcttgccctgtagagaaaggccccacctccattctgtcttcctcttcatcatcttcatcatcttcatcctcctcttcctcctcttggtcatcattttcttcctcctcctctacctggtctggcaagacctctttctcctccttctcctcttccttgacatcattaacactgccctgctcctcctgttgctgggcctttgcttcagacccgaagctggagctggctggcttgacgctccaatacaggctgtctagtgtatatggagacttcccaatgggggaggcctcagagccctcctgcaccaggctgttttctccactctgggtataaatggaacagatgcgcagcagcttctcctgctcctcgtctggcaggccctgccccatggctttgaagatgatccgaaggagttgggggctggcccagcaaggtgagcccaagcaggactcaaccatccggggccagtcaagggaggcggagcagttgaacagcctccagccccttcttgcttcccactggcctgcagaaaatcggcgagcattccgtccagtcttggtgttggccacgatcagttcaacggtccatctgaggatgtaggtaggccggatcccgctgatccccaaggctggcagttcagagagcatcctctccaatagggcctgcgtgaagttctgggagtgcaggcccctgagcaggggctgccagaactgagagaacggctttggcaccaggacgtcattcaagtccacgttttctggtttgtaagggacactgtgtgactttgggtcagtaccttcccctctctggacctcagtctgaccatcttcatattctatctgcaaagctgccaactgttcaaatgtggggacaaggaagccatcatccagaaaagcatccagcacagcctccctgttctcgcatgtaacgcccttgagctctgccaggacacattctacacgtggggacgggttattccacgccttaatggccttaggtaaatacctaaatttctccagcaccgtaaactgctcctcttcgtatgataccagcagttctcgggctctttcata

SEQ ID NO: 125193 - DNA, 1419 bp, Homo Sapiens
cgtccagtcttggtgttggccacgatcagttcaacggtccatctgaggatgtaggtaggccgggatccccgctgatcccccagtgctggcagttcagagagcatcctctcctataggggcctgcgtgaagttctgggagtgcaggcccctgagcaggggctgccagaactgagagaacggctttggcaccaggacgtcattcaagtccacgttttcttcatattctatctgcaaagctgccaactgttcaaatgtggggacaaggaagccatcatccagaaaagcatccagcacagcctccctgttctcgcatgtaacgcccttgagctctgccaggacacattctacacgtggggacgggttattccacgccttaatggccttaggtaaatacctaaatttctccagcaccgtaaactgctcctcttcgtatgataccagcagttctcgggctctttcatatagctctttatgactcagggcctttttgcaatgagaatccacctcttcgctgcctttgctgtctccatcggcctttacatctgactccgtacttttcccatcatcctgaggctctggtttctgttctgtgatgtcatcaacaacaatgttcttatcttcctcttgatcctcttcctctatcccttccctgaactcctccaactcccaggtctctctcaggctgttctccagttggcggcaccaataggtcttctggagccaatccaggacaaagtagcagcctctgcggcagtcatttatatggggcattttcttgtgggtcaactcatggcgaaggtcaacaatccaatccggaatatttacctcttgagccagacacttgagggggaccttggcaaactttgtcttcctctctgagataagattcacaaacctgaccaatgccatgccatagagcagtctaagttcatcagtgcccaagccaccagttacatccaagagcttacagcgtatcaggtcagcagtagaagccactgccagagggagttcgttgcctgacctgctcctccacaccgtgatgcggttaagcgcgtaccgctgcaacttatggtcgtcacagaacagataaaccgtcacctggtcccactcggccctgctgagccaggcgaccacgatgccgtgggccgagagtggcaacgaccctttccctttaacgcactttccgtaccacgcactccacacgagatccatcccctgggaacctagacctggcccggccccggattcccacgacatactgagctcaacaacaggctctgtgccgcgccgctccgcacagccttcagctcagcgtgctaccctcactgccgaaccgccaccccacgcgtccgcccacgcagtccgcccacgcgtccgcgacgcgtggtcgacgatatcccgggattccggaccgtacca

SEQ ID NO: 125194 - DNA, 876 bp, Homo Sapiens
tgagccaccgcacccggcctcttttacttcgcttaaatgtccaattttagtagtaaaatcccggaaaatgtttttaggagtatgtttaactgaaaagctcatattttctttcatttttgggcaattcttaaggtaagcaaactaatgttgcatgataaagcccccatcaagtatctcatacttaagcaaagacctcaaatcattgtggctttattgcagctttccttcaaaatatcatctgtgactgaggaaatccctatcttcctatcagactaatgaaaccacaggacagcaattagacttttaagtattggggggtttagagctctagatattcgatatgcagactactcatgtttgtttgttttaataaagactggtccaaaggctcattttcacacaagctacagtttttcagttccaggaccaggtaaagatggtcagctccgtgatccataaaatccaagggtgacgactcaggattaggaccatttcttggtgacattgagatggtcgagctggtccgcaatgaatctatgcggggggaacttggaagtggcggccgcctttatggcctcgaaggcctccctcctgcgcaccgcggcgtggccgcgctcctgctcccgggtcatgtagggcatgctcagccagtaatggttctccgcctcgatctccaggcggcggatcatgttctgcttggcgcgcaacgacacgaaccgcggccgccggtgcttcccgatccactgacggccgggaatgcggccgcgccagaggagcgcagtcaggaacatggtgcctgccgcgctgctcaagactctgcgtctcccccggccgtaatggccgaattcccgggcatatgtccggtaccgtcgactg

SEQ ID NO: 125195 - DNA, 711 bp, Homo Sapiens
ccttctaatattactgttattgctccagtaaagagctgtaatatattttacctggactgataccaggaatggtggtgttgcttccaatctgttgctgctagattaatctttgcaaagcacaggcttaatttcattgctgctcaactaaaaccactggtggctttccattgcctacaaaataaagtcaacctccccatcagacattcaaggctttcaatgatccatggctgccagctctctccaggctcatatcccactccactcctctgatgtttcctacactacactacactatactacactacagccaggtagaatgactgttcacccaacaccactcaggttgtcttctcaacttggaatactcttgcaccttcaaagctcatttcaaatgccccttcatttgtgaagccttctccaaatttccaagtcagaatgtctcttccttgtgctaccacaaccctttaactgagcctccattagtgcactgagaccattctgttcagtgtctgggtgaagcttcctggtgaaaaatatgttacctatttctttctgaaaagttggattcagggatattatcacaggacctaaggtaatagttctagccaacctccctgtccactgccaggccgactacaacccttctgttgctggcgagctggtccgcccactagttctgcttcactctatttatctctttgatgtacatct

SEQ ID NO: 125196 - DNA, 1038 bp, Homo Sapiens
aaaacagcgtcatactaaagtttatttttctttacacaattatagaattcaggcagacaaggagacatatatggagttttccatttttaatatttggttaaacaaaatacatcttttgtaaacaaacgcagcacaaggccaacaacaaaaaggaataaaagcaagaaaaacaaaaagcctagggttgcccgttattgggcatcagggtcaggcctgttcacttccttaaaggaagtggggctttttgcccttgggcatcagcatgggtccctgttcctaagcaccagaattggatatgaacagagaaaccagccctgaaatgtttaagcgtctttgcatatcccattggctcatggactccaagtgcatggggactctttcaagtgccatttgcacaggcccaagtggatttgtggagaggagtttcctcctctacccaagaaatggcttactatctgacagtgccagtggccccaaggtcctgcttgtgacaatcagcaaggttggctgtaatgtctggctggtggtggttggaatgtcattgtgcagggcaggaaaagagctccctgtggtgccaagcaggtctggtgtagaaaatggtgcaaaagagactgcggccggttgctgagaagatataacgcagtagccgcttggtggcctgttactcagcattaaaaaaacggcctttgttggattgaagatacatgtgcagaaaaagtgctggtgtcaacatgcactccagtcacaggggggagaaagccagcttcacccgttaagttgctcaagatcacatgcaagcccaggctggtttgctgctggagagaatctggcagtggacactctcagactgcacgacaatgtctgaggcagcagcaccctgctgcactgcctgagcacaatcacttggaacaccaatgagaactatttctcgtgcgatctggctcaggcaatcctaaggatcgataatcgtacagtcaacgtctggtaatgtacgcacatcaacaaacagcgacatatgagcgggtgcagagacatcat

SEQ ID NO: 125197 - DNA, 1024 bp, Homo Sapiens
  misc_feature (604)..(605): n is a, c, g, or t
  misc_feature (840)..(840): n is a, c, g, or t
  misc_feature (977)..(977): n is a, c, g, or t
  misc_feature (990)..(990): n is a, c, g, or t
tggagttttccatttttaatatttggttaaacaaaatacatcttttgtaaacaaacgcagcacaaggccaacaacaaaaaggaataaaagcaagaaaaacaaaaagcctagggttgcccgttattgggcatcagggtcaggcctgttcacttccttaaaggaagtggggctttttgcccttgggcatcagcatgggtccctgttcctaagcaccagaattggatatgaacagagaaaccagccctgaaatgtttaagcgtctttgcatatcccattggctcatggactccaagtgcatggggactctttcaagtgccatttgcacaggcccaagtggatttgtggagaggagtttcctcctctacccaagaaatggcttactatctgacagtgccagtggccccaaggtcctgcttgtgacaatcagcaaggttggctgtaatgtctggctggtggtggttggaatgtcattgtgcagggcaggaaaagagctccctgtgggtgccaagcaggtctggtgtagaaaatggtgcagaagagactgcggccagttgctgagaagatataacgcagtagccgcttggtggcctgttactcagcattnnaaaaaaacggccttgttggattgaagatacatgtgcagaaaaagtgctggtgtcaacatgcactccagtcacaggggggagaaagcccagcttcaccccgttaagcttgctcaggatcaacatgcaagccccaggctggctttgctgctggagagaagtctggccagtgggacagctctcagacctgccacgaccattgatctgagggcagcagtcaccctgccctgcactgccntgagcacacatcactttggaacagcatatggagaactattctctctttgtttccaagtacagaaaatggctacacactgaaaagtaggcggtgactccatatacaaagctctgcgatctggcccaggcaatcccaangatcgataatccnacagcaacgttccgttgatgtacgtcaatcacaa

SEQ ID NO: 125198 - DNA, 1163 bp, Homo Sapiens
  misc_feature (63)..(63): n is a, c, g, or t
gcagaaaaagtgctggtgtcaacatgcactccagtcacaggggggagaaagcccagcttcacnccgttaagcttgctcaggatcaacatgcaagccccaggctggctttgctgctggagagaagtctggccagtgggacagctctcagacctgccacgaccattgatctgagggccagcaggtcacccctgcctgccacctgccttgaggcaaccacatccactttggagacacgcatatggtatgatacttatttctcctcttttgttttccaaagttacaagagaaaagtggcctacaactatctgaagaggtaggggcgggttgaacttccattgatacagagaggaaacgacatgaagatgaccagcccaggtcctattccatccatacagcacagaaccacccaacctgagcttggcaactacagtggcagcctccgagcctagagtgtctactgaattgtggctgcccctactccaagaagcctgtcttcacaatactttcctcacccaacgctgccccaaattagtggaatttgatgtcaaaagcagacttttttttcctgattttgccagagtgagtgaactgggataactgctctttggcttctcttttgtcccagagcctcctaaatcaatgctgcgaaatggtagggacaacactggagtgaagacaaccaagccaccccatggctgtcccaggttggctttagccacatcctgttcagtatcctcctcacttcatactagaatattagttaatttttcattataaaactctgccgggtgcggtggctcacgcctgtaatcccagcactttgggagccaccgcccccgaccctctctcacttctcgaatctctttccttgttccaccttctaggtgtccaagacagtggatggtctctgaggttcaaaaccaagctgaccgggtaagtatttcacagcaaagcatccaatgggctgctgcggggatgacttgtatagactacacgcttcctcgctacaggaagctgctgtccctaatgcacaaagaaacacgacacgatcaaagatgatagaactagtccgtacgcgtggtcgacgatatcccgggattccggaccgtaccagcctgcttggtatacacgtgttttgtcactatgctctttatttttcgctt

SEQ ID NO: 125199 - DNA, 915 bp, Homo Sapiens
  misc_feature (219)..(244): n is a, c, g, or t
  misc_feature (627)..(655): n is a, c, g, or t
ttagcagttaggtgacaagcaattttattttgcaaaacaatcactatacagcaacaaatacatttgcaaatttgattgaaaaacatgaactaactacaaccagccattgaagaaatgcctttctatggtaacaggctctagaattatcagaagaaagaaaccccccacagatttgtaacagtgtgttggaacctcggaatcccagcatacagagtatannnnnnnnnnnnnnnnnnnnnnnnnngctaaagttgaagtagatttttatgattgacattttattttctgagtttgaaaataagctttttcctgcagagagtcttggccttcacctacacacccaagctaaaaatcctaggtgtaaaaaaactcaaaacatcaatgcttattttagcacgtcaatctttgaaggaatgcttaaaatttccttaccaagccatgaatctactttatctctagtatttagaccatgagtagtttattttccttattgtggcttgaaaaatagaagaaaactgtaattgcagctatgtcaaaatcaaccacattcaggttatttccttaataaaatactgatggaatgttatatattggctgattattccacgcttgctgtattactgtagnnnnnnnnnnnnnnnnnnnnnnnnnnnnngagaaggtcactacaatcagtacattcttccatttaatggcattctctcttcagccttctccagccgtacctagctggtgttacacaggtgtcatacttgtaggtgggatgtcagcccatctacaagtatgacgcctgttaccatagaaaggcatttcttcaatggctggttgtagttagttcatgtttttcaatcaaatttgcaaatgtatttgttgctgtatagtgattgttttgcacaatacaattgcttgtcacct

SEQ ID NO: 125200 - DNA, 719 bp, Homo Sapiens
  misc_feature (628)..(628): n is a, c, g, or t
  misc_feature (653)..(654): n is a, c, g, or t
  misc_feature (685)..(685): n is a, c, g, or t
ggattacacacatttttattgagttttgtctgatgatagggaaacatttacaaaggagtaaatgttacgtaacttctcacggtatgtaagttagaagctgggcagcaaacatggttaccaagagtcgtctagttcttcatgagaaaagcctgttaaactaaattagggaaagataaaaattaaaatgtaaaaatttgtgtcaagtttatttgctatcttcataatgttctcaattccttccctggggggtttctgccctagtttacaatttatatcaggatcaatttcacaagtcaaaaaactcaattgtttttatagtcactaattttgactgattcaataacttcttacaggcaatctcaaacatctgtttctcttggctgacaaaataagcaattaacagtttgtgtatgaaagtgtgtagggaaaacaggtacctttcgactttgtcactagattgcagcgtgtccactagggagccttcttggaccatcttttttgagctctgattacatggagagggtggaaaattttgaaattagatatgcattaatttcatgaaatactttaagaaccatttttgaaatatatatgtaatttacaagtctaaaaaagaggtgacttttanacatgaaatttagcaagcacatcannaataactatagggtatgcatttaacacccantatacttcagacttacataaaatattaatgtcag

SEQ ID NO: 125201 - DNA, 1118 bp, Homo Sapiens
  misc_feature (123)..(131): n is a, c, g, or t
ttttgaggttaaaagccagttacttttattataatgaatgagaaatactatgactggagaagaggtttcacgtgactagattattcttggttcacacactatggtatcaaaattaattatggnnnnnnnnncccacattggattacacacatttttattgagttttgtctgatgatagggaaacatttacaaaggagtaaatgttacgtaacttctcacggtatgtaagttagaagctgggcagcaaacatggttaccaagagtcgtctagttcttcatgagaaaagcctgttaaactttcgactttgtcactagattgcagcgtgtccactagggagccttcttggaccatcttttttgagctcttatctgccgactcctggtcttgctcctgctggatgattttcatgtatttctctaaaggattttcactgtgagcagatttgtcttttatttcttgattactcatttctaattcattttccatttctaattccttttttattttaatcttcagtgattcttcaatcatcttcctttcctgatacagtttttctagttctcttcgttccctttctaaaacttcttgtaggttactctgccttctttcttctctctgccttcgttctttcacttgctgttcccgtattttttcttcttccttttgttcttcaatttgtttctgatctacacttgggtgctgatatgagaggggcacagcagctgcagcagcgtccacatgagacatatccccggcaggagaaagcccgcccatttccaactgccttggcatgttccctgcagattcaaaagatgattcaaactcctcattatccttaaaagctagcttgtccacatctgaaaattcacttttgtcttgaagttcagtttgtcttcgataaagacccactttctgctccggagggctggagacaggagggatggagaggctgtgcctagactcagtgggtgatggtaggggcattctgtcaggacaaggactgggggaagcaatgtgtgatctgcccagaccttccagatacatttcactttcgaggcttctttttgcttttggaagggggtgtgaagagaggcgtctgaggttacccccaagaagg

SEQ ID NO: 125202 - DNA, 710 bp, Homo Sapiens
  misc_feature (473)..(473): n is a, c, g, or t
acacagagtttgattttattgatatttaaatatattaaatatttcactgaaatacatggttcaccatcctcccccacccccacagtggttacattataaaaccaaagcccacggcctcccacctcctgactcctctaccaactgggtgaggaaagggacaatggtagcccaggggaagggcatggctggcactgtggtacggggatccagggtgtggacaggccctcccacctggcaagaagcagagacaagccacccaaggctgaggcaccaacaaattcaggccagagtcaaggaggttgcagggaaaggggtaaaaggaaggcaaagacaggaagggaatctagagttcaacctcctaacccttctgccagccctcaaggcttcacaagggactggggagctagaaacatgctagactcaggctgaaggctggggaaagccaagtttaaggttcctcttccccaccccgntagtaccagtatccaggtcctcagagggattccatgctaccccagccccaaagcataccatgtcccaggacactatctggggaagccaggaaattcctcagcctctgtccatcaaaccccagacagttcaagtgctggcatggagcactggggcttaagcaagcgcttgggtctctgccacagacagggagagtcatgctgcacacatggcccccgaacggcacttagggatttggc

SEQ ID NO: 125203 - DNA, 1241 bp, Homo Sapiens
  misc_feature (642)..(642): n is a, c, g, or t
ttttttttacaaagagtttgattttattgatatttaaatatattaaatatttcactgaaatacatggttcaccatcctcccccacccccacagtggttacattataaaaccaaagcccacggcctcccacctcctgactcctctaccaactgggtgaggaaagggacaatggtagcccaggggaagggcatggctggcactgtggtacggggatccagggtgtggacaggccctcccacctggcaagaagcagagacaagccacccaaggctgaggtcttcccactctgatctacttataccctcacccctaccccatggcaccaagtagtctcttcctatcccttcctatccagggatatggctggggacaggggagtagattttctgtctggaaaacaagtcttttcccctccttctgccatgactaatgaagtacctgatggcccatttggttgatgcatgaagatgcccaagggaggcattacccagaaaccaggcctccacagggagctggtgtcagaaggggcatgaggaggggcaagtgcactgcctgccccttccactcccaaacctagcaactctggaaacccttctcctctgcctctctagtcatttccaagacaaagtgatcttcaagcanaattcaggctagtgcctttggcttaaataggtacagacagagaaactgaggcaccacaaattcagggcagagtcaaggaggttgcagggaaaggggtaaagggaaggcaagacaggaagggaatctagagttcaacctcctaacccttctgccagccctcaaggcttcacaagggactggggagctagaaacatgctagactcaggctgaaggctggggaaagccaagtttaaggttcctcttccccaccccgtagtaccagtatccaggtcctcagagggattccatgctaccccagccccaaagcataccatgtcccaggacactatctggggaagccaggaaattcctcagcctctgtccatcaaaccccagacagttcaagtgctggcatggagcactggggcttaagcaagcgcttgggtccctgccacagacagggagagtcatgctgcacacatggcccccgaacggcacttagggatttggcacaaaaaggactcctctccctccttttgctacccgacgcgtggtcgacgatatcccgggaaattccggaccggtaccagcctgctttttttaacactgtctatcattcc

SEQ ID NO: 125204 - DNA, 575 bp, Homo Sapiens
ctaagaacaaggacgatttgtattcttggagaagcacatactgaagaagaaaatccagtgaaaccaaacgaatatgtacagtatcatctagcacatgtccccgggagcagctgggtctgggctgggcacagcttcaggtggggagttttggttctattcggagagaagactcgtagaggctttcttcatccattacaaaagattggtccagtaaatattgcgttacctttgcttggtgctctattttgtaggcagtttgttgaaactggcgaatctctcggataatatgggatattttttcagagcttctctgagattcttaaatctgccctcagatgacacaagcttttggagcttatcaatcaaagctttagtctgcttagagactttgagccacgtctttttgagccggaagattgcactgcggttcatggacgaggtgatctccagtacggcattgtagttgtggaggcagcggcatatgtcagctacggccacccacttctcgatggcgctcaccctggcgttgatgtcctcgttgcggatgatttctgaagcaatcaagttactgatgt

SEQ ID NO: 125205 - DNA, 684 bp, Homo Sapiens
aatttaaaccagtgccatgttaggcaaggtaaaagagtattaactcagtactgcccttgaggggaccactgtctagagacataggctaaggatgcctggaaaatgaaatcacagctgtgcttcttgcaaattactctcttgagtacgtaattctgtctcctcatctaactggggcagcttccaaggcagaagagacaaggcctctccaatggaatgagtatttcctccaggtctcctccatctccacaactcaggtcagggtttcaggactaagcaggtgtttgggctgtgctcagggccaataagtagtctcagctgaacacttgccaagaagccaggtcagttctaacacccctctgcaggaatgaccagttcaatgaaaaaaatcaagcatgctgcaatccatctaatcacaaccaggcttcgtctccaccctgactcccccatgcttggcccttcccaacccaagtgctaattgggaaccactgcacacaactgctaaccacacatgggtgggaaggtgctgagagcaacagagggctggactgtgcatcgtggtgggggttgagcgccagaagccactgcaacagcactttcctctgtggatcctgtacagggttcatgtggccttggcaagcagccattagatctgggcaagttgcccaccacgtcggcccttccccc

SEQ ID NO: 125206 - DNA, 871 bp, Homo Sapiens
catccttgaagtcctcattgatggctggtcggctggctctggtcttgctccattcccgaacttggcgcgggctcgggctatttcctgagcactgctggagcagaagggctggggtgcacggttgaagagttgtggatgacggggtgaccgctgccgactggctccgggagctggaggaggactgctccctggaggcccactgctccccagtaagctggccaggccaggtccagtcagggcccccagcccacccagtcctccgaggccggctggtccagatgagctgcatgagctggctgtggctcatgtttcccagcaggctctgcaggccaccctcaccgcctagcgcagagagttcgtggccgctgcttccgctggcccccagtgccccaggcatcggggggttgttcagatactcgttgactttccggcaatgctcctcatcctggtctgtcttgggttcctgcatccagaagaaaagccgcttggaccctgccttgaacttcagcacgtagaccctcccgctggggcactgcggcacccgcttgaactcacagtcgtcagggaagatgatcaagtcgtcttccacgttcccggacgtcctgtccttccagcagaagtgaataagcgagtcgtccgtctgctgaatgtacaccagccctttccgcttatccggagtcacggtggtccccttcagggacatctttcccgcccgaaactccaccaagtacttgttggaggcgccccgagagcctggcaccaggcttggaaagagcgcgcctgaggtcgtcatcctgcctcgcgcccacactcgttcgagaggcgcccctcgtgccgaattcaacacccggcctcgtacctagccgtatgc

SEQ ID NO: 125207 - DNA, 2279 bp, Homo Sapiens
  misc_feature (222)..(222): n is a, c, g, or t
  misc_feature (286)..(286): n is a, c, g, or t
  misc_feature (672)..(682): n is a, c, g, or t
  misc_feature (840)..(840): n is a, c, g, or t
  misc_feature (844)..(959): n is a, c, g, or t
cacatatatagatagatacgtgtgtccagcgtgcgcgaatagagacacacggtgcgcgacatatgatgttgtcctgcgttgacaggcggcaggtggtgtagtctacggtgcgacgttacgaccggtagtggttatattcgtcagtcaccagacacacgattacgcactgacgaggtgaggaggagttactctagcccaacgtgctctcgggatattaataanctgtgggtgggcgacgacaccggtgtatcatagaacgttctgtctttgcgcgcatggcaggggncgttgtgcgcccgctttcgatgcataatgtattattatttcgcccgtcattggggcggtcgcagtttcgtgttactatcgcatctcccgctcctccagcgggattctctaaaggagtaggcttccagtatatggcatcttcggggattgtggcggcgccacctgttctggccgggcgagggctcgtctgaggctatgggtcccccccacaatttttgctgcaaagagagtgcgctgagacgcctgcggctgtaaatttgttgttttggaagagggaggtcgccgaagcaccccgctgtgtgagagctcccgcgtatatgtcctcgcgaaaacctcgtctttgggagttgtgtcttgaacccggtggggctttgcctcccgggcggnnnnnnnnnnngcgaggaaattccaagccggctgcgtgaagggccccgggattaccctggggaaacccgaggggaccatgtgttactttgcgcgtggggggcccccccgtgccaagggaaaggttcttagaaaatttcttggggggccggagcggggctcaccaaggtnttannnnnnnnnnnnnnnnnnnnnnnnnnnnnnnnnnnnnnnnnnnnnnnnnnnnnnnnnnnnnnnnnnnnnnnnnnnnnnnnnnnnnnnnnnnnnnnnnnnnnnnnnnnnnnnnnnnngcaggtaaaagaaaagactttattaataatcagtgggtgggaggtgagggtgtgcaacgcactgcaagcgcccagttcctcggaggacggcgcgtggctcagtccaggctcatgtcctcctcttcgtccttcttgtccttcgtgtcgccctctttctgctcgggcttggcgttgttctgcatggctttggcaaacgcttccacatcgcccttgttggcggcctccacagcctctgcaggcagaccgaactggcacatgagggggcccagctgccccgaggccaaggctgcgctgaacatgcccagggcctgctggaactggggcgaggtcagggtattctggatctcatccgcggtctgcggcagcgactccccagatggcaagtagggaagcaggcgctcctggacatccgcgttggcgaggatgggagccattatctccggcgtcagcacactggccaggtccacttgctggccgcctgctggcccggctggtacgttcatcgtggccaggatgctctggaggtcgctcagctggatgggctgggtcgggctggctgctgtgctggctccattcccggaactgggcgcggggctcgggctagttgctgaggcagctgctggagcaaaaggggctggggtggcacgggtggaagaggtggtggatgacggggtgacccgctgccgactggctccgggagctggaggaggagctgtccctggaggcccaactgctcacacaggaacgctggccagggccagggtcccagtcaggaccacaagacacaacacaggtctaccgaaagcccggatggtcccgaataagctgaatagagctagactagtgactcatgtttcacagcgagagcatcatgaaggcaacacataacacgatataccagaaagttcagaagacaagaaatacaaaagggccccccagtagaccccaaggcaaactaaggggtagatgcaagcacacaaccgtgagcaattaactaggaaggacccacaaaccaggaacagcataaaagaccaacagatacccaaagaaaaaggccatgtagccaaccatgaacacagagcagatagaaatccgagagggaaagacatacacccgagaacacacaaccgacgaaagaagaacaagatacacacagcacgagaagcaggtgtccaaagagagtatacaaaggaggtgggaatgtacccatggttcaggagagaagaccagagaaagtcgaaacaaacatgtgtggcaaccatacggagaggacagatagagccatagcggagtagcagcctgagatagaaaaacaaagag

SEQ ID NO: 125208 - DNA, 861 bp, Homo Sapiens
  misc_feature (221)..(231): n is a, c, g, or t
  misc_feature (331)..(413): n is a, c, g, or t
  misc_feature (416)..(607): n is a, c, g, or t
cacgcaaaaccccggggggggttttcccccattttggtttttaaggtggggccaataagggaaatttttttgccccccgctttttaccgggggaaaaatttttacccaggggggcaaaggttgggaacccccggggaattcaaggttaccaaaccgtttggggagggttccaaggggggagaaagggttagaggattccccccctttttccataggggccnnnnnnnnnnntaatttaaatttaaggcccctggggcccccttgggtaaatcccgaaaagccccccggaccccttttggattttttaaaaaccttggttttcccccggggnnnnnnnnnnnnnnnnnnnnnnnnnnnnnnnnnnnnnnnnnnnnnnnnnnnnnnnnnnnnnnnnnnnnnnnnnnnnnnnnnnnggnnnnnnnnnnnnnnnnnnnnnnnnnnnnnnnnnnnnnnnnnnnnnnnnnnnnnnnnnnnnnnnnnnnnnnnnnnnnnnnnnnnnnnnnnnnnnnnnnnnnnnnnnnnnnnnnnnnnnnnnnnnnnnnnnnnnnnnnnnnnnnnnnnnnnnnnnnnnnnnnnnnnnnnnnnnnnnnnnnnnnnnnnnnnnnnnggcaggtaaaagaaaagactttattaataatcagtgggtgggaggtgagggtgtgcaacgcactgcaagcgcccagttcctcggaggacggcgcgtggctcagtccaggctcatgtcctcctcttcgtccttcttgtccttcgtgtcgccctctttctgctcgggcttggcgttgttctgcatggctttggcaaacgcttccacatcgcccttctgtcgtcttctcgcagccgtatagtagtagtaggcgccgc

SEQ ID NO: 125209 - DNA, 1251 bp, Homo Sapiens
  misc_feature (628)..(655): n is a, c, g, or t
ggaggggggggttgcaaacggccccctgccaaaggcgcgcccaagtttcccttgggaaggaacgggggcggtggctccaagttccagggccccatgtcctccctttttggtcccttcttggtccttgcgggtcggcctcttttctgcttggggctgggcgttgttctgcatggctttggcaaacggcttccacatcgcccttgtgggcggcctccacagcctctgcaggcagaccgaactggcacatgagggggcccagctgccccgaggccaaggctgcgctgaacatgcccagggcctgctggaactggggcgaggtcagggtattctggatctcatccgcggtctgcggcagcgactccccagatggcaagtagggaagcaggcgctcctggacatccgcgttggcgaggatgggagccattatctccggcgtcagcacactggccaggtccacttgctggccgcctgctggcccggctggtacgttcatcgtggccaggatgctctggaggtcgctcagctggatgggctgggtcgggctggctgctgtgctggctccattcccggaactgggcgcggggctcgggctagttgctgaggcagctgctggagcagaaggggctgnnnnnnnnnnnnnnnnnnnnnnnnnnnntgacggggtgaccgctgccgactggctccgggagctggaggaggagctgctccctggaggcccactgctccccagtaagctggccaggccaggtccagtcagggcccccagcccacccagtcctccgaggccggctggtccgatgagctgcatgagctggctgtggctcatgtttcccagcaggctctgcaggccaccctcaccgcctagcgcagagagttcgtggccgctgcttccgctggcccccagtgccccaggcatcggggggttgttcagatactcgttgactttccggcaatgctcctcatcctggtctgtcttgggttcgtcttccacgttcccggacgtcctgtccttccagcagaagtgaataagcgagtcgtccgtctgctgaatgtacaccagccctttccgcttatccggagtcacggtggtccccttcagggacatctttcccgcccgaaactccaccaagtacttgttggaggcgccccgagagcctggcaccaggcttggaaagagcgcgcctgaggtcgtcatcctgcctcgcgcccacactcgttcgagaggcgccgtccgggctcgctcttcctccc

SEQ ID NO: 125210 - DNA, 1094 bp, Homo Sapiens
gctgttgtgccccaaaggtatgtgggaaaacccccaatattttttgcgggggggttcaaagccccccactgtgcgcccgaggtccacccctttttcttggccccgccctggtctgggccgcgggctcggttagcgttaccatccgtgggcccaaggtatgccttctgggaggttccgttccaagtcttggaatgggtctggggttccgggtctgggcctggctgttgctggcttcccattccccggaaaactggggcgcgggggttcgggggttagtttgctgaaggcagctgcctggaccagaaagggggctggggtggccccgggtggaaggaggtgggtgaatgacgggggtgacccgctgccgactggttccgggagctggaggaggagctgctccctggaggcccactgctccccagtaagctggccaggccaggtccagtcagggcccccagcccacccagtcctccgaggccggctggtccgatgagctgcatgagctggctgtggctcatgtttcccagcaggctctgcaggccaccctcaccgcctagcgcagagagttcgtggccgctgcttccgctggcccccagtgccccaggcatcggggggttgttcagatactcgttgactttccggcaatgctcctcatcctggtctgtcttgggttcctgcatccagaagaaaagccgcttggaccctgccttgaacttcagcacgtagaccctcccgctggggcactgcggcacccgcttgaactcacagtcgtcagggaagatgatcaagtcgtcttccacgttcccggacgtcctgtccttccagcagaagtgaataagcgagtcgtccgtctgctgaatgtacaccagccctttccgcttatccggagtcacggtggtccccttcagggacatctttcccgcccgaaactccaccaagtacttgttggaggcgccccgagagcctggcaccaggcttggaaagagcgcgcctgaggtcgtcatcctgcctcgcgcccacactcgttcgagaggcgccgtccgggctcgctcttcctcctcggcgcctgcctcgtgccgaattcgccacccagg

SEQ ID NO: 125211 - DNA, 1432 bp, Homo Sapiens
  misc_feature (1340)..(1340): n is a, c, g, or t
  misc_feature (1377)..(1387): n is a, c, g, or t
ggcaggcgccgaggaggaagagcgagcccggacggcgcctctcgaacgagtgtgggcgcgaggatgacgacctcaggcgcgctctttccaagcctggtgccaggctctcggggcgcctccaacaagtacttggtggagtttcgggcgggaaagatgtccctgaaggggaccaccgtgactccggataagcggaaagggctggtgtacattcagcagacggacgactcgcttattcacttctgctggaaggacaggacgtccgggaacgtggaagacgacttgatcatcttccctgacgactgtgagttcaagcgggtgccgcagtgccccagcgggagggtctacgtgctgaagttcaaggcagggtccaagcggcttttcttctggatgcaggaacccaagacagaccaggatgaggagcattgccggaaagtcaacgagtatctgaacaaccccccgatgcctggggcactgggggccagcggaagcagcggccacgaactctctgcgctaggcggtgagggtggcctgcagagcctgctgggaaacatgagccacagccagctcatggcagctcatcggaccagccggcctcggaggactgggtgggctgggggccctgactggacctggcctggccagcttactggggagcagtgggcctccagggagcagctcctcctccagctcccggagccagtcggcagcggtcaccccgtcatccaccacctcttccacccgtgccaccccagccctcttcttgttccagacaactgaccccagccaattacccccgaacccccgcggccccgttccccggggacggccaatccgccatcactgcccctagtacccatatccctatccacataccactcatctaatcacaccctccccccacgcattatccctggggccccccgccaaccgatcacagctccgccgcacccacagccatgaccacgatcctagcgccactctattatatccccaaaccatcgcgcgaagaacactttaagatgacttacgagcttcccctctgatactctctacctccaaaaattaatcaactgcgctccatcgaatcatacctgatcgcccgaccacctaatccatatctgactgatcccactgctgttaccattttgtctcttatgtgttctacccctaacgcacgtgcctcacatctcctgtcacccacttcgttttcgcacgacgatgacctcctctgtaacttatcgcccgacccactatatttcgcgtaaacaactcataacaattaactagatggtttgctgtctccccgctacccttagcgtcctatcatttgaccccgcaanttacgaactccccctccgcccgtaccactccacatannnnnnnnnnnttgagtctgcacccccacgaatcctcccacccgctatatatacag

SEQ ID NO: 125212 - DNA, 284 bp, Homo Sapiens
tttggcaggtaaaagaaaagactttattaataatcagtgggtgggaggtgagggtgtgcaacgcactgcaagcgcccagttcctcggaggacggcgcgtggctcagtccaggctcatgtcctcctcttcgtccttcttgtccttcgtgtcgccctctttctgctcgggcttggcgttgttctgcatggctttggcaaacgcttccacatcgccctagcagctgcctcagcaactagcccgagccccgcgcccagttccgggaatggagccagacaattggtgca

SEQ ID NO: 125213 - DNA, 709 bp, Homo Sapiens
  misc_feature (626)..(626): n is a, c, g, or t
tttgtgttctaacaagtactttaatggatagggtttgctgtctaaaacatgaagaggtaactcaacattcctttcagtgccacaggttaagaacttggagaactggctttcctgaggagcttctagctccagaggttgtacatgctcatggcagcaacaacccattgaccacttcttcaaagtagttcactgccaaggagaatcaaaattcaatttggattcccaatactcagcctaccttcaatttcccatcaagcctatattcttagcctttagtttaagtgtgggttatcttaacagctcacttggcctcagttcaaagtgaaatttcctgagtccttgaaagaagtagaaacccaatcaatgagtttttctcttggtctctactttgtgagaaggatacatttctagaaatttcaataccttccaagtgtcagaaggaaatataatgtagctgttgaaatttgcgatgtaggataataaggtactcccttagtgccaggtgcccacgtagagcaaagaaactaaagaaaaagtgaaatcatattatttccatgtaaaataaataaagaaagaaatatccagataagcttgattgctccttctgcttctccaccacccatgcnctctttgagtgtggggttagtgactagtccatggcctgctgggagtgcactacagatgtgcttcctgaggatatctccaggct

SEQ ID NO: 125214 - DNA, 903 bp, Homo Sapiens
  misc_feature (56)..(56): n is a, c, g, or t
tttttgagactttgccttgtgtttatttgccattcttccacagccacccttgtccntgggggggtctgcaacatacccatgcacctcccggaatcccctgaccaccccatagctggtctctttgctcacaccaccagctttcaccctgttcctacagcttcaccccaacattctgggccccatctttagggacaacgggtctggtctcaactttttctggcttggttgctgcttgtgggaggcctccagagcggtgtcaggccagatgcctgccagcggtgccaggcagggttctcgtcttctgaagaagttgagggtccagctgctgtcagaattctatgcatagatgtccttgcttgcaccacctgccagcatttttcctgcaaagaaggcgagctgtccctcctcgctccttggggacgaatatcccgcatctcaggctgaggctggcagctccaggaagtcctctgggagctctttccggcttgagtcaggtgtagtgatggcttggacccttcctgtgaatcaccaccccagctgtccaggcaacccagagtgcatattctcttggtgctcaaggcacaaaatccaaataaagaggctcagggtccgagagggatcacttgacaaaattcttcacagaaactaggtcgagctacagcctctcagtttttcttcgatgtcttaagaagaaagatctttgagattcctcccaggagctagataggccgttcccagagaggaagaagttgcaattctccgcctctcgtggagctgggaagagcctgcctctgcggagatgggaactccatgatacctaagactatgatcacacctggtaaggcccagcttggccgccactccaagaagttgtcccctctaagggctcccctcgacagcttg

SEQ ID NO: 125215 - DNA, 1019 bp, Homo Sapiens
  misc_feature (355)..(382): n is a, c, g, or t
  misc_feature (443)..(860): n is a, c, g, or t
ttttttcttttaaacatttatttatctactgtacaaaatatttacatcatcagctgcaactgcctggccctttcacctggcctgacgaatctgcagcagggcttggtctctgccaattttccagaaacatgctgacactctcctaggtattcactcatgtctggtctccttcaaagacgctaaaaggccagaagggtagctggccccccaagtacctgggtcacaaggacataaataaaagaactggccaaaataagaaacactaatagaaaattgcccaagaaataacactctctcatctctttgacatattgtaccttttccccacactggctagtatgaaagcaggattagnnnnnnnnnnnnnnnnnnnnnnnnnnnnggcccaagagagcaaagatacttttgaatagagttcagacagacctcgttccgaattcttnnnnnnnnnnnnnnnnnnnnnnnnnnnnnnnnnnnnnnnnnnnnnnnnnnnnnnnnnnnnnnnnnnnnnnnnnnnnnnnnnnnnnnnnnnnnnnnnnnnnnnnnnnnnnnnnnnnnnnnnnnnnnnnnnnnnnnnnnnnnnnnnnnnnnnnnnnnnnnnnnnnnnnnnnnnnnnnnnnnnnnnnnnnnnnnnnnnnnnnnnnnnnnnnnnnnnnnnnnnnnnnnnnnnnnnnnnnnnnnnnnnnnnnnnnnnnnnnnnnnnnnnnnnnnnnnnnnnnnnnnnnnnnnnnnnnnnnnnnnnnnnnnnnnnnnnnnnnnnnnnnnnnnnnnnnnnnnnnnnnnnnnnnnnnnnnnnnnnnnnnnnnnnnnnnnnnnnnnnnnnnnnnnnnnnnnnnnnnnnnnnnnnnnnnnnnnnnnnnaggaacgtaaaaggcgcgttgcgggttttccaaggtcggccccgacagatacaaatcacgtcagtcgagtgggaacccaagatatagatacaggttcccggactcccgggccctgtcgactgcgtacgaactgcgcttctctcgaggtgcttcaaccac

SEQ ID NO: 125216 - DNA, 667 bp, Homo Sapiens
  misc_feature (96)..(96): n is a, c, g, or t
  misc_feature (99)..(378): n is a, c, g, or t
taaatatcagtgaaatattttgagatctttgaataattcctttagaggaattatacaaaattaatatatatgagtcctttgtaatttatttttttntgnnnnnnnnnnnnnnnnnnnnnnnnnnnnnnnnnnnnnnnnnnnnnnnnnnnnnnnnnnnnnnnnnnnnnnnnnnnnnnnnnnnnnnnnnnnnnnnnnnnnnnnnnnnnnnnnnnnnnnnnnnnnnnnnnnnnnnnnnnnnnnnnnnnnnnnnnnnnnnnnnnnnnnnnnnnnnnnnnnnnnnnnnnnnnnnnnnnnnnnnnnnnnnnnnnnnnnnnnnnnnnnnnnnnnnnnnnnnnnnnnnnnnnnnnnnnnnnnnnnnnnnnnnnnnnnnnnnnnnnncttacggacatccttttgaattatctttttcactcatagaatatgaatacatttatttagactttttctagaactttcctgttttcatgtctttgcttcatctggaattggcttaacacccttttataaagtttgtgtttgtaaaatttccattgtgacatcaatacgcaatatattttgtaatataggagtttctatttttttattaaaatggcaatgaaagcaagagggatatgtgttgcttaattattcatctaaaaagtttgttcagtcatttttacaagtaggc

SEQ ID NO: 125217 - DNA, 948 bp, Homo Sapiens
  misc_feature (276)..(303): n is a, c, g, or t
cgactcatattcctatgagtgaaaagaaaattcaaaggattcctaagctggcacagtagctcacgccgtaattccacacttggggaaggttgagatggggggactggactgagcccaggagtttgacaccagcctggcaacattggtgggacctcgtctctcaaaaaatacaaaattagtacggtgtgccagtgccccacctaaagccccagctactgaggagactgagaacagaaggattgcttgaactcagaaggctgaacctcagtgactgtnnnnnnnnnnnnnnnnnnnnnnnnnnnnggtaaaagtgagatcctgtctcaaaaaaatgaattacaaaggactcatatatattaattttgtataattcctctaaaggaattattcaaagatctcaaatatttcactgatatttaagtcctgtaagtttccatttcatacggtgatataagaccatgggtagaaaatatcagtgaataaaggaagacatgccaaatgtctcatctgaatattttgaccactccatgatcttttgtcctcgcactgctgcatagttaggtttcagaggctggtcttcgaattaggtcacaaaatatgcagtgattgtcttcaatttgttgttaaggagttctgttctatttccacttgccctccaggcccagctaaggatgccacctggtcaatatcagcatttcttggaagaaaataaacaatattattagtgatcttcttagaaagtctgaaaatttcaaagccatcaggagacatcattgttctaatgtcaaaggtctctgcagtggcatagtctggccctccccaaggtgggctgaggaacacaacatcagcctttaaaaaagaagccagcagcaagaaatctccacagatgaactctatcttatctgctatcccataacttctgcatccctaattccggaccgtaccagc

SEQ ID NO: 125218 - DNA, 603 bp, Homo Sapiens
cccaggagaagaaaggtttgaaagatcacgtccctggcaagagccacagccctcagccaggtgatgggcacagggctgggtacaggtctatcacagtgccctggcttcacatctaaagagtccggatggccacagggtaaagcagggacatgtgttcggctcccttaatgggtagcttgcggctggcatagtggtgcacaatttcagggacgctgctgaagggcgggctgttctggcccagcacatatttgtgttccttggttcgggacagcttcatgtgcatgaatccctggctgctcttgagggagagggagaagtcattcttgctggtctcactgttgcgcaccaggtagctggcctctttgcacagccggagcaggttctcggcgtcggttcggctgatggccccgtgataccagctaaggatgagagagaggaaggggggcatctctgctgggtccctcgctgtccaggcccacccattgtgggtgtcccctgcaaaggctttggaaatccgctccttcttccactcccagggctggtcatactcctcagggggcctctcatcatcctctggcaggcgggactcccggggcagggggg

SEQ ID NO: 125219 - DNA, 1100 bp, Homo Sapiens
  misc_feature (60)..(80): n is a, c, g, or t
  misc_feature (377)..(390): n is a, c, g, or t
  misc_feature (667)..(667): n is a, c, g, or t
  misc_feature (770)..(771): n is a, c, g, or t
  misc_feature (782)..(782): n is a, c, g, or t
  misc_feature (817)..(817): n is a, c, g, or t
  misc_feature (837)..(837): n is a, c, g, or t
  misc_feature (956)..(956): n is a, c, g, or t
  misc_feature (970)..(970): n is a, c, g, or t
  misc_feature (981)..(981): n is a, c, g, or t
gtgccaagctaaaattaaccctcactacaagggaataagcttgcggccgcctgctcaggnnnnnnnnnnnnnnnnnnnnncgtttatgccaacaactttattgagcaccaattagggcaagggactaccaccttcacagttctcttgggcttattaacgtcgtggcccactcatttatttcacaaatgaggaaaccgaggaccctgctgggagagtttggggcccaaccagggctcccactgagtctggggcaccctcagctcctgcaccacaaagcttcggttgacttgtttcaatgtaaagaacgttacttaaacaggtctgagtgctaggcaaactcacaagacctagctcaaagtttgagcacattggtatgnnnnnnnnnnnnnnggagaatcagcaccttgtgatatttaagcaggggcatttggcattagccaaccaagcccagaaagtcggcaaaattcttagcctgaggcatccccagaacacctgagactagctcctgcagctgagggttaaactcgtgcacctgcacttgcaccacatcctgtctgagctcttgctgacagcccgtctctggtttgtgaagctcctggcaagggtggggggactccagagcagacaagcaggatccacagcacagaagggcagtgcctcttcccanacccaagggagcctggctgaactgtcactgacttgtatactcactctcctcccagagatgacagcaatgctaccattgggccccaactctgctcaagacttgnngagagtgtgangggtcagagggcaaggaatggacatccagggacangacccccagagcagcctgangcgtggtcacagtgccagacaaggcggtaaaacaggatagctgggtccatcactccagcttcagatcaccacaccaaggtgctctacaacagctccgcagtgtgtgatgagaacacaanagccactgactcanactgcccatangcatctgactgaggatctgacctcgtgcgatcttggccgaggcaatcctaaggagcgataatcgtacagtcaacgtctggtgatgtacgtccatccaaacaacacgagcaaggtacggg

SEQ ID NO: 125220 - DNA, 730 bp, Homo Sapiens
gttgtttaccactgttgctttatggcttcttttctgcttttttgatgaacttcctcctccctgagcatctttcactcttttctgacctgtacaggctttttcaggatgttctggttctggctgattactactgcttgagctcacactggcatcaaaacctgctggcgagctattcccttcagactggaggtcttggagctccccagcaacactatccacctcaattgtgctatcagtttcactcttgatacttcgaacctcttcttggtttggagccagtggttctgatactgttacagaagactgctgccggctgccttctgttacagtgactgatgaaggcgattcaggtgtagtaggaggggtatttagcactgaattactgccactacttggaaattctgcttttctgtcattgacctctactgttttttcttcaatgggtttactatcgacattgactggaggtggtttttctagttctacactgggtgaacaactctcctcttcagccacagtctgcagtgactcctctgccaccccctcctctggggcaggatgcggtggggaagctgcagcctcagtatcagagtctgaaaaaagctctttcagcgtttttttaggccactgtccctgaatacttgaccagacatcttttcgatctttgggcctgctgttttgaagtctttcatcagagttatttaaaagtttaatccttttttctgccact

SEQ ID NO: 125221 - DNA, 1175 bp, Homo Sapiens
  misc_feature (75)..(86): n is a, c, g, or t
ctcccggtttttgttaaaacatgaaaaaaaattttatgggggtatacaaagaggccacttttggaaaataatacnnnnnnnnnnnnaggtgaattaggggaagacagagttaaaatcacataggatttgcatttttaaaaaaggaaagcactaggattgttggccctggaggtaactatttacactgaacagaggtttggccttttacataacatcgatacaatgctttttccaaagtctggagaaataacaaggttctgtctggaatgcttcacagaggaggttcggatttggggacaagtgtcattaatgagggccatggaagttcgtcagcttcagagtcacatgcaatctgatcctgggcggttccgctgctggggagcagctggctacggaattgaaagctaatggggaggggtggggcagcctctgggacaaggcctctctccgcagacccgggccttacaggttttcaccaggttggtactggggctctgtcgcggtaaagtagtcttccaggaagctctgcaagtactcaaaagtggggcgttcttcagggtcctttttccagcagtggatcatgagctcatgcagagagatggggcagtcctgcgggcagggcatcctgtagcctcgctccacctgctccagcacctcccggttgttcatgcctgggtatggcactcttcctttggtgaccagctctgtgagtaagattccaaaagaccacacgtcagacttgattgtgaacctcccgtacagggctgcctcgggggccgtccacttgatggggaactttgcaccttgtcttgctgtgtactcattgtcttctatcaatcgggccaatccgaagtcagcaatcttgcatatgagtccattccccactagaatgtttgctgatcgcagatctctatggatataattcatgcgctcgatgtaagccattcctgcagccacctgtgctgccatgtccacaagatttggtaatttcagagctcttccttctccatcttttaagaaatccagtaaacttcctttgttcatatactcggtgacgatgtagatgggctcctcagacaccactgcatagagctggaccagcttgtcgtgcttcagcttcttcatgatctgcgcttcctcaaggaatgattcggggacattgtgcctggtttaag

SEQ ID NO: 125222 - DNA, 654 bp, Homo Sapiens
  misc_feature (72)..(83): n is a, c, g, or t
ggtttttgttaaaacatgaaaaaaaattttattggttttagacaaagaggccactttttggaaaataatacnnnnnnnnnnnnagttgaatcaggtgaagacagagttaaaatcacataggatttgcatttttaaaaaaggaaagcactaggattgttggcactggagtaactatttacactgaacagaggtttggccttttacataacatcgatacaatgcattttccaaagtctgagaaataacaaggttctgtctcgaatgcttcacagaggaggttcggatttggggacaagtgtcattaatgagggccatggaagttcgtcagcttcagagtcacatgcaatctgatcctgggcggttccgctgctggggagcagctggctacggaattgaaagctaatggggaggggtggggcagcctctgggacaaggcctctctccgcagacccgggccttacaggttttcaccaggttggtactggggctctgtcgcggtaaagtagtcttccaggaagctctgcaagtactcaaaagtggggcgttcttcagggtcctttttccagcagtggatcatgagctcatgcagagagatggggcagtcctgcgggcagggcatcctgtagcctcgctccacctgctccagcacctccc

SEQ ID NO: 125223 - DNA, 1142 bp, Homo Sapiens
  misc_feature (203)..(203): n is a, c, g, or t
gggcttacaagttttctttcaatgatttgggcggtttccctcaagggaattgattccgggggaccattggtgccttggtttaagaagtccttaggggctacttttgggttttcccatcccaggttacctgagtaatgttgtacaaagctgctgaagttgttccaaactggccccgggtggtaatgtagtatccaccattgtcnaagtttgcgatttttataatgtttgacatgttctcctttcatatcatcccaatcacggatagaaagtgaataggcacctttggtgtttcactctcgcggataagaaaggtacctctggggtttccaaaggacaatagctgtcgctcagcatcttttcggccaagttttccaaagtaccactcttctgcctggatagagtcaactggagccacataattgctgggaatgtaacctgtctctccagttgtcaaggagcgggcttcccaccaatctccttccgagctgttcaatatttgaaatttttctcctttgtgaaaactcaggtcatcttctgtccgtgcttcatagtcataaagggccacaaagagtgtcactcctgttcctcctctcgtacgcaaggtccccgtatgagacgaagagttcacacctccaaagacggtgagtccttggcccccggctgcgtggaagttgttgtagttggggatggaggtcacaccgaagctggggtagtgctgaggggtggggtctgtgccatagcggtacccagagctctggttcaggctgccgtccctctcctccgtcagttttgttgcttctttatccttacattgcacacagcccattatctaaattccaaaatttccgccaacgatcacaaactttatatacaccacatgtcttctacaacagaggcaggactggtctttttccacgtttagatcagcatcctgcttcttcaaaaaaactgcgcggcgctgaggctccggagcccactcacatggtcctctccccgccctcctccggcgcggccgaggcggctccggggggtccccggcgggcccgggagccggtgggccttccgagagcaccgagggggcggcgccggggtgtccccggcccggcggccgaatccctccctggcgcggcggggccgtctag

SEQ ID NO: 125224 - DNA, 836 bp, Homo Sapiens
  misc_feature (11)..(11): n is a, c, g, or t
  misc_feature (207)..(207): n is a, c, g, or t
  misc_feature (274)..(361): n is a, c, g, or t
  misc_feature (650)..(701): n is a, c, g, or t
gcaaatgactntggaccataaccccggaagccaaacctctgtgagcatcacaaagttttggttgctttaacatcatcagtattgaagcattttataaatcgcttttgataatcaactgggctgaacactccaattaaggattttatgctttaaacattggttcttgtattaagaatgaaatactgtttgaggtttttaagccttaanaggaaggttctggtgtgaactaaactttcacaccccagacgatgtcttcatacctacatgtatttgnnnnnnnnnnnnnnnnnnnnnnnnnnnnnnnnnnnnnnnnnnnnnnnnnnnnnnnnnnnnnnnnnnnnnnnnnnnnnnnnnnnnnnnnttcctgcaatgaagtctctgaagtgaaactgcttgtttcctagcacacacttttggttaagtctgttttatgacttcattaataataaattccctggcctttcatattttagctactatatatgtgatgatctaccagcctccctattttttttctgttatataaatggttaaaagaggtttttcttaaataataaagatcatgtaaaagtaacaaatgtgtgaaatttaaagattgtaaatatatatttacttttttaagatcaaagtttaaaccccgtggttagaannnnnnnnnnnnnnnnnnnnnnnnnnnnnnnnnnnnnnnnnnnnnnnnnnnnccaactagaacttttcattatatcagaatatctgattacatttataattcaattgtgacttgaactgtatcttacaggaatgttcaatttctatacatattttataaggtattaaacctggtgttttctttccat

SEQ ID NO: 125225 - DNA, 944 bp, Homo Sapiens
gaggatccccggatcattttcttcttccggcgagtcctgtgatgagctggaggaggactggatcagggaatatccacctatcacttcagatcaacaaagacaactgtacaagaggaattttgacactggcctacaggaatacaagagcttacaatcagaacttgatgagatcaataaagaactctcccgtttggataaaggattggatgactatagagaagaaagtgaagagtacatggctgctgctgatgaatacaatagactgaagcaagtgaagggatctgcagattacaaaagtaagaagaatcattgcaagcagttaaagagcaaattgtcacacatcaagaagatggttggagactatgatagacagaaaacatagaaggctgatgccaagttgtttgagaaattaagtatctgacatctctgcaatcttctcagaaggcaaatgactttggaccataaccccggaagccaaacctctgtgagcatcacaaagttttggttgctttaatatcatcagtattgaagcattttataaatcgcttttgataatcaactgggctgaacactccaattaaggattttatgctttaaacattggttcttgtattaagaatgaaatactgtttgaggtttttaagccttaaaggaaggttctggtgtgaactaaactttcacaccccagacgatgtcttcatacctacatgtatttgtttgcataggtgatctcatttaatcctctcaaccacctttcagataactgttatttataatcactttttttccccataagggaaacttgggttcctgcaatgaaagtctctgaaagtggaaacctgcttggtttccctaccacacacctttttggtttaagatcctgggttttatgaaccttcaataaaataaataaaatttcccctggggccctttcaataattttc

SEQ ID NO: 125226 - DNA, 952 bp, Homo Sapiens
  misc_feature (872)..(906): n is a, c, g, or t
  misc_feature (909)..(909): n is a, c, g, or t
tttggcagggtgaacaggatcattttattctcatttatgcttaaaataaagatacaattcaagttttacaattcagtatgattagacgtgatttataattttaacaatttaaaaaaacaacagaaataaagaactagtacaaactttaaaactaccagagcaaagagaactacctttctgatcaaaacatgtgccacagttaaacttccttagaaaactttttaagttttctcagctaaattttctttaaaaaggtttgtgaaaagcctttaatcataaatatttaaactgtttttgtaaccactaaatgccttcaccaactcattaatccaatgttttctaaattcaggaaccagtgaccaagtggcctgaaacatgtaagccttgatcttattcttccagctacaaaatactaatattttaagaaaacaacaaaatattttctaagcacagaagctttctgaaaacttcaattaccttttctggctcagtacctaactgaaatgttcaaatgttcacatttgcacacacgaaaaaatttgagcagcatactacgtgggtgtgagaacctgatgaaaaataagattggaaaaaccccctacactgtgttccacttacatgatttaaatatatagttatctttcatataagtaaaaaggtaaactttagaacagcacagaaatacaaatgtatttagagttttacaaaatatattcaacccctcagacatgcacaattttttaactttggagttaccatacaagggaactagtttcccctccttcataatgaaagcaggaagtcatgtgtacaaagtcattcccggccgtaatggccgaattcccgggcatatgtccggtaccgtcgactgnnnnnnnnnnnnnnnnnnnnnnnnnnnnnnnnnnncgnccgcttcctcgctcactgacttcgctgcgctcgtcgttcgtct

SEQ ID NO: 125227 - DNA, 624 bp, Homo Sapiens
ctttcctttgccatttatgcatataaatatttcaccgaagaagatgcatcattcaataaacaaatgcaaaaactactttatataaagtgtggttctctatttagcaatataaaatataaaacgataataatacagttagctattaaagagctaaattcaagaaatttgcaaaccagtacagcagtgaacagtcccttgtataatacaaaagtccattatgaaaaagtcaagtctattttgtaacaggttacataaaaatatgggccaataaatgcattatgaatgcagaaacagcactgctccatcagcacattcttcagtcttgtttggactagatgccaaacttactgttcatttttcggttcatcttgttttccattaagttcttgatcaacttgttttatgcattctggtatgccaacgtattccatggggacaagttctgctagttctgccaaattaaacacgtatctaattttttggctgaatttcgagctaataaatggtcttggtaacagccagaagtgttctggataaaccaagaaggatgtaccatgattagggattttagatttttccgtaaccttctatcaatttgctgataacatttcctgagccatccca

SEQ ID NO: 125228 - DNA, 1609 bp, Homo Sapiens
  misc_feature (163)..(163): n is a, c, g, or t
  misc_feature (567)..(765): n is a, c, g, or t
  misc_feature (873)..(893): n is a, c, g, or t
  misc_feature (1165)..(1173): n is a, c, g, or t
caaggtgccgcaaaacacaacagagagaagccacgtgaaccaacatagtaacaatacaagtaaatcaacaatataatttacagtgcggatgaataagaaatggtgacagaaaggacacagtgagctgaaaggcggtatgaaccaggccaaaagaaaaaagaangctcgaggtgagatcggtccaataagaataggaaaggaaaagtttttcgaaggagaaaacaaaacaaaatacgtaaaagacaaatcagaacagaagagggcacgaggaacttacaggggaaaaaaggtgaaaaagttatggtcctataggaattccccacgtagtgacgtgagacaagaattgttgtaaatatacaggaggtagaacctatggaaaacaacagtaacgggacgaataaacgattactggcttcgtgatggcgatatggtcacatatagtttcatgcatgatcacgtgattatgtgaaaaccatattaccgccttgacgtgaactgataacgatacacgcaacctgaacgaccgagcgcagggtgttaatgagggaggaagcggaagtgcaacannnnnnnnnnnnnnnnnnnnnnnnnnnnnnnnnnnnnnnnnnnnnnnnnnnnnnnnnnnnnnnnnnnnnnnnnnnnnnnnnnnnnnnnnnnnnnnnnnnnnnnnnnnnnnnnnnnnnnnnnnnnnnnnnnnnnnnnnnnnnnnnnnnnnnnnnnnnnnnnnnnnnnnnnnnnnnnnnnnnnnnnnnnnnnnnnnnnnnncgtaatacagctgtgactctcattaagaactttgtccgacgacgtatagtgaaaatggacatggagcccacgattaagggaagaagggtgcgtccgctgctgtaggcnnnnnnnnnnnnnnnnnnnnngaagacatatttcagttttattatcttttaggcatagacgggtatgttaatccatttccacaaacaattcctataatcacatatagggagtgaaccttgaacttgcaaaacctgtttcctgttgccaaagagttaaattggagagccgaaacctcaaaagttgaggatttggaattctttttcttcttagcatcttcgtgcatgtggctgccattaaacaagtaagctttcctctttatccaggcactgaatcgatggtaataatgttgtcnnnnnnnnncccggcaaactttctgctttcggtccagagctctgagtttctcatgttctgctctcgaggttctgacagctgtttttggacttaattaaccattgcaagtggaaaccaagaaataattgtagcataactctctctattgtcatgttgcttctttctgcaaatatatcttagaagttagactttaaacctttgatctcccacaccaaaagagaaaataatatttatatggaagtaattttattttagtgtttgtgatttattgtggagagcaggtgtttaaaaattttagaatttctttaacaaaattctaaagagaaaataaaaaagaaatcacagtatttacagagataacagaatggcttagccatgcaaaacaaataactttggtttttccccttttactttggtttaaatgttgaccaagattcattttttt

SEQ ID NO: 125229 - DNA, 700 bp, Homo Sapiens
  misc_feature (284)..(284): n is a, c, g, or t
  misc_feature (568)..(623): n is a, c, g, or t
cgggagacctgtgaagacatatttcagttttattatcttttaggcatagacgggtatgttaatccatttccacaaacaattcctataatcacatatagggagtgaaccttgaacttgcaaaacctgtttcctgttgccaaagagttaaattggagagccgaaacctcaaaagttgaggatttggaattctttttcttcttagcatcttcgtgcatgtggctgccattaaacaagtaagctttcctctttatccaggcactgaatcgatggtaataatgttgtcnttttttttcccggcaaactttctgctttcggtccagagctctgagtttctcatgttctgctctcgaggttctgacagctgtttttggacttaattaaccattgcaagtggaaaccaagaaataattgtagcataactctctctattgtcatgttgcttctttctgcaaatatatcttagaagttagactttaaacctttgatctcccacaccaaaagagaaaataatatttatatggaagtaattttattttagtgtttgtgatttattgtggagagcaggtgnnnnnnnnnnnnnnnnnnnnnnnnnnnnnnnnnnnnnnnnnnnnnnnnnnnnnnnncacagtatttacagagataacagaatggcttagccatgcaaaacaaataactttggtttttccccttttactttggt

SEQ ID NO: 125230 - DNA, 1150 bp, Homo Sapiens
  misc_feature (276)..(331): n is a, c, g, or t
cccggcaaactttctgctttcggtccagagctctgagtttctcatgttctgctctcgaggttctgacagctgtttttggacttaattaaccattgcaagtggaaaccaagaaataattgtagcataactctctctattgtcatgttgcttctttctgcaaatatatcttagaagttagactttaaacctttgatctcccacaccaaaagagaaaataatatttatatggaagtaattttattttagtgtttgtgatttattgtggagagcaggtgnnnnnnnnnnnnnnnnnnnnnnnnnnnnnnnnnnnnnnnnnnnnnnnnnnnnnnnncacagtatttacagagataacagaatggcttagccatgcaaaacaaataactttggtttttccccttttactttggtttaaatgttgaccaagattcaattttttttcctgccaaataaaacttcaataaaagtttagaggcaaaataacgtattttctttttttcccataatattttatacagcatcgagtctaagaatattttatgcatttaatccataccaatgcactacggaagcttttattaaacggagtcactattgcccagacagtaaatggtttacaaatgtacaataacgtatgtttctaaataatgcagaagtggcaaagtattattcctattctcatctgactttaattttcaatttatttttcattgccttcataattttttatttcatgagtctaagaaacaaacaccagttttccttttcctttcaataacatagttctatacctagaaatctgatgttcatttatcttccctttaaagttgtgtaaatcctgggaaagaaatcgctgtgcagtgttctcccagaaaccaggcttctgcttgaaagagcaaagtttaaaagtctagtcacaagtagcccatatctggtctacttcaaaaagtttccatttatactaccaccttaaaaatttcctcaagcataaaacatgtttataaagttacaaatttgaatgtaactaaagatacatagacattttattattacactttcatgtactgcttgataaattatgtatcagttaaaaacactaaattatctcaaggtgcattcaatatctgtagggtagttaacaaaaacacacacg

SEQ ID NO: 125231 - DNA, 1549 bp, Homo Sapiens
ttttagccctaaaattttaaatctttaatttccgttttcacgtattttcttcttgcttccaaaaggaaaggagtgcgtagctctgttgcctgtacatcgtccacagcccctgggtcggggcggggtcccctgggccgcccggggggtccacatgcagcccctgggtgggggccggcgcggggtgaggtccgggggccgccttattgctgaggtccggccggttggggccgccgctaggcgcgctggctgggcagctcctgggagatgaagcgacgcaggcgctccaggtactggctgtagagctcgatgtcgttgtgcccggcgccctccacccacagcggctccaccgccttggggcagcgctcgtagagcgccagcccgtgcgagaagtcgatcacctcgtcctccgtgccgtggatgatgagcacgggagacgtgatcttggacaccttctcgatgttagggaaggcgtcgaagcagtaggtcttcttggtgtcggggaaggcgacgcgcatgcccgaggtgagcggcgagtgcagcaccaccgcggcacactcgtagcgcgaggccaggtccacggtgggcaccgtgccgatgctctgcccgtacaggatgatgctgtccgggctgatgccgtacctggtgcgcagggcctgccaggcggcgtcgatgtcggcatagaggttcctctcggaaggcctgcccgagctggcaccgtagccggagtagtcgtaggagaagatgttgcagtggaggcgggagcccaggccaatgtagaagctgctcatctggcccaggtccacggcattgccgtgcgagaagaggaccgtgtacctggcaccaggcacgcagcgaacatacatgcaggagacgcggttgccgcgggcgctcttggtggggaagacctcgatggtgtccagctcgcgctggctgtactggaagtcggcacgctccgtcaggtgcagcttccagcgcccgggtgcgcccgaggaggctctcagggtccccaagggggcggccccggccccaccaggccccggctcgggctcaggcaccagggagtaggtggcctccggcggcaggaaggcgagcttggcagcgatgcggccggggcagggcgggcagcagaagaggcagcagagctcactcagcgacagcccattcatggcgggcgccgcccaggccgggcctccaccggggcccccgccaacaacgccgcccggcctggcccggcaggggaggggtgggggtgctccgagtcgcgggcaggggggagagcgcccccccagctaccgccccagacagcagccccgttaggaggccagggcccagccccatcgcggtccaagccgagccccagggagcctcgcaaccacaggtctccatgtcgtgccgtgggaagcccaccccggcccgcgcccccgggccccagggccgcgctccatggctcccggccgcccgcccgtgcgtccgtcggtccctccgcacccctgcccggcctcctgcaccgccaccgccgcagctccccccatcccgggaattccggacc

SEQ ID NO: 125232 - DNA, 404 bp, Homo Sapiens
  misc_feature (404)..(404): n is a, c, g, or t
ccacgaccctccgctgtttcttccgcgagcttcctcccccgatttccatctcaggcagcggcagcggcagcgacagcctgcctaccccaggactccagcctcacctggcttctgcctcaactccgctcctctgccccccagcgcttcctggtacggggccgagcaggggttggtgctccgtgcggtccttccctctccccgcctccaccacgggaccccgccctcctgggccgactgcagagccttcctgaatcctctgacctcgggcctcaggctttagcggagagacagcatgataggcctggagttcttcaagaggcctcctcgcacatccttaccacccggagagcctcagtttggatttgaagccatcgcaccccaaaggagatgacaatccccccccn

SEQ ID NO: 125233 - DNA, 632 bp, Homo Sapiens
  misc_feature (519)..(576): n is a, c, g, or t
  misc_feature (582)..(582): n is a, c, g, or t
ttttagcagtgctcagtcctctattggagattctgccccctctgggacagatgtccacgctgcccgcgactcctgagcacactcccatggcgggtggcgtgctctgggtgggtgtgcggcagtggccggtcagggtgtagggaaggggactgagaggggaccttggtgagcttgcatttgtgtggggatacacgtgaaggggtgtctgatcccaggactcagggcctcttcctcctggggggcacacagagccccttcccttcctcctcggggaacagccccggaatggggccttcccttggtgcctctaggtcctgccctccagcccatgtccccagaaggtggtctttccttggaggggtcagagactatagcccagggctctggggtcactgtgggaacatctgcctcagctcggcacgcacttctcctggcctgtttcttccactgggaactgggaccctaacccctcaaagggggatccctgagcgagggtcatgggcagggagctggtatggnnnnnnnnnnnnnnnnnnnnnnnnnnnnnnnnnnnnnnnnnnnnnnnnnnnnnnnnnngcctantcgtctttatccttggcgccatgtttgaggatgcgggtgaactccacgta

SEQ ID NO: 125234 - DNA, 912 bp, Homo Sapiens
  misc_feature (53)..(53): n is a, c, g, or t
gtccctgcccttccaagcccaatgtcccccaagaagttggtcttttcctttgnaaggggtcaaaagactaataagcccagggctctggggtcactgtgggaacatctgcctcaagctcggcacgcacttctccctggcctgtttcttccactgggaactgggaccctaacccctcaaagggggatccctgagcgagggtcatgggcagggagctggtatggacgggtgtgtgcggggaggggtgactggcgggggctggggtgtcaggggcctggggtggcctagtcgtctttatccttggcgccatgtttgaggatgcgggtgaactccacgtagttgaagttgcctttcttatcaatgggtgcctcccggtacatctcgtccacttcctcatctgtgaagcggtcacccatggtggtgagcagctcccggaggtggtcctcatggatgaaacctgaggcttcctcgtcgaagcaggcaaaggcgttgcgaatcacatcctcggggtccgtgccgttcagcttctccccaaacatggtgaggaacatggtgaagttgatgggccccggggcctcgctcatcatgccctccaggtattcgtctgtggggttcttccccagcgaggccagcatgtcgtgcaggtcctccttgtcaatgaagccatcacggttctggtcaatcatgttgaaagcctccttaaactcctggatctgggactggtcaaacattgcgaagacattggatgtggcccgctgtggccgcttcttggtggtcttggctttggcccgcttgctggacatcttggcttctggtgggtggggcttccctggtgcggagaaggcgcttgggctcgctgggtgcccccggccgtaatggccgaattcccgggcatatgtccggtaccgtcgactg

SEQ ID NO: 125235 - DNA, 378 bp, Homo Sapiens
cgagctcaagcgccttctccgcaccagggaagccccacccaccagaagccaagatgtccagcaagcgggccaaagccaagaccaccaagaagcggccacagcgggccacatccaatgtcttcgcaatgtttgaccagtcccagatccaggagtttaaggaggctttcaacatgattgaccagaaccgtgatggcttcattgacaaggaggacctgcacgacatgctggcctcgctgggtgagctgggacagggacaggggtgagatggatgaggccaggcaggctctgccaatcatttacagggcacctcctgtgtagtgagacgcgtggtgtccaccttagagaatagttgccattaacttagtccattcaacaggg

SEQ ID NO: 125236 - DNA, 1243 bp, Homo Sapiens
  misc_feature (564)..(608): n is a, c, g, or t
agaaaatgtgtttggacaacaaagacacgcaatgtccccggcagtagagcccaaatcatgtttcataaggtcaggccacccagcacccataattatcgccagcgcaactggtggtgtattgacccacacgcagataataatcccatcctgtgtctagaaaattggtgtatatagattgtattccccctcagatgaagaggcgctgttaaaatatctcttcgtctcaagagaggtagtcattttggggtgccccaccgctatttggtgctcgcgcccccccactcggagttcatagagtgttgtctctcgttcaccccccaagtgggtggcccctcagcgtgggcgcacgccttgttttcgcccccgtgtctcaacccgtttgtgattatacctcgcgcgcgcccacgtcgctctatcgttcgattataattaggacctcctcctattatagtgggcgccccgcttgttctcccagcagaagcttggctgatccgcgtatgaagctcgtggcgcccctcctcggcggggagatatcttcattagtgcgtggcccccccctcttgnnnnnnnnnnnnnnnnnnnnnnnnnnnnnnnnnnnnnnnnnnnnncagtgctcagtcctctattggagattctgccccctctgggacagatgtccacgctgcccgcgactcctgagcacactcccatggcgggtggcgtgctctgggtgggtgtgcggcagtggccggtcagggtgtagggaaggggactgagaggggaccttggtgagcttgcatttgtgtggggatacacgtgaaggggtgtctgatcccaggactcagggcctcttcctcctggggggcacacagagccccttcccttcctcctcggggaacagccccggaatggggccttcccttggtgcctctaggtcctgccctccagcccatgtccccagaaggtggtctttccttggaggggtcagagactatagcccagggctctggggtcactgtgggaacatctgcctcagctcggcacgcacttctcctggcctgtttcttccactgggaactgggaccctaacccctcaaagggggatccctgagcgagggtcatgggcagggagctggtatggacgggtgtgtgccggagaggggtgactggcggggcttgggtgtcagggggcttgggtgtgctagtcgtctttatccttggcgcattttgaggatgcggttaactccacttatggaattggcct

SEQ ID NO: 125237 - DNA, 925 bp, Homo Sapiens
cgagcccaagcgccttctccgcaccagggaagccccacccaccagaagccaagatgtccagcaagcgggccaaagccaagaccaccaagaagcggccacagcgggccacatccaatgtcttcgcaatgtttgaccagtcccagatccaggagtttaaggaggctttcaacatgattgaccagaaccgtgatggcttcattgacaaggaggacctgcacgacatgctggcctcgctgggtttcatccatgaggaccacctccgggagctgctcaccaccatgggtgaccgcttcacagatgaggaagtggacgagatgtaccgggaggcacccattgataagaaaggcaacttcaactacgtggagttcacccgcatcctcaaacatggcgccaaggataaagacgactaggccaccccagccccctgacaccccagcccccgccagtcacccctccccgcacacacgcgtccataccagctccctgcccatgaccctcgctcagggatccccctttgaggggttagggtcccagttcccagtggaagaaacaggccaggagaagtgcgtgccgagctgaggcagatgttcccacagtgaccccagagccctgggctatagtctctgacccctccatggaaagaccaccttctggggacatgggctggagggcaggacctaaaggcaccaagggaaggcccccattccggggctgttccccgaggaggaagggaaggggctctgtgtgccccccaggagaaagaggccctgagtcctgggatcagacaccccttccctacaccctgaccggccactgccgcacacccacccagagcacgccacccgccatgggagtgtgctcaggagtcgcgggcagcgtggacatctgtcccaaagggggcagaatctccaatagaggactaagc

SEQ ID NO: 125238 - DNA, 695 bp, Homo Sapiens
  misc_feature (83)..(106): n is a, c, g, or t
  misc_feature (515)..(567): n is a, c, g, or t
  misc_feature (623)..(623): n is a, c, g, or t
cagggctcagccctttatgggaaattttgccccctttgggacaaatgtccaccctgcccgcgactcctgagcacactcccatnnnnnnnnnnnnnnnnnnnnnnnntgtgcggaagtggccggtcagggtgtagggaaggggactgaaaggggaccttggtgagcttgcttttgtgtggggatacacgtgaaggggtgtttgatcccaggactcagggcctcttcctcctggggggcacacagagccccttcccttcctcctcggggaacagccccggaatggggccttcccttggtgcctctaggtcctgccctccagcccatgtccccagaaggtggtctttccttggaggggtcagagactatagcccagggctctggggtcactgtgggaacatctgcctcagctcggcacgcacttctcctggcctgtttcttccactgggaactgggaccctaacccctcaaagggggatccctgagcgagggtcatgggcagggagctggtatggacnnnnnnnnnnnnnnnnnnnnnnnnnnnnnnnnnnnnnnnnnnnnnnnnnnnnngtggcctagtcgtctttatccttggcgccatgtttgaggatgcgggtgaactccancgtagttgaagttgcctttcttatcaatgggtgcctcccggtacatctcgtccacttcctcatctgtgaagc

SEQ ID NO: 125239 - DNA, 1010 bp, Homo Sapiens
  misc_feature (442)..(488): n is a, c, g, or t
gcccgggttccagggggtgttaggggaaaaggggggttctgaaagaggggcaccctttggtggaggctggccattttggggtggggaatccaccggaaagggggtgtttcggttccccagggactcaggggcttttccctcctgggggggcaacacagaggcccattccctttcctccttgggggaacagccccggaatgggccctcccttggggcctttaggtcctgccctccagcccatgtccccagaaggtggtctttccttggaggggtcagagactatagcccagggctctggggtcactgtgggaacatctgcctcagctcggcacgcacttctcctggcctgtttcttccactgggaactgggaccctaacccctcaaagggggatccctgagcgagggtcatgggcagggagctggtatggacgggtgtgtgcnnnnnnnnnnnnnnnnnnnnnnnnnnnnnnnnnnnnnnnnnnnnnnncctagtcgtctttatccttggcgccatgtttgaggatgcgggtgaactccacgtagttgaagttgcctttcttatcaatgggtgcctcccggtacatctcgtccacttcctcatctgtgaagcggtcacccatggtggtgagcagctcccggaggtggtcctcatggatgaaacctgaggcttcctcgtcgaagcaggcaaaggcgttgcgaatcacatcctcggggtccgtgccgttcagcttctccccaaacatggtgaggaacatggtgaagttgatgggccccggggcctcgctcatcatgccctccaggtattcgtctgtggggttcttccccagcgaggccagcatgtcgtgcaggtcctccttgtcaatgaagccatcacggttctggtcaatcatgttgaaagcctccttaaactcctggatctgggactggtcaaacattgcgaagacattggatgtggcccgctgtggccgcttcttggtggtcttggctttggcccgcttgctggacatct

SEQ ID NO: 125240 - DNA, 1051 bp, Homo Sapiens
  misc_feature (335)..(335): n is a, c, g, or t
  misc_feature (354)..(354): n is a, c, g, or t
  misc_feature (385)..(385): n is a, c, g, or t
  misc_feature (394)..(450): n is a, c, g, or t
  misc_feature (1027)..(1027): n is a, c, g, or t
acccctgggggagccttgccctttggtgtgggggataccaccggaaggggggtttttgattcccaggactccagggcctttttctcctgggggggccaccaagaagccctttcccttccctcctgggggaacagccccggaattggggcttccctgggtgcctctaggtcctgccctccagcccatgtccccagaagtgggtctttctttggaggggtcagagactatagcccaggggctctggggtcactgtggggaacatctgcctcagctcggcacgcacttctccctggcctgtttcttccactgggaactgggaccctaacccctcaaangggggatccctgagcgagnggtcatgggcagggaagctggtatggacggngtgtgtgcnnnnnnnnnnnnnnnnnnnnnnnnnnnnnnnnnnnnnnnnnnnnnnnnnnnnnnnnntagtccgttttatccttggcgccatgtttgaggatgcgggtgaactccacgtagcttgaagttagcctttcttatcaatgggtgcctcaccggtacatctcgtccacttcctcatgctgtgaagcggtcacccatggtggtgaagcagctcccggaggtggtcctcatggatgaaacctgaggcttcctcgtcgaagcaggcaaaggcgttagcgaatcacatcctcaggggtccgtagccgttcagcttctccccagacatggtgaggaacactaggtgaagttgatgggccccggggcctcgctcatcatgccctccaggtattcgtctgtggggttcttccccagcgaggccagcatagtcgtgcaggtcctccttgtcaatgaagccatcacggttactggtcaatcatgttgaaagcctcgcttaaactcctggatctgggacgtggtcaaacattgcgaagacattggatgatggcaccgctgtggccgcttcttggtggtcttggctttggcactcgcttgctggacatcttggcttctgagtgggtggggcttccctggtgcggagaanggcgatcccgggaattccggaccg

SEQ ID NO: 125241 - DNA, 1066 bp, Homo Sapiens
  misc_feature (13)..(13): n is a, c, g, or t
  misc_feature (609)..(667): n is a, c, g, or t
cagacccgacggncggcccagttccacgcacccagcgagcccaagcgccttctccgcaccagggaagccccacccaccagaagccaagatgtccagcaagcgggccaaagccaagaccaccaagaagcggccacagcgggccacatccaatgtcttcgcaatgtttgaccagtcccagatccaggagtttaaggaggctttcaacatgattgaccagaaccgtgatggcttcattgacaaggaggacctgcacgacatgctggcctcgctggggaagaaccccacagacgaatacctggagggcatgatgagcgaggccccggggcccatcaacttcaccatgttcctcaccatgtttggggagaagctgaacggcacggaccccgaggatgtgattcgcaacgcctttgcctgcttcgacgaggaagcctcaggtttcatccatgaggaccacctccgggagctgctcaccaccatgggtgaccgcttcacagatgaggaagtggacgagatgtaccgggaggcacccattgataagaaaggcaacttcaactacgtggagttcacccgcatcctcaaacatggcgccaaggataaagacgaactagnnnnnnnnnnnnnnnnnnnnnnnnnnnnnnnnnnnnnnnnnnnnnnnnnnnnnnnnnnngtccataccagctcccctgccatgaccctcgctcagggatccccctttgaggggttaggggccccagttccaatggaaagaaacaggccaggagaagtgcgtgcccgagcttaggcagatgttcccacatggaccccagaacccctgggctataatctctggacccctccaaggaaaaaccaccttcctgggggaattgggcctggaaggcaggacctaaagggccccagggggagggccccatttccggggctggttcccccagaaagaaagggaaaaggggctctttgtgggcccccccaaaagggaaaagggcccttagaacccgggggaataaaaaaccccctcttccggggttaccccccccaacaaatggcacaccttcccccagggggcccc

SEQ ID NO: 125242 - DNA, 1560 bp, Homo Sapiens
  misc_feature (79)..(113): n is a, c, g, or t
agacttgtattcactataggggctagctctagcagccgaacgacgagcgcagcgaagtagtgagcgaggaagcggccgnnnnnnnnnnnnnnnnnnnnnnnnnnnnnnnnnnncagtcgacggtagcggacatatgcccgggaattcggccattacggtccgggtggggcacgagccgggggcgggtttgaagacgcgtcgttgggttttggaggccgtgaaacagccgtttgagtttggctgcgggtggagaacgtttgtcaggggcccggccaagaaggaggcccgcctgttacgatggtgtccatgagtttcaagcggaaccgcagtgaccggttctacagcacccggtgctgcggctgttgccatgtccgcaccgggacgatcatcctggggacctggtacatggtagtaaacctattgatggcaattttgctgactgtggaagtgactcatccaaactccatgccagctgtcaacattcagtatgaagtcatcggtaattactattcgtctgagagaatggctgataatgcctgtgttctttttgccgtctctgttcttatgtttataatcagttcaatgctggtttatggagcaatttcttatcaagtgggttggctgattccattcttctgttaccgactttttgacttcgtcctcagttgcctggttgctattagttctctcacctatttgccaagaatcaaagaatatctggatcaactacctgattttccctacaaagatgacctcctggccttggactccagctgcctcctgttcattgttcttgtgttctttgccttattcatcatttttaaggcttatctaattaactgtgtttggaactgctataaatacatcaacaaccgaaacgtgccggagattgctgtgtaccctgcctttgaagcacctcctcagtacgttttgccaacctatgaaatggccgtgaaaatgcctgaaaaagaaccaccacctccttacttacctgcctgaagaaattctgcctttgacaataaatcctataccagctttttgtttgtttatgttacagaatgctgcaattcagggctcttcaaacttgtttgatataaaatatgttgtcttttgtttaagcatttattttcaaacactaaggagctttttgacatctgttaaacgtctttatgtttttgtgttaagtcttttacattttaatagtttttgaagacaatctaggttaagcaagagcaaagtgccattgtttgcctttaattggggggtgggaagggaaagagggtacttgccacatagtttcctttttaactgcactttctttatataatcgtttgcattttgttacttgctaccctgagtactttcaggaagactgacttaaatattcggggtgagtaagtagttgggtataagatctgaacttttcatctgcagaggcaagaaaaatatttgacattgtgacttgactgtggaagatgatggttgcatgtttctagtttgtatatgtttccatctttgtgataagatgatttaataaatctctttaaatacttaaaaaaa

SEQ ID NO: 125243 - DNA, 1011 bp, Homo Sapiens
  misc_feature (890)..(924): n is a, c, g, or t
  misc_feature (928)..(966): n is a, c, g, or t
ctcgacaaaccaccaaactggttagattaatccaaaccaaattttcagcaggtaataagatgtgttcttttcagcattttcacgccatttcatagcttgccaaacttacctgaggaggtgcttcaaagccagggtacacacaatctccggcactttcgttgttgatgtatttatagcagttccaaacacagttaattagataagccttaaaaaatgatgaataaggcaaaagaacacaaagaacaatgaacaggaggcagcctggagtccaaggccaggaggtcatctttgtagggaaaatcaggtagttgatccagatattctttgattcttggcaaataggtgagagaactaatagcaaccaggcaactgaggacgaagtcaaaaagtcggtaacagaagaatggaatcagccaacccacttgataagaaattgctccataaaccagcattgaactgattataaacataagaacagagacggcaaaaagaacacaggcattatcagccattctctcagacgaatagtaattaccgatgacttcatactgaatgttgacagctggcatggagtttggatgagtcacttccacagtcagcaaaattgccatcaataggtttactaccatgtaccaggtccccaggatgatcgtcccggtgcggacatggcaacagccgcagcaccgggtgctgtagaaccggtcactgcggttccgcttgaaactcatggacaccatcgtaacaggcgggcctccttcttggccgggcccctgacaaacgttctccacccgcagccaaactcaaacggctgtttcacggcctccaaacccaacgacgcccccggccgtaatggccgaattcccgggcatatgtccggtaccgtcgactgnnnnnnnnnnnnnnnnnnnnnnnnnnnnnnnnnnncggnnnnnnnnnnnnnnnnnnnnnnnnnnnnnnnnnnnnnnnactacagccgagtctttaagcggcctctaattagtgagtctatca

SEQ ID NO: 125244 - DNA, 1276 bp, Homo Sapiens
  misc_feature (1160)..(1194): n is a, c, g, or t
tgtgcgcctgtgccaccccccatttaaagggcaaccagtggcaccttggctctgtgccttaccttagattgtgctcaacaacctattaaagtggtaaaggacgtgactgcgtaacgtaaggacgtgtgaccagatggtccaaaaagctccttagtggtgtgaaaataaatgcttttacttatgacacatatggtatatcagaccagtttgaagagccctgaattgcagcatttctgtaacataaacgaaccaaaagctggtataggatttattgtcaaaggcagaatttcttcaggcaggtaagtaaggagttgttggttctttttcaggcattttcacggccatttcataggttggcaaaacgtactgaggaggtgcttcaaaggcagggtacacagcaatctccggcacgtttcggttgttgatgtatttatagcagttccaaacacagttaattagataagccttaaaaatgatgaataaggcaaagaacacaagaacaatgaacaggaggcagctggagtccaaggccaggaggtcatctttgtagggaaaatcaggtagttgatccagatattctttgattcttggcaaataggtgagagaactaatagcaaccaggcaactgaggacgaagtcaaaaagtcggtaacagaagaatggaatcagccaacccacttgataagaaattgctccataaaccagcattgaactgattataaacataagaacagagacggcaaaaagaacacaggcattatcagccattctctcagacgaatagtaattaccgatgacttcatactgaatgttgacagctggcatggagtttggatgagtcacttccacagtcagcaaaattgccatcaataggtttactaccatgtaccaggtccccaggatgatcgtcccggtgcggacatggcaacagccgcagcaccgggtgctgtagaaccggtcactgcggttccgcttgaaactcatggacaccatcgtaacaggcgggcctccttcttggccgggcccctgacaaacgttctccacccgcagccaaactcaaacggctgtttcacggcctccaaaacccaacgacgcgtcttcaacccgcccccggccgtaatggccgaattcccgggcatatgtccggtaccgtcgactgnnnnnnnnnnnnnnnnnnnnnnnnnnnnnnnnnnncggccgcttcctcgctcacaacttcgctgcgctcggtcgttcggctactaagggagcgccctatagtgagtctatacagtta

SEQ ID NO: 125245 - DNA, 1029 bp, Homo Sapiens
cctgtaagaattgctctcctttactgagcacctcccatgtggctaagcagcctcctgtcactcaacaccctgcgaccccatacatttactgtccccaatttacagatagggaaactgggcccagagggaccccgaggtcctagaaaggacagaagcggtgccatgccttagctggggtcagctctgacagtctctagagtctgtgctcttgaccactgtgccatcctcccccatcactgggtgtccggggtgtggatggtggtgacgttggaggcagagtccctcagcactccacgccgtagcggtcgaagttgcggagcagcaggccgatctccaggtgcacggtgccaccagcagctgtgtgcaggcgatagcggtcggccccactgtagatggtgtccccatgcagcagctgcggcccaccacccacgaaagcccgtgccaactgttctcgccaactgcccaggggccgccacgtggggcaggccagctggtgggtgcccgggctactgggcacatggcaaaatccatagcctgcaagctggcagcggccaaagctgtcctgggaccacacctggaaatggagccggggccagccttgaagacctttggtggcgaagtgcaggtcgatggggtgggaccagtaagccatgtcccctatctgcggggtgtccacttgcgtttggccctcccgcacgcctgacaggagcttccatgccgcccctgtgtgaatgccccacttgcagaagaggctactttccgagaaaccgctggcccctatgatctgcccgatcacgtgcacctcagccatggcccttagcgcacttaacggttaggagaggagaaagcggcaaccggggttgtagttcatgggcttgactgcttcttttctccgcgggcgccgaccaggcctggctcgcgcctctcccaggacccgcctggctgcgagatatgtaagccgcgatacttccgcgaccgcgctcgcctcgtgccgaattcacacccagcctcgtacctagccgtagtttt

SEQ ID NO: 125246 - DNA, 1502 bp, Homo Sapiens
tgtcaagaacaagaaataacacaggccttttatttgctccagaacttggctactgtgtggtctgagggtgccatgctttcccaaagcccccgagggacactccacccagggggtgccagatctctgtgtgtagccagactgcagtgtccccccaggctgccttagtccagaaggccagctgcctgccaccggtgcccgggacgagcatatcccctgaagctggagaatggtgtccacctttgcatggcagcttctcccaaggcattggctaaaatattgcacttgtaaatcaggaaaactgatgaggcaagggtttcctattacaggacgacgtgccaagcatccaactactatttaaataaataaaactcaaagtgggggtctgagctgcaagctccaatggccctctaggagggcccgagagcccaggcctggacctcctgccccatcagccagttctttaaggaacttggtcaacgcgaagcctccgcggtctccgcagcagggagcagcagctccagatctggcttggccagggcccctgacctgccagggtcttgggccccctcgtaccggggcagtggggaccccacggggcccatccttctactcctccagtagcctgggcctctcttggtccaggcctcgcttccgtatgtctatccgtctgtccagagacacggcctctggggggcttgcttgccccctccgtcacagggggcagggaggcaggtgggcaggggacccagcccgcctggtgtgaacgctgagctcgactccagtggcccctaaagcgggggactcatcttcttctggttaataaggtccaggtagaggtcagaacggagaaagcgagggtacgagtccttttccatgagcccgaagatgcgcttctgtgccaggtcgaagcagccccgcgtgacgctctgcaggttgtccttggtgtgctcccgcgtgtaggagtccaggttgacctccttgcatgcctggatcgcgatgtattcagcaaagatcttcttggccttggatgccatcttggactgtgacttgaccttcttgaagtcctcacaagccaaccagaactccagattctcctcactgaactcagtgcgaaggaaggcttggaacactgctaacccgtatttgtgaaccagcagcttctccaaggactcgccccacttgagggcttcctctgaggtgggcttgaatgacttcatcattttgtctgccttgcccgcgggaggggctccaggggactcattccgccgtctgaagatccccagcttgttcttcatgtccttggcttccttcatcgtgtgtcgcctctgcaggttcccgttgcgagtgaggtacatgcctcggagcatctctgtagggccccccaccttggggccccagattggtctgcaggaggcaccactctggctcctgtcccccaccccgcgtcctgggcagcgggcagcaacggtgcaggctgcagccacacacgctctctggaatcc

SEQ ID NO: 125247 - DNA, 770 bp, Homo Sapiens
tttttaggcctgtacaaaactttattatactctgaataacaagcatgtaacaaaattttgagcatgacaaggatgaaatatttcaaattctgtttcttacaaaagcattaagcacaatacacaaagactgttcataatattttacagtcagctaaaaataacaagacattctaggatttcaggagttttccttttctttcaactagagcattagctttatttccattagctttgctacaatgaaaattaacatatatggacatacacatataagtgaaatggaaaatgaaggcatacaacaaacattccgattaatcaacaagtataaaatagtcttttagtacttccaaacttacattttctttgaatgtacaatgaaactttttgtctaaaatgtttttaatgttaattttgaccattcccaaagtaattaatactctttcttagcaccaccattaatctaattttagagtttgaaatgaattaagaaacactctaatcttattcagaggtgctattcacaacaccgaacaacaggcaatccactgccctttatcaaggctgagacactgtagtaaatgagtagttcaccaatactgtctatcccaggtgaatatcagccctgatcttacttccaatgatgagatacatgttttggcttatgtagtagcatgagctatgagataggaaacatgaaagtcacatggacatgaaattaaactcaaatctctactgcatggaggctgaatgtgaaatattcacagtgacta

SEQ ID NO: 125248 - DNA, 685 bp, Homo Sapiens
  misc_feature (601)..(601): n is a, c, g, or t
ttttttggaaattctttacagaaattttatttgagatctcaagtccttataaaaagtgcattacatcaagattgcaaaagacactttttaaatgagagacttctatctactcatccattttaccctatgattcatttcctaccctaacagaaatgatgaaacagtttttctttcttccttttcttcctcctgctttgaaagggcaactgtcatgagggatatcttaacagaatgtgccaattaatccttgccaggagagcagtagcttcctactggctaaatttagagagcccttggcattccttttggtgtggctcaaagattattacaagctgaatctaaaagattgcaacctactacttgcaatctgtctccctgggctcctcttttactcacaaactccactctaaaacaaccttaaattttaagcactcaataattgctttagaaatgaagggatctaaagttaattaccttacccttgcaactattttctgtataagaatctcaaagttaataaaaattatacagatgaagaatgacctaatactaagaaggggatgaattctgagagcaatacattttacaacccttgtctcanaataagatcaatcctacaaaatacaaaatgttaagaatacaatttacacagtaaaaatgatttgatttcagtatgaaagtactt

SEQ ID NO: 125249 - DNA, 1893 bp, Homo Sapiens
  misc_feature (60)..(79): n is a, c, g, or t
gtgccaagctaaaattaaccctcaactaaagggaataagcttgcggccgcctgctcaggnnnnnnnnnnnnnnnnnnnncacaagggataaatagaactttattttaaataaacatttgcactctgtacacagccccagcagaagcagggctcagtcgtcagctgtcttgcgcacatcaaagctgccacagggtcctcgcagcagctctgccagtagcgcaagcagctgcccgtgctcctcctgtacgctggggggaagtgcagccagctcgctgcgcaggctccgctccaccatgcggcccagggcccgccgcagctccttcagcagccgcacggtacgcgagtcaccctccagccgcagcaggtcactgtcgctcagtgagatggtggcccggcgcccgtcatcacggatgtgcacgtccccgtcggtcagcagcagcacagctagcgggtgcacctgagaggagtcccggacgaagacgctgccattggacttgactgccatgaaatacgtcagccatcggctccgtaaccgtgtggcctccctgttaatggtcgacttgtgcagcaggatgttgcctgatttggtcctatatgtgacgctgttgggcttgaacttcccctgccgggtgaccttgccctgcctcacctggatgaggttggggtagaggccggccatcagcacgcccttcaccagctcctcctcctcactgtactcgttgcactgggcggaggccagggtgcagtccgagggcttccccaccaggaaggcctcataaatgttctctgagaactgcttgatgagtccgtggatgaagcgcaggctgggtgcgtacagcaggttttcctccaggtaattctcccgggagctgcggtcctgccaacgcagcacctcctcccagccggcgacagcccgcacaaaggccaggtggtcactgccgctgtcatggctcaacagtgctttcaccttgtccacctctgcccggttctgtaggctgctgctgaaggggtcccgggtgaggcaggaaacgaccaccagtagtgggtgcaggcaacggaagatggcagccaacacaatggccttggccaaccgggggtcggtggagatgtgagccaggcgctgccccagggtagtcaggtactcccgctggtccagcaccccgatctcctggagcaagatcacagcctcgtccactgccttgatgtttggactgtccacagccttggacaggaactccaccgccgtcttctcaggcatgtggattttcgcttgcagcaccaggttctcaagaggtgtgcgcaggatctctggcacttggaaagggaccattttctccagccggcttcgagggaacaagtggtaggcaaagccggactggcagcggcccgcccggccccggcgctggatcacattggctcttgatacccacactgtctccaggcaggacaccttggtcttcaggtcatagcgttcttccttgtgcagcccactgtccaccacatgcacgatgtcattgattgtgatggaagtctcagcaatgttggtggccaagacaatcttgcgcaccccaactggaggctgctggaatatggccttctgatccatcatggggatgttggagtgcactggcaggatgaggtacttgctctcgtgcatgcccagggcctcctggaggcgctgctgcactcctttgatctcctgccacccaggcaggaagcacaggatcccacctggttccccgcgagcatcgatgtgcagaaccagatcagtcacaaggtccaaatcgagtgcgcattcatcctcagactcatggtgccggtgccggtgcaggtactggtgcttgcccaactcctcgtgccgaattcgccacccaggcctcgcttccttggacc

SEQ ID NO: 125250 - DNA, 1004 bp, Homo Sapiens
  misc_feature (27)..(27): n is a, c, g, or t
  misc_feature (32)..(32): n is a, c, g, or t
  misc_feature (85)..(85): n is a, c, g, or t
  misc_feature (140)..(141): n is a, c, g, or t
  misc_feature (154)..(154): n is a, c, g, or t
  misc_feature (261)..(261): n is a, c, g, or t
gcccccgccccgggccccccggggcgnttggnatcaccattggccttctttgataccccaccactgttcttccaggccaggacanccttggtctttcaggtcatagcgttcttcccttgtgcaagcccactgttcccccnnacttgccaggatngtcattgattgtgatggaagtctcagcaatgttggtggccaagacaattctttgcgcacccccaactggagggctgctggaatatggccttctgatccattcatggnggatgttggagtgcactggcaggatgaggtacttgctctcgtgcatgcccagggcctcctggaggcgctgctgcactcctttgatctcctgccacccaggcaggaagcacaggatcccacctggttccccgcgagcatcgatgtgcagaaccagatcagtcacaaggtccaaatcgagtgcgcattcatcctcagactcatggtgccggtgccggtgcaggtactggtgcttgcccaacttggccaggatgtcctctaggtagtgctccttgactgggtacatgaagccaggcaccttgatgacggggcagccaccaaagtatcgggagaagcgctcattgtcccctgtggcactcatgagcaccagccgcagggccgggttgagccgctgcaggcccttgagcaggatcagcagaaagtctgtgttcacgtcccgctcatgcacctcatccacgatgacgtggctcacgccctccaggctggggttgctctgcagcttacgcagcaggatacccacagtgcagaagagcagggccccgcctcgggatgggggcttactttccaaccgcacctggaagcccacattccggcgcagggaggggcccagttcgtggctgacccgctgtgccacagacacagcagagatgcggcgaggttgggtgatgataacattgcagcgggcacctcggccctcggtcacatagcgctccagcaacagctgggggatgcgcgtggtcttccca

SEQ ID NO: 125251 - DNA, 1222 bp, Homo Sapiens
  misc_feature (1201)..(1201): n is a, c, g, or t
ggaggcttgctggcctgggccccaggaaaccaggtagggccttcaaaagatcctgggtcaggttctcgagcccaggcagctgcagttgtacatgaccacgccccaggttccttgacctggggtcagtgaacgccagtccatgttggcactgcccaggtagaagtgggtctggtccacccacccaggaacttggtatgcaggacgccatgggtcagcttctgcatgtccaccatgcggacctgggcaccgctctgcagcagagcctgcaggtccgcctgtggctggggcccgctgggcttgctcacagcgatgcggacgttcacgccctttggtgccagggtctgcagctgccggaggacctcctcaccctgctgggcagagggctcctgcgtgtgggtgtcattgttggtgagggtccagtagaaggaggcgatgtccaggctgctgtgcgcaccggcgagcaggcccagccaggcctggctggtggaagggttccccgtggaggcattggggaagtccaggccctcaggaatgctttccaccagcactgcttcgcaagggtcatagcagggggctgggcgctggttgggcccaaagagatgcaagtcgccgtattcccatagaaacagctgagtcatcagggctccgaagcccacaaccgccagaatgaggaccagcaggacccagcgggctttcttttccgcagccttccacgcctcaatctcattcatgggcagctcattggcgggctcctctgcaggcaccttcagctcctggtacatcagtttaggcttcatcttccctcaaggctgggggatacgcagagcccaggtgagaaggtgggtgtgtcagggtctccaaaccctgaggggcctcggcctcgctctcaggcgtctgctgctacctccgctgggccccagcttctgtctggacaggctgaacgagggtgggaggagggggcggggcctgtgggagctccgcccactgcagcggggagtctgcgcagtgcgtgccccagtccgggctcaccgcagcgagaagcggggctcggctccccagacacggtcgctccagcctgcactccacgtctcccactccgagacccagccccacacgcaccttccaggctgtatccccgcccgacgcgtgggtcgacgatatcccgggattccgacgcgtaccagcctgccttttttgaacnactggttcatagtacagtgcc

SEQ ID NO: 125252 - DNA, 2183 bp, Homo Sapiens
tttacagacaagttatttacttattataaccctgggccctttttgccctggaaagtgggggtgggccagggggccaggcccagcatgcacccccatttctttgggggctgatccctcccccagctctgctgggtcccggggccacagcgtcaggccggtgggggtggaggtagaggtgggagagcaggggagagagcctgaggagccacaatggggcagacagaagcgggggcgcggggacagggaccgtgacccagagcacctgggtccgcgggggcccagcaggccttggcctgcccactggatcgggcctcagagcaggcggcaggcgttgcccacgctgtcagctgaggtgtcaaggtcatggctgtaaggggagtcccagtccctcaggaaaatggcctccagctggctccgcaggccgcccctcccattctgcgtcaccagcagcgaggtgcccgccgtctccgtgaagtagttgccagaccagttggaggttccgatgtaggtggcgcgttcagtcaccatgtacttgttgtggttgacacgggcatatgggattcgagcctgggcctcatccgcggggaccacaaagagtttcacctggatgtcagagtgggtatggttgtcacgcagggcagccagagagagcaggaaggcccgcatggatggctccgagtgtccccagcagctgatgagcaggcgcaccttgacgccacgctcgtaggtggcccgccgcagcccatcgtcaatggcaggccagaacctgtgagggtgggagaactccagagtgggcaggtagttcatgacagcgacgtagatgaaactccgggcattgtccaccacgttgagtagagccttcaggtctggagtgcggccacttggacacaggggtgggggcgcactcgccaggtaggccagagcaggggttccattgaggcagatctccattggtgtctcttggttgtagcgggtgtcatagaaccggggccaagttgatgggatggagctgcctgcctggcccaggaaccagtaggcctcaaagatcttggtcaggtctcgagccaggcagctgcagttgtacatgaccacgcccagctccttgacctgggtcagtgaacgccagtccatgttggcactgcccaggtagaagtgggtctggtccaccacccagaacttggtatgcaggacgccatgggtcagcttctgcatgtccaccatgcggacctgggcaccgctctgcagcagagcctgcaggtccgcctgtggctggggcccgctgggcttgctcacagcgatgcggacgttcacgccctttggtgccagggtctgcagctgccggaggacctcctcaccctgctgggcagagggctcctgcgtgtgggtgtcattgttggtgagggtccagtagaaggaggcgatgtccaggctgctgtgcgcaccggcgagcaggcccagccaggcctggctggtggaagggttccccgtggaggcattggggaagtccaggccctcaggaatgctttccaccagcactgcttcgcaagggtcatagcagggggctgggcgctggttgggcccaaagagatgcaagtcgccgtattcccatagaaacagctgagtcatcagggctccgaagcccacaaccgccagaatgaggaccagcaggacccagcgggctttcttttccgcagccttccacgcctcaatctcattcatgggcagctcattggcgggctcctctgcaggcaccttcagctcctggtacatcagtttaggcttcatcttccctcaaggctgggggatacgcagagcccaggtgagaaggtgggtgtgtcagggtctccaaactggcagaacaaaagtgggcactgtgtggggtgttccctgaggggcctcggcctcgctctcaggcgtctgctgctacctccgctgggccccagcttctgtctggacaggctgaacgagggtgggaggagggggcggggcctgtgggagctccgcccactgcagcggggagtctgcgcagtgcgtgccccagtccgggctcaccgcagcgagaagcggggctcggctccccagacacggtcgctccagcctgcactccacgtctcccactccgagacccagccccacacgacccctcgtgccgattaaaccccagcctcgacctagcctatttg

SEQ ID NO: 125253 - DNA, 1521 bp, Homo Sapiens
  misc_feature (102)..(117): n is a, c, g, or t
  misc_feature (465)..(465): n is a, c, g, or t
caaagcgagtcgagttgaaatttcggggggcattgtttccccccacggtttggaaaaaaagcctttaaggtttgggaggtgggggcacctctggggacaaannnnnnnnnnnnnnnncctctcccccggtttggcccagaaccaggggtttccatttgagggcaaaatcccccattggggggtttctggttggaaggggggggttcattgaaccgggggccaaattgatgggagggagcttccctgcctgggccccggaaacccgtaggcctcaaagtttttggtcaggtctggagccaagccagctgcagttgtccatgccccacgcccaagtccttgactggggtcagtgaacggcagtccatgttggcactgcccaggtagaaagtggggtctggtccaccacccagaactttggtatgcaggacgccatgggtcagcttctgcatgtccaacatggggacntgggcaccgctctgcagcagagcctgcaggtccgcctgtggctggggcccgctggggcttgctcacagcgatgcggacgttcacgccctttggtgccagggtctgcagctgccggaggacctcctcaccctgctgggcagagggctcctgcgtgtgggtgtcattgttggtgagggtccagtagaaggaggcgatgtccaggctgctgtgcgcaccggcgagcaggcccagccaggcctggctggtggaaggtttccccgtggaggcattggggaagtccaggccttcaggaatgctttccaccagcactgcttcgcaagggtcatagcaggggtctgggtctctgtttggggcccaaagagatgcaaagtctcctgtattcccatagatacagctgagtcatcagggctctcgaagcccacatccgccagaatgaggaccagcaggacccagcgggctttcttttccgcagccttccacagcctcaatctcattcatgggcagctcattggcgggctcctctgcaggcaccttcagctcctggtacatcagtttaggcttcatcttccctcaaggctgggggatacgcagagcccaggtgagaaggtgggtgtgtcagggtctccaaaccctgaggggcctcggcctcgctctcaggcgtctgctgctacctccgcgggccccagctctgtctggacaggctgaacgagggtgggaggagggggcggggcctgtgggagctccgcccactgcagcggggagtctgcgcagtgcgtgccccagtccgggctcaccgcagcgagaagcggggctcggctccccagacacggtcgctccagcctggccgggttaggggggtagtacatggctggtggatgggctttgctacattccaccctagagtccccgtgtagggcagggaggccacaggtaaagaacaaaggaacctcacgtcttttctcatttacaaaccttgtgaatttgtgtaccatggacatgcattacctgcactccacgtctcccactccgagacccagccccacacgcaccttccag

SEQ ID NO: 125254 - DNA, 585 bp, Homo Sapiens
tacatttagccctttattgaaacctaagtttgttataagtgtaattatgtaacagtcatatttccaacctggttcccatggctgacttaacccaatccataatctggagcaagccttggctagtgtattttgagatgtccgttgtgtttcagctgccgttcctcactccgcctgcttctccaagcatggtacttcttgatgctcttcctccatgcaaagcgccagatgctaaacatgaaacaccaagacacagcatacatcgctactcccccagccttcacaaaccacttaggcgtgggggagaccatttcacagaaaaggaggcaagctcccacaccaatcctcactcctgtgaacagagccacaaagaggaagtccactacatctccagtgaaactgtgatagtgccctgtttcccggagaaaccagcgcatctgtagcaaggggttggtaagctcacttccaaagaggactgcattgacctctgtgccagactccccaagcacaagggccatgataatgcccaagatactcaatgtgtgatgagccagcatcaaggcaccctcagactgaaagtagacgcac

SEQ ID NO: 125255 - DNA, 889 bp, Homo Sapiens
  misc_feature (114)..(133): n is a, c, g, or t
  misc_feature (805)..(805): n is a, c, g, or t
  misc_feature (858)..(858): n is a, c, g, or t
  misc_feature (874)..(874): n is a, c, g, or t
cttgctggcctatgaaatcccctattttatggctaattaactaatgagtttgagggtttctgtggccttccgtcctcctacccctcccccaacaccagattcatcttctgtttnnnnnnnnnnnnnnnnnnnngcaccatcagttctaagacatttcactttatttaaaagaagccaatatacaggatataaagggcatgatatttacaacagtacagtaaacaggttggtttccggtaggatcagtagtctttccatgagtataaatcccccccttccctgtgatgctagacccagctggcagacaacagcaacggtggggcaggatcatggggtataaagtctccctgggtggggctaaaaatcaggtagatgcaaaaacatccacaaggggtcttgcagggaagggctttgcctcatttctttgagggcttgggagggaagggtcttggtgagggatttgctcagaactaacacacagcccaccctgagcctggaaatcatccattcatagaaaattcccttccagagagaatctggctttacctgcacccacccagtcccctccagactccccactccaggagagagctcttctagagccagagcttggtgtctcaagggggaagacccctgtcctaggaaacccccagcaccctgatccctccccccagggccctggggggaacatagcaaggactgcagcccaggcttggcctggagtagacacagccggggctgggctatgagcatcttaagccatttccacttctgctccagctgcctgaccacctgggacccgcanaggcccaggctccaaggaagtcgtgtgctcccactgtcacccatgctctgctngctcccaaccctctcncaacgcaactgggtt

SEQ ID NO: 125256 - DNA, 1036 bp, Homo Sapiens
  misc_feature (919)..(953): n is a, c, g, or t
aattttagtccagtcccttctcccaaaacataagcttgattccacctcataaaaaaattaaaactatgaactatgatgatgaacttcttcaactacctacctgtgcttctgcccttcctagttcattttcctgtacctatacttaattccttccctcctgtaactggagtaagccctcttaaaaatttaaaactatcttgagccttattcttgcaactgaattcttactcgtccactgtctttttctttcatagccatctctcagaatgtccagactgctgatttccaaaccttcacctctcactgagataagtaacaagctgctctaacgtatgcactccattgaaacgcctcccctagtgatcatcaatgaacctagatgcgtgaagaactctcaagtacttctaaggtttcctctaatgttacttcactgcagcaactggcactatgttaccctcccttcttgaaacattcacttctctcaattgttatgaccataatcctttagcttggcttctacctctgctgtcatcttcagtattctttgcaggctctacttactcagcctgtccacgtgtctgtgttcacgaaggccctattcttcacctgttgctactgccacagccccttctcagccaacctcttccgtttgtgccccacaaagggtgatgactttacaacacccaagtgtttgtttttgaaccttttaaaagatgcatataataaactcatctttgtctatttcacctactcctccccttcagtattacaaatttcagtggatggcacactgggttgcccaagttacaaacctgtgaattatcacagattcctcatattcttactcccctcatatctaagcaattaccccggccgtaatggccgaattcccgggcatatgtccggtaccgtcgactgnnnnnnnnnnnnnnnnnnnnnnnnnnnnnnnnnnncggccgcttcctcgctaacttagtctcgctgcgctcgtcgttcgctaatacggatgcgccatatatggtattaacgtttggcg

SEQ ID NO: 125257 - DNA, 1005 bp, Homo Sapiens
cgttggcgtctctgcctcggtgtttgtgggccgctctcctttgtggcccctctctgcttctcatctcgcgtcgggcgcttattgttggccccttcgctggagtctttctcatggcgccccccccgtatcctgttgagtctgtcttgtgcatgttccttcttctgttctagtccttgctcgttgtctgcgctcgcgtgtttggtttttctttcttgtttttcttggcagcagcagttcacatttattgagggcctgcccccaaggagctcacagcctgggggctgagaccccgaatgtgcagggggcggggaagaaaagaggtgaaggcaaaaaggcaggcaatgcagagacaccgtggcccaagcagagggggtgcaaggcaggcacaggcagggggcctggggcggatggggaggtggagaaccggcagccctgcctagacctgaggactgtagaccccacacgtttgaaggctgccctcccccaccaggatggcactgcccgggcaccctgtgggaggcccagctcctccacctgccctgagccgggtccagcctcacaaaggcccctccacccaggactcccaaccatgcagactcccggtggagggcaggaagctggggtctggggcccagccgggacgtggaggtggggcctatgagggagcagatgaagtgtgggtggccctgggaccctgggcaagtccctaaggaacttccaggatcccatagaagcccctgagccagctaagaagggaaggaagcagaacccaacgaagcaggaggggcctccaagaggcctggcccctcaaacctgctcctgttggggaagctcaggagtagataggtgaaaagcagggggacccacctggggggagggggcagcagacagagcagccaggcgggcagcagagcagggacacgcacacacggctcaccaccagcacccccaataataaaacatgggggcctcgtgccgaaatcgccacccaggcctcgctacctt

SEQ ID NO: 125258 - DNA, 1483 bp, Homo Sapiens
  misc_feature (276)..(276): n is a, c, g, or t
  misc_feature (490)..(521): n is a, c, g, or t
ccccggtcacgcgcgccgcgaggcccgcccaatttgggggatatctttcggcaccagctcccggttcccgcgcccagggccattctttctactccggcggggaattcccaaggccgttaggtcagggccccggggattctcctacgggaaccacctatgcgcccctgttccccttaacctaccggggtccgggcctccaaaaagaaatgtgtagaaaacttttcgagcgcccgagggggccccacatgtttggcgtctagcaggccatggcactcnggcagacagaggttcaggatgtttttggatctgacatagcccaaaccagggcagaggctgtagcaaggggaggaagctgggaaagcctgagggtcagaggggagtggaggtggacaggatctatggctacggtttttcagccgctcagccgtgctgggccctcgatggcccgtgggagtgggagcgtttcctaagctccactgaagataagagnnnnnnnnnnnnnnnnnnnnnnnnnnnnnnnnttccttagtctctggagctggaacaatcaggcttggccatggcggctggtgctgataaccatttcttggcagaagtgcccgccaaagctgtggccctagtcctcaccaccacagagagccagcaaggccttcaggaagtctccggaggtgtcaccctcaatggcttggtggagagacttgtcatatttctcaatgaattccctccggatgttgagcaggtcaatctcactgcgggataccatgatcctggtcagagtcttctcatctgtgccagcacccttcatggatttgtaaagtttgtcggcaaagaagagaggcttgttcttgacactttgaacaatggccacaaatgcatccctgacatccccagacatctccttcttgatggtgtgctccacgtcatagttggtcatcttgatgaactcctggaagactctccggaggtgcggatagctccgggtacacaggatcgtcatgaaacgtgtctccaaaggaagttttgtctcccactgggtgtgtctgctatttccaagatctcagcagccacctgggcatcttcccgtgcctggtccaggttttctcctccctcctcacgatgccccgtggccagagaaatgaggatcctcctgaagtggccagatgtgtctgagctcagagcatcctccagggacttgtgatagtcctccttataggcctcattgatggcccggatttcagcattggtccgagtggccaggatttcaataagagccttttcatctgtgccggctccctccatggccttcttcaactgccttggcatcgtaatgggccggtggcatcatgagcccctatcagccttgccaggtctccagagatctcagacttcaggtcagtcattaagtccggacgcgtgggtcgacgatatcccgggaattccggaccggtacagcctgctttttataccactgtttatattccta

SEQ ID NO: 125259 - DNA, 693 bp, Homo Sapiens
  misc_feature (67)..(76): n is a, c, g, or t
  misc_feature (431)..(452): n is a, c, g, or t
catttagacagttttctttaattgatgatgaagacactacaattctaagtaccagacagaatcaggnnnnnnnnnnttgaaaataagcataacactataaagaaaacttggaaaagtgaaacacttctaaataaaaaatatatacctggcctggcacccattacatatatacataatacatgttataaacatatatacagtaaatgttttggtagcaatacagaccatgcattggtgtttgtgtacacagatgaagtagcaccggggcagccccaccatcttaagatgataaaccaaactgcacatacatttaaatgaaaatacatatatgtttaatttggcccaccctgtagccaagaggtgtaaggaaagtactttgcaagaaaaaattgttttgggaactacattcttaagccaatggtgaagttctnnnnnnnnnnnnnnnnnnnnnnccctacaaatgtctatgcaaatatggacaagttttcctgtttactgaatttgtcctatcctatggcatactcgttaacagcataagcaaagagagatttaaatgccaagtgaatggcagaagtctaaaacaccagatcttttggtgtatacgtcacaaatggcaagtcatacacaaactagaaaagaaagctaactctccacctaagtcatgtgttttctagtcatgttagctaattataa

SEQ ID NO: 125260 - DNA, 677 bp, Homo Sapiens
taaaatctgaaacagaattcattatttcccacagatgaaaataacagaactgtgattgagaaatggagcttaacctgtactaaaaagaatggcttacaacaggggtccccaaccagatataagccataatcacagatatgcttatttgcacagtagctgttgccgaatttcagtctaccatgtgcctattattcaccaaaatagtaatcatacctataccttttaagtattacctataaattcttgctccttatgaaatctcttaatcttccctgattttttattgctattgttgtttgtttttacaaaatctccttaccaaactttggggcacaaaggcctttcaggttgaaaaatttaaactgtccaatcaagtattggccaatattaatgttgtaaacctgtaggtctccttgtatctattctcaatattctccatagcaatttttctcactagtgccttgctcttttctttctcctgcctctatgcaaagccacaattttaccaatttctctattaaataatttttacaattatcctacctaaacatgttttatgtaaattaaccttaccttttatttgatgtaagcattatacaacgtacactagaacttaatataaagtagaacatgcatagtaattttaactatattgggtgttgtcttagtatatttgg

SEQ ID NO: 125261 - DNA, 735 bp, Homo Sapiens
  misc_feature (89)..(89): n is a, c, g, or t
caaagccaagcaactgaagattcagtgacctgctccccaggaatggtagactctccgaactcaaatcgacagttcagaattccagcccnatcaaaacggccaccaccttgcccgatgacatgatcacccagcgagaggacgcagagggggtggcagcggaggaggagcaggagggagactccggtgacatgatcacccagcgagaggacgcagagggggtggcagcggaggaggagcaggagggagactccggtgagcaggagaccggggccactgatgcccggcctcggaggcggaagccagccaggctgctggaggctacagcgaagccggagccagaggagaagtccagagccaagcggcagaaggactttgacatagcagaacaaaacgagtccagcgacgaggagagcctgagaaaagagagagctcggtctgcagaggagccgtggactcaaaatcaacagaaacttctggaactggcgttgcagcagtacccaaggggatcctctgaccgctgggacaaaatagccagatgtgtcccgtccaagagcaaggaagactgtatcgctaggtacaagttgctggttgaactggtccaaaagaaaaaacaagctaaaagctgaatattctgggagatgatgttcaccttcattttccaaaatgaatatcttaaaaatcttatgcagaaatttgcattttgtacctcaatatttctacgtcatgtgccttagt

SEQ ID NO: 125262 - DNA, 976 bp, Homo Sapiens
  misc_feature (745)..(745): n is a, c, g, or t
  misc_feature (787)..(787): n is a, c, g, or t
actaaggcacatgacgtagaaatattgaggtacaaaatgcaaatttctgcataagatttttaagatattcattttggaaaatgaaggtgaacatcatctcccagaatattcagcttttagcttgttttttcttttggaccagttcaaccagcaacttgtacctagcgatacagtcttccttgctcttggacgggacacatctggctattttgtcccagcggtcagaggatccccttgggtactgctgcaacgccagttccagaagtttctgttgattttgagtccacggctcctctgcagaccgagctctctcttttctcaggctctcctcgtcgctggactcgttttgttctgctatgtcaaagtccttctgccgcttggctctggacttctcctctggctccggcttcgctgtagcctccagcagcctggctggcttccgcctccgaggccgggcatcagtggccccggtctcctgctcaccggagtctccctcctgctcctcctccgctgccaccccctctgcgtcctctcgctgggtgatcatgtcatcgggcaaggtggtggccgttttgatgggcctggaattctgaactgtcgatttgagttcggagagtctaaccattcctggggagcaggtcactgaatccttcagttgcttggctttggttgtcacatctgtcacagatcgacccaattcgtgggcatcttttcccatcgacctggagtccctcctgggaactanacatactcttgtcagttggctgagggtctctctgtccatcangtgctgtttttctgtgttcggtcctgtttccaacatcatcatttgtctcatttctctatggagtcagatactcgtgcgattctgctcgaggcaatcctaatgatcgataatcgtacagtcaacgttctggtgatgtacgtcaatccacacatagacgagaaatgtactgggtgcagatacatcatatgg

SEQ ID NO: 125263 - DNA, 1368 bp, Homo Sapiens
  misc_feature (299)..(308): n is a, c, g, or t
  misc_feature (1119)..(1132): n is a, c, g, or t
  misc_feature (1292)..(1326): n is a, c, g, or t
ggtttagtaacatattttattaaatctttacaatcagtaattataatcaaatacataattatatacaggattatatacattttgcccagacttttacatcacagtacatagtttcccttagaaatattgtatacatttatcaccaaacaataaaatccaacaacagtagtgttacagcacctgttagtacagacatctttttcataaattacatcataagaaaatatacggctgtaaattgggcttttaaaaatgtcttttataaaatctgaacatacaatatttcattcacagaatgnnnnnnnnnnctatgttctgactgaagccttgtgcataaaacgaccggctggaatatttactaaattctacccccctctaaaattataagcagtatttgaattacttatgctgagctttcttcatgatgaatttggcatggggtttggtgagagaacaaatgttggctttactataaaaaaggttgtgtgatggtaatttaaattttaaaagcttcttgagagagtaattacattagtgaagttaaaatcagaaagtgtacaatttttctttttactaatactgtaaagaaaaagggagacgtataatgccaagagttaatttgttctgaaacaattatactctttttggaagcctattgcaatttaagaagaaaaaagaaaacttgcctaacaaaatatcccataccaaacatatctagtaaattacaattctttcacacttaaaactttatgggaaaagtattgcaaataagggcatatcatttcaatgaacttttatatgcagaaaaaaactagctattttatttttagtaggtaaacaggttaagttttaaaacttgaaaatacctgaattaaatacttgctctaatatctcttaaaggatttcagctaaaatccttgattccagatttgtaaacattatataaatctttcttaaacaattttatggctgtggtgatcacttcagctatatttctaagcagtcaacatttaactgaggtagaccagatgtttctaaattcggggtttcatagaatcccctgaatctttagcaagttactaaaatgtctataaaagttaactaaaaaacaaaacactnnnnnnnnnnnnnncaactaatgcctttggaatttttaatgaactcaaaaactactttgtggcagtatgtcaagtaagtaaatgaatgtagagttgtaattacaacgttggagttttttagaccccggccgtaatggccgaattcccgggcatatgtccggtaccgtcgactgnnnnnnnnnnnnnnnnnnnnnnnnnnnnnnnnnnncggccgcttcctcgctcacaaactcgctgcgctcggtcgttc

SEQ ID NO: 125264 - DNA, 1413 bp, Homo Sapiens
  misc_feature (92)..(107): n is a, c, g, or t
  misc_feature (136)..(136): n is a, c, g, or t
  misc_feature (326)..(334): n is a, c, g, or t
  misc_feature (409)..(417): n is a, c, g, or t
  misc_feature (426)..(446): n is a, c, g, or t
  misc_feature (575)..(588): n is a, c, g, or t
  misc_feature (602)..(602): n is a, c, g, or t
  misc_feature (604)..(619): n is a, c, g, or t
  misc_feature (624)..(624): n is a, c, g, or t
  misc_feature (665)..(717): n is a, c, g, or t
  misc_feature (740)..(740): n is a, c, g, or t
  misc_feature (743)..(749): n is a, c, g, or t
  misc_feature (956)..(957): n is a, c, g, or t
caaagattgtttttctctctccaaggcggggcccaaccgagggggcgcgtaataataaccccgcggggggggcgagtcacggggtgttccgnnnnnnnnnnnnnnnnttgtggggaggggtgtcttcccccccctncggggcggcggaggagggaggagttttataagagagaatatttacccacaccccctctcttcttctcttacacaaagatatatttgcgcccgccgggccggcgggggggcggtgagtttatttgtgttattattctcgggaggggctcccgccctggagggagctcccccctcccgctgttgtaaaacgnnnnnnnnnggagagggaaccctcccccgggagcgccccctcttcgtaggttttttgttcttcaaacacacccctccggttttnnnnnnnnngggggcggnnnnnnnnnnnnnnnnnnnnnaggccccaaccccctttttctcgtgccccgcgggttttttcttggggaaaacaaaatttggccccgttggcgcctttccccttggggggccccccgcgcccacaaaaaagggttagaaaaggttttttnnnnnnnnnnnnnncggcgccaaggggntnnnnnnnnnnnnnnnnggttngtgaaagtgttttgtgtgtttttgttggtgtctggggtggnnnnnnnnnnnnnnnnnnnnnnnnnnnnnnnnnnnnnnnnnnnnnnnnnnnnngggttgtttggttgcggtttttngtnnnnnnntcagcaggtcatctttaatgcagaggaggagatgggatgtcactcgctgtctggaggcacgtgggtggtgtgcgggccctcactggccagcctctgggtggccccgcctatcccagtatgaacgtagccaactcaagccctctactgtgtctcagcccacgaagcctttgtagccttcatcttccagcagttgaaacagataggggnnaaattcagctctccggggctgctgggctcccctcggcctgggacctgtgccacctgcacatgcccaacaatgggcaggaactcccggatgtttcctgtcaggttcccatccatgatctgccagtggaatatgtccatttgtaattggaggttgggtcttcctaccttctgtaaggatggctgccgcctgctggggcgtgtccaggaagtactgggggtcagtgatgcgggtgttgatgggctccagcagtcccacgaggtcctcctgagccaaaaccccagctgcatgcctcaggttctccagaaaaacggcctccatctcagccttgactgctattcgatcagctccctggggtactcggccagccatcaggtggatcctgtggggaagatggactggaggccttgcctcccttggctctctctgcacctcttccaggattccctgactgtgcca

SEQ ID NO: 125265 - DNA, 709 bp, Homo Sapiens
  misc_feature (47)..(85): n is a, c, g, or t
accactttgtacaagaaagctgggtcaggaaacagctatgaccatgnnnnnnnnnnnnnnnnnnnnnnnnnnnnnnnnnnnnnnngcctcgaggctgatactcacagcccacgaagcctttgtagccttcatcttccagcagttgaaacagataggggaaattcagctctccggggctgctgggctcccctcggcctgggacctgtgccacctgcacatgcccaacaatgggcaggaactcccggatgtttcctgtcaggttcccatccatgatctgccagtggaatatgtccatttgtaattggaggttgggtcttcctaccttctgtaagatggctgccgcctgctggggcgtgtccaggaagtactgggggtcagtgatagcgggtattgatgggctccagcagtccacacgaggtcctcctgagccaaaaccccagctgcatgcctcaggttctccagaaaaacggcctccatctcagccttgactgctattcgatcagctccctggggtactcggccagccatcaggtggatcctgggacagacccagggcatttggcataccagcacggcctgctccagtccctctcggaagccgcctgtctcccggggacggcccccagccccatttcccccttctcttggcctcgtgccgaattcgccacccaggcctcgctaccttagaaccgtagtagtactgccatcc

SEQ ID NO: 125266 - DNA, 712 bp, Homo Sapiens
aacagatagggaaattcagctctccggggctgctggctcccctcggcctgggacctgtgccacctgcacatgcccaacaatggccaggaactcccggatgtttcctgtcaggttcccatccatgatctgccagtggaatatgtccatttgtaattggaggtgggtcttcctaccttctgtaagatggctgccgcctgctggggcgtgtccaggaagtactggggatcagtgatgcgggtgttgatgggctccagcagtcccccgaggtcctcgtgagccaaaaccccagctgcatgcctcaggttctccagaaaaacggcctccatctcagcgttgactgctattcgatcagctccctggggtactcggccagccatcaggtggatccgcacggcctgctccagtccctctcggaaggccgcctgtctcccggggacggcccccagccccatttcccccttctcttggtctcccgggggcgtgttgatcagtacaagccgcagccccgcttctcgcgcggcgcgcgccagcgcctcaggcgtctccgcgtacggccaggccacctcgacggcctcgaagcccgagctgcccgcggcccgcacccgcgcggggaggccggggagctcggggaatagccaggacagattggcggagaagcgcagcggcgccatgcctggggaggccgggccgggcggagtccgcgggatccaaa

SEQ ID NO: 125267 - DNA, 1479 bp, Homo Sapiens
aggatgaaatgtcaggttgtgccccatcagtcagtcactggtcaaggccctcacctgttcctctagacctaggctggcagcctcacgtgctgtccccactgtgcacccccttctccgcacacccacagacgacatgtaagtacgtgtgtagtttccaccatttctcacctcgagccagaaccccagctgcatgcctcaggttcttccagaaaaacggcctccatctcagccttggctgctattcgatcagctccctggggtactcggccagccatcaggtggatcctgtggggaagatggactggaggccttgcctcccttggctctctctgcacctcttccaggattccctgactgtgccagccctcgtccgtctccccaggtctccagtccatggcacctgggtcacgatgcccaggtatcccagcactttcagagacacttcagtgatggctgaggggcaagccctctcccagacatctcagtgtccacccaccgcctcctgcttccagtactttccaaaacctttccttccctcggtccttctccgcaacctgtaacctgctaaattctcacctttaaaaattgtcctgacctttgcttgcccttctcaggtattccatgctgctgtctctacttcctctcctcgcatctacttagccttttcccatctgttttctgcccccaccattgaccagtagtgatcccctcttgccagttccttctgagcctgtttggcctctgcaggatttgacatttgaatcagccccactttgagccgtccacctcctcccatcatcccctgatcttagccacatccagctccaagcagacattccaggcctccccatcccaacaggctacatacatgtccagcctcaggaacgctgccaaatacaccaggcctcctcttgccacagcacccttgcaaggaacactcaacttcctgcccatcaagcaatgcccactccttgaagacagtccaagcatcactacctgtaagcagctttctctgatccagacagggttacggtgcctaccctgctcccacagcttcctggaataggcctgtcctcaaatgcatcactgtatatatttactctcctatctgcctaggcagactgagctcccagcatgggatcccagcatggggtgagcatgaaagagtggcaaacagagtggcataagacagataaaatacaaaaggcaatttacaaaggacacaggaccgcagaggcagagataaaccagtgggctcagacttctgagcgtctcagatctggcagtcctcgactccctgaacctgcatcagggtcatgggtacacaggggtgggggtggggtggagcggggtacctgggacagcccagggctttggcataccgcacggcctgctccagtccctctcggaagccgcctgtctcccggggacggcccccagccccatttcccccttctcttgtctcctgcagagagaacg

SEQ ID NO: 125268 - DNA, 1070 bp, Homo Sapiens
  misc_feature (724)..(725): n is a, c, g, or t
  misc_feature (794)..(794): n is a, c, g, or t
  misc_feature (812)..(812): n is a, c, g, or t
  misc_feature (884)..(884): n is a, c, g, or t
  misc_feature (899)..(899): n is a, c, g, or t
  misc_feature (943)..(943): n is a, c, g, or t
  misc_feature (965)..(965): n is a, c, g, or t
  misc_feature (973)..(974): n is a, c, g, or t
  misc_feature (982)..(982): n is a, c, g, or t
  misc_feature (984)..(984): n is a, c, g, or t
  misc_feature (987)..(988): n is a, c, g, or t
  misc_feature (993)..(993): n is a, c, g, or t
  misc_feature (1002)..(1002): n is a, c, g, or t
  misc_feature (1004)..(1004): n is a, c, g, or t
  misc_feature (1006)..(1006): n is a, c, g, or t
  misc_feature (1016)..(1016): n is a, c, g, or t
  misc_feature (1019)..(1019): n is a, c, g, or t
  misc_feature (1022)..(1023): n is a, c, g, or t
  misc_feature (1046)..(1046): n is a, c, g, or t
ttttagcagtttaatttggtcctgagaatgttgcagtctttattaccccttttgcattaatccacttttctaaccaccttttaagctttaatttttaacactatacaccaagtctttgaaatcagtgatctgttatttaactctaaagcatttgacacttcttgccttaacagttttaaaaaccacacacaaaaaaactctgtaagtaatacagtaggccaaaagtttcatcctatctatcttgcagtttacctatctgatctgatctctgtaattatagttctgtcatttaaaatatactatttaaatctaatttttacatttcaaaaattatcttcagtagtaactaagtatattttctgtggattctgagaatgttatttttcagaatgtgagaatacatatgtacatttataatcttgtgactttaaagtctgttttcagatacagtatgtaaatacttgtaaaaaaatttgtataattttgtgataatgtagtttcccaaaaaaattatttagaaggcattatgttattagtaaatgagagcactgtatagaactgttcctattttctgcacttgccattccagctgcctccactgtccatacccacctcattcatcctgtcacagaaggcaggaaaactgggaactttaccaaagtagcactcagcctgagaggcctgtattatcatgcttttcaaactaaattcacttaaaaattannaagcagacttgaatattttaagcagcctcagtacctttggccaatgctgttttcatggtggattatgancattatataatctttggngacaaagtgaagtagtacattttttagaataatgacaactggctcactgcatctctccactcacacagcaancgtgtagccccctangctgcagtacaatgactaaccatgatgtcatttcatatgctgantctcacaacagcagtgcacaancatgcccnnaatatttnancannaattnagctctccntnangctgtctttncanagnnaaacaaacaaaacacccatgttnaacacatataactacaactgaaaa

SEQ ID NO: 125269 - DNA, 914 bp, Homo Sapiens
  misc_feature (665)..(679): n is a, c, g, or t
tgtggtccctttttgtggtgatcattttaaaccacgtcatccaacaaatgttttatggtcaaccttagcttgttcataagccatagcaactgaaagattaaactcttaaatatgtgtctgggcagtggctattaaatagcaaaaaacaatcagattttagtattttattatttccttgtaaaatggctgaactaaattaaacccttgtttcccatttgttctataatttatagtgaaactgagaacaaaactatctttataaatgatagctaaaagtatttccagatatttaaacaatttaaaataaatttcttctgcagagatgcaaagcatctcaacactggaatgaacaaatgccttaaattcaatggagtaaacctttagaatgaagaggaactgtcatttcacccaagccgaagacaacagccttatgcacttgtgtgctctgtctttgctgcttctcgtgtttcaagcctttcctgtgggatcagcacagcaaagtgcaacttaccaaatggtttaatgactggttaattctttcttctcccaatggaaaagcaatggcaacacaacagtagactgctggcttgacaatcttaaacgtgagcctttgcacatgtaggtttatcatcatttgagtatacgactaagcaagtcaatgaacnnnnnnnnnnnnnnnagcagtttaatttggtcctgtagccccctaagctgcagtaccatgactaaccatgatgtcaatttcatatgctgatcctcacaacagcagtgcacaaacatgccccaaatattttaacagaatttagctcttccttaagctgtcttttcatagtaaaaacaaaacaaaaacacccaatgttaaaaccacataataaacttacaaacttgaaaaattagacacttcagatagatcc

SEQ ID NO: 125270 - DNA, 1093 bp, Homo Sapiens
agtcatgggaacccacgacggaaaaccccgggggggcccccccaagtttctggggggttttctccctccacaaacggagcgcgaacccacgcgggggctgggactccaggggaacagcacccgggggcgtggggcctggcctcgggcccacggggggagcccccaaccggccagaagggggctcggtcgagagttaatccggactgagagcaggccagtggcgcctgagtgcgttcaggctcaaggtctccaggagacgctctggagtcctcctgcaatgcgcctgcgtggctgcagctctgctcagcaccgtgcgcactgggctccagggaacccggtcaggggctggccgtgacccaaactctctgtgggccacagtccctggggcatccccgtgagtcccacaagacgaggccacgttacgaagctgccaccagctccgcctgcctgggcctggccttgacagggacgttttctgggatcttctcaggaaggggctcggagggaacctctggcagctctatttgttcctgagtgattgcgctcagctcctccaggatggcgtcttcatcctcctgagtgaagcttcctgccaggagctcgtctatttgccgctggtactccacggcctcctgcgtctcgtccaggatcctctccacctcttcaatggacatcacctggtgcatcttgttcagacactcatttccaaactgcagcccctccatcactttcatttcgatctgggtgaactcaatactctgaaccatggcctccaggctgctgatctggttctccgtcctgtccaggagctgctcctggtatcgcttcttcttgagcagcagcttggcccgttccttcctgccgtcccgcagcagctgccgggccagggcgcgctcgcgctccagctgctgggcgatcctcttctggtactgcctcagcttgtcccgctgctgcttcagttgcaggatggccttgtcctgctccgtgacgcggctctgcttcttgcggccgaacaggttacccatggcggcgcccgccctggcccgggacccaccaagtccaatcgccatcccgggaattccggaccggtacc

SEQ ID NO: 125271 - DNA, 848 bp, Homo Sapiens
cagtttaccgtcctcacactttattgttagctgttctttaagtttctcacacattattggcaattatgtaaaaatcaagaacctctataaaacaacctggctttccaggtggaattccgcatacagccaaaactggattccagtgtggccagacaacgcccatgtcccaatttaagagtcgctgtcctcaccaccatccggagtggcctctctgtcagtgtgtgatgtggccagggcagtgtccacctgaacttcctcctcatcggactgaacaacgggggactccccaccctcactgatgtcccgggtggccgagtcggtgcaggtggaggaagaagaaggtggcttggctcttaattctgagggatttggaacctggagggtaatctcattctgacaggtactggattcaggccctaaggcgggggacagcacagtgttctcttctcctccagagttcaggaagacgtccagggcctcctggtccgatatgtccatcaggtccatctgctccagcatgtccacgttcacttccatggatgacatgctgcctatgggctctcgccgctctgcaatctgcaggtagccagtggacaggtactgctccatgtcctgctggaaggcttcctcaaaaaacttctgccgctccttcagcttcatttgctgggtgtgctccatttccaggaccttctgggcgtgctctgcatctagttcagcttccccttgcccttctcccctgaggcaggcataaaacctaggaaggatcttctcattttctcctgaagcaggacacgagatcgtgatgtgagagacgccaaccctacacctggagagaaaggactctatct

SEQ ID NO: 125272 - DNA, 907 bp, Homo Sapiens
  misc_feature (109)..(109): n is a, c, g, or t
ccaagcccccccaggtgttttcttctttttcccctccccgggagtttccaggaaaggcggttccaggggcccttccttggtcccgatatgtcccatccaggtcccattntgctcccagcaggtccacggttcacttcccatggattgacatgctgcctatgggctctcgccgctctgcaatctgcaggtagccagtggacaggtactgctccatgtcctgctggaaggcttcctcaaaaaacttctgccgctccttcagcttcatttgctgggtgtgctccatttccaggaccttctgggcgtgctctgcatctagttcagctttgaaggtttcaagttccttcctcttatttttcttgtaattctccagttgctgggactgcatatgtttgcatctttctaattcacactgcccacataagtcttccagatgcagcaggttgttctctacctcctcaaaagtcgcctctaaatgagtcagatttgctgtcatggattgtaagtctgcgattaaagctgggagctgctggagctgctcttgcagctccacgaggcttgtctttttcttctcccagtgcgcagaaagcatgaccacctcgctatccaccagctctccagcacttgcacagtctttggctcttctgtgaagtgcagcccatgtatcctcatacctgctaagtaattctaatccagcagagtactttggcaaaaatggaacagtcctgggtttgcttttcacttttgcttctcttgacttgtcacttaaagtcttcagcccggaggtgaaatcctgctgcacgctcagcagccgctcgcgaagggtctccagcattgccgccgccgccggtctcctctcctcaggccccggtctggtcctcgccgccgcgccgcaaccccagcccctccc

SEQ ID NO: 125273 - DNA, 1088 bp, Homo Sapiens
acatgtttggtctggttgggggtttggggttttccgcttccgtccgggtttattacccccaatccaacccccagcaagtccctccgctccagccttcagtccccctgctgccctgccagcaagagcgaggggcccttcttggtgtcaggatttcttagtccatgccagcggcccctcctgcgcagccaggacggcgtccaggtcccgaggtccacagcggtcccggggctcggggagcaatccgggcgggcgtcggcgtggaggaagcagtgccttcaatcatcgggggaacaggccaggggcaactgatccggactgcccacgctgccagtgctggagcttccatcgcctaggtcgcggggcccgcacgggggcaaggcaagctcgggtgctggcccggctcctgatcccccggcgccgctggggccgccgcgggggccccattcttcgcccagcgccaggcagagctccttaagcgctaggttctcccgcagcagctcctcctggcggccctccagctcggccagcttctgccaacagccgcccaggtcctcgcgcacggcccgggatgcttgggtcccgaagagctgccactggcgtgcggcgcgccgcccgcgctggcgctccgagtccaggaagcagcagaggtcgcgcagctcacggttctctgcctgcagacgccggttgagctgcttgagctcgcggatctcgcccaggtggccctgcagctgccgattcacctcctgcatgaggcggccgcgctgcaccagtgccgccaggcgcgccgcctcctcccgccgcaggcgccgcactagctcttccttgcctagcgccgccatctcctcgtccgtcagctcctccaggccgcctgcctcggcctccatggctggtcaggcctctggagcatcgcccgcccgccgccgcggcccaggagccccacgtcgggcccggcgccactcaggctcgggctccggctccgcacgcggcaggcagtggccgaggcagcgtaggctgcagcagctacccgggctggcctcgtgccgaattcgccacccaggcctcgctaccttaaaccgtagagttactgc

SEQ ID NO: 125274 - DNA, 489 bp, Homo Sapiens
cgatccggtacttggaggttcgaagctcctagtttcgggttgagaccgatgtggagggcgatgacgcgcgggttccttgacatcgaggatcagtaacacccggagtgggtggggaacgaggggggcggcccctgagctcaggccccgcccctttccggggacgtttcaccggattggctgtccttccataacgacatgcggccccgccccggcgcgcgccccgccgcgtgcccagcccgggtagctgctgcagcctacgctgcctcggccactgcctgccgcttgcggagccggagcccgagcctgagtggcgccgggcccgacgtggggctcctgggccgcggcggcgggcgggcgatgctccagaggcctgaccagccatggaggccgaggcaggcggcctggaggagctgacggacgaggagatggcggcgctaggcaaggaagagctagtgcggcgcctgcggcgggaggaggcggcgcgcctgg

SEQ ID NO: 125275 - DNA, 570 bp, Homo Sapiens
  misc_feature (129)..(129): n is a, c, g, or t
  misc_feature (340)..(340): n is a, c, g, or t
ttttcatataaactttgtaactttttggacattgaaagatgtatgtaataggggagggtagaagcagttggtatgggaaaaaacaaaggggaatgtgagagctgggctggggcaggggctagtccatcntcataatccatactaccagcatcaaatgtccttgagtgcaagagagcaatcgtcatcacccacgatggccctggaccaaacgaaggcagtttgggcctataccccaagtcaatatggtggcttccatcatccacggatggctgccctgcagaagtccagtgtggtagctgaatggcagttcaggatggcttgttcacatggtccagttgtnggccccttggatcctctctagcgcgtagaagcttcctctgcatatgatgttatagcagctcttttcctccaagtcctcttggtttgagaatgtagtgggcagactagatccttcttggcccagccaaaggagcttcacccttcagaagccaaggagcatgggagggacggagacatttgccagtgcccaactctgggctcctcctccatgtgcctacggcaggtgggatc

SEQ ID NO: 125276 - DNA, 646 bp, Homo Sapiens
  misc_feature (32)..(32): n is a, c, g, or t
accaggggggggaatgttgggttttcggggtnttttactgtcagagacagctggatcagctccagccacatttattacaaaatagtgaccgcagttctggtatagaaaagatccctgacagcccagtacacctgcaacggcccccaccccacagagttcctctctcaggtgcctcaggtgtggaagttctcagattcgaaggtttcctgccaggagggcgctgtaccgggcagttgtgaggggcaggtaggcacctacagcctggtccagaacgtacagtgggtcagacagggtgctggggtcgaagccctcatttgccatccgaactttctgctgtttgaaggtctctgtggtggccaaagactcctggagcctgaggaatcggggccgggcataaggtggcaagttctcagacacgtgggtgtagagctgcataaggtccaaagcgttgggggggacggcagaactagggctgccattccagccctgccttcatgccctggcacagtgactccatagacgttcacctcctgaagaaaatctagggcctcgaagacctctgccacctcgggttgtggccacattctcccccttccacctgaaggtgtctccagtacgatcatggaggcggagaaaccttggtcat

SEQ ID NO: 125277 - DNA, 432 bp, Homo Sapiens
gtaggtcagagacagctggatcagctccagccacatttattacaaaatagtgaccgcagttctggtatagaaaagatccctgacagcccagtacacctgcaacggcccccaccccacagagttcctctctcaggtgcctcaggtgtggaagttctcagattcgaaggtttcctgccaggagggcgctgtaccgggcagttgtgaggggcaggtaggcacctacagcctggtccagaacgtacagtgggtcagacagggtgctggggtcgaagccctcatttgccatccgaactttctgctgtttgaaggtctctgtggtggccaaagactcctggggacaggagggtcagggatttggagggaaggggactctgcccacgtggttcaggggagttgcctgaattttgttaaggagcaagtcttcctcgtgcc

SEQ ID NO: 125278 - DNA, 674 bp, Homo Sapiens
  misc_feature (583)..(583): n is a, c, g, or t
  misc_feature (596)..(596): n is a, c, g, or t
  misc_feature (626)..(626): n is a, c, g, or t
gtggagctgggggatgtttactggtgtggggggacctgggaacatcactgtcgttcgtacatctctcgtaggatcttcatgctttctgagtaacgaagctggttccgatgagaggcctccttccacctggggaggcagaggggagactcagcagttgcaaagggccctacgaggggcaagcaggctgggggacgctcacctctggcggatgcgtttccagcgctgcatgttgcgatagatgagtgtggagggtgagggctcgggctcagagggctcatcgtcaggggtgccctgcatctcaggctgcagtggagatgggatgcgggatctgcaggcatctccgggtggccccgggggtgtgggtggcggcagcttgtacacatcacgactcttgctgttggttacctctgatccctcctcatcctcaggcagcgggggcaggggtgagctgggagagcattcacgctcgcgcacagaggggctgttgcgcatccaggcgcggcagattgggtacagtggcgtgttctcgctgaactgggccaagtccacgctccggtcgaacagcttgatcacatatgtgttnggatcgctgcggncctccctcaagcagcccatcatccatctcnctcctcttcttcctccgctggtgggggaagcgggcagatggcttttgc

SEQ ID NO: 125279 - DNA, 753 bp, Homo Sapiens
gcggccgcctgctcaggttttttttgtggagctgggggatgtttactggtgtggggggacctgggaacatcactgtcgttcgtacatctctcgtaggatcttcatgtctttctgagtaacgaagctggttccgatgagaggcctccttccacctctggcggatgcgtttccagcgctgcatgttgcgatagatgagtgtggagggtgagggctcgggctcagagggctcatcgtcaggggtgccctgcatctcaggctgcagtggagatgggatgcgggatctgcaggcatctccgggtggccccgggggtgtgggtggcggcagcttgtacacatcacgactcttgctgttggttacgtctgagccctggggacacaagggccccatgccaggcccaagagagtcaaagcagaggggctgggaatccacattcatccctcctgcctttcccagcaacaaatggcatgaggggctcgctaagggactcagacaggaggcatgtatgaagggcagacacctcaaccagccagcgggtcaagtgtgcctgccccagggacccctgtcttctcctatccagcccagagactccatctacacctgtcagcccagggagtcgcgtctgcctgcctcagggaatcctgtctagggggtcacgtctgtgccacctaggaagctctgtccatttctgacagtcctatatgtctgaagggtcctatatgtctgtcctggggaccttgtctacccgctgggtc

SEQ ID NO: 125280 - DNA, 904 bp, Homo Sapiens
tttttggagctgggggatgtttactggtgtggggggacctgggaacatcactgtcgttcgtacatctctcgtaggatcttcatgctttctgagtaacgaagctggttccgatgagaggcctccttccacctctggcggatgcgtttccagcgctgcatgttgcgatagatgagtgtggagggtgagggctcgggctcagagggctcatcgtcaggggtgccctgcatctcaggctgcagtggagatgggatgcgggatctgcaggcatctccgggtggccccgggggtgtgggtggcggcagcttgtacacatcacgactcttgctgttggttacctctgagccctcctcatcctcaggcagcgggggcaggggtgagctgggagagcattcacgctcgcgcacagaggggctgttgcgcatccaggcgcggcagattgggtacagtggcgtgttctcgctgaactgggccaagtccacgctccggtcgaacagcttgatcacatatgtgttggatcgctgcggccctccctcagccagcccatcatccatctccctcctcttcttcctccgctggtgggggaagcgggcagatggccttttgccagtggctgcgattgagcagtcccttattgtgggtgtcttagggtgttttcccagcttcctcatccagacgcctccttgtccatgtgactcttctccaggagacacttgaagacagcatcccgttggttccgggctttggccatctccagctctgatttctccactttcaccttcacagggaacatggtttgggtccgggatctggctagctgggtcagaggcgccccaaagggcctagggtcacaagtcaaggcgggagaaggcggggacagttcaaagatgagcttcgtgggccacgg

SEQ ID NO: 125281 - DNA, 693 bp, Homo Sapiens
ccttcttccctcccccgggtagtgttttggtttattatcttagtgttgtcacagtgatagaaacccccagagtgggaagaagagctcctgcgaggacctacattttgccattcccctctgccctggggctcagagccttgaagcctttgcttggcccttgcatgttaggatatggccaagaatcagaaactgatgcgtttttccagcactacctgtgtgctgcactcatggaaggtgggaagctatacacaggtatccaacttggttataagacaccagttcccacagggctggatttctcagctgtctggtaaaccagtggcacttcactgccccagggtggctggctccctttctgaatttctgtctcaatgtgatataattgccaccattcaggatggctacccacatctggtatgaacaccatgacttctgtaagccaacggggcttcctcctcagaacagtgcccgtgcaatcttcctccctgtggccttgatcctgggaaaggagccccctcctccctcactcggaggagttcctgaggcagacgggccactggtgacgccaggtgtagcagtagaggaccttcgccgctgccgcaggaggaaatcgtgtgaagctccatccatggcgtagaatacattagccgaggctgggatagtcagctctcgctcccctggtagcagctgtac

SEQ ID NO: 125282 - DNA, 579 bp, Homo Sapiens
gtgatctcttagcagaatagatttattatttgattgcttgcagaataaagcctatccttgaaagctctgcatcatgggcagtgagctcagtggtatctggaggacagggcactggccactccagtcaccatcttctgccaggaagcctgcacctcaggggtgaattctttgccgaaatggattgccaaaacggtcaccagcacatttcccaggagcttgaagttctcaggatccacatgcagcttgtcacagtgcagttcactcagctgggcaaaggtgcccttgagatcatccaggtgctttatggcatctcccaaggaagtcagcaccttcttgccatgtgccttgactttggggttgcccatgatggcagaggcagaggacaggttgccaaagctgtcaaagaacctctgggtccatgggtagacaaccaggagccttcccagggtttctcctccagcatcttccacattcaccttgccccacaggcttgtgatagtagccttgtcctcctctgtgaaatgacccatggcgtctggactaggagcttattgataacctcagacgttcccctcgtgc

SEQ ID NO: 125283 - DNA, 508 bp, Homo Sapiens
  misc_feature (212)..(241): n is a, c, g, or t
  misc_feature (382)..(383): n is a, c, g, or t
  misc_feature (392)..(392): n is a, c, g, or t
  misc_feature (439)..(439): n is a, c, g, or t
  misc_feature (458)..(458): n is a, c, g, or t
  misc_feature (461)..(461): n is a, c, g, or t
  misc_feature (465)..(465): n is a, c, g, or t
  misc_feature (469)..(469): n is a, c, g, or t
aggggccggcggctggctagggatgaagaataaaaggaagcacccttcagcagttccacacactcgcttctggaacgtctgaggttatcaataagctcctagtccagacgccatgggtcatttcacagagggagggacaaggctactatcacaagcctgtggggcaaggtgaatgtggaagatgctggaggagaaccctggaaagctcctgnnnnnnnnnnnnnnnnnnnnnnnnnnnnnntgacagctttggcaacctgtcctctgcctctgccatcatgggcaaccccaaagtcaaggcacatggcaagaaggtgactccttccttgggagatgcataaagcacctggatgatctcaagggaccttttgccaggctgagnngactgactntgacaagctgcatgtggatcctgagaacttcaagctcctgggaaatntgctggtgaccgttttggnaanccanttcnggcaaagaattcacccctgaaggtgcaagcttcctggca

SEQ ID NO: 125284 - DNA, 585 bp, Homo Sapiens
  misc_feature (252)..(301): n is a, c, g, or t
  misc_feature (417)..(503): n is a, c, g, or t
gtgtgttttttgctttgatctctcagcagaatagatttattatttgattgcttgcagaataaagcctatccttgaaagctctgaatcatgggcaagaggctcagtggtatctggaggacagggcactggccactgcagtcaccatcttctgccaggaagcctgcacctcaggggtgaattctttgccgaaatggattgccaaaacggtcaccagcacatttcccaggagcttgaagttctcaggatccacannnnnnnnnnnnnnnnnnnnnnnnnnnnnnnnnnnnnnnnnnnnnnnnnnatcatccaggtgctttatggcatctcccaaggaagtcagcaccttcttgccatgtgccttgactttggggttgcccatgatggcagaggcagaggacaggttgccaaagctgtcannnnnnnnnnnnnnnnnnnnnnnnnnnnnnnnnnnnnnnnnnnnnnnnnnnnnnnnnnnnnnnnnnnnnnnnnnnnnnnnnnnnnnncttgtgatagtagccttgtcctcctctgtgaaatgacccatggcgtctggactaggagcttattgataacctcagacgttcc

SEQ ID NO: 125285 - DNA, 573 bp, Homo Sapiens
  misc_feature (239)..(288): n is a, c, g, or t
  misc_feature (404)..(490): n is a, c, g, or t
gtgatctcttagcagaatagatttattatttgtattgcttgcagaataaagcctatccttgaaagctctgcatcatgggcagtgagctcagtggtatctggaggacagggcactggccactccagtcaccatcttctgccaggaagcctgcacctcaggggtgaattctttgccgaaatggattgccaaaacggtcaccagcacatttcccaggagcttgaagttctcaggatccacannnnnnnnnnnnnnnnnnnnnnnnnnnnnnnnnnnnnnnnnnnnnnnnnnatcatccaggtgctttatggcatctcccaaggaagtcagcaccttcttgccatgtgccttgactttggggttgcccatgatggcagaggcagaggacaggttgccaaagctgtcannnnnnnnnnnnnnnnnnnnnnnnnnnnnnnnnnnnnnnnnnnnnnnnnnnnnnnnnnnnnnnnnnnnnnnnnnnnnnnnnnnnnnncttgtgatagtagccttgtcctcctcctgtgaaatgacccatggcgtctggactaggagcttattgataacctcagacgttcc

SEQ ID NO: 125286 - DNA, 1016 bp, Homo Sapiens
  misc_feature (43)..(61): n is a, c, g, or t
taacctcactaaagggaataagcttgcggccgcctgctcaggnnnnnnnnnnnnnnnnnnnatctatattggtttttatttataaacagattgacataaaataagtccagatggcagcgtgagtagctgtgctgctgacttgcttacaaggaagcctgtggacaggcgagtgggtggaaccgactccagcctggaaaacctgccctcccatcccccttagcgccttcttggccttccggcctgattttcttcgacagcagttctggccagggcaaggagctgtggtgggggcagtatgagccagggactcccttcccacagatgaggcctagggctgcaaaagggccccgtgaagagaggagaaggtgacagggatccttctcctccccatatggagtgatgtggtcaaggctttatgggtctctccacctcaaagagaaagtgccctagggtagtgtcctctgaagaggggccacgcctatctgcagagggcctctctgggaccaaagcagggcagtctccctcctcctgaaacccagtgtctagtgtgggaggagtattaactacagggtttgcccaagtgccagaaacaataaattaacaataagatctttttgtaaaaaaggtagaggtttgcaccacgagtttggattcaggggaatctggtgagaaggtacgagctgtggggcgatggggtgccacagcaagaccaggacagagttggccttttcctccatcacgtggaaggcattcagccttaactcctggtgagaggccagccagggttgagaaataaatagagggaccttagagccccggcagagctgagggaagagcagcaccagccctggacccccactctccctcctcagtccttcatggaaggacttatcatggcagctgtggctaggagtggtggctccacacagcctcttggagtcctgaggtggcccggaaccccactgaggtgcctggggtgggctgatgcccctcattcctagaagaatgcccccacc

SEQ ID NO: 125287 - DNA, 1869 bp, Homo Sapiens
  misc_feature (124)..(124): n is a, c, g, or t
  misc_feature (171)..(796): n is a, c, g, or t
  misc_feature (838)..(856): n is a, c, g, or t
  misc_feature (1321)..(1345): n is a, c, g, or t
  misc_feature (1530)..(1689): n is a, c, g, or t
  misc_feature (1710)..(1710): n is a, c, g, or t
  misc_feature (1715)..(1715): n is a, c, g, or t
  misc_feature (1858)..(1858): n is a, c, g, or t
catatctataccagtgatggcccagggcataaatatgtctaccgggtgactcagagatagtaccggataagcacaacgttgggttaacgggggttagtaacacagccaaattggaggaaggacnataccgaattgagatactacaggctgagctatgagaagcgccacggnnnnnnnnnnnnnnnnnnnnnnnnnnnnnnnnnnnnnnnnnnnnnnnnnnnnnnnnnnnnnnnnnnnnnnnnnnnnnnnnnnnnnnnnnnnnnnnnnnnnnnnnnnnnnnnnnnnnnnnnnnnnnnnnnnnnnnnnnnnnnnnnnnnnnnnnnnnnnnnnnnnnnnnnnnnnnnnnnnnnnnnnnnnnnnnnnnnnnnnnnnnnnnnnnnnnnnnnnnnnnnnnnnnnnnnnnnnnnnnnnnnnnnnnnnnnnnnnnnnnnnnnnnnnnnnnnnnnnnnnnnnnnnnnnnnnnnnnnnnnnnnnnnnnnnnnnnnnnnnnnnnnnnnnnnnnnnnnnnnnnnnnnnnnnnnnnnnnnnnnnnnnnnnnnnnnnnnnnnnnnnnnnnnnnnnnnnnnnnnnnnnnnnnnnnnnnnnnnnnnnnnnnnnnnnnnnnnnnnnnnnnnnnnnnnnnnnnnnnnnnnnnnnnnnnnnnnnnnnnnnnnnnnnnnnnnnnnnnnnnnnnnnnnnnnnnnnnnnnnnnnnnnnnnnnnnnnnnnnnnnnnnnnnnnnnnnnnnnnnnnnnnnnnnnnnnnnnnnnnnnnnnnnnnnnnnnnnnnnnnnnnnnnnnnnnnnnnnnnnnnnnnnnaagaattcggcacgagggttggagcggccgcggctgtaggcnnnnnnnnnnnnnnnnnnnatgtcattcagcctttactgtaaaaaaggaaacaataaaaacaaaaccctattaataaacacaatgcaaacaatgcccgagattatcataaaaacatactagcaagccacaagtaccagagaggggtgaacaggcatatctgctagctctcctcttgcagtcctcagcctcccacaggaggcacaaggtccaaactattcctcaaaaaaaaggacagcctctttatgctgaaataggaactttaaaggaagctcttcttgtagtccaaatggacgtaccttgtggtatggctgtaaggactcgattttacggcttgtgtattcctaactatagctaggcctgtcacctgctgttcctgtgatctcagctttacctagaagagctcctgaaacagaatgggtacacgaaaatctggaatgaatagctatctgctcaaaaacgattgtttaaaaacagatgattggnnnnnnnnnnnnnnnnnnnnnnnnnccttcttccttctttttaggagaatgagaaaataaaagtatagaaagtaaccattaaactggagtactggtattctaaatctagaataaccacactgaattaaaaggtcaatcaactatttttacttataatttgttccttgattggtagatttagttgaagaataacctcgtgccgaattcttnnnnnnnnnnnnnnnnnnnnnnnnnnnnnnnnnnnnnnnnnnnnnnnnnnnnnnnnnnnnnnnnnnnnnnnnnnnnnnnnnnnnnnnnnnnnnnnnnnnnnnnnnnnnnnnnnnnnnnnnnnnnnnnnnnnnnnnnnnnnnnnnnnnnnnnnnnnnnnnnttattgcgtgcgctcatgccngcttnccagtcggaactgtcgtgcagctgcataatgatcggcacgcgcgggagaggggttgcgtatggcgctctcgctcctgctcatgatcgcgcgctcgtcgttcggtgcggacggacactcatcaaggcgatacgtatcaagatcnggataccagaa

SEQ ID NO: 125288 - DNA, 1059 bp, Homo Sapiens
tttcaatgtttatgtaattcagcctttaccctagccccggcccctcagctgtggggagaggccgcctcctctgatggggtctcgatgctgctgctctgttcctggtctggcacgtcctcctcttcctgctccaagctgaagttctcgagctcctgaaaaatctcatccatgaagtcctgggagttctgtttgtaagacacagctaatcgaattgcatcattgaagagctctgcagtcaaccacaccgttcacaacaattggtaccatcaagccagccgagacgaaatacaggggcagggagaacttctttggcaaaagttgaaagctcttttttgggtcacgtttatgtcatcaattttattggccaccacgatgcatgggatctctggcctgaactcccgaagctctgtataccaggtgctcaggttcctataggtgactttcctctgtacatcaaacaccatgatgcaggcgtgggccttgtggtagtaggaggcatgcatgctctggaaccgctcctggcctgccgtgtcccaaaagtccacaaggatggtccttccatctaccgtggctgtgtgcttgtacagggtcagggcgtacgtggacagctgctgtggctgaaagccatccatgagaaatctctccatgagtttggatttgcccactgcgctgtctcccaggcagatgatcttcacgttgtcatcagcatcatacttcccttggtccaactcactcggtttggttttgtcttctgccattggctcctagctgtagagaggggtccagcccaagggaggggagggtattgtcactgtcaacagggcccccgagttttcctgactgtgccaccacacagctactgcttctgcacagccagggacttcgccttgtttatccagggagacaattcctgggaagtggcagatgcctggaaagcatgatgaggggtctgccccctttcacctgtaccgtgcggttccgagtgagggctggagagaccagggacgctgcgggtcggcccctcgggcctgccgccagtctggactctgcgcgctctcg

SEQ ID NO: 125289 - DNA, 1386 bp, Homo Sapiens
  misc_feature (652)..(710): n is a, c, g, or t
gcggacatcagtgcactcagggctgggggaggctgtttaatgagcggggggcagtacaaaagagcagccttctctcagtgggaaaaggcaagagcacctggcgctgggcttgctgggggagggagcagcttctcagttggttgggggagggggaggtatgttccctgggccttcggagggaagtgggggcctcagcattgggggcatgggagttggggggtgcaccccaggatttgaggggtgaactcccggaggctgagggtggaccccaggagccgacggatggaccccgggaggttgggggtggacccccggggcctgagggtgcatccctggggctggtgggtgcacccctggggcctgagggtgaacggcgggggctgctgggtgcacccccggggcctgggggtgaacccccgctgatgggggaggatggacccctggggctggtgggtgaaccccaggggctggtgggtggactccgggggctggtgggtgaaccccgggggctggagggtggactccaggagctggggggtggaccccagaggttggtgggtggaccccaggggctgggggatggacgccaggagctggggggtggacgccaggagctgggggatggaccccagatgcagggggatgcaccacnnnnnnnnnnnnnnnnnnnnnnnnnnnnnnnnnnnnnnnnnnnnnnnnnnnnnnnnnnnctgagggcgcaggccctgtggggggcatgggtggcagaggcaggcctcctggcgggggcggtggcaaagactcaggcagcggtggccgagggggcagaccgttcatcagcgggggtggaggccgcttcaccccaggggggccagcagggaggctgggtggagccgggggcttctccatcttaaagtggaactggaggaagaactgcttggtctcccggttccagtgtgtccagaacttgccctccgccttgtcgatctctctgctcggcaccttgaaggcaatggtctcgtagggctcggcggccatgagcaggtactgccagcgccggtccggaggctcgatcctctgctcgtacgcagacatgaagcggtgacgtggcatgatgccctcggcgatctcagggtagtcaatctggaagaggaggctctgctggcccatctccgagtctctctgcttggtcactttgtagcccgggcggccgatcttcacaaacttcttcacctccaccttgaccttctcaggcgcgggctgggcaggggcctccattggcctccttggctgctcgccgggccaggttggtctggtgcttcttccactgcgtatgtgccaggtagctcccctcattgtgcctcgtgccgaattcaacacccaggcctcgctacctagccgtaagtt

SEQ ID NO: 125290 - DNA, 984 bp, Homo Sapiens
  misc_feature (130)..(138): n is a, c, g, or t
ccgcacgcggacctccctggaaggggccccagcgcccctttggggttgggcccatggtttgacacgagggccagccctttccgttccgaggggcgcggggcaaagaagcttcaggccagccggtggtccnnnnnnnnncagaaccgtttcttcaaacggggggttggagggccgctttcacccccagggggggccagccagggagggtttgggtggagccggggggtttctcccatctttaaagtggaactggaggaagaactgcttggtctcccggttccagtgtgtccagaacttgccctccgccttgtcgatctctctgctcggcaccttgaaggcaatggtctcgtagggctcggcggccatgagcaggtactgccagcgccggtccggaggctcgatcctctgctcgtacgcagacatgaagcggtgacgtggcatgatgccctcggcgatctcagggtagtcaatctggaagaggaggctctgctggcccatctccgagtctctctgcttggtcactttgtagcccgggcggccgatcttcacaaacttcttcacctccaccttgaccttctcaggcgcgggctgggcaggggcctccttggcctccttggctgctcgccgggccaggttggtctggtgcttcttcccctgcgtatgtgccaggtagctcccctcattgttgtgaagtgtcaggcagagtttgcattcataggagcccaggtggttcttcatgaagtacgggtccttgttgatgtcgatggtctccagggccagctgccggaggcgctccctgcggtcacggttgctctcggaggaggaggccacgcccccgctcccggtcttgcccccggggcgatgctggaagtccatggtgatggccttagggctttagcagactgggagacaccagagcccaaggccgcgttatctcctcctcgtttcgcccctcgtgccgaattcgccacccaggcctcgcta

SEQ ID NO: 125291 - DNA, 1057 bp, Homo Sapiens
  misc_feature (60)..(78): n is a, c, g, or t
ccggcagtaactactacggtctaaggtagcgaggcctgggtggcgaattcggcacgaggnnnnnnnnnnnnnnnnnnnaatgaagctggagttgaagatcgccatctcagaggccgagcagtctggggctgctgagggcactgcgtctgtcagcccccggcccccaatccgccagtggcgaactcaggaccacaataccccagcacttctccctaagccctctctgggccgaagctactcctgccctgatctggggccccctggcccaggtacctgcacctggccacctgctccagcccaaccaagccgaccacggccgcggcggcacactgtgggtggtggggaaatggcccgagccccgccaccccctcggccctgtctccggaacgaggtcttccctctcggaggagtgggagcctccccttctctcaccacatcttgctcgtccacggcatccacttccttctccgaaccagcagaacccaggttgggttcaaccaaagggaaggagccaagagcctcaaaggaccaggtgctttcagaacctgagaccaagaccatgggaaaggtttctcgattcagaatacgcagaacaccagcccgtcctcagctaaaccttacaccaatgggactgcctcgaccaatcaggttgaacaagaaggagttcagcttggaagaaatttacaccaacaagaattaccaatcacccacaaccaggaggacctttgagaccatctttgaggaaccccgggagcgcaatgggactctgattttcaccagctcaaggaagctccggcgggctgtggaatttcgggacagcagccttcctcgatcacgaagaccgtcccgtggggtccgggctgcagggggcaggactgttcctcccaatgtggcccccagccctgatgtgggccccctgctccagcagcggctggaggagctagatgccttgctcctggaggaagaaacagtagatcgggagcagccccactggacctaggtgccccatctgttggtcatccatcctgaagggacaggaaacctccccaggcagtta

SEQ ID NO: 125292 - DNA, 211 bp, Homo Sapiens
tttttgagttgatttattcttttatttataaagttgttaatatgctacatagtccctaattttgccacaaatagtcattattttaatttcatatttcactattgataaatgaaggaaaaaatgagtagcagttaagcagtccataaacctacatataaagcaaattggagattttaaaattgattctggatgcttaaaatccttctcattg

SEQ ID NO: 125293 - DNA, 708 bp, Homo Sapiens
tttttttctgagagtgtgctccaagaggtttattagtatccacactggggagctctgggttcttgcccagaacaaggggctgagaacatccagtcaggatgcaaggccaccacaggctgaggggactggcactggggatatggcagggtttcgccttcaagcacagccaagacaccctcctttgcccttggagtctcctcctgaagagcatggctgtcttccccatggagaaaatgaggtctccagaggtttcctgccttgcccaatatccaccaaccccctcagaatctagaccccccctgtctgttcctcacctcggccaggatcgggggacacccccattttgcagagtcagccccacccccacctcagcaggccccagctcactcctagaacctagtgactaaagtctggagcggataaattctatcaggttctccaactgctcctccaggcgctgttcaactccatggttctcgatgacccagtcaaagtccccgaagttgtccaggccacattctgactcagcatcgtccacccctggcgtgaacacccagccccgctgctgtcggctctgctccaacgctacaacgcggaccgtctgcgtcacggccccataggcctcccgaaaccactggatgtcagacactctccgtgtgtcactcaccagccagatgggctgggagatgcctccacaatcttcctgca

SEQ ID NO: 125294 - DNA, 937 bp, Homo Sapiens
ggctaggtacgaggcctgggtggtcgaattcggcacgaggggctggactgttctaagtgaagttcgggtgggggagcttcacgaggggaggctgctctgtgaaggaaccgcctttctctccgcgtgtctcacccttttctccccatatctgtttggacatgagctgagggcacggtcgcgggcggtcagccctgttcgcagctacggcgaggaggggcgcgattgctccttgttgccgctccgcttagtggccgcgtccattccgcgcggtgtcccgattttaggggtagggagaagtgtcagcttcaggcatcgcgaggcgtggcggccccatggccccgctgggaggcgccccgcggctggtactgctgttcagcggcaagaggaaatccgggaaggacttcgtgaccgaggcgctgcagagcagacttggagctgatgtctgtgctgtcctccggctctctggtccactcaaggaacagtatgctcaggagcatggcttgaacttccagagactcctggacaccagcacctacaaggaggcctttcggaaggacatgatccgctggggagaggagaaacgccaggctgacccaggcttcttttgcaggaagattgtggagggcatctcccagcccatctggctggtgagtgacacacggagagtgtctgacatccagtggtttcgggaggcctatggggccgtgacgcagacggtccgcgttgtagcgttggagcagagccgacagcagcggggctgggtgttcacgccaggggtggacgatgctgagtcagaatgtggcctggacaacttcggggactttgactggggtcatccagaaacatggagttgaacagcgcctggaggagcgttggagaactgatgaattatccggtcagactttatcactaagttctagaatactgggccgctagt

SEQ ID NO: 125295 - DNA, 695 bp, Homo Sapiens
gtgctcccaagaggtttattagtatccacactggggagctctgggttcttgcccagaacaaggggctgagaacatccagtcagaatgcaaggccaccacaggctgaggggactggcactggggatatggcagggtttcgccttcaagcacagccaagacaccctcctttgcccttggagtctcctcctgaagagcatggctgtcttccccatggagaaaatgaggtctccagaggtttcctgccttgcccatatccaccaccccctcagaatctagaccccccctgtctgttcctcacctcggccaggatcgggggacacccccattttgcagagtcagccccacccccacctcagcaggccccagctcactcctagaacctagtgactaaagtctggagcggataaattctatcaggttctccaactgctcctccaggcgctgttcaactccatggttctcgatgacccagtcaaagtccccgaagttgtccaggccacattctgactcagcatcgtccaccctggcgtgaacacccagccccgctgctgtcggctctgctccaacgctacacgcggaccgtctgcgtcacggccccatagcctcccgacgcgtgggtcgacgatatcccgggaattccggaccgtaccagcctgcttttttacactgttctatatgtccatgcccagtgcgcc

SEQ ID NO: 125296 - DNA, 627 bp, Homo Sapiens
ctacatgtacaacagcgacaaggacaccgtggagcggttcgtgctcaaacctgccacgtgcccaggtggagtacagtgaggaccagcaggctatgctcaagacacccaacacattcgcggtgtgcacggaacaccgcggcatcctgctgcaggccgccagcgacaaggacatgcatgactggctgtacgccttcaaccccctcctggccgggaccatacggtccaagctctccagaaggaggtctgcccagatgcgggtctgaacctgagccctcccgtgacagccggcaggcccagcccatcccctccctcatcctcgtctgtcctgtcacctgccgcccagcccctctcctgccagacagcccacgaccgggtcgaccccccaggggacgcccatgccaggcccggggacctgtgccacacgaccagctgtgctcccagcagaggctgtgcgtgtcagttcttcttgcagaatgtgctctggtggaacaagttgggagaggctgggggggccaagggcacaggttacgggggttcttgctgccgttctaatatttttttaagcatagacagacttataattaatatccgttagttagtgacattgaaacagtcaactcggaaatt

SEQ ID NO: 125297 - DNA, 1261 bp, Homo Sapiens
  misc_feature (1187)..(1187): n is a, c, g, or t
gcctcaggcacagtcgtggttagccgtatcattgtgtgggacatcatggcattcaatggcatcatccatgatatggccagccccttcttggcacccccacagcctcaggcagtgctggcgcctgaagccccacctgtggcggcaggcgtgggggctgtgcttgccgctggagcactgcttggcttggtggccggagctctctacctccgtgcccgaaggcaagcccatgggctttggcttctctgccttccaggcggaagatgatgctgatgacgacttctcaccgtggcaagaagggaccaaccccaccctggtctctgtccccaaccctgtctttggcagcgacaccttttgtgaacccttcgatgactcactgctggaggaggacttccctgacacccagaggatcctcacagtcaagtgacgaggctggggctgaaagcagaagcatgcacagggaggagaccacttttattgcttgtctgggtggatggggcaggaggggctgagggcctgtcccagacaataaaggtgccctcagcggatgtgggccatgtcaccaaggaagggggtcttcatgcagccggtgcagagctggtccatccagaggggtgcctcgtgctgcagcggcgtacggcgtgggtagaaggtgaagtccacgcggtagttgagcaggcagctgagggaggccatgtagaggtcagagaagcgcacgaggcgccttgagaagtaggtggggttgtggaaggtgcggaagatgctgccgaactgcgcattgaacagggccttggtgatgcacctcagctcctgccgctctttcatccaggcagccagcacctgcctcgactccgcgtcctgataggtctgcatgcgctccagcagccccgtgagcgcctgctgccacgtcagcgagtgcatgtactgctccgtgttgatgatgcggatctcacgctccagctcggggatgatggcgcctgtgcgccagccgtgccgcagcatgagatccgccagatcactatagaggtggtccccgaagtagagcacgcgggggccacgccattccgtcaagcgtaagaagtcaaacaggtttccctgccgatagatcttgcccttttccaagcgggtgatccggtccactgaagtgagcccttctcatcgattttctgaaaggctgcgcggtcagtgangagctgggctttctgctggacatgacacatcgaagagtggcgccatcgggaccacatgtgcgcatccctgtctc

SEQ ID NO: 125298 - DNA, 1119 bp, Homo Sapiens
  misc_feature (304)..(304): n is a, c, g, or t
gggagggggtgggtcccccttcccagaaaggggggggccccttggttgtctgccagccgggccgtaagggggttggggtagaaagggtgaagttccccccgcggttagttgaaccaggcaagctgaggggagggcaaggtaggagttcagagaagcgcaagagggcgctttgagaagtagggtggggttgtggaaggtgcggaagatgctgccgaactgcgcatgaaacaggggcttggtgatgcacctcagctcctgccgctctttcatccaggcagccagcacttgcctcgactccgcgtcntgataggtctgcatgcgctccagcagccccgtgagcgcctgctgccacgtcagcgagtgcatgtactgctccgtgttgatgatgcggatctcacgctccagctcggggatgatggcgcctgtgcgccagccgtgccgcagcatgagatccgccagatcactatagaggtggtccccgaagtagagcacgcgggggccacgccattccgtcaagcgtaagaagtcaaacaggtttccctgccgatagatcttgcccttttccaagcgggtgatccggtcccactgaagtgagcccttctcatcgagttttctgaaaggcttgcgccggtcagtgaagaagctgggcttgtctgcctggacaatgaccacatcgaagagctggcgccaatcgggacccaccatgtgccgcatccccttgtctacgaagctgaaaggactgttggtgatgaggaacagctgtttcccatgggccaccaggcggctcaggacagcaaacgtctcatcccctctcaggatgtacttctccatgtcctgctcgatccactggtacatgaggcccttcacatgcacgtctcggatggcgtccgtcacgtccttgtagagatgtgcttggtcaaactccaggctgtggcccagaaagtagtccaccacacaggacagcagagccatctccggtagcgagaagatgtccatgaactgcttaatggagggacccttgccatagaagccactcatctggtatagtgggatgtgctgggtacccccatacagcgtcaatcacctcctcgtctggcacaggctggaggcccctgtagg

SEQ ID NO: 125299 - DNA, 1423 bp, Homo Sapiens
  misc_feature (485)..(497): n is a, c, g, or t
  misc_feature (906)..(963): n is a, c, g, or t
tttcatgctttttatttttcggtttatttaatcttctttaacacagccattgttggttcaacaatccaatatttgaggttacattattgcaaaaataaggacatagctgaataggttatgccatcaatatgtttgttaatcctatcccttttattaaagacaaagcacagtttgttaatattgtcttggattaactctatttgtaaggttacttatagtggttcatactaaaggcaggggatttgcttcctgggccaattgtctttaaactataatttaagaaatcattagcattttgtaattaaaaacagataaagcaatattttagtacaatgttaggcagcagataaaattaccctgtctgaatatatgtgtacatatacataaaacgctagcatgctttaagaagttaagaaatattaatattctgtgaaattaatatgtaaataaaatataatctggaatgaaattcccattatgtaccnnnnnnnnnnnnntagaatctttcacttccgaaacctatagattttagcatcttataagcctacatcacatcacatggaatgtaagggttagtttaaatttgaagagcattaaagaatagtatgaggctaagtttccacaaaacagtatatattaattgtattttgaagatttatattcgttccaatgttaacaagacgacatccttttgaacttccttaaagaaatatttgtaatgtcctttatttattaagaaaaatacagctttaacactataaaatgtttattattaaaaatattagaaaataaaaatattttgaagatgacatgttattccaggatatacgaacttctttagtatttttatttaaagagtgaaatagttaagctactattgtaagtattttactttcaagcacatannnnnnnnnnnnnnnnnnnnnnnnnnnnnnnnnnnnnnnnnnnnnnnnnnnnnnnnnnccaaattttctttcttactttttgaatagtcctgactttactacgtatcttacttcattagctgacttttataatctcttcatttttccttcgtttgcaataaaacaatggtttctagcaagtaaacaaccaactgatcatctctttttacctttcgtagatgttttcttcttaaaacatatagttatatgtttagcttacatatttatgtatattatatatcaacacttaaagaataataattagattcacagagtacggtggaaatacaatatattaccggtacactattcagcaagcttatggaatgacaaaaaagaatgaatcacttttcatgactagtatcttaattatcctctgtttttttctgactaagtcaaagagattagcatttttcaactgctcagcttcttcttcaatcttggagacattctacagagatagacctaagagcaattaa

SEQ ID NO: 125300 - DNA, 867 bp, Homo Sapiens
gctttcccatctgactttatttcacttttttgtttctataaaactcctccataatttcacaatttaacaaaagtttaaaatccaggaaagaaacaatcctgtaactcgttacaaacacgattctccttattccttttatccaggagttggtctcgggccgatgagtgtcctagttcctagtgagacacgttctttgtaaaaacccttatgggcaagaaaggtattcgataccatttgctttccggcgtcggtttacatttttgttcaggagagagcaaaacacagagatttgcactgggggcaggcggcttaacaggaaacacgtggcaatcacaaagtgccaggcccctttcctatggaagtgtccccagagccctcgtgggcccagccgccgggcagctggggtggggtgggagagcagctggggatgctgccttgggagcccatgctgcccagcacgtccatcaggtggtcacggagccagccctgggcccagagcagctctggaggacaacgtgaggccttccggccagaggaggtaactgagaactgggttggtgcttccggaggccttggaaacggcaggaagggccagacgccaccaccgagagcaggcgggggagcccgaccctcctctggctgagtggaaggctgctcgagtcgctgtgtggattttgggggactcctgcgaaggagaaaggccagcagcctgggctgaggttcctgtccgtgaccccggcggcctcttgtgcgtagagctcccagcagcacgggcccccgtcagcccgacgcgtgggtcgacgatatcccgggaattccggaccgtaccagcctgctttttttaccagctggtcatagttactatgc

SEQ ID NO: 125301 - DNA, 1374 bp, Homo Sapiens
  misc_feature (463)..(463): n is a, c, g, or t
  misc_feature (632)..(659): n is a, c, g, or t
  misc_feature (692)..(705): n is a, c, g, or t
aaatcctcccaagtatttggacatatatgaaatgtttcaaaacctgacagataaacactgagatatgcttcattcaataaacagaagtctgcatttataaaacagaaagctgccttttttccccaaagaaatctgtcaccaaaatggaaaagggtctcaactttacaccaaacatttagcaataaaacccttttgactaaccacatgggaatagcttttatagctctgttacagttttataattgacagaaatatagtttttttttaaaccctcaaattagggcaccctaatcaaggccaaaaacttaagaaatggcttactgttagcacaacacgttgtacagtactaccaaatgcactgtcactaacaaagacattagcggcatgctgaagtgtcaccttaaacaaaatatacaataactgaaatgctaaaggcatttacatggagtggacagggaagggnaaaaaaaagctctaggttcaatattaaaacagataatttgggggggcttgatatccacattgtttaacagaagcaggcacaacaagtggctgcctccaaattgtagtccacaagagaggccttcctttgcagagaattttatataaaagtacagaaatgaaggtacccnnnnnnnnnnnnnnnnnnnnnnnnnnnncaacttgtataaggctttctgctgcatacagcnnnnnnnnnnnnnnaaataaatggtgccaacaaatgtttttgcattcacaccaattgctggttttgaaatcgtactcttcaaaggtatttgtgcagatcaatccaatagtgatgccccgtaggttttgtggactgcccacgttgtctaccttctcatgtaggagccattgagagactgtttggacatgcctgtgttcatgtagccgtgatgtccgggggccgtgtacatcatgttaccgtggggtggggtctgcattggctgctgggcatatggctgggtgcccatcatgcccatctgcatctgcatagggtattggggcgtttgattcatatagccatgattgctgtggtagccactgttcatcattggctgggacatgctgtacccattcatggcgttgagagtgttcatgttcatgttcacagagttgacattgtaggctggcgctggcatcaggttcacactcatgttcatgcctctttgcatcgttaaagtccgtgcaggaccctgcatggctacagtctgggagcgcccatagatttgtgactgatgggtggcagcggctggtgacagagacgctgacttggttcttatgggagatgtggcccttgctggcaatctgggtttgcagtcttttgcctgtgagagatgccaatatttgatgcagccatgttccgttgca

SEQ ID NO: 125302 - DNA, 1171 bp, Homo Sapiens
  misc_feature (42)..(62): n is a, c, g, or t
ccctcactacaagggaataagcttgcggccgcctgctcaggnnnnnnnnnnnnnnnnnnnnnacagtgtagtgaaggaagtttatttacggatgtggagagaacatggtaaaggcccctgggctggccagcaagggggcaatcagtggagattgaaaacagattctccaagccagggccagggaaaagggctggggaaccagcaggaggggggcggaggggcagagctgacctgaacctagagaagagagaacatggccaagaattatccaggtagaagaaacagaggaatctaaagggggtgtatgtccaaccccaagggtgccccaaaggcacagtggcagtgaggcttgctctggcctagtcctccagcaaattccatcactgctgatggactgggcaccatttcagccgttctcagaggtagcccgcccaggccaggcatgctggaccacaggctcttgaccttgactgccctctgcttctggggctggcggtctcctcactcaggctccctcagcacagcaaccagctccctctgttctctgtgtagagcctgccaggcctgctgctgggcctggacctgtagctgcagctcctccacctgcctccgccctgccaggacggcatctgccagctgctggttctcggcctcctgtttctgcacatggcgccgcagggtgtcccgttgctgcaggaagtagggtgccataacactgtgcagatccttctctgggatcccgctggggcgccaggctggctctttgcggactttgccttcttccacaattttatccaaggcattcaagacagcttctaggttcccctcctctttgatgtcagagatttcctcccggatagatgtctgcaactgagctataaacttgtcatagatttgctgtgtcatcgcaggctgcaactggtagaagcacttatagcagtcagtgaatctctggtagctgccggcggcgaccagcttctgaagaaaagtgtccaccatggtgtcgaggagcttcaccctcgaaatggtagtgccgggtggcacagattccgaagacgacccctcatgccttttttcctcacagccgctgcctagattggcgctacttgcttcggccatgttgaagcctcgtgccgaattcaacacccggcctcgtacctagcccctattt

SEQ ID NO: 125303 - DNA, 1151 bp, Homo Sapiens
  misc_feature (1028)..(1062): n is a, c, g, or t
  misc_feature (1066)..(1110): n is a, c, g, or t
ttttcctcttctggagtttatttgggagcagctgggatgatggggaccccacatccatagggctgggaggtcagggcaagggcaaggggaagaggaaagaagggtgcctggagaggagcagaactggggttgccggccaggccagcagagcgacaccctagaccgggccgtagaagcgccgataggcctcctgaaagccgatgtggtcagccaactcgtcacagtccggattgagctcacacacctccctcctgggctccaggggatccgggtaggggactggggctcccagccattgatacaggtagcgcctgggtctcttcactacctcgctgccctcctgcttggacacaaaggctgcacctttgctggactctgcaccgctgggcttcgcacctgccaggcctgctgctgggcctggacctgtagctgcagctcctccacctgcctccgccctgccaggacggcatctgccagctgctggttctcggcctcctgtttctgcacatggcgccgcagggtgtcccgttgctgcaggaagtagggtgccataacactgtgcagatccttctctgggatcccgctggggcgccaggctggctctttgcggactttgccttcttccacaattttatccaaggcattcaagacagcttctaggttcccctcctctttgatgtcagagatttcctcccggatagatgtctgcaactgagctataaacttgtcatagatttgctgtgtcatcgcaggctgcaactggtagaagcacttatagcagtcagtgaatctctggtagctgccggcggcgaccagcttctgaagaaaagtgtccaccatggtgtcgaggagcttcaccctcgaaatggtagtgccgggtggcacagattccgaagacgacccctcatgccttttttcctcacagccgctgcctagattggcgctacttgcttcggccatgttgaagttgaacctcccccggccgtaatggccgaattcccgggcatatgtccggtaccgtcgactgnnnnnnnnnnnnnnnnnnnnnnnnnnnnnnnnnnncggnnnnnnnnnnnnnnnnnnnnnnnnnnnnnnnnnnnnnnnnnnnnntgacgacgctgagcgccctatatgagtctatacgatctttt

SEQ ID NO: 125304 - DNA, 948 bp, Homo Sapiens
  misc_feature (49)..(49): n is a, c, g, or t
  misc_feature (57)..(57): n is a, c, g, or t
  misc_feature (109)..(109): n is a, c, g, or t
  misc_feature (208)..(208): n is a, c, g, or t
agggtggcccccaaaaggcaacagtggccagtgaggcctgcttctggcntagtcctnccagcaaaatcccatcacctgctgatggactgggcaccatttcagccgtttntcagaggtagcccgcccaggccaggcatgctggaccacaggctcttgaccttgactgccctctgcttctggggctggcggtctcctcactcaggctccntcagcacagcaaccagctccctctgttctctgtgtagagcctgccaggcctgctgctgggcctggacctgtagctgcagctcctccacctgcctccgccctgccaggacggcatctgccagctgctggttctcggcctcctgtttctgcacatggcgccgcagggtgtcccgttgctgcaggaagtagggtgccataacactgtgcagatccttctctgggatcccgctggggcgccaggctggctctttgcggactttgccttcttccacaattttatccaaggcattcaagacagcttctaggttcccctcctctttgatgtcagagatttcctcccggatagatgtctgcaactgagctataaacttgtcatagatttgctgtgtcatcgcaggctgcaactggtagaagcacttatagcagtcagtgaatctctggtagcttcctcccctgtggtaacctgcacgccgcccaactgaaggcctgtttcacagactgtccaccagagggcaggcggggaccagcacttccgtcccaatgaaggagtggagagctgccggcggcgaccagcttctgaagaaaagtgtccaccatggtgtcgaggagcttcaccctcgaaatggtagtgccgggtggcacagattccgaagtcgacccctcatgccttttttcctcacagccgctgcctagattggcgctacttgccctcgtgccgaattcgccacccaggcctcgctc

SEQ ID NO: 125305 - DNA, 1051 bp, Homo Sapiens
  misc_feature (43)..(64): n is a, c, g, or t
  misc_feature (723)..(723): n is a, c, g, or t
  misc_feature (744)..(753): n is a, c, g, or t
  misc_feature (822)..(822): n is a, c, g, or t
  misc_feature (851)..(851): n is a, c, g, or t
  misc_feature (887)..(887): n is a, c, g, or t
  misc_feature (890)..(890): n is a, c, g, or t
  misc_feature (896)..(898): n is a, c, g, or t
  misc_feature (922)..(922): n is a, c, g, or t
  misc_feature (970)..(970): n is a, c, g, or t
  misc_feature (1003)..(1003): n is a, c, g, or t
acctcaactaaagggaataagcttgcggccgcggctgtaggcnnnnnnnnnnnnnnnnnnnnnnggttggttatttacttatttatttacttaatacacttcattttttagagcagctttagggttacagaaaaattgagcaaaaagtacagagaattctcatataaacctttaaccctcccatcctccacaggctccccaattattaacatcttgcatcattatggttcatttgttacaattgatgagccaatagtggtacactgttattaactgaagtccagagttgacactagggtttactctgtgttttccgttcactgttttccattctctgcattttgacaaattacagtaccctacagagtactttcactgtcctaaaaatcacctacctgccatccctcctttcccctcaactctcagcaaccactggtcctttgactcgctcgatagttttgcctctcccagaatgtcatataattgcaatcatacaacatagaaagccttttcagattggttttcacttaacaataagcatttagggtttctccgtgtcttttaatgacttgatgtccaattcctttttatcatctacctgaggactgtatcctgcaatcctgctgtaattgcttattaatgtcagcagggtttttgttatttagaattctctacaaagacaatcatgttacttgtgaacaaagttgtatttcatcctttcanatctatgtgcattttatttcnnnnnnnnnnaacactgcattatatagcacttccagtacaatgctgaaaagcagtggtgtgggtggtccttggcatgtntctgatcttagtaggaagtgtctagtttngacatcaagggatatgtagctgtagggtttttgtantangtcttnnnacaactgagtagtctctgtatccntctgtgtgagaggtttacatgatggtatggatttgtcaatgcttttcngtactatgaaagatcgtattcacttttagcgcnaggcagcaaggatacactgaacaatgttgacagctgcatctgattgca

SEQ ID NO: 125306 - DNA, 873 bp, Homo Sapiens
ttttttgctgtgaaaatactctgtttattaaagaccaggcggagggaggtaaggttgtgggttctgtatgggaaactgagtcccagccccagggagggagaaggaggacggaccagctggcagccttcgagaggtcacaggtcagtggccggaccccagtcatagccgtcttcatcggaggactccgcatcatggactcgcgtaaactttttcttcagggcttcccgttcataggttcgcatgctgtcctgtcgccactgtccctgggggtggcggctgtccacctgggccccctgatgagccgagattctcccacgatccctcgggctctgggactcatctgcctgcacgggctccgaggaccgggccagggctggagccgggggctcatcatccacatccgtgtagggccccccctcgccgtctgtgtagccctcgccatccgtgtacgcgccgccctcgccgtccgtctcgtagtcgctgttaacgcggctgtcgcagctgaggtcagcggagctgtcggccaggccgtggtgagggaggtctaggttgtcctccaaggagccatccagctgatcttccgccgtccagatgggccgcgtctgctgctctcgaatgatggccttgagctcctggtaccaggtgtcactcgtgccattcagagggatggtggctgtgaagaggtggctgctgtgttttcgcagcttctgggcttgtgcgtagaggcggcgggtgctgcggcagggggcaggcgccagccaacttagctccttctaaattgtcctcatacatccagtgattttcagatcattttcattcaaagactgattgagaaaatctcagaagattaaagagaataaaggatctgacttg

SEQ ID NO: 125307 - DNA, 1181 bp, Homo Sapiens
ttttttttatagcaaataataaatttattaggtgcctacaagtacaaaatactgaaagccgctgcaggggattataaagatgtgtaagagacaagccctgccctcaaagagcttacaatctaggcaattagtcacacaaataagttgtgatggcgctctaagtgacctcagcagagttcttgaaaatgttcatatccttcaaattcttctcttgtcaaattaaacagtgggaaagagaacttttgtggcattcactggtgaccctgactctgcttgcaagcatctttctgctgttgcacgttgtcgtcatcctctcagcgtcgtttcctaactggacctttgttggagagaatctccgtgcttcctgaaccttcaccagggtttcctgtttgggagtgggtggctcagttgcagtttggccttggaatgatttgcagtccgatttttccttcagcaaatcgctcttttgattgtagttgatgctaaaatgctatgctttgcaatctgtggttttaagggtgggagtgagatgcaatattaaggaaggcagcccagacttttcccttactttaaacatttaataatagtgcacttattgattataatctgtacagatatagagcaagttataaacctcttccttttatttattttcttcacttagactgtattcacgtaaagtgtatttacaataagaagaaaaaagccttgaggtacaaaacccaaaagaatatctgaggtataaatacaagtatatcttaaataataatctttatcatgctttatctatgtttgaaagcacagtggacatgtttcttaatagaatggtatatacaacatacaatcttacaaatctggaagccatcaaaattgaatatccatgtatatcttcatgaggaacactgatatccaaaatactcaaattttaaaactctaatctgatgccctgccccaaaattcttcaaagaacctttgaaataacactgaaaatggtaactaaattataacaaaataaaaatccttcttacagctctcattcatacattattcacttttgatccatacacaataaatttactaatactgtctcttgagtcaatccttaccattacagtaaaacctgaataaagacacccttctaaaggttctaaaaaattcactggtttgggttggttttcttc

SEQ ID NO: 125308 - DNA, 723 bp, Homo Sapiens
tttcttcttcttcttgctgtcctgactttctgctgagctggcactgctactgtggcttcgggtctggcttccagaaggactgtggcttctgctggggctgacgctggggctgctgtggctctgattcctgcttatgcccacctggacaactgctgctgtgtccaggctctcttttgctttctccactattttatctttcaggtccttagaaatgtttcctgaagattcctcttcttttacagaaacattactttcactgtcactttcattatagtctggttcaaaagcagcttcatcagtttctctagttaagtcagaggaaagtctagaggaatgacttaactggggtttaggcttgacagtactcttgtcaatttgcccagtaatttgctctttttcaacctgtgtctctggtgggttaagtatataaagtagtttattgccacttgactctttattgttccttgcttctaatacatgcttctcacgatccttacaaggatttttatctacagattttgtctcttcatttggccgtttagtatcataagtggctttgtgatcatgaggttttctgtctcttgagggactagaattactttttttggaatctcctgttccttttttaggcaatctctctcttcccctggtaattttcctggcccgatccaaattttattccgagaaggagagcctgccgcctggtaaatcattcttcctctt

SEQ ID NO: 125309 - DNA, 950 bp, Homo Sapiens
gttccctgttctacaaaaattttatggccatttgccggcttctttctgctttttctttcttgtcctgctttcgccctgcgggccgtctgtgttgttttggttggttgtttttttcacattctaagccatttattcaacgaccctatagagtataagtatacccaatacctcagactgcttttggcccctggactagaccctcattgctccaggcatgaggggctgtgcaccctgacagagccacccagggccagtggcctgtggccacaatgtcaatggctataaccgcttcatctgccgccgctcctgtcggcgctgccgtttctcattgtgctctggtgctggggtgccactgtctgcagtgaaccaggggcccagcacattcacccacaggaggtaaagggcccggcctggagccagaagccagaaggaccagacatagagagagaagcagctgagcacctgcacgatggctgtcagtaggatcacatccttaaggtgctctgccatgccctgctccatgttgaggtccatgccaccatccatcagggccccatcctcagagaacgctgctcgtgccatcgagctcatagagtggtagctggccccatacactgccagactaaagcccagggccaaccaggcccaaaatgaggcagatgagtaaaagaagaccaacgtcacaaggcagtaaatggcattggcccccagtatgatccgcaggtagaacttcagagtctctctgttctcttcaaatatctgcttcttccctctcgtgcccactttgcccttgggcgccatggtgcgaggcaaatacccagcccgggaaacacgggagagcgaccgaaaccgcaatcactaagcaccggacgcgtgggtcgacgatatcccgggaattccgaccggaccagcctgcttttttgtaaccaacttggttcatattccatgct

SEQ ID NO: 125310 - DNA, 833 bp, Homo Sapiens
  misc_feature (819)..(819): n is a, c, g, or t
cacaccacacttcacaccaataattgacaggccaccacacttcccagctagaatcaggcaggaggaaggaccctgacccctagcagcacggaagaaagaaagagcaagacggatttgaggcagagtgtattgagaacatgagagaaaacaaagttgggggcagagctcagcctggccgcaggagctgcagaatgaagggcgggctcttccattggtggccctcaagggtagaagggagcaggggtccagggcaggggcttcactctgttctgggagaggccaggcctgaaggagctgagctcactcacaactcccccacgcataccccctcgatctgtgtgaaatgagctcactaagaaggcacccctgttcccatggagacaagcccagagctcacaaaaactgcaggctcagcccagcatgggcactgcctccaccaccccttgccccactggggaacccagaactagggctgggaaagagaagtgggtggtcctcggcccccagccttgcgaagcttccatctgaatcctgccacttgtgtctgtattctctcaccccccacaaagcctggtttggtcgggggctgtatcatatcacctccaaaagtgtcagaggcgatgggaagtctccagctacctgacttaacaccctcactgtatgaatgtggaaactgagacctacagacacacatgcagttggtctgttagaatccaggtctcaagtctcagattttcctcaaaattctaagatctcctctgttccttcccactgcactgctatgcacctgccccagctcctgccatgctcctactgtcnccaggcaatcctga

SEQ ID NO: 125311 - DNA, 754 bp, Homo Sapiens
  misc_feature (732)..(732): n is a, c, g, or t
  misc_feature (740)..(740): n is a, c, g, or t
aaaatgcaatactgtaacgacagcttattctttaataaaagtcaggggtgtcagcagcgtcactggtaagacatgatggcgctccacgactgaccagcagcgctgggaagggacacgcagaacccaccttccaaccacgcccaacacatcacagaaatgcctgctcgtttgttttgattcatatacaaagttacaaagtatttcctgccccaaattcttaacgaaaatgaaagaaaaccctagaatgcggtggttttacaagtatattagcccagaacatcctaggcagctgcgcgggccgcgggtgcggcagggcgcagggcagcacccagagccccggccagcgcgaaacggacgcaggcgcatccccagccctccgtggcgtctcagcagcagatcacccaggcctggcccggtcgggcttggtgttgcctccgaagtcgagacgacggtgctgctcagttatcttccgcctttccgcactatggtgggcaggcgacactgctgcggggcaggcttaaggtccttctgcggatctgtcttcttgctcgcagggatgcacttcaagggtctcagcaccggcactcttccatttgttccagatccaagcacggactgcagcgtggggctggagtaagacgacagtctgaccactcccgaaagctttagtttgggcagttccatgacataggccggtcctcgtctcttgggacggtcctcctcttgctttanggactgtntctgcatttctgcc

SEQ ID NO: 125312 - DNA, 685 bp, Homo Sapiens
ggaacgtttccacccaaaggcttctaagtcctgtttaaattactcagggaacacagcctgactccccagccctcagaaagcctgtgacaaatctttctgtgatgctcaaggaagagctcacctttgagaccacttaaagtgatgggctctgtctgagcagccactcactggccctcaagtgaacttgaacccctgtagtcagccaaaggagctcctgagaggggtttgagggaggcacagggaggggcttgccctgctgcaggtcctagcaggggagtgggtccacatccactctcagaacacaatacttactgtttgaacttggtgaggatcttctgagcgggtgtgccgatgacatcgtggatttttgagatttggtccagttcatttactccaggaaagaggggctgcagactggcgatctcgtagaacacacagccggcgctccacaggtccatcttgtacgtgtagaacccatcagtgaggagacactccggggcccggtaccagcgggtggagatgtattccgtgtacggctgcttggaatagacactccggcaggagccaaagtcccctaatttcaggacatcctttattagtatattttctggttttacatctctgtgaaatattccatttctgtgaatatgatccagggacttacataactgatacccattatcag

SEQ ID NO: 125313 - DNA, 1379 bp, Homo Sapiens
ttttgcggtggttttacaagtatattagcccagaacatcctaggcagctgcgcgggccgcgggtgcggcagggcgcagggcagcacccagagccccggccagcgcgaaacggacgcaggcgcatccccagccctccgtggcgtctcagcagcagatcacccaggcctggcccggtcgggcttggtgttgcctccgaagtcgagacgacggtgctgctcagttatcttccgcctttccgcactatggtgggcaggcgacactgctgcggggcaggcttaaggtccttctgcggatctgtctgtcaaagaaaaattacagacacaaaattcagtggcggcctgggctgggtcgaagagcagcgccgtcagagaagctggttccgcgctaccttcttgctcgcagggatgcacttcaagggtctcagcaccggcactcttccatttgttccagatccaagcacggactgcagcgtggggctgggagtaagacgaacagtctgaccactcccgaaagctttagtttgggcagttccatgacataggccggtcctcgtctcttgggacggtcctcctcttgctttagggactgtttctctgttcttggaagtaggggtgctgcagggcctggtgggcggcgattctctcatcgggatcataggccaccattgcgtgcaggagggagaggcattgtggggacaaattggttgttagtagaggtattcctgatcctgtttgaacttggtgaggatcttctgagcgggtgtgccgatgacatcgtggatttttgagatttggtccagttcatttactccaggaaagaggggctgcagactggcgatctcgtagaacacacagccggcgctccacaggtccatcttgtacgtgtagaacccatcagtgaggagacactccggggcccggtaccagcgggtggagatgtattccgtgtacggctgcttggaatagacactccggcaggagccaaagtcccctaatttcaggacatcctgatgtgaatatgatccagggacttacataactggtacatatagtgcataattttttttctgataatgggtatcttctccctttcaaagcgctgcttcatttgtttacatgcatagtagtttccatctctcaggctttgcatcttcataacttcagaaaacgttccctctcctattttgccaattgctttatagttcttcatcttggatgcggaagccggtgacaaccccttgccgacactggacggaaaagaaagaagcaggaaggttgtcccctgctttccacttccctgaggcggggtcccgcactaggatctccgtggtggtccctcgaaggagagcgttagagatcccgccgccatgttgtgtcctg

SEQ ID NO: 125314 - DNA, 511 bp, Homo Sapiens
ctgataatgggtatcttctccctcgtattagctcataaatattcatgtccataagttcacatattagtgcaagagaaccagattttctgtcaaaaaccacttcatgcaacataagaatgtttgggtgcggattcaggcgcctcagtgcttggatctctcgtaggttgttgacttgctcaatactttcaaagcgctgcttcatttgtttacatgcatagtagtttccatctctcaggctttgcatcttcataacttcagaaaacgttccctctcctattttgccaattgctttatagttcttcatcttggatgcggcagccggtgacaaccccttgccgacactggacggaaaagaaagaagcaggaaggttgtccccctgctttccacttccctgaggcggggtcccgcactaggatctccgtggtggtccctcgaaggagagcgttagagatcccgccgccatgttgtgtccctgtcaccctagcaaccgtcaggcctgaacgccatgag

SEQ ID NO: 125315 - DNA, 1011 bp, Homo Sapiens
ttttttttagattaaaaaatgcctttatttttaaaatgtggcttaactacatgcaatgtactgagccagttttggaatccaccctgtatcagagtaaaactggaccaaaggaagtgaagtcagggctcctggctgtcactcctccagcaactcaatctacagagcatttcttcagctgttttttgtgacgtgtggtgattcgttttggattcctctgtatgacagacaggtccgaccttgaggaagaccggtagcccacgtcttctgcttttatggggttaatgatatggcctggcttggtgacgaccttgggagtagtcagcttttggaaagccctctgggtgttccatgtggatcctatgggggtctggatggtcctttcaaattgccaatggtgggtaaatggatatggaagcactcgtacctgatgagcagctgcgtggatgttgcgcttctcattgataatcacatttggcaaattcttatcttttcttggaggaccctcaggggctttaatgagaaaccggcgtcttttcttggcactgggctttaggcccacaccaccccactcgccccagccaggtagtgtcaggtccacgtcctttggcttactcgcctccacagcttccctcttctctttcaagaaatctctgatgacatcatcgccagcacaagcttcctttatcatctgcctatggtttctctcctcttcatcttccagctcctctattgtgggaactgccaaagacttcacggagggagattgtgtggttaggaggttctgtaggtcgatcatttgctccttctttttcttctccttaggggcatcagggcgattatttggggtcctctctgactgctgcccttctaacacaggtctgggaagctccttattttgaaaacattcttcttttcccagctcttctagctcttccagcgtctgtactctctctggtctctgtagcaacaggggctcctcttcttctggggcaggttcctctctctggaccc

SEQ ID NO: 125316 - DNA, 2182 bp, Homo Sapiens
aaatttgtccaaaaaaaattctatttgtcaagttttcctcctttggatttgtttcatagaaatgtaccattttattacaaagaggctcacaaaaatgaaaatagtatctcaaaaaggaaactagactagcaacctccacctgcagaattaggagaagacagacagagggcaggcagtgtttcttggctcacttgaggccagtgggaaggtacgaaaacagaaccaatctaaaaatggctgatgttactttaggagcctgaaaaaaacaggagatccttgaagacccagccaccccttctagaatgttcaataagggcacctttccaaagctactaagcaggcacttggcatttcaggagtttgtcttatggttgcataaaagtatccctttcacccagacctggcaccctttatggttcaaagttaagaacgggaagaatgggtggcaaggtggctcctggaagagctcacccagcacagctgccctgagctcggggccttggtttctgtccctggggatatttatatttaataaatttttatataaatacacagagaaatagaaaatataaaatctgaggggttggggaagaaacgtgagggactcagcaggaagccagagctggagaggtccattcaggccaacttgacctcctccttgacccctttggcttctggcttctcctccttggttttctcctcttcggtgacttctttcttctcctctgggtctttctctttttcatcctctgttttgactctcttggcttttttgaagttgggagagttcttgcgggccccctctccctcctcttcagaatcggagaactcttcctcacaggcaattcgtttgtcagaggagcagatcgagatgcgcttgtcagggtcgtcttcgtcctcatcgccactctcctcagggatggcgtcttcaggaatcgcctgcatttggaccccagggcgtgcggcagcattctaaggttctcaaacagtcgctgtttgatcttctccagttactcattcgtgttctggttagtcatattggaaggactgatgtggagcttggaaatctggtccaaagtattcaaagtagtcattgtatggaagctcattagggatctccgtatccagggccacagctgtctcatatgtccagcaccgggcaacgttacgaatggtgtaaccaccgcctcccagcatcagcataggcaggttaaagctcttgacaaattccacacacttggcgtgtcctttgatagttagattgaagcaacctaaccgatccccagatagggagtctgagccacactgtaagaccaccgcactaggctggaacatctccattactttggacatgaccggcttgaaaatggcctcataggactcgtcatcaatcccgtctcggagcgggtagttaacagcataatacttgcctttgccagccccgatatcccgtaggtccccagttcctgggaagtactctccatacttatgaaaggacacagtcatgacccggtccgtggtgtagaaggcctcttccacgccgtcaccatggtgaatatcaatgtcaatgtacagcaccctctggtgatactttagcagttccaggatggccaagacgatatcattgacgtaacagaagccagatgcctcggacttctttgcatggtgcaggcccccagcccaattcacagcgatgtccgtctgctgcttattaagtttcacagcacttgccacagaaccaccagtagacaactgacagaactcaaacaggccatcgaatactggacagtcctcaccaacgttgaatctctgcatctgcttgctgtactccgacatgttatctggacggatggagcgcaagaatttaatgtagtcatcgctgtggtacttggtcatctcctcagcattggctttgtgagggcgatagatttccatttttcggtagagaccatagttgagcagcaaattatgagtcatgcggattcggtgaggcttcattgggtggccttgtccataatagtaatttccaacatccccgtcgtagtagtaacagactttcctccgggtgccctgcgtctgcgccatcttgctcgcctcccgtccctaccgtcagtcggtccgtccgccctcccgcccgcggctcccctcgtgccgaatttaacacccaggcctcgtacctagc

SEQ ID NO: 125317 - DNA, 674 bp, Homo Sapiens
  misc_feature (283)..(293): n is a, c, g, or t
ttttttaaggattaacttaaatttattaatgccaaggggaaagaaggtaacagttcctgaccctccagctgtatccacagttcggccaggaacaggctctgccagaggctagggccagcgctacatagtctgtggttaatggaggtgactagggaggggtgagcacaccagctgctctagtctcctttccttccccagaaatgaggaagtggtcatgtattattttaggagttcccctgcccacccaatcctctcataattgggagcaatcaggtacatttgnnnnnnnnnnnccttttcacctcctggagtcctggacttccccacatctcccctgcccctcccacgtttccatagtccaagggccagagtaaatgaaaatacagcagccgcccaagcaatggggcccatgctggggcttcagtcatcagcatcttcactggagtctgagttagctggcatcataggatcatcaatgagtgagaagtccctttctgagctatcatagccctgagataagtcatcatcatcttcttcatcctcatcgtcatcctcctcaggttgcagtggtggcaaccgcaaggtagtaccagaggcggtagtcactggtgaagaggggtagccaggggctctcaagcctggatggtgatggtggtgatggtgggggtggggtg

SEQ ID NO: 125318 - DNA, 1341 bp, Homo Sapiens
  misc_feature (1308)..(1308): n is a, c, g, or t
tcaattctcatcaaccgattctaaattaccttacatttttgaaagttccaaataaatttagattttctagatatagcagattgaaacatagtaacttaccatcttttctgcctattggacttacattatggatctaggaggtatcaagtgccatattaaacatattcttgccaccagcttctatgaaattgatgtctttaatcaagtcatgcatttaaatttgatcagtgctattctgtatggattaggatctaagggtttatacataaaattgatctataaggagatatatgctcagatatgcagagtcatgctggggatgcccacaggtctccccagttttcaacactttagattgctaggtgaggtcaaagctaaattctgaattccattgtagttttaagaaatgaatcgtgccttctctctgttcctggacaggtttccaacttattttagcttgttttcctcgtaaaatccatggagcagagttaagcactatgttccctctaattttcatagcatatttgaaggagctttgtaaggaatggagcaagagaagagagtaccaagcatgaaaaaggccagattcttgaatcatatttgcaatgtgttaaattatttgggggaacactgcagttatttttattcaagagtcaagtgacactggaaaacaatactttttcaagataatcatttagatttatttttaaaaaaagaggagagttctcttattgattttataagagcaaaggcaacagtcagccattcttttggctaattcatatgatcctcaagtaaaacttaagcccaggttactttggtaggatttaaagtagtaagacatatgtgaataaaatgatattaggtctgtataattctgaataataaaataaagattaagatggtaatattggtccctcaagtactggtatttaaactttaaaaatcaatcaagagagaagattaagtggtgtttctttggtactgaaaatgtaaagctaagaccaaattgttctacttcacagatttaagatacaaagaatgatatttaaaggtattaaaataactatttcattatcttcagtttgtaaagaatatcttatgaagtacacttagaaggaatccctgagtatattaagtactctattagtatctttcttcataaacaaagaggaacaatttaaaggctttgcaagacatataaacacagtgcttggtaaaagcactatctgttaatagggctctctccatcgggctgtaaattaggccaccaatgcctcagaggagaaccattgattcacaaattanctctacattggatacattaacactctcaggtaa

SEQ ID NO: 125319 - DNA, 1122 bp, Homo Sapiens
ctcacgctggtcggtcctgtgcgtcttgtgccgcccgcttgcgcctgcgtacacgtgtccccccccatgcgcctacttcgtccgttgtgtcttgcacttagcagcccctggtcccgggtgcccctgccggcccttttggctcatggcacgctgggccaaaggttatgcgtcattcccggtgccggtctccctgcccagtgaccgccatggatgtaagcatgggcacagcgttcctctgcaatatgtccaatgggatgccaccgaggttgcttctgggcgaagctcttaccagttgcctggtgctccactccctccagctgctgccaccaccattcgaggggccttgtaatgtgtgctgaggtactcggtcaagtctgcacgagacagcttcctgacattctcactgggcccctccacagcctgggctagaggtgtgccctggaatgctgtggcatgcaggtagttaaagaccacatctcgcatagatgcatcattctcctgcatctcccgcaggatcacatcacgttccttctcaatctgtgagtcttccagactacagttctgcacaatgtcacccaggagctccacagctttcggcagatccttggacagcgccttgatgtagtaagctgtgtgctcccgggtgctgtaggcattaagatgggcccccatgctctccacctccttctccagggcactgccaggccgattctttgttcccttgaaagccagatgctccaaaaagtagcctgccccattattcttctcagtctcaaaacggctgccaacatcaatccacactcccaccgtgcaagtgggctgagaggactgctcggaggccacacgcaggccgttgtccagcaggctaacctgcgtctccggcacgaactggagcgcctgagcgaaggttgccgtactccgcaaggctggcgtccgcagcagggccggcgagcggcgggcgcgcaatagcacttgtgccccggcggtagcggcccgacagaccacggacgccgccatcttccagctgcacctcgtgccgaattcgccacccaggcctcgctacattaggaccgttatagtactgccgtcttttatacacgcactcgctttgtttggtagcaa

SEQ ID NO: 125320 - DNA, 962 bp, Homo Sapiens
  misc_feature (453)..(453): n is a, c, g, or t
gggctacgctggcgcggcgcaacagggccgactgcagctggaagatggcggcgtccgtggtctgtcgggccgctaccgccggggcacaagtgctattgcgcggccgccgctcgccggccctgctgcggacgccagccttgcggagtacggcaaccttcgctcaggcgctccagttcgtgccggagacgcaggttagcctgctggacaacggcctgcgtgtggcctccgagcagtcctctcagcccacttgcacggtgggagtgtggattgatgttggcagccgttttgagactgagaagaataatggggcaggctactttttggagcatctggctttcaagggaacaaagaatcggcctggcagtgccctggagaaggaggtggagagcatgggggcccatcttaatgcctacagcacccgggagcacacagcttactacatcaaggcgctgntccaaggatctgccgaaagctgtggagctcctgggtgacattgtgcagaactgtagtctgggagactcaccgattgagaaggaacgtgatgtgatcctgcgggagatgccggagaatgatgcatctatgcgagatgtggtctttaactacctgcatgccacagcattccaggggcacccctctagccccggctgtggaggggcccagtgagaatgtcaggaagctgtctcgtgcggacttgaccgagtacctccgacacatttacaaggccctcgaatggtgctggcagcagctgggaggagtggagcaaccagcaactgttaaacctcgccagaaagcaactcgggtggcatcccatggacatatggcagaggacgctgtgccaatctttactccatgccggttccactggagtggaattcggccacgtggatgtggttctacctttgcccacgtggcattgggaaaggtccggggggcaaccggaaagggctggaagtgccagcaag

SEQ ID NO: 125321 - DNA, 925 bp, Homo Sapiens
  misc_feature (111)..(111): n is a, c, g, or t
gcatccacggtggccgggatctccactgcccagtgaagcgggcatggagtaaagagttgggcccaagcgtccttttggcatatgtccatgggatgccaccgagggtgtttntgggcgaggtctaccagttgctggtgctccactcctccagctggctgccagcaccattcgaggggccttgtaatgtgtgctgaggtactcggtcaagtctgcacgagacagcttcctgacattctcactgggcccctccacagcctgggctagaggtgtgccctggaatgctgtggcatgcaggtagttaaagaccacatctcgcatagatgcatcattctcctgcatctcccgcaggatcacatcacgttccttctcaatctgtgagtcttccagactacagttctgcacaatgtcacccaggagctccacagctttcggcagatccttggacagcgccttgatgtagtaagctgtgtgctcccgggtgctgtaggcattaagatgggcccccatgctctccacctccttctccagggcactgccaggccgattctttgttcccttgaaagccagatgctccaaaaagtagcctgccccattattcttctcagtctcaaaacggctgccaacatcaatccacactcccaccgtgcaagtgggctgagaggactgctcggaggccacacgcaggccgttgtccagcaggctaacctgcgtctccggcacgaactggagcgcctgagcgaaggttgccgtactccgcaaggctggcgtccgcagcagggccggcgagcggcgggcgcgcaatagcacttgtgccccggcggtagcggcccgacagaccacggacgccgccctctgccgcacgaggcctcgtgccgaattcgccacccaggcctcgctaccttagaaccgtagtagttactgccgg

SEQ ID NO: 125322 - DNA, 2194 bp, Homo Sapiens
  misc_feature (141)..(149): n is a, c, g, or t
  misc_feature (295)..(295): n is a, c, g, or t
  misc_feature (537)..(567): n is a, c, g, or t
gttcatcgcggactgtgtgaatttctgggcgcccccatatcgggcccccggcggtttctctcgcccttcaaataatttttgtgcggaattttaattttgagaaaaagggcctttctgcgggggggtatatttgggggagannnnnnnnnaccctctggggtttgcgaagaatattaaggataatttcccccgccccgcgtgtaaaagaaatggggagacccccccttccctcacgaaaaaaacccttctcccaccatttctttggggggaaattttgtggtgttttgcacagaanaaacccgggctctcgggtgttttgccccccggcccgggggggtcgtgtttttgttttaaattggggtgagaggaatattcccaaaagctcacttatgctcagtggccacaagggattcttccttaggagaaaccagcctattgttgccagtgtttcaccttagccttaccggggccccgcggcgccaaaacggaatgggtttgtgaaagcttttttgagggccggagggcggcccgacaagnnnnnnnnnnnnnnnnnnnnnnnnnnnnnnnagcagaggattttattggtggtcacctgtggcacaggttagaggagccgaagtgctgtgtttgtggtggaggggggaccacaaaccccggccctgccctcttgcttacataggcttcccgcctagaagcgcagccagaacatgccgctacggatccggttgtagtctgggagctgctcaatggggccatatccagccactgctgggcactggtcatagatgtacttggagcagatctcacgtaccacactggcatccacctccgcaatccggctttcccattcagccagggggatgcggcggccataggtcaggaggctgcgtccgatgtcctcacacacaggagtagtgccatctagatgagataccagggcatttctgaggatgtttttgccccgggccacctcactctccgtggcactggtacacaggcgcatccactgcccttgcaggacgaacatcatgtcatcgattttcattcggtcacagacaaagtgtgcacccagcaagcccgtctctgcatagcagatgctgaaggtctggaaactctggcatagcttgttggccacagcacctgaagccagtgggctggacaggtgcacgccaccaccataagtgcagtcatagtggccgatgatggcattggccacttgcaaggccacattgtccgggctggcccagccaggaccctctactgcaatggccacgtgggcaaaaggtagagcatcatcacggtggcggatctcactgccagtgaagcggcatggagtaagagtgggcacagcgtcctctgcatatgtccatgggatgccaccgaggtgcttctgggcgaggtctaacagttgctggtgctccactcctccagctgctgccagcaccattcgaggggccttgtaatgtgtgctgaggtactcggtcaagtctgcacgagacagcttcctgacattctcactgggcccctccacagcctgggctagaggtgtgccctggaatgctgtggcatgcaggtagttaaagaccacatctcgcatagatgcatcattctcctgcatctcccgcaggatcacatcacgttccttctcaatctgtgagtcttccagactacagttctgcacaatgtcacccaggagctccacagctttcggcagatccttggacagcgccttgatgtagtaagctgtgtgctcccgggtgctgtaggcattaagatgggcccccatgctctccacctccttctccagggcactgccaggccgattctttgttcccttgaaagccagatgctccaaaaagtagcctgccccattattcttctcagtctcaaaacggctgccaacatcaatccacactcccaccgtgcaagtgggctgagaggactgctcggaggccacacgcaggccgttgtccagcaggctaacctgcgtctccggcacgaactggagcgcctgagcgaaggttgccgtactccgcaaggctggcgtccgcagcagggccggcgagcggcgggcgcgcaatagcacttgtgccccggcggtagcggcccgacagaccacggacgccgccatcttcccctcgtgccgaattcaacacccaggcctcgctaccttaaaccgtgagtagtactgcca

SEQ ID NO: 125323 - DNA, 558 bp, Homo Sapiens
gaattttctcaactctttttattaagttagaaaactgataaaagcaacacaacttttgggggaaagcaccatggcacgtcctttgtgctatgtgataagtgtgctttatctcaatgaagcaaccccacgggtccaggcaccctccctgcagtccccgcggccaggctcctgagtgtgccagcagagccgtcccctgggaccacagccaagtgccttcgggcagctggcctgacacaggcggggtctgctgggtctacagggtccaaggagccccatgcagccagtgccccatggcgggcgtgtcagtgggcaaaccctgcccaaaggtcccacccccaagaggcctccaggacccgcaccaaggcatgggggacactcgtggctgcttaagtaactggtatgtgcacagccccctccgcggccctaatcttgagccagccaagcagtgttcacactgcaggtgcctgggaagccccaagtttggacaccctgcccagtccctgtcagggcaccaacacccctccctctcaaatggtggcttgggagtgagcctcgtgc

SEQ ID NO: 125324 - DNA, 883 bp, Homo Sapiens
  misc_feature (828)..(828): n is a, c, g, or t
cacttttggatggctgagtaccataaaacatgatttatttggtaacaaaaatgtttccaggagtttaaaaagggaccactactcagagctaaaaaagttctaacagtcactttttaaaaaagctagtttatcatttgtttataaagaaaaacacaactctgtcctacttcctctaataaaaatggaaaatattaagatgagctgtgtgcttataaagaggtgctacacaagtcatcttacgtttctagtcaacacaaacattgcttcagtgacacttaatattcaatacatgatgcattactcttagcatttttgcatttactctccgcatataacaaggtcagatatcaaaacagtcctgatcttagacaactcactaccaatatttaaagctgtttcctcctaggactacagttcctaaactatgcacagggagcaaagtggtattcccttaggataaacttggtcaaggctcagataaccctgagatgaacttagcaaagtccttgtaaagaaatcttcagatgggaaactccacctatgtgaattttaaagctttaagactgacccattcaacagaaatagcagattttctcagagcactgagtctagtgattgtccacggtcaaggaggcacacacacaattttacccacacccctgatgtctcttctgtatggaaaatgcattcattgatgaagggccgaaataaatcttgccaggtgtaactctttacagagcacaagtgggaggaagaatgaactaaatgtgttggggtgtgggtccgtggggaaaaattaacttgctcagggaatggctgatccactancaattttgataaacattttagtataaagtttgatcccaaatgtcatctttgtggg

SEQ ID NO: 125325 - DNA, 1099 bp, Homo Sapiens
  misc_feature (131)..(180): n is a, c, g, or t
tttgtgatataagtatgaatttattgacatgaacttcctttagctattactctaacacagggtatcaaagagctgaagataatgatactaaacccacaggatctgaagtttggagggctccctctccctcnnnnnnnnnnnnnnnnnnnnnnnnnnnnnnnnnnnnnnnnnnnnnnnnnnaatatgaacaaatcttttaaaaaggattctggagaatgccttcaactataataagaaagtaatgacacgtttgacaatttaagcatttttttccagaaacatatatctattccatagataccatatcgattaccatataattgagtttgaaagtatacaaaatatttgttcttacatactgaaattaaaacctaattttaaaaagtgcacagtaaaaacagcaataaggaaacctacaatatccatgacatacgtattgtttttccatttactgccgacatcaacttctgtatttgcctcactggttacaaatatgttttaaatatttcaaggccgtttccaacactgactagtttactaggtccaacaatactttagcttcctgaaggcagccagcatggacgtggtctcagccctgcggctctgtgcagcaggagcaggtctggaaagaacagtcgccaaccagctatttcacaactatcgactcttgttctttttagaattcccctcacataccttactggacatctttagtgtgtcatctcttctctctgtttagataatgtctcattcatgctgcacaggtggtcactcatcatacttaactgatcctcgtaactcctcttggtagttgtcagctcatcctgaagtctgctgatgttctgactggcaagtttcatttcttctgtcaatgcttccttagacttttcagccaaggccagtcttttagacagtgctcggcactcggcataaaaatgcactgacttactgtcagccagctgcaactgagacgtaagttccactatccttgccatgtagtgatttttaattaagtcttcacgagattccacatctggaacctaaatagaacacaaatacacataaataaacaagtaccagtgagatgaagcatttctag

SEQ ID NO: 125326 - DNA, 1043 bp, Homo Sapiens
  misc_feature (937)..(971): n is a, c, g, or t
tttcggtgttcttggacacctctttattgctgttagaaaagggtggttacaagtttcctggacatggagagggacactatccctaaatccaagggaaccagaaaatttatagtatcaaacagaggaaagcgggggcagaacagagctgggcttaagatcagaaaattttcttcctgctcattacccaagcccagagttcttgccccagcttcaactgccaagataccacccttcaccccgacatcctcctaagctaccacaattcaacaaaggtgcaggtgcagaacttcagggtgggaatggggtgcagggaagcaggggctgtgccccagcccagtgccctctgctcaccctgaggtacccagtgcctttccctctgccagctgtacctcccggggaggggcctggacacatgtcaggctggggcagcagccactctgatcagcaccaggtcccgagctgggggcccctcttcagtccaccaccgccgagctggccatggtgttcacgccacaggccccggacccgcgatgcaagtagtagtaacccttctcaccccagtcagtgccccagctgttcttgatggcccaaaagggaacgtcagagcggttgccgtagcccacaagcaacaccgcatggtcaatgagccaagggctgcagaggggccggagagggcgggagatcccgtggcggtaaaactgcatgccaaaggcattgatggccacggagattgggcctctcttggccagccaggctgccagcttctgctcgttctggctcagctccacggagtcattgatgtagaccttggccttctctgctgagaagttgcaggactgcatgtgaccctggtagctgtagtcgtcctcgtgtctgcagccctccccccggccgtaatggccgaattcccgggcatatgtccggtaccgtcgactgnnnnnnnnnnnnnnnnnnnnnnnnnnnnnnnnnnncggccgcttcctcgctcattgactcgtgcgctcgtcgttcgaaaaaacgctagcgcctatatagttatcatc

SEQ ID NO: 125327 - DNA, 730 bp, Homo Sapiens
  misc_feature (165)..(173): n is a, c, g, or t
ttgaaaaaagaaaacaaacaagtttatttgtatatgccttatgagtaacctataaggttacttcaagccttaagagccaattacagtaatggttcagaaacaggaatatttgtacttactccttgggcctggacttgggtgtcttgtttttgtaagatgataggnnnnnnnnnattgtggtatgacacagaaaagtgcaccaaatgtacagcttgatgaatgtttacagtgtgaacacagctggctagctagcactcagagcaagaaacaggatcagtacctggaagactctctcgtgccctttccagacacttccatccacttttcctctcccctaactcctccattcacctgtccccatctcctcacccactgtgccccaggaaatcatcctgggtactcacatcattgtctagtaggttaaattttaacagggaataaatagttaacacttccaaactgtaatgtctcagtacagtatacagcagaagggtgctaaatcttacaaacaagtaatagggcttcattttcttcagctttgtagtttgtgaaacatcctagacttctctccgagtgctttccaaatctgtagttgcgcagtcttcaacaaaaactttgggggaaaatgcccaccttccctttgcactccccttccagccattcttcattcacctttgattacaccaggattatatccccttcctgaaactccaggtccctctggttgggt

SEQ ID NO: 125328 - DNA, 760 bp, Homo Sapiens
cagtcagtcattcagctttatttcagtgctggtttttggttccctaagagctgcatgagtgctaggcttcaccacgtgactgggggccccttgggaactgggtactatgggcaggatgcccctgaaaagaactgaagacagaggaatcatacttctctttaatacctctggggaaggcccaggctaaggatgagggcagggaccagtcccagtgccccctggggagagaagagggagaagcttgggcacaaactcccagtggccctgcaaggctatcatccctggatcttgctggagtggacagtcttctgggccagggttgttctagcttgtttctcactgtacctaatcagggggcctaactgcattaacaggcagccagaacctacctaccaaaaagcctgtaacctagactgctcctcagattttggccaagagagggccccggcttgggagctgcttggccctgagagtgagcagaggctcagagaatacacagcacaagggttacagtccctggcctcttcccatcgctggagacaatttaagactgaagggacgatgagaggaggggccagccctctaccctggctcatctgcttctggctatgttcctacaagggaagtgataacagcctgaaacccgtggtaccagggcctaccctatgtccacaatccttggtgagcccttctgtccacccatcacccgctcagccagcctgggcagacacagagcagaagcagcctgaagccctgaagc

SEQ ID NO: 125329 - DNA, 579 bp, Homo Sapiens
tttttctcttctgagagatgtttaatatatcttaggttcaaggtacaaaacacagggcaggtgctgatccctagaaagtcacctgccaccctgtcagcccctgcttagccaggcatcccagcccccagagcaatggagcagtggccctgagatgctgggttccttctctgtttggggaatgttcaggtggtgacatggcagcccagaggccactatgtcccctcctcaaaaaacccagacccaaggatcagaaaggtctagacttagacccagagcagcagatcccagggtgaccccagttaagcaacaggcctgaactgaagcctggcccagcctcttggccttggtcttggaaaaggaggaaatattaccccaatacctggcagcaaagggaaggggctaaagcaggaagtggaggcagaggttcccactgccctaaaaaaatggactatgggtagctgacccaacagggcagcaaagcccaagggtgaggcctgccccacctcccaccccagttcctctaagggccagcccctcacggagcctcactgccaggacaccactgacccatgctgggga

SEQ ID NO: 125330 - DNA, 674 bp, Homo Sapiens
gtaaacatagtttttattcttatcttaccttcaatgaaattttgtcctcatgccaccaaaacatttttgaaactcagtaactgaacaccaaactcagtagcctcatgattacttttctagacaattgctgaattatattgctttaaaaaaatagctgagatatatttttattactttattcctttttaaagcagcaatatcccctcacatttttttcataaaaatctaaaatatctctagtagtcccaagtgtctcatatttatatttgttctaagcgtttgtttcattaagatttttcagaaataagtgcacttctaaagagaaagtaaatttaaataaacacaacaggaaaataatcatgggttgtagcaaaacagttattttgaatgttctgaattttaacaattcaaaggagaatgtgtttggtagccagggacctctatggactaaattctcaattcatttatttgtagatcagcaaaagacagatagctgctgctcctgtcagtaaagactgactgattgattgtctaaggttttatacaataaaacaccaaaaataaatgtacttaaaatattttaaatttagagatttacataaaaatatgcaggtgtttacaaaacagaaaaagtatagaaataaatgaaaccctatcttaggccttaccaacca

SEQ ID NO: 125331 - DNA, 2869 bp, Homo Sapiens
  misc_feature (60)..(84): n is a, c, g, or t
gtgccaagctaaaattaaccctcactacaagggaataagcttgcggccgcctgctcaggnnnnnnnnnnnnnnnnnnnnnnnnnaacgctcccaagatgtcacgtttattgcaactgagcagagacaggctgtgcggaccttcctcaatcccgtccaacccccagcccctccccaagcccccgctgcaactacgccggcaggtccgcagagtgttgcttgaccagcggcgtggcggtgccccggagtcttaagaccaccgccagtcttctggggccttcagtccatggtaggggactcccagaggggcacgcccgcctcttgaagccctaagtccggcttggaggcagcggaacctccggagaggtcagaggtagagcgaggacactgtcggaggcggtggcgctggtctggagggtaccactagggggcgggattccagcccctgggccgggcaggtcacccgatgggcaccggccctgggggtcggcaggcagtggcttccttgggggtgggggcttggctggcccctgagactgtactggcaggtgggtcccttgagctggcagagtcgctggtgcaggcgggcacggtaccagtagctggcaccaagcatcaccaggaccaataagaccaggaggctgaggagcagccctgtggtcagggagctggttgctttgagctgagtggtgcagtcagggggtgcccagccctcctcacagtagcagtgcctgttgctgtcacagaccccatgtccatggcatttgcttcgacattcctgtgcccccaggagatccacacgctggcatcgatggtctatacacaccaggccagggccacaggctgtgccaggcagagtcaggaggggctgggccacatcactgcccaggtccaggtgcacccagctgcagttcagctcagtcccattcacatctattgtctcccagagtagatcccggatggagcccagcagaggctgggtcctacctgtctggcactggagctgcccacaaatggcatctctaggggtgcaggacacataactgccactggggttgcgcccacagctcccaaaagcatttccccgagtattagctgtctggaggcaaagtggcgcagcgggctgggctccaggtccccaaagtgactggcactgctgggcataggaggcacaacgcccgtgcatgcacacagcttgcccgccagcgcagggctcgccatcccctaggctgacatcagggggacactgggagctgtctcctgggcagaattcaggcaagtcacaatcccctctggtaggacgacactgccagccagacgggcgcagctggcaattttgacaacagggtccgtcagatgcacactgtgcacctggcctcagctggcaggtcaaagaatcacagcagggatcgacgcagtcatccaggaagccacagtcacactgctcgcccggctccacaaacatatttccgcagaaagcagccatagggggtaggctaggcagccgttcgaagaggcagctgcccattccatccaggagggctttctccagggcccgtcggctgcagttgctgaagttcaggcctggtaggaagtctgtggaggcctccatgatgcaggtcttggctggggctggacctggacaggggcagctattcccaggcaaatcatggtccaggcccaggctgtggcccaactcatgggctatggaggaggcgactcccaggatgctggtggagtggtccatgttcacacctcctgagaagtcaggagaacagatggagttctgaatggccatgcccaccgtagggcccagagaatgaagtaccagtcaccagctgggcactgtcatggggcaatcgaggcagcaaatgtgccctgcgccagtggaggaagttttcgagggtgacagctgggtttgggctgatctccaccaggtcacgctgggtccaggcctccaggcccactagtgccactcgtacattcaggggccggaagaatgtgtccagcaagagggccacttccagtgtgcggtttagcaggtgctggaagtcccggtatttctgggcctccgagtgatcagccacaatcaccaactccacagtcttggtctctgttaccacatcccgcctccggcgaatgtggcgctgtcccagggggtgctctggtggcgtctgagtgtgtacagattcccgccagctcagggcacaggtgtggcctggcaggtggagatcttggattcgcgaaataatgggaggaccctgaaggtccccaggcccctgctccagggtatagcttctctctggggtcaggaccaccaagcctctgagcccagagcaggtgcagatggacacccaggagcctgcatatccccgcactcttccctggtagcagcagttctccaaagtgtgtccctcactgaccacccgagtgccatcgggctggtaccacaccagggttgggcggcctgggaccaactccctattctgtagcagctccaggatatgactgtcaccgtccagctccaacttgatcctcaggggctcaggcagactggtctgaagcacctttttgaggctaattgggagatcgtcctgaaggacctggggctccaagggctccctcggggccttctctgactctgcctgctgctcctcagtgccacctatatttgggagcggccaggaaggcagagggctgcccgcgcccaggagccccagggcccagagcagcgccagccgcatggcagcggcgctccgggccgggcgagggcagcaagtgcggaacagcgcgcggaggagcggccggcggccaggtcgcctcgcggacgcgtgggtcgacgatatcccgggaattccggaccggtccagc

SEQ ID NO: 125332 - DNA, 890 bp, Homo Sapiens
  misc_feature (699)..(699): n is a, c, g, or t
  misc_feature (719)..(719): n is a, c, g, or t
  misc_feature (788)..(788): n is a, c, g, or t
  misc_feature (880)..(880): n is a, c, g, or t
ttttgggagctgtgggcgcaaccccagtggcagttatgtgtcctgcacccctagagatgccatttgtgggcagctccagtgccagacaggtaggacccagcctctgctgggctccatccgggatctactctgggagacaatagatgtgaatgggactgagctgaactgcagctgggtgcacctggacctgggcagtgatgtggcccagcccctcctgactctgcctggcacagcctgtggccctggcctggtgtgtatagaccatcgatgccagcgtgtggatctcctgggggcacaggaatgtcgaagcaaatgccatggacatggggtctgtgacagcaacaggcactgctactgtgaggagggctgggcaccccctgactgcaccactcagctcaaagcaaccagctccctgaccacagggctgctcctcagcctcctggtcttattggtcctggtgatgcttggtgccagctactggtaccgtgcccgcctgcaccagcgactctgccagctcaagggacccacctgccagtacagggcagcccaatctggtccctctgaacggccaggacctccgcagagggccctgctggcacgaggcactaaatctcaggggccagccaagcccccacccccaaggaagccactgcctgccgaccccccagggccggtggcccatcgggtgacctgcccggncccagggggctggaatcccngcccctagtggtaccctccagaccagcgccaccgccctccgacagtgtcctcgctctacctctgaaccntcctccggaggtttccgctggcctccaagccgggacttagggcttccaaagaaggccgggcgtggcccctctgggagtccccctaaccatgnacttgaaggc

SEQ ID NO: 125333 - DNA, 1142 bp, Homo Sapiens
ttttttaacgctcccaagatgtcacgtttattgcaactgagcagagacaggctgtgcggaccttcctcaatcccgtccaacccccagcccctccccaagcccccgctgcaactacgccggcaggtccgcagagtgttgcttgacagcgcgtggcggtgcccggagtcttaagacaccgccagtctctggcgccttcagtcatggtaggggactccagagggcacgcccgcctcttgaagccctaagtccggcttggaggcagcggaacctccggagaggtcagaggtagagcgaggacactgtcggaggcggtggcgctggtctggagggtaccactaggggcgggattccagcccctgggccgggcaggtcacccgatgggcaccggccctgggggtcggcaggcagtggcttccttgggggtgggggcttggctggcccctgagacttagtgcctcgtgccagcagggccctctgcggaggtcctggccgttcagagggaccagattgggctgccctgtactggcaggtgggtcccttgagctggcagagtcgctggtgcaggcgggcacggtaccagtagctggcaccaagcatcaccaggaccaataagaccaggaggctgaggagcagccctgtggtcagggagctggttgctttgagctgagtggtgcagtcagggggtgcccagccctcctcacagtagcagtgcctgttgctgtcacagaccccatgtccatggcatttgcttcgacattcctgtgcccccaggagatccacacgctggcatcgatggtctatacacaccaggccagggccacaggctgtgccaggcagagtcaggaggggctgggccacatcactgcccaggtccaggtgcacccagctgcagttcagctcagtcccattcacatctattgtctcccagagtagatcccggatggagcccagcagaggctgggtcctacctgtctggcactggagctgcccacaaatggcatctctaggggtgcaggacacataactgccactggggttgcgcccacagctcccaaaagcatttccccgagtattagcggtctggaggcaaagtggcgcagcgggctgggctccaggtccccaaagtgactggcactgctggg

SEQ ID NO: 125334 - DNA, 657 bp, Homo Sapiens
  misc_feature (630)..(630): n is a, c, g, or t
ctgattttgacaagggtaacttcttctttattaaagcaaataactggacataatcttaaaggattccacctccatcgtctttcctaacttagatcttcattgagaaattgggcaaggttaagtttacttttttctagtgctgcggttttggctcgtcttggtagtctcatcttcatttctgattctggttctggaacttcatgatcactttcagagtcggcttcagcagtctgacacctcctgttcgtcctagctgaaactgtcacttttctctgtcctctgttagtctttagctgagtagactttgatgcttgggttgcttttacacccctgagtggagtcatatatacttctttattcttttcatcttcattttggaaagtagttgtagtcaaggtggcatcctgtgctgcttcagcttggtcaccaaattctttatttcctttttctaactgaatcttgattttctccaaagctctcagacatgtcctatcttttacttgctccagaatctcattcaatagaaccagaagatcttttgcaagatggctactgagttctaaagaactcaaggcttttgtatagactcgaatttctggcgagcacggacttgttaagatctcattgcanattttcatagccaaattgtcatgtact

SEQ ID NO: 125335 - DNA, 990 bp, Homo Sapiens
aattggtagcgtatataaagagaagttcctgtcacattatattcccactagaattattatccacagtaaataaatattattttgttatgccaaaaatatagcgagcagcttcatggttaataatacatttatgttgacacctccctaatccaggaaacattcacaaacaaggactcccatatacaaatactttaggaagagagatttcccaggcagatatcaccaaaaatgttttcactgtaggaatcacaaaataagtttttgtcaaaataactgttgttgaacgttatactggtcttcctcactggtgattgataagctcctttctagccagtttgtggtacttccttcattttccctagaaatgttacttgttaaatgtgtcctcaggcggtttcatctttgttgattctgcccatctaagtcataagcttctcaaatgcaagctactagctagttacacttgtaagttttccataatgacatgattttaaacataaagagttcataagaatcacttggagagactatttaaaaatgagattcctaggcccacctcagattgtgataaatctgtgtgactgactgatgcagactttttctggactataataactgatgctgctctactgctttaatacaggccaaagtaacgtggaagcgcacagcagaaaatcttcagaaagacatcaggtttgttctgattttgacaagggtaacttcttctttattaaagcaaataactggacataatcttaaaggattccacctccatcgtctttcctaacttagatcttcattgagaaattgggcaaggttaagtttacttttttctagtgctgcggttttggctcgtcttggtagtctcatcttcatttctgattctggttctggaacttcatgatcactaaatagatgttgaaaatacacgaatttagatacaagctttaaaaccagtttatttataaataaaacttttttgtttctgaa

SEQ ID NO: 125336 - DNA, 993 bp, Homo Sapiens
  misc_feature (198)..(237): n is a, c, g, or t
  misc_feature (240)..(244): n is a, c, g, or t
  misc_feature (246)..(246): n is a, c, g, or t
  misc_feature (248)..(248): n is a, c, g, or t
  misc_feature (250)..(256): n is a, c, g, or t
  misc_feature (260)..(261): n is a, c, g, or t
  misc_feature (263)..(264): n is a, c, g, or t
  misc_feature (268)..(269): n is a, c, g, or t
  misc_feature (273)..(273): n is a, c, g, or t
  misc_feature (275)..(275): n is a, c, g, or t
  misc_feature (277)..(277): n is a, c, g, or t
  misc_feature (279)..(279): n is a, c, g, or t
  misc_feature (281)..(281): n is a, c, g, or t
  misc_feature (283)..(283): n is a, c, g, or t
  misc_feature (290)..(293): n is a, c, g, or t
  misc_feature (296)..(296): n is a, c, g, or t
  misc_feature (300)..(301): n is a, c, g, or t
  misc_feature (303)..(305): n is a, c, g, or t
  misc_feature (312)..(318): n is a, c, g, or t
  misc_feature (320)..(321): n is a, c, g, or t
  misc_feature (323)..(323): n is a, c, g, or t
  misc_feature (327)..(328): n is a, c, g, or t
  misc_feature (330)..(336): n is a, c, g, or t
  misc_feature (339)..(339): n is a, c, g, or t
  misc_feature (342)..(342): n is a, c, g, or t
  misc_feature (347)..(347): n is a, c, g, or t
  misc_feature (364)..(364): n is a, c, g, or t
  misc_feature (366)..(366): n is a, c, g, or t
  misc_feature (371)..(371): n is a, c, g, or t
  misc_feature (376)..(376): n is a, c, g, or t
  misc_feature (400)..(402): n is a, c, g, or t
  misc_feature (409)..(411): n is a, c, g, or t
  misc_feature (417)..(417): n is a, c, g, or t
  misc_feature (430)..(430): n is a, c, g, or t
  misc_feature (434)..(436): n is a, c, g, or t
  misc_feature (446)..(446): n is a, c, g, or t
  misc_feature (450)..(450): n is a, c, g, or t
  misc_feature (461)..(461): n is a, c, g, or t
  misc_feature (494)..(494): n is a, c, g, or t
  misc_feature (497)..(497): n is a, c, g, or t
  misc_feature (507)..(507): n is a, c, g, or t
  misc_feature (527)..(527): n is a, c, g, or t
  misc_feature (559)..(559): n is a, c, g, or t
  misc_feature (565)..(565): n is a, c, g, or t
  misc_feature (579)..(579): n is a, c, g, or t
  misc_feature (608)..(608): n is a, c, g, or t
  misc_feature (610)..(655): n is a, c, g, or t
  misc_feature (659)..(659): n is a, c, g, or t
  misc_feature (670)..(670): n is a, c, g, or t
  misc_feature (678)..(678): n is a, c, g, or t
  misc_feature (693)..(693): n is a, c, g, or t
  misc_feature (699)..(699): n is a, c, g, or t
  misc_feature (701)..(703): n is a, c, g, or t
  misc_feature (705)..(705): n is a, c, g, or t
  misc_feature (743)..(743): n is a, c, g, or t
  misc_feature (746)..(747): n is a, c, g, or t
  misc_feature (751)..(755): n is a, c, g, or t
  misc_feature (757)..(757): n is a, c, g, or t
  misc_feature (762)..(765): n is a, c, g, or t
  misc_feature (767)..(777): n is a, c, g, or t
  misc_feature (779)..(784): n is a, c, g, or t
  misc_feature (786)..(787): n is a, c, g, or t
  misc_feature (789)..(791): n is a, c, g, or t
  misc_feature (794)..(798): n is a, c, g, or t
  misc_feature (801)..(802): n is a, c, g, or t
  misc_feature (805)..(807): n is a, c, g, or t
  misc_feature (809)..(810): n is a, c, g, or t
  misc_feature (813)..(817): n is a, c, g, or t
  misc_feature (819)..(819): n is a, c, g, or t
  misc_feature (821)..(827): n is a, c, g, or t
  misc_feature (831)..(836): n is a, c, g, or t
  misc_feature (841)..(842): n is a, c, g, or t
  misc_feature (844)..(844): n is a, c, g, or t
  misc_feature (846)..(848): n is a, c, g, or t
  misc_feature (851)..(852): n is a, c, g, or t
  misc_feature (857)..(860): n is a, c, g, or t
  misc_feature (863)..(863): n is a, c, g, or t
  misc_feature (865)..(867): n is a, c, g, or t
  misc_feature (871)..(873): n is a, c, g, or t
  misc_feature (882)..(882): n is a, c, g, or t
  misc_feature (884)..(891): n is a, c, g, or t
  misc_feature (893)..(901): n is a, c, g, or t
  misc_feature (903)..(907): n is a, c, g, or t
  misc_feature (910)..(912): n is a, c, g, or t
  misc_feature (914)..(914): n is a, c, g, or t
  misc_feature (916)..(917): n is a, c, g, or t
  misc_feature (924)..(925): n is a, c, g, or t
  misc_feature (936)..(936): n is a, c, g, or t
  misc_feature (940)..(943): n is a, c, g, or t
  misc_feature (945)..(945): n is a, c, g, or t
  misc_feature (949)..(952): n is a, c, g, or t
  misc_feature (959)..(961): n is a, c, g, or t
aaaagaacaatctccgtttattaaacatgtttttttctgtttcaccacacactccagaaaaaaaggaaatggggctgggagtggagaaaaggggacagtgaggggggatagataaggctgggagtggggtggggagggaaaaaacgagaaaacaaaataaaacaggtaggaagagcaactccctacccttgaggtggnnnnnnnnnnnnnnnnnnnnnnnnnnnnnnnnnnnnnnnncannnnncncngnnnnnnngggnngnncccnncccncncncncncnccccggnnnnggncagnncnnnccccagnnnnnnncnncngccnncnnnnnnnaanggncgggnggggaggggccacgggnanggccngaggnggggaaagggcacagggaaaaaannncacaaannnacaacntccaaaaaagaanaaannnggccccgacngggnggcacgggaanggggacgggacggaaggggaaccgcccaaacanaanaaacaggagnaaagccgaagagagcccaanaccaaacgcaaaaggaagaagggggcaaggcngggaangggacagcagccanggaaaagggggggccaaggagagggcccncnnnnnnnnnnnnnnnnnnnnnnnnnnnnnnnnnnnnnnnnnnnnnngaancccgccaaacnaccaaggncaaagaaacaccganaaaccngnnncnggccgaacgaaagcacggcaaggaaacgggaggggganccnncccnnnnngngaccnnnncnnnnnnnnnnngnnnnnnanngnnncannnnncanngannncnncgnnnnncngnnnnnnnggcnnnnnngggannancnnnaannccccnnnnggngnnncccnnnccccccccngnnnnnnnnannnnnnnnncnnnnnggnnngngnngcgggcnngaaaaaagggnggcnnnnancccnnnngcccccnnnagccggcgaagaggaggccccacccgcggaga

SEQ ID NO: 125337 - DNA, 692 bp, Homo Sapiens
  misc_feature (643)..(643): n is a, c, g, or t
aaaaaaaatttcgctgacagatggatgcatgtctttatttaattcgttcattccaggttcatcccacatcttcacatctcaccctcccaccgtcaaaacaggtcccatgtaacaacagggggccaaaaacaacaggcttgcccacagtctccatcaccccctaccccacggaacactgtggggacaacggtaccttgcttgaaagccacaggtttcaaacacttttaggggcacaactctcttcaaactggaaaccacgagccactacgtagaacaggctgtcagggagtttcaacctgggcaacatttggggtacgtccctggagccccaagttccctcagagcaggtgaaaactcctgcttcagagcccttctttctatccaatcacttgaaacgttccatagaaagaagaaagaaaaaagaactcccttcttgaaatgcgaataccaagatttcgcacgaccaacacttccacctgttgaaataaacagtccacaaaattaaggcatttgggggcaattagagggaagtaaagcatttactaaagttacaatatcatatcaaaagtgttcattatgcttttgaaggctcttaactaggcacaagggcagaaacagtcacggtcccggccactgcaggcanacacgtgttgattaccacagcagaaagggaaacagagagctggtggtga

SEQ ID NO: 125338 - DNA, 591 bp, Homo Sapiens
  misc_feature (183)..(238): n is a, c, g, or t
acaaagcaaacaatctttattcacaatttggggtggcagaggggagatacccccaggtcagtccaaaagcaaagatactgggagggaagatggcgctgggcgaggaactcagcactcatcctcacccagcagggcataagggtttcggccagccaggctggaccctggagccgaggttggggnnnnnnnnnnnnnnnnnnnnnnnnnnnnnnnnnnnnnnnnnnnnnnnnnnnnnnnntcacaggagctgctcagctcttcctcttcctcctcctcctcgtcacctgctggccccaccctgccctgcaaaaccaccagctccgtggtctctggatgggactcccaggtgcctttctgttcactgtagcctgggggatgaaaacacaggctgaggcggccgtccactgccagccgcaagagactgttggctgctctgtacacatcattccgagccgccttggctgtcttgtaaccacgtttctctgcccaggcttcacagatgtctcaggcacaccaggggtgttccgctgaggggtcctcagcctctgggtggcgcaggtggagcagggcctgcacgggaattcgggaggc

SEQ ID NO: 125339 - DNA, 684 bp, Homo Sapiens
  misc_feature (240)..(325): n is a, c, g, or t
  misc_feature (659)..(659): n is a, c, g, or t
agcctggaacagccgctctcacctcagttcatctggggaaggggctacaaagcaaacaatctttattcacaattggggtggcagaggggagatacccccaggtcagtccaaaagcaaagatactgggagggaagatggcgctgggcgaggaactcagcactcatcctcacccagcagggcataagggtttcggccagccaggttggaccctggagcccgaggttggggtctcctcatccnnnnnnnnnnnnnnnnnnnnnnnnnnnnnnnnnnnnnnnnnnnnnnnnnnnnnnnnnnnnnnnnnnnnnnnnnnnnnnnnnnnnnngtcacctgctggccccaccctgccctgcaaaaccaccagctccgtggtctctggatgggactcccaggtgcctttctgttcactgtagcctgggggatgaaaacacaggctgaggcggccgtccactgccagccgcaagagactgttggctgctctgtacacatcattccgagccgccttggctgtcttgtaaccacgtttctctgcccaggcttcacagatgtcccaggcacaccaggggtgttccgctgaggggtcctcagcctctgggtggcgcaggtggagcagggcctgcacgggaattcgggaggccaggtagcccacagcagtgtanggctcctggatctgggcgatagggt

SEQ ID NO: 125340 - DNA, 2070 bp, Homo Sapiens
  misc_feature (182)..(238): n is a, c, g, or t
acaaagcaaacaatctttattcacaattggggtggcagaggggagatacccccaggtcagtccaaaagcaaagatactgggagggaagatggcgctgggcgaggaactcagcactcatcctcacccagcagggcataagggtttcggccagccaggctggaccctggagccgaggttggggnnnnnnnnnnnnnnnnnnnnnnnnnnnnnnnnnnnnnnnnnnnnnnnnnnnnnnnnncacaggagctgctcagctcttcctcttcctcgtcctcctcgtcacctgctggccccaccctgccctgcaaaaccaccagctccgtggtctctggatgggactcccaggtgcctttctgttcactgtagcctgggggatgaaaacacaggctgaggcggccgtccactgccagccgcaagagactgttggctgctctgtacacatcattccgagccgccttggctgtcttgtaaccacgtttctctgcccaggcttcacagatgtcccaggcacaccaggggtgttccgctgaggggtcctcagcctctgggtggcgcaggtggagcagggcctgcacgggaattcgggaggccaggtagcccacagcagtgtagggctcctggatctgggcgatagggtagatccctgccagaacctgcaactgcctaggcagaagagatgggaagatgaggcctgggcagtcacagagcttcacagagggggtaagaaagtaggtctgaaagtatcgggtatggcccggggttctggagacactcacgactttccgccccaccagcccattgatcagcgaggactttcccacattagggaaacccacacagccgatggtcaccaccccatccttgtagcgctcttgggttgggccagttggctccattgctgaatcagtctgctgctccaccaggactgctgggccatcctcctcttcctcctcctccccagagccattaccccaggtggccccagccacatcccgagcaatcttctcccgccagctgctcaagtccactttccccacagtgatggcttcacaggctctcagcaactgctctggccccagggcccgagtccatcctctcccccgcctccgactcttcttcaagacactactaggatcctgtggggtgcgggggtcccgaggaaaagaggtgaaaaggacgacgtggagctggggatagtgttgatggaaataatgcttccaggcaaccacaagagctggcggggccagatccaccttgttcaaaaccagcaccagggccagtccaagttctccagtcacatactcataaagtgctggcgggaaattcacaactggatgtcggatatcagtgataagcaggacgatgtcagacatctctaacacccgccacagctgcctccatgtctccagattgtgctcaaagtagctgagtttctcagaggagtaagccccatgaatcttcccaagatagtcttggaagctccgttcctgcttggctcattagttgctccttggacatctcatagctccaaggaggacgtcgaggaaagtccagaactgagccaggctgatacacctcccggatgtccagctccaacacttcagcactgaccggctgtagaacttgctgcccgggctgctctctttctcctctctacctcctccctgctgtctctctcaaaatgcagtcggtatcgatttgggtcgtagcctcgtggacccagcccctgagaaggctgctggttaagcctgcggatatgatgggtcacagactccccgtccgaggtgtcggtctgttcctctcgccgctcccggctcccgctgcggctgttggaactggagcgcagcccatcttgaagccctctcttccgctcccgtttgtcctgcaactgcttcttcttctgcttcacgctgaatggcttcttcctcggcatggcccggaccagtcacctggcccgccctccgccgagtcccgccgcctcaacgtgactgcccccggggcagcccccgccgcaggggcccgggaccctagaggaggcggggctagcaggtgacgtcagcgggcgggccc

SEQ ID NO: 125341 - DNA, 732 bp, Homo Sapiens
ccgttagatcaagttttttattttcttacacaaggtgttatagaaaatccaatctttcagaaagacaaaaacaaagataatcacaatgacataccagtggaaaatttataatcctaataacctgacctaggctctaaatccatgtaaaatttgccttgcttttgtttaagggattggtccaaacaaatggagtttatgaagcaatggatacttgtaaaaggtagttcccactgttgcactgattccagtcttggtttttaatatatacatattttttttccagagagtttagtgaatttcatatgccctatcgtctcctctccacttagaatgctttatagaacagcccatcatgtcctgtggcctcagtttaacccaggatttgttaaaacaaactgcatagaatggcctgttagcaatgaatatttggaggagtcactgctccccatctccaccccgatttccgcaaccttgctctagaactcttcataaaataacatcctgatgtggcctatagatcagagactttatattttctatctgggtccactgaagtctgggcttaaaatccagagctgattctgggcaaacagagaagagtaccctgttgtgtcccagatgaatttttctcactgaattgggaatgtgataagcgctggtcaaccataaaattctgatatttactgtcatatattttgcttggccaatagtctacaaagttctatagcttcg

SEQ ID NO: 125342 - DNA, 803 bp, Homo Sapiens
  misc_feature (716)..(716): n is a, c, g, or t
  misc_feature (733)..(733): n is a, c, g, or t
tttaagtcagaaagaattaaaacatttattgggcataaatatattacatatacactacagatacagttaggtattacatatagcataatatttgcaaaatctatacattaaaattgatatggcagttttaatacaatgtatatgaaatagtctaaaatttacaatacaggaaaacatgattttctttttctcctagagttgaaaagcttggaatgtatgtccaacagtgaggtaaaacattttatctttcaatttaaagaattgtgcaaggataacattcaaacacattcaattagggcacttctcaattttgacatgaatactgaattattgtagccaacaaaacaaggttagaaaatgccaacatttcaagttgataagaacaaggcagagaatatgcaaaaaatctctttaaaaagttttctttttcaacaatttctttgaggacaaagggcagtttgcttcacatgactggaatttcttgtgccagggatgagtttgacatacagagaagagtcagagcatcagaaggccactcattcactcctcacatagcaaaagggcaaagagatcaggttaatagaacactttattttattgttcgtgtgtgatggcactatatatagttatatatcactatcacatatacatatttgtgataaaaaacagtgccatagagagtactattttctgactgaaggaatatatgaatacanataatggagagcaatanaataagtgctgtcagctttgtacttcacacacttcagcttcctggtggttaatgatagtatgaaatctca

SEQ ID NO: 125343 - DNA, 1359 bp, Homo Sapiens
  misc_feature (30)..(30): n is a, c, g, or t
  misc_feature (105)..(105): n is a, c, g, or t
  misc_feature (113)..(113): n is a, c, g, or t
  misc_feature (127)..(128): n is a, c, g, or t
tattccattaaagaagttcttgcctatgancaaaggaaggaaagttacttgtcccagatgtggcaaattataaacttttgtataatgtgcaaaaggcctaacccntcatatcntacaccctccactnntcattctaagagagcctgagtaaacagccaggggctgggttttcccttgaatggctgccagatgggggttaaaatctgcttctcaccttctaggctgtagcagtgaggagctaatataaaaagaaactacaagatttcaagggaagagggaccacacccatcttcacaataaaatgtcattctcaacctagagcagaggtgctcaaacatggtattagagatgcatccaaagtaatgtttctggttagtggtttaaatactgagttttgaaaatgctttacttttagaaagaataaattactgtagatcacaagggtagccatacaacaaagtcactctcagatatttgtatgccttcttgaatgagaaaaaggcagatttcaactattagtacataaacatctttttgttatgtgtcatcatagctaaaaggttgaatactgctcctctagagcaagaaaaagcgggagcccctgggcaaaacagagcctagggagaatgccagggaagagatgagatttttggaggtaagcacagtgtcccaaaactgggggaaaagggagcttaggaaatgtgatacaaagtgaactaagcaggaggcatgtacttgaggctttaggaagcaggattaaccctctgcatgttcaaatggacatgctggtactcagtatttatattagcacagacaagaaggcagcggaacagttataccacattaaaggccagttcttgtggggagtaggtttatctttggagatggagctgagtacccctcccctcagttactcatgggaaactcgttccaaggccacatagaaactgttcttgtcatctaggcaatgccagccaattggtccaatttcacagtctgcgcagaccagaaacttgatgttgcccacgtccttggtgaagcccacattctcgaaaatgaacatgtcctcaaccagccagtgttcctggaggagatcgccgtcaggattgctgccgtcagacagagctggcttctttctcatgggaagggaaggaaaagctgtcggcgagagaagagagcggtccctggctgcagcacccgggagccgcaacgctggcacagcaccgccttccggtttcggccctcggctgacactaactcgctcggctgctccgctggttccatcgccgctgccgccacaggctcctcagccaccggacgcgtgggtcgacgatatcccgggaatccggaccggtccac

SEQ ID NO: 125344 - DNA, 1648 bp, Homo Sapiens
  misc_feature (1561)..(1578): n is a, c, g, or t
tacggctaggtagcgaggcctgggtgttgaattcggcacgaggagcccaccacagaggccacaggcaggcccccacttcaggcccaaggcctggggcggggggaacagtcactgggtctcagattctgagactgttgtttagcttacctttctgctaggattggcttcccgcagagggcagggcccatcctaagcagcttccaagtcccacaaaggtggcttgtgggaggatttggaaggagctgcattgtgggcggggagtgtgtgggttgggttcgtaccagcaagtagactaggaactgagcccaggaaagggggatgttttcctggtgtttggatggtcagctgggagtgtccatcatcaggggaagatcaaacacaggtgcactcagctgcccagggcctctgggacacttgccttgacttgcaacttgccttgaacatcacgatcaaagcagcaggtgctgtggtctctcaaaattgatttttatttgactctgtggctctaagactgccttgaaccgcctgaggcctatgcatctgaacaagtgggtctctcccttgagcaccaggagtgggtgccagccggccccgaggattcccagcaccccacctatggtcttgccagcataggcttgctagttccttcttggtcagaggtagctgcagaggggggaggccaagggtttggtctaagctgtgccctgccacctggcaggaggcccactcactgcccaagtcatggcaacaggctggagcagcccaggagatgggcctaaaatgttctggatcccttgggtcctagtgttatgttccagtctgcccacctgtgctcaggatgcagccctgggatccagcacccatggaagcttctgctgggatggtgtcacctatgggttttgaaccagtgtggtatggtccttgggagctctgctctgagcttgccacactgctgagagcacccactgtcctgaccagagtctcagtggtcctgacccccaatgtgggcaggggctgggcaggagggtggggtctgctgtgggttcagaggactccacctcctggctggtttacctgctgctgcccattttctctgggtactgctggccagaggactttagcctacccctgaagagcctgtccatgtcattttcctactgccatagataccctaagcccagggccccttgaggcccagactcagcctgcccactggtgccggagacggagtggagtgggcctggatccgagggatgctacctctccctttcccacttgaggaccctggggagagatgggggcggggaaaatggaggtatgaatttggggtaagaggaagtgagatctccgcttgcaggtcagcccctgccttgcagggcgggctggcttgactcaggccctgtgagatagagggcccagcccagccccacccacagatcccctgctcctgttgtgttctgttgtaaatcatttggcgagactgtattttagtaactgctgcctaacttccctgtgttctatttgagaggcgcctgtctggataaagttgtcttgaaatgtnnnnnnnnnnnnnnnnnnccatgagcaggcggccgcaagctttttccctttagtgaggattaatttcgagcatggcacgtggctcgtc

SEQ ID NO: 125345 - DNA, 925 bp, Homo Sapiens
ccatagataccctaagcccagggccccttgaggcccagactcagcctgcccactggtgccggagacggagtggagtgggcctggatccgagggatgctacctctccctttcccacttgaggaccctggggagagatgggggcgaggaaaatgacatggacaggctcttcaggggtaggctaaagtgctctggccagcagtacccagagaaaatgggcagcagcaggtaaccagccaggagtggagtcctctgaacccacagcagaccccaccctcctgcccagccctgcccacattgggggtcaggaccactgagactctggtcaggacagtgggtgctctcagcagtgtggcaagctcagagcagagctcccaaggaccataccacactggttcaaaacccataggtgacaccatcccagcagaagcttccatgggtgctggatcccagggctgcatcctgagcacaggtgggcagactggaacataacactaggacccaagggatccagaacattttaggcccatctcctgggctgctccagcctgttgccatgacttgggcagtgagtgggcctcctgccaggtggcagggcacagcttagaccaaacccttggcctcccccctctgcagctacctctgaccaagaaggaactagcaagcctatgctggcaagaccataggtggggtgctgggaatcctcggggccggctggcacccactcctggtgctcaagggagagacccacttgttcagatgcataggcctcaggcggttcaaggcagtcttagagccacagagtcaaataaaaatcaattttgagagaccacagcacctgtgtttgatcttcccgtgatgatggacacatcccagctgaccatcccctcgtgccgattcaccacccagcctcgctacctagccgtat

SEQ ID NO: 125346 - DNA, 1816 bp, Homo Sapiens
  misc_feature (23)..(24): n is a, c, g, or t
  misc_feature (106)..(106): n is a, c, g, or t
ggcacccactcctgtgctcaagnngagagacccacttgttcagatgcataggcctcaggcggttcaaggcagtcttagagccacagagtcaaataaaaatcaattntgagagaccacagcacctgctgctttgatcgtgatgttcaaggcaagttgcaagtcaaggcaagtgtcccagaggccctgggcagctgagtgcacctgtgtttgatcttcccctgatgatggacactcccagctgaccatccaaacaccaggaaaacatccccctttcctgggctcagttcctagtctacttgctggtacgaacccaacccacacactcccggcccacaatgcagttccttccaaatccttccccacaagccacctttgtgggacttggaagctgcttaggatgggccctgccctctgcgggaagccaatcctagcagaaaggtaagctaaacaacagtctcagaatctgagacccagtgactgttccccccgccccaggccttgggcctgaagtgggggcctgcctgtggcctctgtggtgggctcactcccacccccaacagtggccccaggagaggctttcccaagagtcttcaaactccacccaccccagccctagcatcagggactccccaccccccactggagtgttaatatcattaatgtacaaataagatccaaagatataccaaagatcgagaaacagctggctccgacctccctcccacagagccttcccagggttagctgaaaaagagccctttggcatctacagaagccagtcggagtttatggtttcatttgcccaaaaatacacctttggggacctcaaattctttccaagaatcactaccacacatatgaatttgaacattcgccacccttccaccatccatttctcgcaggaacttcaaaataaaaatggccagtctgcccccactctggctcctcgtctatggctgtctcttcttttccaggggctgcagttctgatgtgaatgatggtgccattccagcattgggcctctggcaggctgcatcacatgatggcacagcatgagttttgtttccgggcagttttatagaaggctttagactgtgttcccagcacctcggatttggacaccaagtcatctagcttctcacctcgctctaacagagactccatggtgttgtgcagaatgattttggtctcatctagttcggcctgcactttagtcatgggatcagcttctcgtgggttctggtatctactgaggtgaccatccagggctgggtaatggattgtagcaggggatcctactggccagtctatcctgtcgacttgcttggagaattcatctagtaccttctccagcaaggtaaaggccacccgggatgggtattcattgtcagcaatgaccacacctgcaagactatcattccggacgtagacgtggcacagatagtcttgttctttgacagaagctctagtgcctttcgatgagcgctccacaatcagttgactcgtgaaggtcatgaattcctgaacgctggatctctggaaaaagctgaaggaagacacatcgtatgcggctttgagcagcaccaccttggcctcgcctttgtagaggacgctgaggctgtacagcttcatggctccgcgccctcaggccgcccgcctgcccagctgcgggacccgttctcagggagcagcgcggccgccgcccctcgggaccgccgccgcctaccggcctctcagcagccggctgctgacggggccaccgccggcttcctcctcccctcgtgccgaattcggcgcgccgtcgacttcatactct

SEQ ID NO: 125347 - DNA, 1344 bp, Homo Sapiens
tttatgacttattctatttaatatccatttatcaacattttgtcacaataataataaaaataatatctgttttaaaaatccacagggaattctcaagggaggagcttgtcttgtttctcgcccctcacatttgggaactcctggcctaggcccagtctctttggcttcctgccgccaggtccagcccctcttagtgcctgaagtggggtcttctggacccatccttgcccacagagtacagtgaacacaatgccctgggggtctgtggccaggggggagtcgagatcactgggggcctcaaagggtcagggattggggagctagtgaggtggagagtgggcggtgggggagttgtaagataagagtgggaatactgtatttatgtgggatggaaaacacgtgaacaggcccaggcagcctctagagggaggggcaggtctggagcaaagagcggctgagggtggggcagaggggaccgggtgcccagagagctgtcgaggggagccggcagcctgggacgactgcggggagaccagggcccctcagtgaacctggaagagtccgaagtaggtgaggaagggggcagccttgagatgggcccaggggagggtgcggatccgcagggaggaccctggccgcagggccaacagcccagacacctggcagaggcggagctggggcccgagggaactcgccgcagtggctgagaattcctccaggcagcgcagggccagcacaccatccaccagcaagtccagcttcaggtagacagccttcccctcatcaaagtgcacctgacagtacaggtagtagagcccagcccgggtgactataaactccccgatctggcggttgtagcgcagagggctggagctgttgattctggcttcctcccagccactcactgtcccgtccacacctgcctgcgctccgtcctgtccaggtcgtggatgaacttcataatgggctgcgatcgctcttcgagcccgtgttttccggcctttaggtgcacttctgcgaggccgaactagtcggttcaggaaaggcgcaggatcctggctttcttctgtctggggattcagttccgacgggtcctggtcctcctctgccaccagctcctcctgggcaggctcctgctgggcggacagcgatgcccggctccccaaactgaccacggccagcaggaggccgaggcaggccagcgccaggcccaggcccagcgcgagcgggaccagcagggcggtgcccggctccccccggcgccccctccgcctctggctccgacgggcggccatgggggcggggggctgtgcctgcctcaccgcccccccatcccgggacccg

SEQ ID NO: 125348 - DNA, 676 bp, Homo Sapiens
ttttaggtgctaaaacttggttttgaaattttattaaaaaaatatatttgcaaacatataaaatttaagatgaaaaacgctcattttaaaacatgtaataacttaatatttgcaaacatacacagatgctataaaatccataccattaaaaatgttaatgatacagtattgcgctcatggaacaaaaatcttgctgtaattccagagcttctcgtccccatgtttcagggagctgagaatctggtacaatgaaagtcatgagagccacatggccaaagcagtaatacagaataaaaaaccatttagaacacatattttaaaaacatgtttcttaaggaatcacacagataaaaaggaaacacaattctgcattttccccactttgaagtgaatgatattgcatcttagcattttaaatgaaggtgtcaaatacaaaacggagggaatcactgcacacatctgttgaatttgctgaaaaacaggctcctcaaggccctggtccactcggaaatgttctcaagcacagctgtaaaaaagcctagtgtaagctgcttgactttgctcagatcttagcattttagagacttgagaacacagggcactattggttccagaagatacactgaacgcaactgaagaaaactgaagggaggcacgaaagaaaacatactctgca

SEQ ID NO: 125349 - DNA, 683 bp, Homo Sapiens
ttttttaattagaacaattcttttatttgaaaactgctggtatgaatttcctccttccctcaattaggccagaaactcatcatggggcatgcacagcatctacaggaggaagccccagcttgtgggggctaggatggagcagccgtgagagacacctagccaaatgtccgtttttccatcataaacaatggagcgggggtcagggggagaagagagtgggtaagtgaatggccagaaactccagagggggcctcacacccacctgtgaggtacctccttgccctacccccactgaggcctcaggccccttgcttgggtcatgctgccccctgtcggctgctgcccctgcctcttcctctgagttctaacaacacagacactggtgcctgaaagccctgctgctgccagggagtcagaattctggctgcctctacttgggaatctcctcccatgtggggatctgcagaacatccagatggggccatcccacctcatgatccattcactcccagtgggatacactggaattcaccccggagactggagcccaacagattaaggcagcattctccttgctctggaggcaggtctgcgggaagggggtggaagtctagctgcccctcatgtctcatgccggtgagggtacttggcttctcacagctaagcccaggagcttcctatat

SEQ ID NO: 125350 - DNA, 1112 bp, Homo Sapiens
  misc_feature (1095)..(1095): n is a, c, g, or t
cataaaaaatttccaacgggagggggcccgaaaattccattaattttaggcttcgcttaagcaccccccttatggcccaggaacccccataggggcatctgggtccccccctgcgtgcaggtttcttatacacttggtttgtcaacacaggggggcttttttttaggggggagcaggcccggcccctttagttgaaccccaggttcctttgtgaaaaggcttagttccttttctgatcactttcgggcacgcgtgtcagaaagatattttggataatatattgcggaatgtgctcgatacgcacattaattctcttggcaagaatttttgcctttaacttgtttgtttacaacaattgccaacagcatgctgggttaacattgtagatttttttcattagtgaaataagtcagtttattttatttctaacaaggcctttttctcctataattaagacaaaccattttacactttataataacataacttagtttttagtattttcaaaagggaaagattttgggtggggggaatttaggaagtcaaatattttagaaggagtaactatagaagttactttttcaatcttaatatattaacaggcttgttaccaggtacattacccagcattttttcttacaaggaatctatcaagtactagccaacaaatagtctacatttagaaactgagggtagaaatgtctgtattttaataggaaacaagcatctaaaatacaaatcacatgtctttaacaaggcaatttacataattaggtgtaagtttttaattaactttatgttccttaggatcctagcaaacactcagttgactgtatctcaagttcaaactgcactcacctggctataaaggtaaacatcacaatggaattgggcctgtctgactagggaaaaagatcacttcaatattgcacatttcctttctttaaaaacaaggattaagtcagggccatcttggttctgaatctctccatttttgttgggagaagactaaccatctctttactaagttctagctcaacttctatttcctgggcggcctcaggatgcttttcacagtaatcaacaataatttgntatgttcaatgatgttg

SEQ ID NO: 125351 - DNA, 1874 bp, Homo Sapiens
agcttgttaaacaatcttaatattttatttattcttcataaatacaatgtatataatataaaacactttgtgcacatgtttccaacaatttcattttctatgcatctttacataaggtagtagctaataactctttctgtggacacgtattttccagttttctaaggtttatgtgttcaagcattgtaaaaacatatttaaaaattgaattaccagtaaaaatattgaatgtacaggtcattatgctcccacaaatacaaaatacattgaaaaattatatcaacagataattacatatgaaatatgaggcatatattttcttctattatttattttctccctaaagagttctaattgattaaatctcaagagacaaaatgtaattttataaaaccactgtattgttcagatttaggagacaacctaagaagatgattctgagtaggtaggatttttgctattactgttatgtgaaaaagactgctcaattaaatgacagattgttacatatctccctaacaagaggggcgaactgatactacaagcagccagaacaacataattagaatagaattccgaggttatattaatagaggtaataagttaattaaaaccaagatcaactgagcttctatttacaccagttcagacagcccaagaggaaaagaactctattttagagacatatgtgactctttgagcttctgtcatccaggtgccatttctgatgcagcacatgtgcactgaacagttggcaaagaaggaaaaagattatggtagatgtatgtgcagatagtctctctaaatgatgtaaaatacgtcccagaaagaaaagccagggctttgttgtaaaataaaaaattttccccatgactttttgttctttctgaaatgtgatttgagcatgtttctgtaaattaaggatatatactaacttatgatgtatatagaccaaaaatagacttactcatcaggaagtgatggaattatacacataaattggcaatgacatttgaaaaatttaggatctggttcccatttcatctaaatgtaccatgtatagggtggctgtcaaagcagaaagatatataaaagtatccagtagcacatactatactgcattgctaggtaaggttcttttcctgacatcctatgcaactatcaaaaatcatatgtctgcaaactgaaaatattagcagaaagaattaaagatgttacagtttcagtattgaaagttttggtcccaaaaggtgctttcgtaaagttatttctctttcatgcattgattgttgcttagctaatcttcatcttggtccagatcagggtcaacaatccgtggtgagtctgagataaaagaaagcatagaaagccagtagtagtgccaatatagctgcaagtacaaggccaacttcctttatgcctattgctgttttctttgcttctgcttttaatttggttgctcgtaaaataggtttagtttttttataatcctgtttaccaatttgttttctgtactgatcaacaggaagttttatagtagcagcatcttttctacccatctttgatctccaaaatgcctgcttgcgttgtgtctttgatgctgccaagtctaaactctggagagctgccaaggggtaagatgtttccaaagccaaggtctttagttaggtagcagtgcttgcattcctggcaaattcaattccaaataccaaaaataatattcttggtgatttttcttactcagctctgccaaggcaagggccgacaaacttcgtgtcctgtgggaaatgttgctgtccacggttctgtcactcaggggcaggccccggccgtaatggccgaattcccgggcatatgtccggtaccgtcgactg

SEQ ID NO: 125352 - DNA, 1524 bp, Homo Sapiens
gggactcacgcttggtgcgtgcgcggcgactgcgacgggcagtggcagtcatggcggctcagtgcgtgaggttggcgcggcgcagtcttcctgctttggcgttgtctctcaggccatctccccggttgttgtgcacagccacgaaacaaaagaacagtggccagaacctggaagaggacatgggtcagagtgaacagaaggcagatcctcctgctacagagaagaccctcctggaagagaaggtcaagttggaggaacagctgaaggagactgtggaaaaatataaacgagctttggcagacactgagaacttacggcagaggagccagaaattggtggaggaggcaaaattatacggcattcaagccttctgcaaggacttgttggaggtggcagacgttctggagaaggcaacacagtgtgttccaaaagaagaaattaaagacgataaccctcacctgaagaacctctatgaggggctggtcatgactgaagtccagatccagaaggtgttcacaaagcatggcttgctcaagttgaaccctgtcggagccaagttcgacccttatgaacatgaggccttgttccacacaccggttgaggggaaggagccaggcacagtggccctagttagcaaagtggggtacaagctgcatgggcgcactctgagacccgccctggtgggggtggtgaaggaagcttagctgctgttgatggggtgggtgtttttaaactcacttgatgtaactctcaaggctggttcattgtttctcatctatgagtacgtgtgaccttttcccaaaccttattgggaaccttaagtaaccagtggctaaacagaaaagccggttgcccaactgcattaatgaactctaattcgggagtctgttcccttttagtgccacgcgttgaatagttccacatactttcagaagagctcagcagggccctgcctggtctcccgagcatcatgagtaacgtgtctgctcagactctgctgacaccaaagtattttaaacaaataaaaggtcttggggaattctgtttggctacctgggcacgccagtctgcaccatgtgtccctgcggcgcatgagtgactggcgtatttagcccgtcacatttcattcgctgaaggaaaggcaagagagttgaaacatttttcttacttaaaaaaaatgatctttgtgaagaacatagtgagttcgtttgtcttcagtcaacagcggctgaaactgaccactgagaaatgggtgtgggcactgacagttctcccccattatttggccaggaattgagcttggcttggcaaagttccttttaccctgttctgttcatctaaatgcagacatatttaaatcatattcaactagttactaatgacctcaagttgtattccctggcaaaatggactttctcaaaataggactgcacgcttggtgtactttaaatgttaatgtttaatttaaaatttttatttaagaggattaaagccctaatgtttattttcctactttctgaaagc

SEQ ID NO: 125353 - DNA, 560 bp, Homo Sapiens
tttttacttgtaaatttcatatttattgtaacaaaaattatgacatgtccatttgtgcattctgcttgagtataactctgggtatgtaaatggcctaatggggcactatacaaccatgctgattgtggcagcagtaaggaacacagttaaaagtgtctgtcaaagtgggaaggctgggacaggggaggaaaatgggttcagggcccttgggtgcaggttcttgtccagtggcctaagatccatttcctccggacagaaacactgcagctgctcagcctcctcattcagtgaagtgagggtgagttgtgaggcaggcaggctcctcagaggggagggggaggggaaacgtcagttacttgggctgtgtccttacgccaagactacaaaacatcgtaagcctcactatacaacactgagctatttacaatggaaattctcaatcagctgttctctcagagaaaattagtgaatcccagtgacttaagtcacctgacagagtaaagcaactcctaggagttagtctccatattctacaaatgtctattattttcaagacaaaa

SEQ ID NO: 125354 - DNA, 660 bp, Homo Sapiens
  misc_feature (646)..(646): n is a, c, g, or t
tttttaattaacaaatggaatggcaggtctgtttcaaatattagtagcataacacataagtgcaattgcagtctggccacaagcgtcagaagccttccgtgtgtctgtcacaagggcgggcagacacactccgattccacccctggagggtcaccaaaagaaagcagccacttctctatttccattgttgtcaaagcactcaggttggggaagaaaattcaaatgaaaccaagctctcagcatccggggccagccaccctgtgccatcctaagtggtctctgtaccccagacctggggctgtcatctccaccgtggcattggctgggaaagtcgctgtgggacacacccctccgctcactcctgctgcccatggaggagcctctggtgtcccccggcctggggccatgtgggtcacacggagctgagcttcaccaggccgcgcacagagtcctcatgcagggagtcctggctggccaggcccagcacgtgcatggtgcggctgtgcgccagggggctgcccgccgccagtagcctggggggcgagggcgcctcatcgggcgtcaggaactggtggcccatgtgctcatctttccggggcatcacgtccgcgagcgtggcctcggcgaggttgggcatggaggcggncggtgtgggcgggc

SEQ ID NO: 125355 - DNA, 1573 bp, Homo Sapiens
cacgcttagaaatgtaatcgggggatctagaaattctacacaatgagaagctcaaaaacagccccaaagctgccaacaaccagagccgactggggcccaccccagcccagcccggcccggcccacccagggctaagttgggaccccccagtccctttccaggacgaatgggcccaactatgccgcctgcagcctggcccgcatcccaggccggaatcgttcatagaaaaccagccccggctcagggcgcagcctcagccaggcgggccaggccctcacgcagctcactcagctcaaacagcctgacgtccagcagctgcgctgcccggcccacctcagcccgcgcccgctcccgctctgcccgtgcctcctccaggctgcgctccatcgcccgcagctggtgctccaactccgcattgcgggtctccaggtcctgcaccttctgctgagtctcctcacgctcggcagcctccagggcctcgcggggccccccagtctgactcttcagggtctgaatctcctggtccttggtttgcaccagagcttccagctgttccagcgactggccctggcccagcccctccttctcaccggtgggggtcacctctgaagctgcctgagcctccagctcagccacccgctgccgcagccgctcggcctctgcacgctgagcctccagctgctgcctccactgggctgcggcggcgttggcctctcgcagggcgcctgccagcttgttgttgctgtcctgcagtgcgaaaaactcggcctcccactgtacctcgcccacggagccctcagacaacatcttctttagccgctcgcgctctgtggggccgggggcatcagcgctctggctgcggaacagtttttcctcgccggggccgttggcactgacgagagggctcgggggcacctggtgggaggcgagccccagggctggactggtgagctccccgccatcctgagatttctccctggccagcctggctgcttccttcacttcctggaacttctcggcaaactgtgtcagatgctgttcagaggcaaagcccaggccgtagactgtgttggcgcgactgtcggcccactgcccgaacttctgggaagttttggtgaaggtcatgttgggagtgacagtgctgttgatgatggccttggcgcctccgatgctgatgatgcggtacacattgcgggtggcatcgtagaaataggagacagtgagtgcgtgcttgcccgctgggatccagtttcgcttggtggctgggtcaatttggaacacgtgcgcccgtgtgctgaagattggctgctccctggctgtggacattggtcaggctgggatgggcaggctctagggggcagccagagaggtggcaggagcactggtttggccccctgccaggtcggcgccccgcgagtgtccaggcgcgagtcgggtgcggcccccgcggcgctgactccgcgctgccgggcgccccgctcgctccctggctcccgggcccgcgccctccgcgccgccctccacgccgccggacgcggggtcgacgatatcccggaaattccggaccggtcca

SEQ ID NO: 125356 - DNA, 950 bp, Homo Sapiens
gactttacttcttttatttattctggagtatctagtaggatatcatggcccaggaactcaacacatgtatgtggaacatcatgtgactaaataaaaaagaagatactattctctctcaagttgtaccattaacagtatctggctaacataatcactcctttagccacagttccatggctaggatgcagtaagcacaggaaaacaagggcctcctccaaagcttaatgacaatgagtcatttatactaatgctgcctgttcctcttactccttagaggtcaggaactatttgcttcttgattttgtgccacaggtaacaggcagtgttggaagaaatccatgggaagtaacaaaagtctggcataaaaagtcatgggaagtctggcacagagtgccggttaacattaccatgtcacaactccatcacccggtaataaaggagggaccggataaccattcattgccctttttctgtgactgtatatttattcagtgagtgctgacatattaaagaactacacagataggacaggttcatgatgacgaggcacagctgtgccctctcttctccatgcatacctcctcacagacttcacgaactgctgccacacttggctcctcctcgggctccatgcctcctccagggacaatccatctgtctggatggcgactactgctcacgagtagcacctcctcctcgctctcgctgcggaaacacaggcatgcggcccgcttcttgtagccgtcgccgtcgtaggtgcgggtctggttcgacttgagcttcatcatcctccgggcccgcgtgggggtgcggtgcgggtcgcaggagtcgaggggtggggagcccgctctggacggccgcgtgcgcgcgcgcccccggctcggccaagggaagcagggagggggagcttctccgctacacggctccgccgctggcccgccgcggccgca

SEQ ID NO: 125357 - DNA, 1289 bp, Homo Sapiens
  misc_feature (21)..(21): n is a, c, g, or t
  misc_feature (45)..(84): n is a, c, g, or t
  misc_feature (109)..(127): n is a, c, g, or t
ccctcaactaaagggaataangcttgcggccgcatacgcggcccnnnnnnnnnnnnnnnnnnnnnnnnnnnnnnnnnnnnnnnncaccccaaactggtatcttttaatnnnnnnnnnnnnnnnnnnntcaaagaaaacgtctggccagggccaggataagacaaacaggaacacttcagaatccaaggcaggggaaggctgttggcctctcttcagaggactgcaggggtgggaagagggagggacagatcatgcacaaaagtacttacaaattacacacccaacccccaccctcaataaaaacagaagaaaaagccccatcacttaacaccaaacagcaacattatcaatacaccctttctttgctgcccaccatgccttatttgaaagaggaggcctgtgagaagtggaaagagccagggtgagagggaagatttgcacttcagtctagtttccaatttccatttctcttacaggaagtcttcagtcatctgatgcctgacatcgagctctgagcagaaaccgagtatgtggtggccacgactggggtgccattgttggctgagtagccttgcctcaatgtttcaaaatatgatgcctgcacgggtttgtgatactgcagcacttttatggcgtcttctattttaaaccattccctcttccttccaatgttaactgaatcttcccagtcttccagcacttcagtgacaatgagcacatagacatacgtcctgtgcttcctctcctggttctcaaaaattccaactaatcttcccaatgtcccttttactccagcctcctcacagacttcacgaactgctgccacacttggctcctcctcgggctccatgcctcctccagggacaatccatctgtctggatggcgactactgctcacgagtagcacctcctcctcgctctcgctgcggaaacacaggcatgcggcccgcttcttgtagccgtcgccgtcgtaggtgcgggtctggttcgacttgagcttcatcatcctccgggcccgggtgggggtgcggtgcgggtcgcaggagtcgaggggtggggagcccgctctggacggccgcgtgcgcgcgcgcccccggctcggccaagggaagcagggagggggagcttctccgctacacggctccgccgctggcccgccgcggccgcctcattcccccaggcccaggtcccgcgccgccgctgccaccgtcacggctgccgtctccgctaccgccagggccgccgccccctcgtgggaattcgccacccaggcctcgctacctaggacc

SEQ ID NO: 125358 - DNA, 719 bp, Homo Sapiens
ggcaatttctacattgtgttcttctacaacgcagcctttgcaggcctcaccacactctgtctggtgaagaccttcactgcagctgtgcgggcagagctgatccgggcctttgggctggacagactgccgctgcccgtctccggtttcccccaggcatctaggaagacccagcaccagtgacctccagctgggggtgggaaggaaaaaactggacactgccatctgctgcctaggcctggagggaagcccaaggctacttggacctcaggacctggaatctgagagggtgggtggcagaggggagcagagccatctgcactattgcataatctgagccagagtttgggaccaggacctcctgcttttccatacttaactgtggcctcagcatggggtagggctgggtgactgggtctagcccctgatcccaaatctgtttacacatcaatctgcctcactgctgttctgggccatccccatagccatgtttacatgatttgatgtgcaatagggtggggtaggggcagggaaaggactgggccagggcaggctcgggagatagattgtctcccttgcctctggcccagcagagcctaagcactgtgctatcctggaggggctttggaccacctgaaagaccaaggggatagggaggaggaggcttcagccatcagcaataaagttgatcccagggtttgctttgtttttttaaagcaaaa

SEQ ID NO: 125359 - DNA, 777 bp, Homo Sapiens
ttttaaaaaaacaaagcaaaccctgggatcaactttattgctgatggctgaagcctcctcctccctatccccttggtctttcaggtggtccaaagcccctccaggatagcacagtgcttaggctcctctcagattccaggtcctgaggtccaagtagccttgggcttccctccaggcctaggcagcagatggcagtgtccagttttttccttcccacccccagctggaggtcactggtgctgggtcttcctagatgcctgggggaaaccggagacgggcagcggcagtctgtccagcccaaaggcccggatcagctctgcccgcacagctgcagtgaaggtcttcaccagacagagtgtggtgaggcctgcaaaggctgcgttgtagaggaacacaatgtagaaattgcccagccagttgaagcgtccaaagtcacccagcaggtcaaagcgagtgagccccagggttcgagagaagacaggaagtgctgagcttaggaccaggagacagacacagttcccaattatctgcgtcatggcagtgtcgtgccatctgggccgcaggctccggaagagtggagagctatagaagcccacaactgaggacaccattaggtaaaagatgagtacaacctgaatgacggcaccaaaggagcccagcttggagaaggagacctggcctaaggaggtaccctgcatgcctcggggcagtggcagcctcatcgatgagcagctccaggatgtggatggccacaatgagaccaggcagttttgtccc

SEQ ID NO: 125360 - DNA, 1297 bp, Homo Sapiens
  misc_feature (578)..(578): n is a, c, g, or t
gtaatataacagtgggtaaaaaaagccaggctggtaccggtcggaattcccgggatatcgtcgacccacgcgtcgggcgctacgtctgctgcggagggcggcgcgcggagctgcggcggcggcgctgctgaggctgaaagcgtctctagcagctgatatccccagacttggatatagttcctcatcccatcacaagtacatcccccggagggcagtgctttatgtacctggaaatgatgaaaagaaaataaagaagattccatccctgaatgtagattgtgcagtgctcgactgtgaggatggagtggctgcaaacaaaaagaatgaagctcgactgagaattgtaaaaactcttgaagacattgatctgggccctactgaaaaatgtgtgagagtcaactcagtttccagtggtctggcggaagaagacctagagaccctttgcaatcccgggtccttccttccagcctgatgctaccaaaggtggaaagtcctgaagaaatccagtggtttgcagacaaattttcattccacttaaaaggccgaaaacttgaacaagcaatgaatttaatcccttntgtggaaactgcaatgggtttgctcaattttaaggcagtgtgtgaagaaaccctgaaggtcgggcctcaagtaggtctctttctagatgcagtcgtttttggaggagaagactttcgagccagcataggtgcaacaagtagtaaagaaaccctggatattctctacgcccggcaaaagattgttgtcatagcgaaagcctttggtctccaagccgtagatctggtgtacattgactttcgagatggagctgggctgcttagacagtcacgagaaggagccgccatgggcttcactggtaagcaggtgattcaccctaaccaaattgccgtggtccaggagcagttttctccttcccctgaaaaaattaagtgggctgaagaactgattgctgcctttaaagaacatcaacaattaggaaagggggcctttactttccaagggagtatgatcgacatgccattactgaagcaggcccagaacactgttacgcttgccacctccatcaaggaaaaatgatctgttaaatgaagctgtcatcaggctaaagggtattgaagctgcagagggatcaacttgtgcttgccagaggacgccaatgaagtttgaaacaccaacaatcagagattttgtttctgttcctcattaaatcatgagcttttgtgccgagaaaacgctccagggggatactctagaacgactatcagcatcaggtgcactg

SEQ ID NO: 125361 - DNA, 1252 bp, Homo Sapiens
  misc_feature (817)..(845): n is a, c, g, or t
  misc_feature (871)..(1104): n is a, c, g, or t
  misc_feature (1139)..(1173): n is a, c, g, or t
ttttacatttatgggaaattttatagtttgcataaacaaagtataaacttaaggcacagtgaataactatattgataaacataaactagccactattggacaagtagcaaaagtaaaattcaagaaacaaaaccttcataagtcactacttccttttgttacaatcataaaattttctgggtaaactctagatactagtacctctagggagacaggattcagaagatcacttttagacacacctatcttcacttgataaccaaataaatatctgtgagtgagaggtactatctcgaatgaagttaaaaacaaattagaaggaaaaggtcaggttagcatgttttagaactattggtaaactataattcatgggacattatataatcaaaagattaatattttaagcactaagttataaagggtttacacccatgaataaaaagattaccatcacttactatgaaccaccattccatgaatccatgtagctgaacactcctaatgaaaagtttaattatccttcaacctgtagttgaagaactcagttcatgttcattgacagatttccattacagacccactatattgatgttactttctttgacactatattttatatagatatattaaaattgaaaacttaatgctgtttagaaggctattaatataactattaatttctgaaagctttgagtttctgaaaaggcttttaagatcaaaatttctgaaacactccacacattcttcctcacccacatttaattataaatcaatgttatactgataaaaggttctatacacacatttagagatatannnnnnnnnnnnnnnnnnnnnnnnnnnnnatatatatatacttttttccccccannnnnnnnnnnnnnnnnnnnnnnnnnnnnnnnnnnnnnnnnnnnnnnnnnnnnnnnnnnnnnnnnnnnnnnnnnnnnnnnnnnnnnnnnnnnnnnnnnnnnnnnnnnnnnnnnnnnnnnnnnnnnnnnnnnnnnnnnnnnnnnnnnnnnnnnnnnnnnnnnnnnnnnnnnnnnnnnnnnnnnnnnnnnnnnnnnnnnnnnnnnnnnnnnnnnnnnnnnnnnnnnnnnnnnnnnngaattcccgggcatatgtccggtaccgtcgactgnnnnnnnnnnnnnnnnnnnnnnnnnnnnnnnnnnncgccgcttcctcgctcactacttcgctgcgctcgtcgttcggctacgaccgccgctagcgccctatagtgatctataca

SEQ ID NO: 125362 - DNA, 686 bp, Homo Sapiens
gttttttttatttataaagaaaggaagtttaattgactcacagttctgcattgctagggaggcctcaggaaacttacaatcatggcggaaggcgaaggagaagcaggcaccttcttcacaaggtggcaggagagacagcacaggagaaatgccagacacttatcaaacaaccagatctcgtgagaactccctcactatcatgcgaaccaatccaatcacctcccaccaggtccctccctcgacatccagggattacaacttgagatgagatttgagtggggacacagagccaaaccatatcatctgtggccatagcatctgcacttggcttctccccagggagacatacttgcaggtgtccctgtaatgtctcttaatgtgtctaagtaccacgtccacagtttgttagccagcctcttgctcaggaagctccatgccctgtgttacacctgctctgagtctcattagaatccttagaattagggagcagcacccctgggctttggcagaggcagagaagtcactgcagatcccccattgtcagcgatcatttcacagcccacgggggcagacactgaacatgcatgaaggcattgtctttgcccttgagaaactcacctcaccatgcaccagctttacatactgctgtcaatgctgaatggagtggccagtttttgtcctggaca

SEQ ID NO: 125363 - DNA, 582 bp, Homo Sapiens
gagtgatttggtaacaaagttttgtttattgtctaaatttaagataaaatgtgtcattttcattacgaagtacaattttatggaatactaaataaacatatataaataagccttggccaacattataaaccaggatctgacatagatataaatccatgccttccaacttcccttgacgtcacattatcttctcttaagagatagtcactttggctaatagggaaaagaaaaccagtaacatcagaaaacaatttccatctggcctggctctgactggcatcatcactgtgagccatatgccttacttttctctgacacttcaggatgttccctcctggtatcagctgtgcaccaaagctaaaagttcacaaggctctccttgccattctcaataaatcagttttgcaaaatctccaggccttcttgcagagtattcaggcatatagggttgtagttgatcagccataaagatggggctccctttaggtcctgcagcagtatggcaccagtttgaaagcctccatccagtccacataatgaaagtcagaaaaagaccatttaccacttatctgtgctttctac

SEQ ID NO: 125364 - DNA, 1517 bp, Homo Sapiens
  misc_feature (1281)..(1322): n is a, c, g, or t
aaaagtatcaaataattttattatgaaagataagccatttattgaccattcacttttctaaaaaaacacaaatgtgagaataaaataaacatacctaagactcactggcccctccaggacaggaagcagccctggacagagagcctgcaaacgagtttccttatgcctaatgtctgaacttctcatacattctaggatttcatgtttcgttacaaaggaaaggaaactggctagaagattcatgtacaagaaggtcacaactttaaagctatctgacgctaatgacttgtacaatctggtttgcaaactctgagagacagtatcaaataagcactgtcaaagactactcccagctaatctttactgtcatttttctttgaaattgtctttgggactggctatgttctcactgtagcttccgtttatcccacagcacaaaccctaaagtccatgtgcagtctccatgttcaagtataaaagtctgtttcaggacaaccctgggttgctgtagtgtttctctctctgtagtgtctacttggtgtcatgcccttggacaggctggccaaatggcagcacaatgcagggggtgacacggtcaactctcccactgccgaacttgctcccctttcaatctggtcactgcccatggtcaaggttgaaatcttgagatcagtgacgaccttggcctatcttcagtctgaagttgcactcttatgtaaccgaatccatttcttcaccaaaaattagctttcaaaaggtgtctggcgtattcttaggaagtgtcttgagatggagctggagggtcctggccttcgggctctggagggggtgctggcacagctgcttttttctgggccgccaggaactcatgaattgctcgttctatttgtggcctgaagatgtggttaagttttggatccaccacctgagaaataatcctgtctactccagcttccaacatccctgactgaaccacactctgcctcagaccatttcgcaactggtttttgttcatcgtaggattccattcctgcttgtccagatgtgttgacacaaaattatccactttctgcctcaggttttggtaagctggcttggtgtccacgtcggccaggcagtcccggcggaagctgtcaaaaaggccccggctcttgagctgctccacgatgagagcgatgagctgcgggtcgccgggaggcagcgaggccgggttgatggggccaccgcccccgctggccccagtagcgccagtcgctgccccggcagaggcctggctagttnnnnnnnnnnnnnnnnnnnnnnnnnnnnnnnnnnnnnnnnnntccgccatggctgcgccccgggcccacaagggagaacgactatagcttcttctccaggacagaaggcctagaacgtgtagaggtggtgaagggggcggtgaaggaggagggccccaaggcgcagcggcggaggtggcgatgcggcaggggcggtggtgcctcgtgccgaattaacacccggcctcgtacctagcc

SEQ ID NO: 125365 - DNA, 676 bp, Homo Sapiens
attagttttctttctgtggtttcttcctttttaattactggaagggtttttccattttttctcctagtgttcctttgtttgccagggaatgtttcgggaaggctgtggagtgggacggtggggatgaagcggggagtcccacactctctgggtccaggcacaaagctatcctccgttgttctgatctgcagagccagcgccctcagcaggtacctagtggtggcagagccgtggcctacacgttcccaaggaggccgccagccgggctgtacccttaccttgggggtgtgtgcagatggaaggtgggaagagacagaccaacaggaagtgttctcttcaggggttgccagccccaccctgaatctcagagcatcctcctccccggcaaaggccagggcactgtcccgaccatgggctctgtacaagcagagggaggcacccggaggctggtgtgagcagctacgtggggtggtggtccagggaacagagggagggcactggagccattgcctgcctagttcagtcctcaaatgggtccaagccagctcaggtctgcagcgccaggcccagggtacctggcagcccagccgatggtaccattggctggtgctcccactgaggtcttgagaaggtaatggggagagccacttgcccctgcctctgtccccagtggact

SEQ ID NO: 125366 - DNA, 1346 bp, Homo Sapiens
  misc_feature (566)..(566): n is a, c, g, or t
tttcttttggcttttttactccctgaagtcctcttttctccacagaatatttacaaacagggaaggggtggaggccacttccgccaccaaataaggggctagggaggggggcagtgctaagacacgcctctgcgcagggagagttcctgaggagggcccagtgtgaccacagtgccctcaggggcccaggtggttccagacggctcaggccaggtcggcggtgggtgagcccagctgcttggaggccaggaggaggcgtgtggctgcactctcagactccgcctgcagccgccggttgttgtgtctcaggctccgcacctcctcctccagggccgccctgtccgccttctccttctgcaggtcctcctgcagcttcctgagcatggactccaagtgagagaccttctctgagaggttcccaggctctggctcagcatcagattttggagttcccttagggtctccactctctgggatgggctgtccctctcgggacagcgactccagaatggtgttgcaagtagaggcaatctccgagatggcctgccactcgtcctccagggtcncactgcccgcctccgacatgatcctgctgatggagttccgcagagacaaggtacgtggcagaaaggaggccctcagctccggcgccgggttgcccttgtcctcagagccactgggactgcctggcctgtcttgggtcaggggtgtctcactgtcagccctgggtactgatggcttggctgtggtggccaggaggaggtccggggtggtgttgggcaggactggggcctcatccgacagagagctgcgtggtgacagcgagttctggctgtgcaggaactcagtcctctcctcggccagatccccaggccctggaggactgccaccatcttgcaggcacaggtgcagcagctgctttgtggtgggcagcagggtcaccccctggacctcatcctgcacaggatctggggccccccgccggctaggctcctgcagcgacagcgtgtacagctccgaaaaactcctgcggggccggccgctctcgtcggggggcaggacggtgacgcagaccttgggcgccgagcgcaggagctgggcagcggcctcgggccggaggctgggcagcgtctggccgcacacgcgcaggaggcgcgccccgggccgcagccccgccgtctcggcgaatgtgaagcgctccacgtgcgtgacgaatccctcggcgtccacctcgaagcccaggcggccttgaccgtcgcggggcagcgccagctcgcgggtctcgcagccacggctcaccagctcctcgtgccggaatcgccacccaggcctcgctaccttggacc

SEQ ID NO: 125367 - DNA, 640 bp, Homo Sapiens
tggcaggaccacaggtttattggggactttatccacagacgcttatggcattacacgacgacggtttttttactcgggacacacacggtggcctctgcccacagccagggcccagaggcagtggggtgcagtctcctcccttgtggcccagacccagctgggtcccttccttctaggcagctgagggaaggactgttgggttggccacgggcctgggaaggggaagcgagcaggcgagtccaggaggggccggggccggggtggggctcgcctgccctcactccagggactgtagcatcagcagctgtttcagcaccttcgtctggctggtctctcggatttcgccagccaggaacatctcgtccacgaccgtgtaaaccttgtagaagttgaacaccaggtccagttcacagacattgtggaaatatttgtttaagacctccactaagttgtgaatggcctccaggtaagccaggttgttgtcattgacatccacacagatgcagaagtataggccagcatagcggcggtaaatgatcttaaagttccggaacatggcgacccccgtccacgacccagcggccccggtcccgcggcgactgggcagctccggctcagggtgcaccctcgtgccgaattc

SEQ ID NO: 125368 - DNA, 965 bp, Homo Sapiens
  misc_feature (82)..(86): n is a, c, g, or t
  misc_feature (88)..(107): n is a, c, g, or t
tggttcattccccaatggggcccgcgggcaaaacgaaaggtcttggaaagcttttcaagggccgaggcggccgaccaaggannnnntnnnnnnnnnnnnnnnnnnnnccaggaccacaggtttattggggactccacgcacagacgcttatggcatcacacgacaacggcacggttactcgggacacacacggtggcctctgcccacagccagggcccagaggcagtggggtgcagtctcctcccttgtggcccagacccagctgggtcccttcctcctaggcagctgagggaaggactgctgggttggccacgggcctgggaaggggaagcgagcaggcgagtccaggaggggccggggccggggtggggctcgcctgccctcactccagggactgtagcatcagcagctgtttcagcaccttcgtctggctggtctctcggatttcgccagccaggaacatctcgtccacgaccgtgtaaaccttgtagaagttgaacaccaggtccagttcacagacattgtggaaatattcgtttaagacctccacgaagttgtgaatggcctccaggtaagccaggttgttgtcattgacatccacacagatgcagaagtagaggccagcatagcggcggtaaatgatcttaaagttccggaactccacaaagttggtgtgtttggcgtctcggacggtgaccacggcatgcacctcctcgatcagcttctgtttctcatcatcatcaaactgcatgtaccacttggccaggcgcgtcttgcctgcccggttctggatgaggataaagcggatcatggcgacccccgtccagaccccagcggccccggtcccgcggcgactgggcagctccggctcagggtgcagttgtagggcccagagctagagcggacttccggtagcccggccgtaatggccgaattcccgggcatatgtccggtaccgtcgactg

SEQ ID NO: 125369 - DNA, 1019 bp, Homo Sapiens
  misc_feature (31)..(31): n is a, c, g, or t
  misc_feature (37)..(37): n is a, c, g, or t
tggccccaccaggttttggtgtatctgttgngtggtngattttaattcccggttttgcccaggccaggacccacaggtttattgggggacttccacgccacaggacgcttattggcatcacccgacaaacggcacggttacttcgggacacacacggtggcctctgcccccagccagggccccagagccagtggggtgcagtctcctccctgttggcccagacccagctgggtcctttcctcctaggcagctgagggaaggactgctgggttgcccacgggcctgggaaggggagtcgagcatgcgattccagtagggtccggggctggtgtgggtctcgcctgccctcactccagggactgtagcatccagcagctgtttcagcaccttcgtcttggcttggtctctcggatttcgccagccaggaacatctcgtccacgaccgtgtaaaccttgtagaagttgtacaccaggtccagttcacagacattgtggaaatattcgtttaaagacctccacgaagttgtgaatggcctccaggtaagccaggttgttgtcattgacatgcacacagatgcagaagtagaggccagcatagcggtcggtaaatgatcttaaagttccggaactccacaaatgttggtgtgtttggcgtctcggacggtgaccacggcatgcacctcctcgatcagcttctgtttctcatcatcatcaaactgcatgtaccacttggccaggcgcgtcttgcctgcccggttctggatgaggataaagcggatctccaggtcctctctccttttacagcgctttcccagacccttaagtttcattccctacagttgcctccttttggtttcctgtgccaggtctcttcttgagatcatccctctctcacaggcagtctcctgcgcctgtctcaacatcccctctccacctgcaatcagatccttgtctctagagaccctcgtgccgaattcgccacccagcctcgctaccttaaaccgttggagttactgccg

SEQ ID NO: 125370 - DNA, 882 bp, Homo Sapiens
  misc_feature (632)..(632): n is a, c, g, or t
ggactcgccgagtagatacatgcgactgaaatgcatagaggcaggtttatttttaatcgtacaggaaaatcaacctcttacacttcagctagttcctcattcacgtctttgatacaacacaactaacgactgacctccacattttcctgcacagactcacatttgtaactaagtctattttcgtctattttcttccctcaccccctaaaagtcataagccacacacaaaaagatctacctagctggaaaatcttcaccagccacctgtgcttactaaaatgaacgaagtaattcgttaagcagaatccttggaaatcaggcaaaaaggacagcatgccccactcctcagggctctgcaggcccagctcagggaaggagttggcagccagctcctgcccaccccacccatccaccctgggctgtccctctcctgcagtactgttctttcagatgtgaatcactgtaactggcactcagggtaactggagactcaacatccgcagtctaaaattgctttgctgtacagccctgaggctgaacatgatgctctacccacctcattgtttttcctcctctctggtttgttaattaaacgtccaattatacagttaaagaaaatctcaaatgacacnatcttactactggaatagatggaaaaatgcaacgggacacttctctgtctgtgggggactgacaccacccatgtggatgccctgtggattcagaatgtaagccttggtctgatgtccaagaggcagcctaagtagagcccaggccggggtctctagggaacaccgcggtttaccagccactccttggcatttagtcattattgccacaagccgttatttatattctcatgtgtgtatctgactcggcgag

SEQ ID NO: 125371 - DNA, 1746 bp, Homo Sapiens
  misc_feature (1)..(1): n is a, c, g, or t
nttcaactttttaattctaacggaccaaactgtgcccaggaatgtctccaaacaatggaaccaaaagaaacacagtaaaattctcctgttgaagaaaccaagagtttgtgccagccccagtgtttctgagggttaggccaaaaacagcccattcctgaggcgagccctgtcctcacgcagggttctcagcccgagaataggattgtgggtgggtgagggacctgtcccctcttccaccacgccgggagctcttagaaaaagtcactggtgggcgagcccatcctcctaccccatggaaaccctctgggaaccatccagaaaaccagcaaggacaagacagctccagtgccctcctggtctctcagccaatgctccactccagtccactcagcgggctgctcccagagcccagggtggggattaaataaaatatgcatgagagatataaactcaaatgccctgtctccacgatgcaagtcacatagcagaagaaaaaaaacacaagagccctagtggcaagcgccggccctcagaagacgcgctcaaactccgtctggttggtggtggcgggattgcgactctggttggtggactgctgggtgatctggctgcccttccggcgcggtggtgccaagtactcgaacatggacgtcaggtgggtggagagcatgcccttgaggtcggagggcatggggtcggaccagaagaagtcgtggttgagggcgtcatcgctgtcgatgcgctgggcagggtccagcaccagcagcttgtcgatgaggtccagtgcgtatgggtcacgcacataggccttcagcctgtccttcaccttccgcttctggcccttgaccagctccagcttttcgtacagctcatagttgtccacgtttggccacacctcaggggtgatggagccgcagagctgactgatgagggcgagttggtgctgctccgtgttgccctgcatgatggggctgcgggtccacatctctgccatgatgcacccagcaccccacaggtcaatgggggggccgtagtcccgctccccgagcaacagctccgggggccggtaccagagtgtcaccacacggttggtgtagcggttgggctggctgttcttggccaggctgaaggcccgggccagcctaaagtctgccagcttcaggaccccatcacgagtgataagcacattagcagccttcatgtccctatgcaggatcttgtttctgtggatgtagtagaggccgttaagcagcatctgcatcaccctcttgatctcagacagcgtgaacttgaccaaaacattgctcaacagcccagcaaggtcatgctcgcagaagtcgaacaccaggtatatactacccttgcagcggttatagggggaagctttggttcgacaaatctcaatcaagttgaccacattctcgtgttttagaagctgaaggatcttgatctcccgcaaggctgtaatggggaacccctccttctcgttttccatcagcaccttcttcagagccaccttctggccggtcttgcggtgcctggccttgaacacctccccgaaggtgccttggccgatcttggcgagcttctcgtatttggaaacttcatcacaaaaagggcactccaccgagtcgtactgctttgccatggccgcctccaacgcgccgccgccgcccccagtcgctgctgccgccgctcctgctccgggtcccgccgccgccacactccaggcccctccgcggccgc

SEQ ID NO: 125372 - DNA, 917 bp, Homo Sapiens
tgctctcgtaatgacaatgttttaatactggcactagctaaagaacagcgcccccagcggatgccaggactggaggtgggagcgctgttcattcagacgctgagaggtcggggttaaaaaacgcggctgtggagacaggagagctgctgggaagccatgtttttgattttcagacaggtgttaattttaccaggcttcattaatacagaagaaaggaaacgtcttccaggaaagcagccactgcggaaacgagtgtgtccggccatcaatacacaagagactctttgtggctcaacacgtggggtcgcgaggcagagctggtggcactgcggatcacttccatccacctttcgaacgtgtactcgctttccgccctgaagtagtagacgtgggacttgaagtgcagcttgaacacgtagtctttctggatgttctcggactcagaggggatggtgagcgagtagccgagcagaggcaggctggcaaggggatgattgtcctggtgtgatttgtagaagaacaggcagaagtttgtgaacaccacccacagcttctgccacccgttgctgtttttgaatttcctcagcaggtttccagacaactgattctccactgcgatgctgaagtccaccatggagacgctggtgttgcggtgccagcacacgtgcaccattgtgttgccgcggtgcggggcctggcgctccagcgatgtgcgcgaggcgctcaggtcatcctctgactcctggtcagccgcggtggcttcatcaggggacttgttgtcaggggggctgctggccaggaactcaggggcggggctgctgctcttctccgccaggtcaatggccatctggatgtcctcaacccacttctccatctcgcctcgtgccgaattcggcgcgccgtcgacttcatactct

SEQ ID NO: 125373 - DNA, 170 bp, Homo Sapiens
ctcgggcccaaactcgtgttatattatcgaggtggaaaacagccatatgtattaggaggggaaactgaggcagaccacaggacggggctccagagggaggacaactaggcccagaaccccttctgtcgtcttctcgcagccgtatagtagtagtagtagtaggcggccgc

SEQ ID NO: 125374 - DNA, 1395 bp, Homo Sapiens
tttttgcccaaactcgtgttatattatcgaggtggaaaacagccatatgtattaggaggggaaactgaggcagaccacaggacggggctccagagggaggacaactaggcccagaaccccttctggaggctcagagatgccagtgttccaggaggtctcacagcatgaaaggggcctgactacattcgcttttagcagtcggaatggcggatggtcaggcggtggctggaatcacatttacatccttcaaatcagcatcctgggcctcccctggggtgggcaggaggaccccggtgtcgtctccacgaagggagatccaaggggctggcagcccactcctcatccttctccacaacagagctcctcctacagccgctgccgtgagtagcaagacaccgatgacgattcccaccacgagcacggaggacttggctggagattccagctccaccctgaggggctgcgccagccccgcgtgctgcacaatgcagcagtagtggtgctcatcgccacttttgactgttagtgacgacgaggcgtggaaggatccgtcactgttggggccgaagtcaccctggccggtgccagcggccagcccattccgcaggaaccgaagttgcagctccggagggtagaaggagaaggcgctgcaggtaagcacggaaaagccagggctgctgggtcgggccttcaggcgcatggaggggggctccttccactccaggtttccgcggcccctctccaggtgctcccgcaggcggtgcgggcaggagaatagcaggaaggtgagctccttgttggccgccttgtcctgctgctgccaccgctgactgatagccagggcctcgggccagtccccaccccaggtgccctgcttgaggtcgaaattcatgaactcctcgccgttcagggcgaacttggcggtgggcaccgaggtgttgtcagggcccagttcacagcccagcaggccctgcagagtgtagggaccttttccccccaaagctttgaaagcttccagaaagagcttctccttgatcctcagatctgtggtctctttctcccaataccaggacacctggttttcccagacccaagctccacagggctccgcctcgccccgcaggctattgtagctcaggtactgctgcgggcccagccagccggacacccagaaggcaggagtccccggggcaggcgaggacaccgcggtaaggtggtacaggagggagaggtggctttctgcgcccaggctcccaggaaggagaaagagcaggagccccagcgcccagggctgaggccgcgggacccccatgctgagaggacgacgttcccttcagcctcgctcccttcctgcctgcggccctggcccctcgtgccgaattcgccacccaggcc

SEQ ID NO: 125375 - DNA, 893 bp, Homo Sapiens
caggaaccgaagtgcagctccggagggtagaaggaggaaggcgctgcaggtaagcacggaaaagccagggctgctggtcgggccttcaggcgcatgaaggggctccttccactccaggtttccacggcccctctccaggtgctcccgcaggcggtgcgggcaggagaatagcaggaaggtgagctccttgcttggccgccttcgtcctgctgctgccaccgcctgactgactagccagggcctcgggccagtccccattccaggtgccctgcttgaggtcgacattcatgaactcctcgccgttcagggcgaacttggcggtggtctccgaggtgttgtcagggcccagttcacagcccagcaggccctgcagagtgtagggaccttttccccccaaagctttgaaagcttccagaaagagcttctccttgatcctcagatctgtggtctctttctcccaataccaggacacctggttttcccagacccaagctccacagggctccgcctcgccccgcaggctattgtagctcaggtactgctgcgggcccagccagccggacacaccagaaggcaggagtccccggggcaggcgaggacaccgcggtaaggtggtacaggagggagaggtggctttctgcgcccaggctcccaggaaggagaaagagcaggagccccagcgcccagggctgaggccgcgggacccccatgctgagaggacgacctggggcgggagggggcacgtgactcctcccgacccccggcccgccccttcctcccgggacaccgcgggcacggccgggaccaggacgccgaggaggggctctgcgggctcggtccagactgacaacaatgccctcctcgtacctgaagaactttcaccactgaactgg

SEQ ID NO: 125376 - DNA, 870 bp, Homo Sapiens
caaactttaaagcgaccacaccaaccatattggtaatccagtttaaagtgaccacaccaactgtattgatgataaaccaaagtgaccacaccaaccgtactgataatccagcttaaagtgaccacggcaaccatactgatagtccagtttaaagtgaccacaccaaccgttttgataatccagttttgtattttgacttctgaaatatgatcataaatgtttaattctgggccataactgggaaattagttactgaacatctaactttcaacaaaaaagcccatgaagtttacatagataattcttgtgtttaaccaagtaataaaatatttaataaaatgaaagtatacagaagaaaattatgaattcatcaaatcaggccgttttgcatccagattgcattcagaaaacttgtttaacacctaggaaattactgtccaaagttgatagtgcttggtcttttttatcattgtttttattctgaaagctgtgcattactaatctacttttatgtaaatctgaaatacagtatttatcccatatgtccacatggtaaagtaatcaagaaagatattttcagtgcttagcacccccaccccaatttaaaggaaactctgactgtagtaaattcatgctaattgagaactctggggaaggggttaaaacattacccaggtacaagtcgggtggccattataaacgttacccaaataaaagccagaaacaggaagccaaaaaccaggtccctaaggcaggcatgtgtcttaaatgatatcatttgtcaagcttccagcatcttgtggtggtgaacacaaaaagaaggtctgcgttgtactgaggacattacatcctcattagctggaatgttcc

SEQ ID NO: 125377 - DNA, 656 bp, Homo Sapiens
tttttttgtatagaaaaccttttttacaatttatttcctgttgttaatctttaaaaatgaggttctagctaagtgcagggtttcagtggtgaaattttgaccatgtgaacacataaataaatatttacagtctttggcaaaacacatgacgtttcatcaacctatacgataaatttgtttagaaaaacataaataatttacaaaaaatatggtacattctaaatattcacatcatcgtcactcccacaccattgtacggttgaccccacaacacagaaacagaaaacctgcacgctgttgacagtcgctacatttaatgaagtatcccaacgcttcgttggtctcgggaatacagctccacacgcaaaaaagtaaaaagtgcagcaaaacaacaacacaacgatcaacctcaaaggaaacaacaaaattaattttatcaaaatgcaatgtgtacattaagactaaagttatggatcgttcctgtttggcatagaaatgtgatgactattaacagaaaggggaaaaagatttgccccctatccatcatcagacagacagacttctcttactaaaccccttatgtggagtgggatgagtgactatttcctgcagaaagatcatgcgaccttaagcgaaaaaacagaccatcccatcat

SEQ ID NO: 125378 - DNA, 1455 bp, Homo Sapiens
  misc_feature (1271)..(1271): n is a, c, g, or t
cggggggaagaagcctgtgagaagctgaggaagcctccagcctcgagtgcagtgttccgccgggggtgtcccgtgacctgcttgataacctggcagtaaatctcatccctcagcttctcctgctggcacagcttcagcagttcatagagcagatccatctcatccttgccccggggcttggactggtcacccataaaccgcatcagggccaggaagctggctacagccagcttgctcacatcatcactgaggctgaggagcgactcctggatgggagccttggtgtactgcaccaggctgtccgtgtcctttcctgcggcacctccatcagtctggcccagcaaggcctgggacctccggaagtaacgccgggcgaattcctgcatggtgtagctgtgggagtcgggcagaaaggcataggccacagaggacaggctggtggcctccgagtcgtcactgtgtgcctggctccaagggtgggcagggcgctgggatcacaagaaacctggtgccacctgagtgtccagtgccctgtcccaggggtcctgccccagccccatccctccccagccagacaccaaaggagcaagaccagaagccaggaaagtgaagagctgtttattaagcatctgctggggcagccttgaactaagtaccacgtgggacacaagagcagcatccagcccagcccctgcctgcaaggagtgcacagtcttgctggagagacaaggcgagccatcaggagcgggcagaggggcagccacaggagacggacagcagggtggtcccaccgcatggcagcctcgggagtggtcaaacccctttccttcctcagtctcaggcaggccttgcctctgcttgtccctctcccatcttcctcacctctgaggccctgtcccaccgagccagccctggttccccgttggacagctgacccttgtgccagccactcctctgctccttggagaaggaaaagtcgggagcggcagccggctgcactatgtcggcaggaaagagtccggaacggcccccggcagagccaaactgccagcctggctccagggtggccaccggcagcagcttgatgaggtccccacggtggaagctgaggaggctgcagttgtcagtgatgtagctgcgcagggcgatgacatagccggagtccttcttaagctcgttcaggaatagctcaaccagcgcctcgatggcccttgcccgggctgtgtgcagcaccagctgctcgctcttcagtgacagctccagggtggagncgccccggcactccacacccagcacctccgcaaagctgtatgagcagagaatcttcagctggtcggggcggagccggggccttgggtcaccttgagcagtcgcagcccacggtgggacacggctaacagctgcacgtcgctgccactctcgcccgagacaggaaaggagagagaagagaactag

SEQ ID NO: 125379 - DNA, 888 bp, Homo Sapiens
tttgggggtcaaatgaagcacgttattttatttcacaaagactgtacaaaattccttataaaacatggggtagatgccacctggttacctcactcggcccccatccaactccgtatgagggggcaggtgagggtggaaactgtgtggatggaatagtattatgtacaaggcaggggttgaagtgataggtacaagttctttcatatttacactatttcacatattcacaggtatatagagagccaggaggaaggagtgaactctggctcgttctcttgtataaaaaagcaccagtgtcctggactggacacccactgctataaaagatgcaggggggcccagggcctgatcgtcaccgactgatatcccgactggagtcccacaacttgttgggcggctcagcccgaaggcgggcgaagaaaggatgctgaagggcttcacccaaggtcagccgcttagctggttcatactctagcatgctttcaatcagatcgaagagctggtggtgttcctctgcctctgaggtcagataccgccgcagcggtttgcagttctcacgaacatagcgcccagctgatgtgttctcatcccaatccaggcgaccccggtaaaaatatttctgctttcttgtctttcggatcatccgggaagggataggacccaagatcctttccatcatggctagatgctctctgttgtcatgggtctggaagagggtgaatcccacatagtattcaaagatgatgcagcctatactccacacatcacaaggctgtgaccagcccaactcaaggatgacttctggtgctcggtaatggcgagtggagacaatggtgctatggtgctcatggtcaaaggtggcactgccaaagtctaccacccgcacag

SEQ ID NO: 125380 - DNA, 266 bp, Homo Sapiens
cttgtgcaaatataaacaggtttattcattctgtcattaggatacaaaatagaacatgtaaaaggcacccctcccgtcgaccccacagttcagtgtgaacaccgagcgctcgtccagggaaggctgccatgcacggcgtggctcccggtgaaggcagccggcttgagccagcctcaggtctcgaacatggcacagctggtgcacagcactttctcgtacatgtcactgcagctgcgacagcgtcagggaggggagagaaaagctgc

SEQ ID NO: 125381 - DNA, 802 bp, Homo Sapiens
ggcacgaggttttttgcaaatataaagaggtttattcattctgtcattaggatacaaaatagaacatgtaaaaggcacccctcccgtcgaccccacagttcagtgtgaacaccgagcgctcgtccagggaaggctgccatgcacggcgtggctcccggtgaaggcagccggcttgagccagcctcaggtctcgaacatggcacagctggtgcacagcactttctcgtacatgtcactgcagtccacgaggccacacagggtacaggccacggagccgcagccccagcaggtgcgcacacactgcccgcacagggctcgctcacactgaccgcagaccgccttcccatccacggctcgcacgcatgaggaacaggcaatggacgctaccccagatgggtcagcttcggaggcctgcccaaggctcctgatcaggcggccgtctggtccaatcagcatctgcccacgtgcagccctcggggcccctgtagggccaggctttggggactctggcaggtgaacgacagcacagccttcatcccacacgtggtccaggtaggcctgggccccgaggaacaggagtcgcttggtcttctcgaagacctcctgcgagtagcgctcggcgcacacgccgcggctcaactccctctggctcacgcggaccttgacgctgtagcggggcacgtccgcgaaggggcagctccgcttgggcatgcccgcggggccgggagctacgcaagctccctcgtgccgaattcgccacccaggcctcgctaccttaagaccgttatagttactggccgtt

SEQ ID NO: 125382 - DNA, 836 bp, Homo Sapiens
tctttgtcccctcttgcattctgttcaccttaaattatgtatgctcctcctgatttctccaccgggggccaaatataaaaggggggttatttccatttcggcccttgggggtcccaaaatggaacctgttaaaagggccccccttccggtcggacccccccagtttcagtgggaaccccgagcggtcgtccagggaaggctgccatgcacggcgtggctcccggtgaaggcagccggcttgagccagcctcaggtctcgaacatggcacagctggtgcacagcactttctcgtacatgtcactgcagtccacgaggccacacagggtacaggccacggagccgcagccccagcaggtgcgcacacactgcccgcacagggctcgctcacactgaccgcagaccgccttcccatccacggctcgcacgcatgaggaacaggcaatggacgctaccccagatgggtcagcttcggaggcctgcccaaggctcctgatcaggcggccgtctggtccaatcagcatctgcccacgtgcagccctcggggcccctgtagggccaggctttggggactctggcaggtgaacgacggcacagccttcatcccacacgtggtccaggtaggcctgggccccgaggaacaggagtcgcttggtcttctcgaagacctcctgcgagtagcgctcggcgcacacgccgcggctcaactccctctggctcacgcggaccttgagctgtagcggggccacgtccgcgaaggggcagctccgcttgggcatggccgcggggccgggagctacgcagctccccggccgccagccccttaccaacgaccccc

SEQ ID NO: 125383 - DNA, 656 bp, Homo Sapiens
tagccgtgaatgaaggaattatttaattgctgttgaatggtttacttaaaaacagcatcattcatataatacacaaccccaaggtcacagaagaaagtgcccaggcttcaggctgacccacattgtaaacagtccttcccaaatcttttctctataaacaacagtcctctatgctgctgcctccaaacataatgccatccattaataccactggctgggcacaccgggatcaaacctgtgaccctaaactgccatggaaatagcttaaactggggttggagactcataacactgagtggggggattccctccatctcactccaaatgagtccaaattcacttcacactgcttttctgggtgagcacagtacttgagaaggactgatagaacccagatgatctccagaacaaggcagatggctccagccttccccagcccacaggcccaaatatttagagtcagaggagttctcattcttaacaaataaccaccatgcttcacatttgcaatgtctatttcccctcatatttccatacctattatgtcactcaacacaaaattccatgattctgtgcaactccagatgaaaaacacattttagaatttgttacaccagctactatttgaaataaatggaccatcaactattctagcc

SEQ ID NO: 125384 - DNA, 582 bp, Homo Sapiens
atctgcaatcataagcaaggtctttattttctctctttgatttcttaaaattattttggaaaaatagttgtgtctccaaatgtactttcacagaaggaagctcatatgaccaaagcaatattctgagtcattatggcaaaaatatttattattgaacaactgagtgtttcattcacttcacattttacacatacttaacacaagcagaaagggaagtttcagtgtcagaagcaggggtcgttctccttaactgaaagactatcaggagagagcctttggtgattagcaatccaaatttgagattttttaaaacaccattaaaaataaaggttgcctataaaatatggaaacacataatattttctgaaaatctttttggaagaatgtctttttatcttcattgttactatcttagacattttgaggtttatttaacacagcattccatctgcttaacattcaaatttagacacactgattatcctgttctactctcctgaataggttaagtacactctataaataaacacatcaattttgctctattactactcttccacaaacgtctcatataattgggat

SEQ ID NO: 125385 - DNA, 687 bp, Homo Sapiens
tggaggggcttttcatcctcttttgttaaaaacagactagcaccactgtgacgcgtgccacgagacaccaagacggcccagtcacagaggaaaaacccgaacacgacacagaactgaggagagtccaggcctgggctggtgggggccacacccgcgggccctggttgctgggaggcatggggctcaggcctgggcgcctcgggccggggtctccgggcctcacttggccggccgcgtgatgaagcgcgtggagaagtcgaacaggtcccgattgatcttgcgcaggttgcgcacctcgtcctccagctccgtcacacggacgcgcagctggtcctggccgccgagcacgctcttctccatggtgctgcacaggacggcctgcagctgctccgtgcggtccaggtagctgggctccgagccctgctggtggaggcccaggcgcagagtgaggcccccgtggcgcggctcgtccccgtgctcggcgcccagcaggtgcttgttgaagtggggcagcggcaggctgggcctgaagtctgagctcagcatgctttgagggccaccgtccggatgcactgcttgctctgcacgtcccagaggcgcacggtctcgtcgtgggaggctgagagcagcacgctgccgtcagtggacactgacaggcaagtcacctggttcctgtgccctttgaag

SEQ ID NO: 125386 - DNA, 717 bp, Homo Sapiens
ggcttttcatcctcttttgttaaaaacagactagcaccactggtgacgcgtgccacgagacaccaagacggcccagtcacagaggaaaaacccgaacacgacacagaactgaggagagtccaggcctgggctggtgggggccacacccgcgggccctggttgctgggaggcatggggctcaggcctgggcgcctcgggccggggtctccgggcctcacttggccggccgcgtgatgaagcgcgtggagaagtcgaacaggtcccgattgatcttgcgcaggttgcgcacctcgtcctccagctccgtcacacggacgcgcagctggtcctggccgccgagcacgctcttctccatggtgctgcacaggacggcctgcagctgctccgtgcggtccaggtagctgggctccgagccctgctggtggaggcccaggcgcagagtgaggcccccgtggcgcggctcgtccccgtgctcggcgcccaacaggtgcttgttgaagtggggcagcggcaggctgggcctgaagtctgagctcagcatgctgacgggcgccagcaggatggcggcattggtgactgggcctttgagggccaccgtccggatgcactgcttgctctgcacgtcccagaggcgcacggtctcgtcgtgggagtctgagagcagcacgctgccgtcagtggacactgacaggcaagtcacctggttcctgtgccctt

SEQ ID NO: 125387 - DNA, 610 bp, Homo Sapiens
gataataagcactgaacaattttattaagttctttgccaaaatgcaaacatatgaaatgaggttgtgtacaatagaccaaaggctacctagagaccaacagtcatataaaaataatttaaggcaagctttattgatttattttaaataaggtaagtgaaatatgggctcagaattaaataagattttcaagaaagttcttgtagctgtaaaataggagaatatgaatgtcaaaattttgactgtttctgtgccaaacagaaagtttcacaaatgctttccaaactgcaataaaaagaactttaataataccattaagtctacaaagttactgtcaagttgacagtattcaaatactacaatattttctaaatgtaaattttgtaacatcttgaatactttctaagcccacttttctgtcattacaaaaataaaattccaagaaatttctgctacattaatcttaagagatcaaaataacctatgtagttttctaggttaatgtaattcaagtaaagtggtactaaagaaaacacatcattttaataaaaaccaaacctgcttaagagacataacagagttaagcaaaagtataaactactataataagca

SEQ ID NO: 125388 - DNA, 734 bp, Homo Sapiens
cgtcgccgagcagagtaccccaggaatcagagtgggagaaaggaattaaacatgggccagcgatgttcagatactagaggaatgtcttcgaagatgtgaaagtgcctaaagaaaatgttttaattggtgacggagctggtttcaaagttgcaatgggagcttttgataaaaccagacctgtagtagctgctggtgctgttggattagcacaaagagctttggatgaagctaccaagtatgccctggaaaggaaaactttcggaaagctacttgtagagcaccaagcaatatcatttatgctggctgaaatggcaatgaaagttgaactagctagaatgagttaccagagagcagcttgggaggttgattctggtcgtcgaaatacctattatgcttctattgcaaaggcatttgctggagatattgcaaatcagttagctactgatgctgtgcagatacttggaggcaatggatttaatacagaatatcctgtggaaaaactaatgagggatgccaaaatctatcagatttatgaaggtacttcacaaattcaaagacttattgtagcccgtgaacacattgacaagtacaaaaattaaaaaaattactgtagaaatattgaataactagaacacaagccactgtttcagctccagaaaaaagaaagggctttaacgttttttccagtgaaaacaaatcctcttatattaaatctaagcaactgcttattatag

SEQ ID NO: 125389 - DNA, 1327 bp, Homo Sapiens
ctgggaatagttacaaatttaataaaatttgccttataaattacagcagcagccccagggctcagttcgctgccccaagaagcaacagttgggcaaagctgggcagctattgctggagagagttgtctcaagagttcagggctgtagaggtggccagggaccagcatcacctcctccaggacggccacaggacagcagcaggggccaggcagaggctcatgggccagtgggtgcacaaggaacaggagtgggggctgaggccaggccctgtgggctgccgagcgcccctgcccactgctttcctcagtccagactggccatgagcaggtgcagctcgcggaaggtactgccatggcggccgctcaggcctgacttgctcttgaccaggccgctgatgctcttaagctgcttgtagcagagccggcacttatgcagcctctcctccctgctgatatccacacccacagagggtggggccgccagcatgtctgtgatgaggggcagaaaccgctgcaggatcagcttcagggaggtgcagcccgtctggacgtagctctcatacttgctctgcagaagcttctcaatctgtggcaggacggtggtgcacaggtccagcttccacagggaggctttctggttgacgatgttcaggaggtccaccaccaccgacaggtcgttgatggccacagcggagtccaccgacgtcttgatgtcgcccatggtccacacagcccgcacagtgtccaggttcttgtggcggctggtgagcaccacacacatggtgtcgtggcctttgcggatctgtgacatggcatcctcgtccaccagctcggcctgctgggggatcttcacggcgggcaggaagtcggaggccttcagcccgatgggctcgttccgggtggcaggggatgatggcaggctcagccttgggtgcaggtgtggaagcaaccactggggggccggggcaggacctccagatttggcaccggggaactgcacatccatggcaggggctgggctttgctgcctcctttgctgtggctgcgtcgtcctctggggggtgcagggaagggctcacttctccggggtggcgtccgactgatgctgttcttgggctggaagatctcgttgtagtcctcggcgttctggatctccgcgcgggactcgcgctcgtcccggtcatcctccctgctgggggctgcgggcgctcgctctctgaagttctgctttcaccctctgaagcttgcctgcaggttgtgctgggcccgctcatataatgcccggaaggggggcccctggggggttggcacaggggcttgtcccaggg

SEQ ID NO: 125390 - DNA, 674 bp, Homo Sapiens
  misc_feature (638)..(638): n is a, c, g, or t
gcggccgctcaggcctgacttgctcttgaccaggccgctgatgctcttaagctgcttgtagcagagccggcacttatgcagcctctcctccctgctgatatccacacccacagagggtggggccgccagcatgtctgtgatgaggggcagaaaccgctgcaggatcagcttcagggaggtgcagcccgtctggacgtagctctcatacttgctctgcagaagcttctcaatctgtggcaggacggtggtgcacaggtccagcttccacagggagctaggagaggccaggacatgctgccatcagcccagccctgcccctccgcccactccccctctgcagccacttacgctttctggttgacgatgttcaggaggtccaccaccaccgacaggtcgttgatggccacagcggagtccaccgacgtcttgatgtcgcccatggtccacacagcccgcacagtgtccaggttcttgtggcggctggtgagcaccacacacatggtgtcgtggcctttgcggatctgtgacatggcatcctcgtccaccagcttcggcctgctgggggatcttcacggcgggcatgaagtcggaggccttcagcccgatgggctcgttccgggtggcatggatgatggcangctcagcctttggtgcaggtgtgggagcacccactg

SEQ ID NO: 125391 - DNA, 1010 bp, Homo Sapiens
  misc_feature (66)..(76): n is a, c, g, or t
  misc_feature (214)..(254): n is a, c, g, or t
  misc_feature (318)..(335): n is a, c, g, or t
  misc_feature (366)..(869): n is a, c, g, or t
gtgattatacgttttattagactcgggaggggtatggcagggcttcatcagtgttccttcaaattnnnnnnnnnnntacaaaagctacgtagaaaacgtcagatcagacgactaaactttcccgactcagggccaagttcttcttgagcctgcgctctcgggacgcctgcgagtcggtctccgagtacgggggcggcgcgggcgggtagtaggnnnnnnnnnnnnnnnnnnnnnnnnnnnnnnnnnnnnnnnnngaccccttcttcctcacagcctcctccagtagccgcccatcataggggaggaggagaccccacnnnnnnnnnnnnnnnnnngcctacagccgcgcctcgtgccgaattcttnnnnnnnnnnnnnnnnnnnnnnnnnnnnnnnnnnnnnnnnnnnnnnnnnnnnnnnnnnnnnnnnnnnnnnnnnnnnnnnnnnnnnnnnnnnnnnnnnnnnnnnnnnnnnnnnnnnnnnnnnnnnnnnnnnnnnnnnnnnnnnnnnnnnnnnnnnnnnnnnnnnnnnnnnnnnnnnnnnnnnnnnnnnnnnnnnnnnnnnnnnnnnnnnnnnnnnnnnnnnnnnnnnnnnnnnnnnnnnnnnnnnnnnnnnnnnnnnnnnnnnnnnnnnnnnnnnnnnnnnnnnnnnnnnnnnnnnnnnnnnnnnnnnnnnnnnnnnnnnnnnnnnnnnnnnnnnnnnnnnnnnnnnnnnnnnnnnnnnnnnnnnnnnnnnnnnnnnnnnnnnnnnnnnnnnnnnnnnnnnnnnnnnnnnnnnnnnnnnnnnnnnnnnnnnnnnnnnnnnnnnnnnnnnnnnnnnnnnnnnnnnnnnnnnnnnnnnnnnnnnnnnnnnnnnnnnnnnnnnnnnnngggaaccgacaggctataagaacagcgtttccctggagctcctcgtggcctctgttcgacctgcgcttacggaactgtcgctttctcctcgggaaggtgggcttccatactcagcgaggatccattccggtagtgctcgtc

SEQ ID NO: 125392 - DNA, 1340 bp, Homo Sapiens
  misc_feature (594)..(606): n is a, c, g, or t
  misc_feature (685)..(694): n is a, c, g, or t
  misc_feature (766)..(790): n is a, c, g, or t
  misc_feature (1050)..(1102): n is a, c, g, or t
tgggttagcaaaccgagttttcccggccaatcgctggggtcgcgttgacccacggatggtcctccaaaaccacggcgcttgtcctccaggtttttggcggcgcgcgtctgtttatagagcccccactggggccccttttacaaaaaggggtggatcgtaaatgcttggcgccgcgcggagtattattggccgccgcctgctttttctatgtgcgtacttgctacgttcgtcttggtgatcagtagcatggctctgtgtgctatttgttttttatttaggaaaagttttttccatttaatactagactttcaaggattgagatgcaagctttgtatgcaattacatccaatgttaaaattggtaatacataatttacaaagattaacatcaaaacaatcatctatttagatatgcttttgtaaaaaggaaatatattagcagcatttatattttccgcaatcacacagcctacagacatgcagactaactctgtatctatttgcagtgatgtagtgctttgccccgcatttcaaacaccaaaacccgcctggcagctggggggttctttttatttcgttattataaaataactgnnnnnnnnnnnnnggcattaatttctacaccagtaagaaaaaacaagtttttgcacttacctaacatttgattgtctaaaaaacatttcagnnnnnnnnnnagtctttcaacaaaagaaagataaaatgacagagcgtagtgtcttttgcttctgttctcgcattttacaagnnnnnnnnnnnnnnnnnnnnnnnnnaaaattttagtgtttaacactataaaggaaacattgaattttaatctctttcttgtcattttctcgcttttgactaaaaggagacccccaaagtgcccctagtcccacctccctcccacccactccctgcaatgaaaaacaaaagaaaccactcaaacgggcttggacatgcgatttttccagctccacatgtgagtatcttatacccaggtctcttagtaatgtacagtgcttctctacagtaagaaaatactccaaannnnnnnnnnnnnnnnnnnnnnnnnnnnnnnnnnnnnnnnnnnnnnnnnnnnnctgctcaaggggatcattggcatcccctctctcttttgttttttcctcaagaatgacacagaaaggggaaaaaggaaaaaatatttaatggaatggaaggtggtcaatgtgtctacctaaacgagtcagagcatcgtcaccataaggggaaatgtacaattaggacagcattggtccaatattagaaaaaagtaatggggacatgtttactattgtattgcttaccaatcacacagca

SEQ ID NO: 125393 - DNA, 2169 bp, Homo Sapiens
  misc_feature (270)..(327): n is a, c, g, or t
  misc_feature (1179)..(1211): n is a, c, g, or t
cgggcgtggctggtcacgcagatgggggagagacggggggggatgggagctccacggcgtggtaccggccccattttggactggattgggtgtgcgcgggcagtggttagaaaagaaggtgggtcaacaacatgtcttcctgtgcgtggcccgggaggcattcagcgcagaaagccaagaggggaggggtgctgggatcggagggggggcgccacagcgagaagggtgggcgggtgaggtgggcgggcctacaaggaggggtcgggcaannnnnnnnnnnnnnnnnnnnnnnnnnnnnnnnnnnnnnnnnnnnnnnnnnnnnnnnnncgtgttcctataaactgaagttttattacaagcaggaacaaagaatactggcttaaataaaaggtaggtgggagccccctcctctagccagcttcttcctcacctcccagggccactgcagtgatggcccagggccctgaggctggggtgaagctgtttctcccagaggggaccctctgtggctgccattcccagctgtctgtgaccactagcctctggagtgagaagggcaagatctggggacttcctatgtcactttccaagggcttcagcccacttgaagggccaaggagggggatggtggaacaatatctattttgataagaaactacagctcccagcagaggagaaacatcctctgagtttccggcccagactcaggccaaccttcacttgcctcttggcccaccctgcaccttcttccttttctctggatggaggtccccgtttggcagaaacaccttgtcttccagctcctggcactgggtcccatattcagagctcagaggagggggtgtggcttgtaggatggcagccgctccccagagccatcaccccacccaccacgcccaggctcagcctgtctgggcaggtcccagctggaagcctcacctgggggctggtgggtagggctgggggtagagtggcagagtccccagacactggctgtctgaagtccatagaagaaggaaagataggaggctgggctgagccccagtgggagcccagggttttctcgtgaccagtgcacgtgccccctgtccccttggctcagagtgcttctgatactcaaaggggatggggcagggggcagcccaggggatatgggagccagccacattcatacagggnnnnnnnnnnnnnnnnnnnnnnnnnnnnnnnnntctcactcattccagccagaaggtctcttggaataaacttattaaaaccaaccagccttctgataacccttcacctggcactacacagacagtaatgtggctgacattttctccttccatttaaaaaagactatgtagaaaagaggtctataaaattgtgcaaaatacccagcattaataaacccgtttcaagtattgccagcatgagcataacccacccatgccgggacctggcttgggagagaagtggaggggcaggctgggatcccttaaagagctctccatgggcaggggaaggaccaggctcccacttccactgtgctgcccaggaactgcacaggagctgagtcttttggttgcctggctggctgatttacctttgtctgatacaggttgccctccacccaccaccaaccctgccttctctactggagccccaactcaatcctattggccgactccataaaaaaggggggaaaaccccaccaaaaatcccacagaataaagggaaattatcaccaagggaatgaaggagcccacagaccaaagcagcccatggaggcttcctctccacagccagctatccagagctggccactcctcagtcctgcttcaccctgaggacctggctcagcaaggcccaagcagttcccccacctgggaggcctcacgctcagttcacagcctcactcacacagggctcgcccggcacaggcaaggacttggtgtagtccctgggtagcctccagaggctctggtctctcctggcactgatcagctggggtacctagggcccaaggctgtgggaacctgggtttggggagcagagggcacagccacggaacagttcagggaaagccacgcaggatgggaaataaatatgaaaagacttgagtctttggcctcgtgccgaattcgccacccaggcctcgctaccttaagaccgttgtagtactgc

SEQ ID NO: 125394 - DNA, 1592 bp, Homo Sapiens
ttttttgccttaactgagtcatcttttttccattccattcatgaaagcaacataagaaagccaagagtgaaaggggtaaaagatcacagtataaaggtcttcggtgtgtccttcaaagatttacacaacattgtcctaaagggaagtcacagcagcttagctgtttctcacagatcagagaggatggtggggcagccaggagtcatcagtaaacccaggtgagcagtgcaggactgaatgtcgctgtccacttgcaggtgggagtccatgtggagggtgctccttcttgtttctcattgggacggtgactgtgtatagtggaaagcacagagccaatgagggacaggatggctgtggtggagggaaaacagtgcagggctgctctgtctctctgtcctgtcccgttaggactggtgggccaccacaggtttcgcgaaggtgtggctggccattcctttcctcgcgttggggtttctctgtgtcagcgagcctcggtacactgatttccgatcaaaagaatcatcatctttaccttgacttttcagggaattactgaactttcttctcagaagatagggcacagccattgccttggcctcacttgaagggtctgcatttgggtcctctggtctcttgccaagtttcccagccactcgagggagaaatatcgggaggtttgacttcctccggggctttcccgagggcttcaccgtgagccctgcggccctcagggctgcaatcctggattcaatgtctgaaacctcgctctctgcctgctggactttgaggccgtcactgccactctgtccctccggctctgccttttcgtcctctgggttcctcctcctcggacgaggtctcctggtcactgacgttgctggtcagctcctccagcttcctcctcagggcctcctcctctacatcggcctccgtgcgcgctccagcacctagaccctgactctcagaagacgcccggcctctccgcttggaatggtgggaggccatcacgtgagcccggatgctttcctcatcagaggtgtccacatcggccaagtactgcaggggcagctgctcattcctgatgacattcgacccgagtgcagcagcagtccccagggccatcctgtgggagcctccaggcgggcagagctcagccagggcgccgtgtctggaaggtgagatgctggtcggctgctcttccggatgggagtggcacccagaggccccagtatcagcctcctccaggccctcagccttgtgaggggctgccttctctgagcaggactcatctgtgagggatttgctgccaaagggctgggcctgggcctgggcctctgagccaggttctccatcctcatctgtctggtcgctgtctccacttctctcttcagatatcagttcaggcccagctccaccctgcagccgcccgtggagggaccggatgaccttggcacttccgaacctcttgaagcgggctttcacatgctcatagtaccacctccagtgagccgatcttcacgactctggccagatggcaggggtcacagatccagccctgctcctaacgggtggagccgccctccatttacacc

SEQ ID NO: 125395 - DNA, 1473 bp, Homo Sapiens
  misc_feature (33)..(34): n is a, c, g, or t
  misc_feature (112)..(112): n is a, c, g, or t
  misc_feature (119)..(119): n is a, c, g, or t
  misc_feature (165)..(166): n is a, c, g, or t
  misc_feature (171)..(171): n is a, c, g, or t
tggatttggtccccttgttgggcttctgccctnnttcgtcccttggcctccttccttcttggggacggagtcttcctggtcactgacgttgctggtcagctcctccaggttncctcctncagggcctcctccttttacatcggcctccgtgcgcactccagcacnntaganccctgactctcagaagacgcccggcctctccgcttggaatggtgggaggccatcacgtgagcccggatgctttcctcatcagaggtgtccacatcggccaagtactgcaggggcagctgctcattcctgatgacattcgacccgagtgcagcagcaatccccagggccatcctgtgggagcctccaggcgggcagagctcagccagggcgccgtgtctggaaggtgagatgctggtcggctgctcttccggatgggagtggcacccagaggccccagtatcagcctcctccaggccctcagccttgtgaggggctgccttctctgagcaggactcatctgtgagggactgtgggctgtccctggcctcagggactgaggacaggtgcagggagtgaccttgaggctgagtggagtcatctgagtctccctcgaagtcgaagtcgtggacggagaggaggcgcttttttttgctgccaaagggctgggcctgggcctgggcctctgagccaggttctccatcctcatctgtctggtcgctgtctccacttctctcttcagatatcagttcaggcccagctccaccctgcagccgcccgtggagggaccggatgaccttggcacttccgaacctcttgaagcgggctttcacatgctcatagtaccactccagtgagccgatcttcacgactctggccagatggcaggggtcacagatccagccctgctcctccgggtggacgcggccacagcttttgcaggtgaagaggccacattccaggcactgccttttgctattcacaagcagctggtagggctgcaggcagcgggcgcagtgggtctcgttcagatgggcagtgtcggaaagcagctccctcttggagctttccttcttaatcttgcccttcaacgcctctagccgttcctcttctttccttcggaggtcaaaatctcgttgaacaacttccaagacatgctgggcctcttcatcagtgagcttggaaagatccagtttcttccccatttctgcttcttgtcggggtcacaccggaccctctccgggggacagctcagtccctggtccagcacctgggagagaaaggaggcgacgaagcagggcgtcaggccagggcgtcaggtcagggcgccggggcaaggctggataatgggggcaagcagggcgcggggcgcagagcggctggttagcgcctggctctccggggcaggcgggcaactggccacgtcccggcgcctcccgcccgaaccacgtgggctgcgccccgctccgcccagctccgggagcg

SEQ ID NO: 125396 - DNA, 868 bp, Homo Sapiens
  misc_feature (804)..(804): n is a, c, g, or t
cactatgccgtggggggtgactgtgaatagaatgggaggcagctttgccctaagcagttcccagcttgactttttcctttagcttggtgattgtagagtctcaagatttgttttcttttcacaatctgaaattcaaagttccctgggtatcctgtattttcatttgcacactttggcgccctagtcccagagtcctggagcggcatactgggggtggctgtgcagtcccagcatccccaacccagcatgtatagagagcatccatccttacatccagctgacccatgcccatgctcctccctgtggctggaggttcaacaataacataagtctcttctttgccctccagatatttctccctcgagtggctgggaaacttggcaagagaccagaggacccaaatgcagacccttcaagtgaggccaaggcaatggctgtgccctatcttctgagaagaaagttcagtaattccctgaaaagtcaaggtaaagatgatgattcttttgatcggaaatcagtgtaccgaggctcgctgacacagagaaaccccaacgcgaggaaaggaatggccagccacaccttcgcgaaacctgtggtggcccaccagtcctaacgggacaggacagagagacagagcagccctgcactgttttccctcccccacagccatcctgtccctcattggctctgtgctttccactgtacacagtcaccgtcccaatgagagacaagaaagagcacccctcacatggactcccacctgcaagtggacagcgacattcagtcctgcactgctcacctggngtttactgatgactcctgggctgcccaccatccctctctgatcctgtgagaaacaggctaagct

SEQ ID NO: 125397 - DNA, 1022 bp, Homo Sapiens
  misc_feature (650)..(650): n is a, c, g, or t
  misc_feature (724)..(724): n is a, c, g, or t
  misc_feature (757)..(757): n is a, c, g, or t
  misc_feature (774)..(774): n is a, c, g, or t
  misc_feature (794)..(795): n is a, c, g, or t
  misc_feature (840)..(841): n is a, c, g, or t
  misc_feature (869)..(869): n is a, c, g, or t
  misc_feature (876)..(876): n is a, c, g, or t
  misc_feature (884)..(884): n is a, c, g, or t
  misc_feature (887)..(888): n is a, c, g, or t
  misc_feature (933)..(933): n is a, c, g, or t
  misc_feature (936)..(936): n is a, c, g, or t
  misc_feature (955)..(955): n is a, c, g, or t
  misc_feature (968)..(968): n is a, c, g, or t
  misc_feature (988)..(988): n is a, c, g, or t
  misc_feature (999)..(999): n is a, c, g, or t
tttgaagatattaaaattcaggttttattatttgttcagttataataatttaagttaatatttgctgtattctcagagcaaagatgtatttctgtaccactgtcctgtataaatttgttacccaagatagtgactggtatgaaaggagagggaagagggtgacagatggaaacgattgctgtaggacagtccatctggccagatgcggtgggggaggggagaagaagtgggagagagatggtcctacagatgctcccatgggtaaatgatgggtgcatccctccctgcagtcgggctgtgcctgtacttcacagtcctctaagaggtgtcattcaggccacctcactcagcctatgcccaaccccactcactttccctttccttatgggctgcccccgcaactgacttccatgatgattggttctcattaggccctttgtttctacaccagccttagatcattaagacaaagacgtacttgctaccctcatagcacataacaacgcctggcagatgaaaatcaaacaaaaagcattaggcagtcttagaacattatcttgtatccttactaatcacatccagaccagatattttctaatcacagtttcgtatcatgttaactttttaagcataaaatgtgtatgtagtanaaagtgcttttcaagctgtaccaataggaagtcagctatgtttgagtgaggcttattttactaccatagttaanagatcacctaaaggctcaagcttgaacccctgngcagctggttaatgttnttgctcccgtgacacagttnnacactgaagcttagccagtcactccccaagagaatcaagccctannagtataatggatcagcacaagtctgtcnatcagtngcacaggnaannagagtttcacatcactgggagcatatctgtgtgtgtgtgcatatnttncacacatacacacatattntttctgcacatanacaatatattctgacagtanaaaatcactancaatttaacattcagatgtgata

SEQ ID NO: 125398 - DNA, 1275 bp, Homo Sapiens
  misc_feature (195)..(219): n is a, c, g, or t
  misc_feature (335)..(345): n is a, c, g, or t
agagaaaagttttgggaaatttttagggtagggggaactaagtgtgcatacttgaaaaccagggtaaaggaacttcatccccagaaaatttaattcccctgggccaaaggcacttttttctaaaaatgcaccctgtcagcaagactttacctaacataaccgtgctgcccaaaggtcccctaggagactccaggnnnnnnnnnnnnnnnnnnnnnnnnnaatagagccagagacacctgacccaccagcactaactcagcttattccaagctaggctgttaaataattatctgtcttgctctaacaatggttgaaaggacccgccctcctcccannnnnnnnnnnggtaatataaagtttgttctgttgaaaactgattaacattttaaacagggggaaagaaaagcggtctactagattaaattttaaaaggattttgttatttgctatacaaatatacatttcaacttttacaacattcactccagtctgacctccttgtctatagaagactaagagatcaacatttccagtctctgacttcaaggacattattacggatacacaatgccctctgaaagcttttgcaaatgacagaaaatactgaagatgaccagaggctcaggtgttaaggatgcattttccatgttttccaacagcacacaaactccttacaaaaaacaagcttatctagatggtcccacgagctggtcatcttcagtttacaatatgctgtggctgctggcccatgtcactgggctttcctataaaagctttcttttcttggaactgctgtcctcctgctccagtgtcctcttgtcccacctagagttcctcctggtgtgatgggtctcggaaccacacttctcctgctccccttcactgaaagccctggcctctctcctgtgacagagctcctcttccgggtcatcacatttgctctgacacgtggaagcctcgggactggcagctggaggttcgccccgcacgggaggtttgtggctgctcagagcagccactacagcagcgggctgctgtatatggctcaggtcctggtgaacgacagggaagcccggctcgcccgtaggaggtgttgctccaggatgctgggggctcgagggttgtggatcccaaaggaatattcctcctttgacctcaatgcccatcctcttcagcagtcgtgggtcctgaagttggtcatgaacaggaggtctttcagggtcctttgaagtaacagtaagagtaatttccttggagtcagagggtgtgtggtat

SEQ ID NO: 125399 - DNA, 1162 bp, Homo Sapiens
ttttactaactccccaaatttttatttttccatttttatcaccacaaatttcttggtaacaatgtagaatttaattttgtaattaaaacaaaaactctcccctaggaggaatctgatgacataaggataacaccaagttatgtgcacaaacgacaaaaaatgccaaactaactggaatgatcatccttcctgaaatttctcttaaaaagcagagaagtagaaccaatgctgccacctagtggccagccaaacaaatcaggtagcatactggagaaaaaggtcatagtcccgacaatctggtttccctgcctattatcaagccacctaactccttacttttccacaaaaaaacacaaccacatatcttaagcaagccctcctccacagtcataatccaaatacttgaatacagcaaccaaagtctgtcttgttaaacacactacttctcatgaaactttcctctgcctattttaaggtaggtttgcccggtcctatggcccagtagagatgacacaggagaacacggaaacatccaaaatgttcactggttcagagtgtgtacacagtaattttgatgtctgttgcctcaaatacctcctcgatcatcgcagatacattttcccattgcagacgatcaagaccacatccaatcctgggcatggagaggtcagtgactccattcttcagacaatgagacttcattgcctctaaactcttctgtaagttttcataagttggcttgtgcgaagcccttttctttgtaatcaagtaatatatatatcgcccatctctcttcagaacagccacttctccagatttcttttgttgatttaaaagttcttgcacccctccaaatttcttcttaaagaggacagctatcccagcgcccatgcgacaatcctcactgatacagtgggctaaagagtctgttttcgggcatgcaaaaaggtctcctttcacataagtgattctgcttccttctggatcttcattaaggctgctggccatgatactgagtcgctatttccagaatttaagtgtttcttcagccaagtcacccttcacctggaaaggagtcggtcgacgcgtgggtcgacgatatcccgggaattccggccgtaccagcctgcttttttgaacactgttctatatgtcctatagc

SEQ ID NO: 125400 - DNA, 1939 bp, Homo Sapiens
  misc_feature (193)..(232): n is a, c, g, or t
  misc_feature (241)..(290): n is a, c, g, or t
gcccccggctccatttagggccggggttaaaatttccccggggtacctgccagcccggattccattaaatgccagggtttaaccctgggctttttggaaaattaattacggcctcactattaggggaggcccggccagatcttaccacttttgtacaagaaagctggggtcaggaaaacagctatgaccatgnnnnnnnnnnnnnnnnnnnnnnnnnnnnnnnnnnnnnnnngcctcgagnnnnnnnnnnnnnnnnnnnnnnnnnnnnnnnnnnnnnnnnnnnnnnnnnnggccttcaggtttccatttaatggccaagccagcactgccaagatgtcctcctgcctgagaagcccacccacgctggcacccctcagcctcactagcggcatcccagtccagtcctggtgtggggcctcatctcagctccttcagcaagctgttgacagagcccagcagctcctggaagtagccctcgtcctcaccatcctgcagctccaggctggccagcacctggtactcagcctgcaggctggccagtgtcctgccgagctgggggtcctgacggtagcggtcccggcaggtggtcaggaggacgcccagtgtctgcagcaccttctcacgggcatcatgctcgggcagcgccaggaggtgggccgtgatctcgcaccagccctgttcccacaggcctggcaggaggtgtacctggcgatactgctgcagcttctctggggacatctcctgggtcagctcagcctcctcctcggcgaacatcttctccgtgaccaggtcgtagagcagtgtgaccacgcgcacggcgagcacctccgtgcccttctcctgcaccagggtcctcaggacctgcagccccccgagcttcaggaactgccgctgggcataggggaagtggcgcagcagggagcacagtgcaaacaggaccttcttctttgcagtgagcggctgctccgtggccaggatgaccagcagcttctgcagggctcccccttcgatggcctccacctggaccttggggttgctggaaaaggcagcgcccagcacaaacgcagcatactccttcacgaggggctctgtgctgttcagcccattgatcaccacttgaagaccaccaaaggaaagcaggtcctgcgcattgtccatctgatggacataatattcaagatcaaagagcgcagcaatcttctcttccaaactggagctggaactattgaacttgttgatcagccgtaccatgatctgcatgtcagtctcaatgacaacattcagctcatcaaagtctttcttcagttcctcaatggggcggaagagccgctttacctcagcctgccttgccttgtcttcctttgaactctccatctctgccccctccttgaattttgccagtgcactcttgagatcctgagatgtgtaggtgttggtgttgatatccagccttttgcctttcaaattatttcggaacttgtcctcatattggagttttgcctctctttccccagtctgaagattcagccgtacgtgggatcctgcagggacagcctgccctggctgaagggcctgccactcatgcgtcgggtggaacacctccaggacttcggcatccagctcctcctcggctttggtttcttttctctccgtttctttggtgctgctcttctctgggttggtcagggcaaactccttcaggttctgatgactgaggcagaaggtgaagcaggcggccatcagcagcccaagcagcatgcccagaggagccatcctagatgaaggcaggctctggggagccatagtcagggaccttcggcctccggcagccgagtggcagacacaactcccacaattccaggcggccgcggcggcgaccagctccccctgcgcctcgtgccgaattcgccacccaggcctcgctaccttaggaccgtta

SEQ ID NO: 125401 - DNA, 1700 bp, Homo Sapiens
  misc_feature (61)..(94): n is a, c, g, or t
gtgccaagctaaaattaaccctcaactaaagggaataagcttgcggccgcatacgcggtcnnnnnnnnnnnnnnnnnnnnnnnnnnnnnnnnnnggcaatataacatgtctattttattttaaaaaacaaaacccaaaccacctgaccccttccccaggaggctcttgacgaaactctagggaagggcctggctccagccaagcaggggacagtcagaagatgtcaacatggatgccaggctggtgggctccgcccttctccaagccccccatccaccccctttgctcctcggtgctacaggcactgccgggttgaggggacaggcagggcaggactgtgggcatgcagagcctcctggcagccagggagggctgcccgcccccctgcatctggcgaggcaggcagctgtgtgcgcagtgatggagctaggaggaggaaacatgcgcagacaccccgtgttcccgcttccccacgtggccaggagagtgttcaaacacgaacaaggatggctgggcactcagggccccagcccccaacccaggagaggaagaggggggtcccgccctcctggttcttttgttcgtccttagatggatggtgttctcggtgccactcggcagaaattctgcagactgaggcggaggcccgggaggagggcgtgcatccgcagagcccacagggctcggaccctctgcccccagcgacctccattcgctacctgtcgggcaggatgcccaggggtgccgggcacctgatctggatccctggagtggagggacctgtcttaagccacactcggtggttctgccgcccagggcaggggtggactgtaggctcccgacagcatgacaacagccgtgacagtgtgcctgccggctggcgtgccttcctttcctgcccaccagggacgccaaccagctctgcctcagcaccaggggtctcgggaggctcggccgcggcagagactgtcgctccgctgccaggcgctgtggatgaggctcaaggcatcctcgaatttcttcttgttggaggcttcctggatcgccgtgtgggggaggtccacctgatagatggttttccacccagagttcagtgcagacagcaatcggtccagttcagaagtgcagctcaggtagatgacccagggcgggaggagctgctggctgtcctgggagaactccaagacgcagtactccttgcccggctcggtggagacggcgctgatgtcgcccagcttggctgtgcccaaagagcggaagaagctggtctggcaatcctcatggcacgtaaagaggcggtcatccgtgaggaccaggcagcagggtatgcaggggctgggagctacgccctgggggatgacccctttggacacagcctggcagagatgctgcatccactcggccatctcggcctcgctctcggcacttagctccaggcagggccggtcggagagaatgacctggaaggcgtggggccgatccgtggtgttggctctccggcagccaccgcactgctccccccccatgttcaccgagagcagagggatgacgtcggtgcggtccgggtactggtagaggatcccgttgctgagcaccacgaagcacgtcttccagtgttccttgcccaggtaggaggtgcccgccttgtagtgcagcacctcggtgccgattctaccaccaggcctcgtacctagccttaa

SEQ ID NO: 125402 - DNA, 681 bp, Homo Sapiens
  misc_feature (638)..(638): n is a, c, g, or t
aaaaaaattattgggaggaatttattgcctgcctccatgtctataaacgttccatggacacaaaatacaatcattcaaattccctggaaaccacctatatttttcgaagaattcattctggccaacagttgggaaccaataacaggtctagagctcctaatttaggcagctgtcccaacataaaagcacaagagccagaggtgagttctccaaagctgcacctgtgtctgcaaacgtttacacaagacccttgaatggagaacatgccttgtagggcaaattcaacttttccaaatgacactgctataagttactacatctcatcctctacatctctgtgagggatgatggattagtattaactgtcttgcaaatacacatacagaaactcaggtaaggtcagccttactcagtagataaaccccaaacatgaaaccagctgggtcagcctgtcataattggatccctcttgcatgtaaagacaaaggttgtctgcttggagatggagaagagttcagcatagctcgctttggggccaactcagagcaagggtgaaccaatcctagctgtcctctgacaaataacagctggagtcctgccaggagctcctcccccaagcacttggttccacaaggcanaccccagagaagtacaggggaaaagagctctccatttctcagc

SEQ ID NO: 125403 - DNA, 1110 bp, Homo Sapiens
  misc_feature (43)..(60): n is a, c, g, or t
ccctcactaatagggaataagcttgcggccgcggctgtaggcnnnnnnnnnnnnnnnnnngttgcaggttgttttattaaaaccaggtgagtcactgccatacctgaggaggcacacacaagttccagatagtcaaatgcttccccagctggcccgcccagcccagatctcctcctcattgcaaagggacattctgctgtcttcaaggggccagtgattaatcagacaattgctactgtcaggtgtagttaatggcttggatttggggttacagccagtttggaggttggaagaagttcggttgggatttagaagaaaggacaattaattcagatccaaaccatgcagaacacagtgagccaagggccactcccggttcccagggtgatgacatcccacagggaggcgcatcgctgggcatgcaaagccaacttcaacaccccagccccagcccctcagctcctcctgcccacctctactaaacaaagcagacactcagaagcaaactctatatggctacacgagatcagaccccgctctctcttgaacccggggcccagatgggtgggggtgggagcggcaggggcctagccctggaagcccagctccttgtagttggaggccatgtccttccggaacagctccagggccttgttcatggccccctgggcatcagcaccaaagtccccgggatgcttgctctgcagaacctggatgatgcattccgagatgaactccaggtacttcacggggatcttgtgcttggtggcatgcgactgtgccaggggcttaatctctgcctcatgatgccccttcttcttaaggatgccacccagggcggtgagcacggtggcaccatgcttctttaagtcctcagacgccttcatctcgtcctctgacttcaggtgcttgaacttgtcaaacttctccagagtctctgggtgacccttaaagagcctgatgaggacttcctgcccatggcctgggatgtcagcctccaccttcccccagacgttcagcaccaactgccattccccgtcgctgagccccatggcgcagtctgaagaagacaaaaagagcaagtatgggctcactgggtgtcctggcccc

SEQ ID NO: 125404 - DNA, 925 bp, Homo Sapiens
  misc_feature (53)..(128): n is a, c, g, or t
atgcttacttggttatttatattatccagaccataaactctcaaaggcaaggnnnnnnnnnnnnnnnnnnnnnnnnnnnnnnnnnnnnnnnnnnnnnnnnnnnnnnnnnnnnnnnnnnnnnnnnnnnngggggtgacttacaaagcatcagtctcaatgctcattagcacaaaattggtctcacagaagcactttgtgtttttttgggggagggttaattagtccactagttgacaagtgagtcattaaggatgggaactttattagagcagtgtggatctgttcaacaaggccctggtgcaccacgctacaaaccactgtcgaaatgaggttgctaagagtcaccttgtggagggagagctgcaggtcccatctcatccagagctgctttgatctgaggtggggccctggagatgaacgaaagaaaggtggggagtgctgtgtattttttccccacaaatccaccagggctcattgtcagatcctgggctttcctttccacatcatttttagggactgaggccagttttgcatgattcagtgaccaggcatgtggcctgactgtaggtggcaggtggggatggtgcaagctgacaggttgagtggccatggaccctgttcaggtaatcttgggggaaggtgataggagagaagtgggtgtgggaaagggatgagaatttgataaagccaggttaccaacagggaacctctgagcaggccaggcagggaggatctgggaacaatcgagtggaagagtggtgatgtggatctggaggccagctgtgctgatcctttgtccaaggtgaagtgattgcccaggaactggggagaagagggaaggtccttggacagggctgacatcctaggtggggagattgaagccaccctgggaaaatagtacttcacacccacccctgtttcttca

SEQ ID NO: 125405 - DNA, 1221 bp, Homo Sapiens
  misc_feature (504)..(550): n is a, c, g, or t
tgggcgccgtcggggtccccggggtgtgaaagttggtggtgcgtggtggctgctgtgttccttcggtggtgcggtcagctgttttgtgcacgttgcgcgctgtggtgcattgggcgcggcgtcggtgtttggaccggcgcgtgtgatccgtcgcgtgtatgttgttgctgaggggtgtcggctctgtgggggccttgtgagaaggcgctgtgtgggggggagtgggttgggcgcgccatgatggtgtgtcactcctcctcctgggtgttagggtctctgttttccgagggttgtttccagcgggtcgccgcgttgttccgcggtttgcgcgaggtgtggtggaatagcgtcgggccgcagggtccttgccgttgttagaagtcggtggtcacgcttattggggggcgccccttgttgtgcggaagagcctggtggtgtcgcgtttgaggtttgggggccctcgtcgggcgggatatatctttggtcgcggcgcgcgccccctcnnnnnnnnnnnnnnnnnnnnnnnnnnnnnnnnnnnnnnnnnnnnnnntggcctatccaaggtgaggtctttatggtgtatagagattggtgagtttcagagccagtgtggccagtctagtccctcccctttccctagcccagcacaattccctccattgagggcccacatcacctccagagggaggagggaggggtcagacccccccatagcaccaatctggataggccactctctgacaaaacagagcgagcagtgccttccacaaacggggtaaatggggctaagaaggggggaggccttttcctgtgggagaccaagagtagcaccatctgtagaaagaaagctggggggtaagggaggcacatagatggtggcagacagctgaggggtcctggcttctctccccacctggcaatatgcagacagcaccgtgcctgtgcatgtgcctgtgtggctggagaagtcttcagattgcaaaccacccaaggggtgagggagccccaggtgccccaaacatgtggggtaaagtcaaggtaagtgcatgtctggagggctggggtgggaagtggagggggttctggggcacagagattgtaggcaatgagaatggagaggcatgaagtccaggagcagcacagcctagagggtaggggtctagaatgggaaaacttaagactgaaagcaggaattgggtaagttcagtggggtgggaagcc

SEQ ID NO: 125406 - DNA, 1196 bp, Homo Sapiens
ttttgaatccaagtagttttaccatcttttattataaacaccatcacatttcaagtttcctctttttgatcacaaatataggactttttcttctcctcttaagtatacagcatgagacacagcgttggggctttccaggtttcttacagaaatttccttacgacaaacttagggttagcatccacagaccatgctctcggtcacatccttcgacatctggattgcccaagacggttgcacaggatgcagactccaaagaggatgaggttggtacataacgttttgaattccaggataacctgaaacagaggcccctccactgcccacattaaaaggctgcacaaccaggagggcgccactttctgagtgtgggcttagagctgctgctctcgggctctagccccacttcttgtttgaacacatggctcaaggtttccctacgggtggaaaagatgaagaggacactggaggttaagaacccagcaggccgagcagtggcagcaatctccaccggaggcccggcctgtgcttcccctcctgggatggggtgaatgggggactagggataaagtgggttctctgggtgctgggggtggtagacttaggggatgaacttcagctcccctgcccatggtcctcctctcagttttacggtttttgtgaacttgtctcacccactcagtaagggagcctggaactggactccaagggaggcaggaccatgtggctaagtgcaagtatcccccgaagtgggggacctttctcactgtaacagggaccggagctggtgctccaaggtgtctgtccctcagcatttcctcaaacgccacacgggacatgctgcgcggcagcggcaggatttggggggaagtcagaaagcacctcgcgagcctggagcactctctgcctcagattctgggagtcgtgtacggggcggggggagccgcctgaacacgggaagaagcgccgcctctgggggtggcagctacgacggacagggaggatggaggagtgggccaaatgcagtttcagaccaactgacgaccctaactgtgtgagcgacaatcacctgtgagcctcgaatgtgtggggccaacgctgagccgcccacctcagtctccgggaagaaaagcctccggcggcctcgtgccgaattcgccacccaggcctcgctaccttaaaccgttatagtactg

SEQ ID NO: 125407 - DNA, 677 bp, Homo Sapiens
  misc_feature (126)..(146): n is a, c, g, or t
tcaggtttcagcccagctgtatttttggctgggtgggctgggggccgagcaggcaggcgcagctgcccatccccagcacacaccacactcacactacctctacccagatagggcaccatccactgnnnnnnnnnnnnnnnnnnnnntgcaggcagaaaggaatcaggtgctcctgggctattgaatcactttaggcttctctggactgttgctaattttttgtagtgtcttcttgatccgcagcgcggtgagtcgggcagaggggtttgggtaccagcactcccgcatcatctgagctaggcctgagaggaccgggtctgcagccagccggttagggatggtgggggtctgctgatccacacacaccaccttcttcatgtcctcaaagctggggtcattgggcaccacatcatagaagggtggtctatagtcctccacgatgccattcacgatggtccggcgggcaatctcccacagcaccaggccaaagggccagatgtcagtccacttgtaggactcaaagcagtccgtgcggatctgctcgttcagcacctcgggtgccatgtaccgcttggtgcccactctcgggttgttgccgatgtccaggtaatcgctgccctgtgagtgcatcacagccaggcccaggtcggcgatgcaccactgcaggttgctcttga

SEQ ID NO: 125408 - DNA, 555 bp, Homo Sapiens
tttaagtttgggactttgctaagcgctatattatcatctaatttattcataacaacaacccaatgaggaaggtactaatattactcccatttcacagaggagcgagttgaaagtcacaaaaatgaaacagcaaacgcgccgaagtcaggcagcaagtaagtggcagcaccagaactcgaaactgcctcggagcatgcactcttcaccaccccgttccaccttgaggtcggattccgcacgccgttcgcggcattcccaccttcctacgtgggacagttcccggtactgaggcatggcgctgtccagccctcaggcccgcagccgtccgcaagcaggagaacgcggccccgctgggcgatcctgcccgaaggcgcccgaactgcggcgcgcggccgggtcctggcgggcgggtcgagtctccccaaggcggccatcccaagcagctccccggatgtccctcagacccgcgcgctaggctcaactcagaaaggcgggaggcgcgaagcgagatcggccttgcccctcgactgtcccctcatcgctccccgtcctcta

SEQ ID NO: 125409 - DNA, 1269 bp, Homo Sapiens
  misc_feature (60)..(153): n is a, c, g, or t
  misc_feature (206)..(207): n is a, c, g, or t
  misc_feature (231)..(239): n is a, c, g, or t
  misc_feature (328)..(338): n is a, c, g, or t
  misc_feature (363)..(363): n is a, c, g, or t
  misc_feature (423)..(441): n is a, c, g, or t
  misc_feature (449)..(462): n is a, c, g, or t
  misc_feature (464)..(467): n is a, c, g, or t
  misc_feature (470)..(611): n is a, c, g, or t
  misc_feature (1226)..(1226): n is a, c, g, or t
tgttccccccacttttttaaataacacacccggggcccaaatatggggccactttttttnnnnnnnnnnnnnnnnnnnnnnnnnnnnnnnnnnnnnnnnnnnnnnnnnnnnnnnnnnnnnnnnnnnnnnnnnnnnnnnnnnnnnnnnnnnnnnttgggggggttttcactttggggcagaggttttaatatttctccccctctttnnaaacggcccaggcgcgggggtaannnnnnnnnaaactttccttggctcccggtttttatttcccgaaaaacccccccaaaccccttgggatttttttaaaacccccggtttccccccgggnnnnnnnnnnnggggggatcccccccctcttcaggncccggttttttttggaaaaaggttgggccccgttcccttccttttgggggcccgggcccnnnnnnnnnnnnnnnnnnntttttttnnnnnnnnnnnnnncnnnncannnnnnnnnnnnnnnnnnnnnnnnnnnnnnnnnnnnnnnnnnnnnnnnnnnnnnnnnnnnnnnnnnnnnnnnnnnnnnnnnnnnnnnnnnnnnnnnnnnnnnnnnnnnnnnnnnnnnnnnnnnnnnnnnnnnnnnnnnnnnnaattttagtaaatactttcatctcagaagtcaaaatggggcagaagagctatacaaaggtacatagtttaaatctttgggacaagagacaagaaggtaaccaagtcagtagcccccccaagcttcacttaacctaaaattgtagatcatagtaggtagatgtatacatctatctattgccaaagaggtataacttattttgacaacctttctaaataattttatggtaaggccaataatataaaaatattatacacagtacagaaagaattaaagttaatgataaagaccacaaaataaaataatccaagcttcttatttggaaaaagaaaatagaaataatactataatatttagtacctaatatgaaatctccactcattataagttgtcatgttgattgaaattttgcagtacaacgttgcatgttactaatgagaaaatcaccagatagctcttgtcgagtcctatgaaccttaaacattttttataggtaaagatatcttaaaaataccacccaggaataaagatttgtcagaagtacaatatagtaacataaatgcaaaagatatcatgtaatttgtgcaattcacaattccaaaaattgtcttatcanatgtacaatacataatagtcatacttgacttcatcaagttaac

SEQ ID NO: 125410 - DNA, 658 bp, Homo Sapiens
  misc_feature (561)..(561): n is a, c, g, or t
tacttgatatgttttatttcttgacttggacagttacatagttgttacaattactcattaacatgttcatttatgtttatgtacctttctatatacagattttaaaatagaagtttttttaatattgaaaacaatccagatttgatggaagacacaaatctgcagattcataatgaacctaaatccatgataaatctatagctagacatataataaaaactgcgtatctccaaagtaaaagatattatcttagaacagctcaagagatgtcagttctaaatctacagctctaaggacataatttcagaaggtataaagaattctacctagaaggaacatctgacacacaagaaaaaaggtaagcccccaccatgtcccatcaaaaaaataaacattgactatataaaatactaataatatccaatttggagatttaataaagaacttgtggaatttaattagaattaatgttatttcaatacctttgtgttgtttggaaagagggtagcatttttagatgtttaaggataatcaaaaggacttgtaacattcacattccanatcagtaaagggaaaatatatgattaaatagaaaacccaactgatcccacaagataggaggagagataaaggtgggaaagaagacaacatagaaaaa

SEQ ID NO: 125411 - DNA, 925 bp, Homo Sapiens
caaaattaactaacattcctatggtagatttatttttcctccataaaactgaacagtgcagaatagggcttgggctacagttcatcacatttggttttcttattaacaattaaaaggcaattttcttcctccctaacacatgtagacattaaatctaaggtttttaaaatatcaactacctataagaaaagtagtcttaaatggttaaaaggaatcaaaataccaaagtttagtgtgcgaagagtagatataaacaactgcgaacagagtagatcattggtgttgaatatttaacatgaatagcccaaaatgagttccaaagtttttccacctttacaaataaaaaaaggtgtcctttccacagtttgggaatatgcattgtacatccctcccaacaagtgtatgagtaaggatttaaaaatgttgccaatattaagttcttcagtacctaaaattaattagaggacagcaatattacagtggcaatggtgcatcaattctcaaaacgtagttatgatccaacacgagttgtggtggttcttttatctgagaaaaagcttttcaaaagaaatacctgccctatgctaaccaccagaagaatgagggcttctcctactgaccaataggccactcttgtatttagatcctctgctcggcttcggccttgagcttctcttaaacggaaatgagtctgataatcgatgacagacttcagagcttcgtgaattgaaacacaggcagattccatctgggtaagagcactgactcggttctcactaggaaacaaaggtgggtcttctccaacttgaaaatcaaaatatacagttttatgtgtgaaagtagaaaattcattgctgaagcaaatttgtatgtccatttttggaggctgtgaaggtaaactatcatactgtttcttcatctcttt

SEQ ID NO: 125412 - DNA, 917 bp, Homo Sapiens
  misc_feature (18)..(18): n is a, c, g, or t
acctccagcaccccccantagatttgcggaccgacgaggacggagcaggtgcccagccccaggttccctgtggggttgccacgagcctccacccgcccgcttgttggcgggctccatggcggccccctacgcatccacgagtgggcggtgcccttcccgacccaggtggtgcgggagaagctgcgcaagtacgtcttcgaccgcgtgaacatgcacaacctactgatccacctggtgcggcggcgcgggcagaagctggagagcatgcagctggagctggacagcctgcggagccagcccgacgccagcaaggaggagctgcggctgctgcagatcatccgccagctggagaacaacatcgagaagacaatgatcaagatcatcaccagccagaacatccacctgctgtatttggacctgctggattatctgaagacagtgagcccagcggcccgggaagggcgggggtcaggggctgggatctgggaggggcgggagcgtcctggggcggagccgccccgcacccgccagggagagggagctctgcctgaccaccggctacgcaggacgccgaggcatgtggaaaacgtttttttaaacttcatttttggctattccaaaaaagcatatcgtggggtatatcagaattcttcggactttcttgcacgtattaaatgatttggtattgtttgtatcttgcctgtcattttctcattgcctgggcctctgagagtcagacaggtcctgcaccctcagaaagtccttgcacctttgagggtccgctgggcctgtaagcagggcttgctgccgtcccagccagcccacccgccctgctccctgcagacgaggccaaaggcagccagcagtccgattgtgagggaagacccccttcatgggaggctgagcaccgcccctcg

SEQ ID NO: 125413 - DNA, 877 bp, Homo Sapiens
  misc_feature (374)..(446): n is a, c, g, or t
  misc_feature (757)..(798): n is a, c, g, or t
  misc_feature (836)..(836): n is a, c, g, or t
aagttttataggaatatcccgtcaaaacccaacccggtaattgcccttgaaatgttaactagacggatttcccagggagaccacaggacggttatcctgtcttgggatgtcctcagaaggctctgtcattgatcaggtaccagtaaaacccccagagtcctttctttcaaatggaaaagggaaagcagagggaccagaagctatccaaacttcgtcttctttccttgtggcttgtggtcacctcctcctcctttgcctcctgggaagcctcctcgccctccaaagcctccccggcctctgccaccaaatcctcctcggcctcctgtaccaccacctcgtcctccaaagccgcctctgcctccaccacgaacgcnnnnnnnnnnnnnnnnnnnnnnnnnnnnnnnnnnnnnnnnnnnnnnnnnnnnnnnnnnnnnnnnnnnnnnnnnggttttgtacatgggatgaaacaatataaattcaaaacttacagataagggttagctctatcactcaactctttaaaaagtttatatgaatatccagtcaaagccaacacggtattgcccttgaaatgttaactagacggatttccaaggagaccacaggactgtatactgtcttggaatgtcctcagaaggctctgtcattgatcaggtaacagtaaaaaccccagagtcctttctttcaaatggaaaagggaaagcagagggacagaagctattcaaacttcgtcttctttccttgtggcttgtggtcnnnnnnnnnnnnnnnnnnnnnnnnnnnnnnnnnnnnnnnnnnaaagcctccccggcctctgccaccaaatcctcctcggnctcctctaccaccacctcgtcctccaaagccgcctctgcct

SEQ ID NO: 125414 - DNA, 1493 bp, Homo Sapiens
  misc_feature (464)..(464): n is a, c, g, or t
  misc_feature (485)..(544): n is a, c, g, or t
  misc_feature (670)..(700): n is a, c, g, or t
ggacttggtgcgaatctacgggatgcattttgccagaccctgtctgtgcgattcctccgtggaggggtctttgtgacggggcggttttttagccccaaagtgtttttcgcatcttggtctttggttcgcgtctgtttcctcttgggtttttggtagtttaattcgttggccaaagcgtttcaaacccagggagttcccatcgcttttttgcaggtctttcagcggattcaaaatcccccataaccaaatttcctagtcaataccaatttgggacatccacaacagcaaggatcatttttagcaaaaccatcgctgatcccagtttttaattcaggagcagattttgttaaagtttaggtttccaacaaagggattgaaagccgtagtcggttctgtgccttccactttctgtttcttggcttcaggagctgctttctgtttggccatttccttctttcgttttnccaggtgcttctttgacaggnnnnnnnnnnnnnnnnnnnnnnnnnnnnnnnnnnnnnnnnnnnnnnnnnnnnnnnnnnnnttcgtcgtcgtcgtcatcctcgtcctcatcatcctcttcttcatcttcatcctcagccacgttcttggctttcacaggaacaacttttgcagctttctttcctttggctggtgtagtctccatagnnnnnnnnnnnnnnnnnnnnnnnnnnnnnnnatcgtcatcctcatcatcttcgtcatcctcatcgtcctcatcctctgaggcaggggcagcagctgctgctttcatcgctgctggttcaatttcatcttcatcctcatcctcgtcctggtcatcctccttcatcctcctcactgtcatcatcctcctcttcatcactgtcttccttcttggcattcttgccattctttgcccccttggctgggatggcagcacccttcttaccaggagttgctaccaatgctttgcctggtgtggctcccttcttgccaggtgtggtaactgctttggctggtgtaactgtcttcttggcaggtgttgctgctgcctttttgcctggagtgacagctgctttcttggctggtgtggcaactgcaaccttttttgttggggaaacgaccaccttctttgctgaggttgcagcagccttcttgcctttcttctgaggtatgacgacctcttctccactgctatcatcttcttcatcttctgacatttcctcatcttcactatcttcttctacctcctttggaggaggagccattttcttggggtcaccttgatttttacctgccttcgcgagcttcaccatgatggcggcggagtgtgaagcggacaagtggcgcagatgagtccagaagaagccaagcgacggcgatggcggccgcgggtgctgaagatcccggagcacgtacacccgaaggccagcgagagctcgagactgaggcgaaagactccccggccgtaatggccgaattcccgggcatatgtccggtaccgtcgactg

SEQ ID NO: 125415 - DNA, 974 bp, Homo Sapiens
  misc_feature (307)..(367): n is a, c, g, or t
aattggaggaaaaaggtttgaccaggaggaacaaaaaatcaaactacaataggttatttaatccacccactcttaaaagtaatatgaataaccagtcaaaccgacacggtatgccttgaaatgttaactagacgggatttccaaggagaccacaggactgaatactgtcttggaatgtcctcagaagctctgtcattgatcaggtaacagtaaaaaccccagagtcctttctttcaaatggaaaagggaaagcagagggacagaagctattcaaacttcgtcttctttccttgtggcttgtggtcannnnnnnnnnnnnnnnnnnnnnnnnnnnnnnnnnnnnnnnnnnnnnnnnnnnnnnnnnnnnaccaaatcctcctcggcctcctctaccaccacctcgtcctccaaagccgcctctgcctccaccacgacccccgaagccaccttcacccttaggtttggcccagtccaaggtaactttatttccatcaatttcaccgtcttccatggcctccttggcagctttggcatcctcctcactgttgaagtctacaaaaccaaaccctttggaggacccagtttcccggtcagtaactatccttgcccgaacggagccgtcaaatgactcctttaatgtctcttcagtggtatcctcagacaggcctttgacaaacagagttttggatggctggcttctggcattaggtgatcccctgggtccttgcaactccagcctgattgctctgccctcaatttcccttttattacaggaatttaaagcttctttagcgtcttcgaatgaagcaaactctataaatgcataccctttagatttgccattttggttctggggtactttgataaaagttgctttctcaaatacttcctgaagagtttcttctgttgcactgtaggagaggttgccggacgcgtgggtcgacgatatcccgagaattccggaccggtccagc

SEQ ID NO: 125416 - DNA, 1446 bp, Homo Sapiens
  misc_feature (74)..(74): n is a, c, g, or t
  misc_feature (251)..(277): n is a, c, g, or t
  misc_feature (437)..(438): n is a, c, g, or t
  misc_feature (441)..(478): n is a, c, g, or t
  misc_feature (482)..(486): n is a, c, g, or t
  misc_feature (490)..(499): n is a, c, g, or t
  misc_feature (501)..(504): n is a, c, g, or t
  misc_feature (607)..(679): n is a, c, g, or t
tggtttttcccaatattgtgggccaagaaaaagtgcgtttaaaagggaaattttcacacacccctttttactcncccaaaataaaatgggcacagggcggcgggggccgttaaaattttgatatattcgagaggcctcccccttggggaattcccccggggtggataaagattccccagtgaaagggcctctgcaggaaacttcccaattttgggatttgttttcaagaaccgcttccgtttgcccccccnnnnnnnnnnnnnnnnnnnnnnnnnnnaattccccaggccctttagttcattggcccagggattttcctagggaaaacacggtattggcccaggttctcttttcctttattggggccccgcgggccaaaacgaaatggttttagaaagcttctttgaggggccgaggcgggccccacaagggttttnnttnnnnnnnnnnnnnnnnnnnnnnnnnnnnnnnnnnnnnntttnnnnntttnnnnnnnnnntnnnnttttttggcaccagagttgacttttaatttgtcctaaagccgctgaagcaaaaaccatgataaaacattctgctttcttttcttttacaaccccacgaacgcnnnnnnnnnnnnnnnnnnnnnnnnnnnnnnnnnnnnnnnnnnnnnnnnnnnnnnnnnnnnnnnnnnnnnnnnntggttttgtacatgggatgaaacaatataaattcaaaacttacagataagggttagctctatcactcaactctttaaaaagtttatatgaatatccagtcaaaaccaacacggtattgcccttgaaatgttaactagacggatttccaaggagaccacaggactgtatactgtcttggaatgtcctcagaaggctctgtcattgatcaggtaacagtaaaaaccccagagtcctttctttcaaatggaaaagggaaagcagagggacagaagctattcaaacttcgtcttctttccttgtggcttgtggtcacctcctcctcctctgcctcctcggaagcctcctcgccctccaaagcctccccggcctctgccaccaaatcctcctcggcctcctctaccaccacctcgtcctccaaagccgcctctgcctccaccacgacccccgaagccaccttcacccttaggtttggcccagtccaaggtaactttatttccatcaatttcaccgtcttccatggcctccttggcagctttggcatcctcctcactgttgaagtctacaaaaccaaaccctttggaggacccagtttcccggtcagtaactatccttgcccgaacggagccgtcaaatgactcctttaatgtctcttcagtggtatcctcagacaggcctttgacaaacagagttttggatggctggcttctggcattaggtgatcccctgggtccttgcaactccagcctgattgctctgccctcaatttc

SEQ ID NO: 125417 - DNA, 2265 bp, Homo Sapiens
  misc_feature (34)..(34): n is a, c, g, or t
  misc_feature (58)..(59): n is a, c, g, or t
  misc_feature (130)..(131): n is a, c, g, or t
  misc_feature (168)..(168): n is a, c, g, or t
  misc_feature (181)..(181): n is a, c, g, or t
  misc_feature (1378)..(1444): n is a, c, g, or t
  misc_feature (1535)..(1565): n is a, c, g, or t
  misc_feature (1663)..(1721): n is a, c, g, or t
ttcaaaattttggtcttgtttccattggggggtngggggcccccccctccatcctttnncctacttaggaagcctccttcgcccctccaaagaccttccccggcctttggcccccaatccctccgtgggnnctccttttacccccaaccttgtcctgccaaaagccgncttctgccctctncccaggggcccccgaaagccccctttcacctttagggtttggccccagtcccaaggtacctttatttccatcaatttccccgttcttccatggcctccttggcagctttggcatcctcctcactgttgaaaggtctccaaaacccaaacccttggggggacccagtttcccggtcagtaactatccttgcccgaacggagccgtcaaatgactcctttaatgtctcttcagtggtatcctcagacaggcctttgacaaacagagttttggatggctggcttctggcattaggtgatcccctgggtccttgcaactccagcctgattgctctgccctcaatttcccttttattacaggaatttaaagcttctttagcgtcttcgaatgaagcaaactctataaatgcataccctttagatttgccattttggttctggggtactttgataaaagttgctttctcaaatacttcctgaagagtttcttctgttgcactgtaggagaggttgcttaaaaccagagtttttgattcaccactccaagtgctattctttccacctctatagtcttgattttgacctttctctccagtatagtacagggaaatagatcgcccatcgatctctgttccctgcttttcttcaaaggttttctctgcatcagcttctgtcttaaattcaatataagcaatccctttacttttcccatccttgctgactaatctgatctccgcagcatcttcaaacacttctttcaattcatcctgagtgactttgtaagggagatttttagccaaaagtgttctcgcatctcgctctttcttactgtcttttccttttggtttctctagtttaatttcattgccaaagactttcaaaccagtgagttccaacgctttctccaggtcttcagcagattcaaaatccacataaccaaatttcctagtcataccaattctgacatccacaacagcaagatcatttttagcaaaaacatcgctgataccagtttttaattcaggagcagatttgttaaagtttaggtttccaacaaagagattgaaagccgtagtcggttctgtgccttccactttctgtttcttggcttcaggagctgctttctgtttggccatttccttctttcgttttccaggtgcttctttgacaggctcttcctcctcctcttcttcctcctccnnnnnnnnnnnnnnnnnnnnnnnnnnnnnnnnnnnnnnnnnnnnnnnnnnnnnnnnnnnnnnnnnnncttcttcatcttcatcctcagccacgttcttggctttcacaggaacaacttttgcagctttctttcctttggctggtgtagtctccatagnnnnnnnnnnnnnnnnnnnnnnnnnnnnnnnatcgtcatcctcatcatcttcgtcatcctcatcgtcctcatcctctgaggcaggggcagcagctgctgctttcatcgctgctggttcaatttcatctnnnnnnnnnnnnnnnnnnnnnnnnnnnnnnnnnnnnnnnnnnnnnnnnnnnnnnnnnnnttcatcactgtcttccttcttggcattcttgccattctttgcccccttggctgggatggcagcacccttcttaccaggagttgctaccaatgctttgcctggtgtggctcccttcttgccaggtgtggtaactgctttggctggtgtaactgtcttcttggcaggtgttgctgctgcctttttgcctggagtgacagctgctttcttggctggtgtggcaactgcaaccttttttgttggggaaacgaccaccttctttgctgaggttgcagcagccttcttgcctttcttctgaggtatgacgacctcttctccactgctatcatcttcttcatcttctgacatttcctcatcttcactatcttcttctacctcctttggaggaggagccattttcttggggtcaccttgatttttacctgccttcgcgagcttcaccatgatggcggcggagtgtgaagcggacaagtggcgcagatgagtccagaagaagccaagcgacggcgatggcggccgcgggtgctgaagatcccggagcccaccc

SEQ ID NO: 125418 - DNA, 1003 bp, Homo Sapiens
  misc_feature (33)..(34): n is a, c, g, or t
  misc_feature (61)..(126): n is a, c, g, or t
  misc_feature (131)..(131): n is a, c, g, or t
  misc_feature (232)..(293): n is a, c, g, or t
ttctttttcccagggtctttcttgaccaggctnnttctccctcctttttttcctccctccnnnnnnnnnnnnnnnnnnnnnnnnnnnnnnnnnnnnnnnnnnnnnnnnnnnnnnnnnnnnnnnnnnttttnttcatctcatccctcagccacgttctttggcttcaccaggaacaacttttgcagcttcttttccttgggctggtgtagtctccatagcttcttcttcagannnnnnnnnnnnnnnnnnnnnnnnnnnnnnnnnnnnnnnnnnnnnnnnnnnnnnnnnnnnnnctgaggcaggggcagcagctgctgctttcatcgctgctggttcaatttcatcttcatcctcatcctcgtcctcgtcatcctcctcatcctcctcactgtcatcatcctcctcttcatcactgtcttccttcttggcattcttgccattctttgcccccttggctgggatggcagcacccttcttaccaggagttgctaccaatgctttgcctggtgtggctcccttcttgccaggtgtggtaactgctttggctggtgtaactgtcttcttggcaggtgttgctgctgcctttttgcctggagtgacagctgctttcttggctggtgtggcaactgcaaccttttttgttggggaaacgaccaccttctttgctgaggttgcagcagccttcttgcctttcttctgaggtatgacgacctcttctccactgctatcatcttcttcatcttctgacatttcctcatcttcactatcttcttctacctcctttggaggaggagccattttcttggggtcaccttgatttttacctgccttcgcgagcttcaccatgatggcggcggagtgtgaagcggacaagtggcgcagatgagtccagaagaagccaagcgacggcgatggcggccgcgggtgctgaagatcccggagcacgacacaccgaaggccagcgcctcgtgccgattcacacccccagcctcgtactagccta

SEQ ID NO: 125419 - DNA, 1233 bp, Homo Sapiens
  misc_feature (71)..(71): n is a, c, g, or t
  misc_feature (82)..(82): n is a, c, g, or t
  misc_feature (84)..(84): n is a, c, g, or t
  misc_feature (87)..(87): n is a, c, g, or t
  misc_feature (90)..(91): n is a, c, g, or t
  misc_feature (96)..(96): n is a, c, g, or t
  misc_feature (101)..(101): n is a, c, g, or t
  misc_feature (109)..(110): n is a, c, g, or t
  misc_feature (115)..(115): n is a, c, g, or t
  misc_feature (123)..(123): n is a, c, g, or t
  misc_feature (125)..(125): n is a, c, g, or t
  misc_feature (128)..(128): n is a, c, g, or t
  misc_feature (130)..(130): n is a, c, g, or t
  misc_feature (133)..(133): n is a, c, g, or t
  misc_feature (136)..(136): n is a, c, g, or t
  misc_feature (138)..(140): n is a, c, g, or t
  misc_feature (142)..(160): n is a, c, g, or t
  misc_feature (268)..(340): n is a, c, g, or t
  misc_feature (652)..(702): n is a, c, g, or t
  misc_feature (933)..(933): n is a, c, g, or t
  misc_feature (1138)..(1138): n is a, c, g, or t
tgcggataaacggggtgtgcttttttagtagagaggggcccatagagggcgggggcgcttccaactacccnctcccgcgccncnacnttnnttttnttttntttctttnnccttntttttttntnttntntgnctntnnntnnnnnnnnnnnnnnnnnnnggggccacccagaggtggactttttaaattggtcctaaaagccgtgaaagccaaaaaacccatgataaaacattctgctttcttttcttttacaaccccacgaacgcnnnnnnnnnnnnnnnnnnnnnnnnnnnnnnnnnnnnnnnnnnnnnnnnnnnnnnnnnnnnnnnnnnnnnnnnntggttttgtacatgggatgaaacaatataaattcaaaacttacagataagggttagctctatcactcaactctttaaaaagtttatatgaatatccagtcaaaaccaacacggtattgcccttgaaatgttaactagacggatttccaaggagaccacaggactgtatactgtcttggaatgtcctcagaaggctctgtcattgatcaggtaacagtaaaaaccccagagtcctttctttcaaatggaaaagggaaagcagagggacagaagctattcaaacttcgtcttctttccttgtggcttgtggtcnnnnnnnnnnnnnnnnnnnnnnnnnnnnnnnnnnnnnnnnnnnnnnnnnnnccggcctctgccaccaaatcctcctcggcctcctctaccaccacctcgtcctccaaagccgcctctgcctccaccacgacccccgaagccaccttcacccttaggtttggcccagtccaaggtaactttatttccatcaatttcaccgtcttccatggcctccttggcagctttggcatcctcctcactgttgaagtctacaaaaccaaaccctttggaggaccagtttcncggtcagtaataatccttgcccgaacggagccgtcaaatgactcttttaatgtctcttcagtggtacctcagacagcgctttgacaacagatttttgatgggggcttcggggattaggtgatccctgggtcttgcactccagccgattgtctgcctcatttccttgtataaggacttaagctcttaggtctcgatgagcaatcanatgcaacctttaattgcatttggtctgggtcttggtaagtgcttccaaactccgagagtctcgtgcatggaggggtgctaacaattttgtacacc

SEQ ID NO: 125420 - DNA, 881 bp, Homo Sapiens
  misc_feature (153)..(153): n is a, c, g, or t
  misc_feature (477)..(536): n is a, c, g, or t
  misc_feature (691)..(783): n is a, c, g, or t
cgagagcagacgtcgctctcagtttgctcgtctctatcaaagcatcctactccatctgcgatattattcgcagctctcaacatctcaatcatctgaggactgtaggagatttagcaaagtgtccgcatctcgtctttctactgtctttctttnggttctctagttaattcattgccaagactttcaaaccagtagttccaacgcttctccaggtcttcagcagattcaaaatccacataaccaaatttcctagtcataccaattctgacatccacaacagcaagatcatttttagcaaaaacatcgctgataccagtttttaattcaggagcagatttgttaaagtttaggtttccaacaaagagattgaaagccgtagtcggttctgtgccttccactttctgtttcttggcttcaggagctgctttctgtttggccatttccttctttcgttttccaggtgcttctttgacaggnnnnnnnnnnnnnnnnnnnnnnnnnnnnnnnnnnnnnnnnnnnnnnnnnnnnnnnnnnnnttcgtcgtcgtcgtcatcctcgtcctcatcatcctcttcttcatcttcatcctcagccacgttcttggctttcacaggaacaacttttgcagctttctttcctttggctggtgtagtctccatagcttcttcttcagagtcatcttcctcatcgnnnnnnnnnnnnnnnnnnnnnnnnnnnnnnnnnnnnnnnnnnnnnnnnnnnnnnnnnnnnnnnnnnnnnnnnnnnnnnnnnnnnnnnnnnnnngaggcaggggcagcagctgctgctttcatcgctgctggttcaatttcatcttcatcctcgtgccgaattcggcgcgccgtcgacttcatactctctcc

SEQ ID NO: 125421 - DNA, 844 bp, Homo Sapiens
gagcttatataaaacagctgagctgccagtttattctgggcttctggtggtttgggctgaccaggcttggtggagtctggggacctgcctcagggactggccccctggcctggagccaggggttctgggggcctggctcaatccagggcctctgtggtggcacacagcaggccagccagaagagccaggcccagcgcggccacggcgaccagcgccacgtcccacaagacccccgggcgcacccaggacgcctgcagctgccagccacagctgcccagctggtagcctgtcagccggcccagcgggccatgggcagcgaggctggggctggcacagcggacctgcagcagggcctcgggcgtgcggtcctccagccagaggcgcagataggtgaggctgcagtcacagtgccaggggttctgcgtcacatcgagggtctgcagctggggcaggtggtcaaaggctcccgggggcacggactgaaggctgttgttggccagcagaaggtggcgggtgcgggccggcagggcaggcagggccgtgagtccgtggcccctgcagtccacccacagccccatggtttccagggcgcggcaggtacatgggctggggcagtccttggtggcctctgctgtggcccagagcaggaacagggctccccaggcaggcatgggacaggctggctcccttctcgggtctcagccttctcctctgggaaaccagctggtgactagggaaggtggagtgtgcccagcccaggcctggcataactgtctctggacaccgtagaaggccgggcggtgagggcggctgtgaagcctttggtcaggtgctcctgtctggc

SEQ ID NO: 125422 - DNA, 1263 bp, Homo Sapiens
ttttagatcagtattttttattggatggagggtaacaatgtagagaggctatcttaacatagtagaaacaacaattattagatagcttaaaacacagaattgaagttacttaagtaaaaatgatacgtatttgaggaaaaagggttgaaaaagtatatgaactctgatggctacttctattcttatgcgaagagggaacagtcctcaaaattcatgctatcccatgattgcgccactgcactccaggctgtgctacagatactcttgaaatgcttagtttttggagatctctgctcttcagattgtcttcctgatatggatccgtttgtttggctttctgtagttctattttgagatcgctacattctttcctcatcagttccagctcttgttccaaaccatggatcttcaggtcacagctcaacttttccacctcccagtttgatgaaggtggatttaaattcctcatcacctgctgagtttccacctctgtcctcagctggaggagttctacttctttagattgtagctgctcattcaatactttcaaagattcagagttgtctttattcattttgtccagtttgctcttcaaattatctctatcaatgcaaacctctcgatatgcatgataggccttatttacttgttctcgtcccacggaacttgtttcttcttcaaatcgagctattagcttttcttcccaaaatcttattctcttctttaaccaagagttctctttctctgaatccttaagtcgttttttgatgtcttcatatgcagtgacaagagcaaaatgggaagcaacagattcatctcctgaatatattgaaactggagtcactgtatctctcttatgggctttttcatgattcagaatacagatatcatcttctaccagtgcatccatgacaaccagaagccaggctacgtagggccgcccccaaggccgccgagtttcgattccttagtgtttggaaacggaccgaaaacaaaccgggtcgccaggggtcaccacgggcttccggtttcttcgaagacaccgccgcttccacagcgaagggagctgctccgggcacgtcgcggagggagtcccatttcttctgactcggcaggagcccgggacgttctggaaggagggacgagccgaggcaggaggggccgggccgacgcgggagaaggcccgttacccagcaatacgcgcgcgagacccaggcccgccgtcgggaccagcacgggccggagggaggggaagcactccga

SEQ ID NO: 125423 - DNA, 488 bp, Homo Sapiens
tttcctggaaagatattactggatggatgcctgtgactcttttgaaggggtggctgattttactgagggtggaagttcatctaacattttacagctgccaaatactgggcgcgggccagactcttcaggcaccaacatggatacccacatagctgtgtagacattgatatgtcagcagaaacctttgtacatacggttctacgctactccacagatacagagaagtaaggaaaaagtgacactgctagagaaaagttaagccatctgggcatggtcagataacaggctaaaaagacatttggcatagtctacagtcatttccagaaattaccatcctagacccacctagtaaacagttgtgaggctccaattttcaagcatcattaaaaaaagagcaagatttgacaggattgactggccgacatcaatgagattggcgatggcaaagggttaacatcagtttccttaggttttcccttttaaagggc

SEQ ID NO: 125424 - DNA, 1174 bp, Homo Sapiens
  misc_feature (11)..(11): n is a, c, g, or t
ggcacgagggngagggtgggccctcggagacccagcttctctgacaagcagattagaccaaaaggctgcctcaaagatatgccactttgaaggaaagcgtagagaagcgtttacataaaagaagacgcttcctgttcagtggacaacttcatgccactttcaaggcacaccgatggccaggtgggacatttgtactgtagcagcacatggcaaaggtgagccagaagcagcctggatgctggctgatccggaggcctttgtgaagagcaaggagagggctccagcccacctccccgcagctctgccccagcccccgtgggccacagggaggctcaaggggagtgaactaggtaaacagattcctggaaactcacatctggatgcagctggaagagttaaatatttacattggtggcttccctggaccaccgcgaacacaaacatccacaccacagggctgagttttgtgcaaatgatggggctttgcattttttattaacattttcctctcacgtggtttacatcaatttataataatctacataagttgaaacagaacatagacaaaaaaatatatccttaccaacttattaaagtcagatattcatgaagggtcccatcctacctgtgtatcagcagaaactggcagccatcagccattgcccagcaagaacaggcagacctggcgtttcttagcctgactcctgctgggcacagcccaccctgctgggcacagtgactggaggttccaggctgcacagtccctggctcctgactcctgccgggcgcagtgactggaggtttcgggctgcatggtccccggctcacaggagaccctgctgggtgtttccttggtgcagtttagtccaggtctggcacctgaccctccccactctgggggtgggatttataaatatgagcctttgcatttctcagcctttgcagccttcccatagcctgttctcacgttgcctcagcgagcttggggctgtggggctccctgaggctgagacgtgaaggtgcccagtctgggccgtgactcactctgccccttcctgtccatcactttggaagcaagcaggagccttctgtgccacacaccgacactcggatgccaggcagggaccttaggaaggggcaggcactgcatctttagactcaagttcaccgcctt

SEQ ID NO: 125425 - DNA, 1513 bp, Homo Sapiens
tttttttgattttctaaataaaataaacctcaactttattcagctgatgtgcttccaaaacaatgggtgtaaatccaaatttgcaaatcaaacccattcaaattcatcagggcaaagggtgtacagaactccgcagtgaagtctaaaaaatcaagactcctctaacttacttggtcttggagtttggcttttcttacagtggtccccctgaagtaaatgtccatgtaataaagagatctcaagttcctcttgataacccacctgttttaaatcacagtaggcacaccaaactcatgtacaaggtcacagaggctggctaccggagtttcttgcatcagctcgacctaagaattcacccccgcctccactagagggtgctccttccctggcctggacccttccctacactgaggcggtggagagagtcacactgttaggccaaggtctatttttcaccaggcactgaaagcagatgtgtgaagagaagtggtcatgtgacaacatgcagtctcaatgcccctgggtgtccagacacactggctgctgtccaccagccgcaggtggtaaagacccaaaaaccacctctgcaatttttattccaaactagaggactggctctgaaggtgcagcatgagggttcatcaaagccaaccactgtcaagtgtggaaagcactggtgcacaccacgaaaagatgtcctatcagtccacgcatgatgggtgcggggacttctgcctcccagagttcaagaacaaatggctcagctgctccctgcagaccttcctccaaagtgtgctgtctggcaggatccttgggtgcctgggggacaggacagccttgccgtcgcagtctcagaatccattttatggattaccaaaagtcctgcgctaggtccctggcaccgcagcagtgctgtgtgtaatggaaatgtcaatgtgcctccccagagttagacagatctaggtctaaagatgctgcaaccccccagtccaccctccagtcactgctttaactggctggcagggccccaacccattttaggagtcacagattgctccttccttggaaacctggggcccatttggcccggaggggtgggaacaatggagatctcctccaaccgaaagtgtgaaattagcatccaggaaactcagttaatctatgacaattaagaaacttaccaaaggggagctatgccacagaggtgcctgaaaggaccaacatgactacagagcagcggggaggggaacaagagaggtgaagaggaacacagaaaggaagggaaataagacagaagacagttcaagcaacaagaaactaacagagcaggtagggcaggacaaccaaaggtagggttaatactgagccggtttccagatctgaaggattttgagtgtcattttatgtcttgccatgaagctgctgtgcccagggctggtaggcctgtggtaaatgagaacatacactaaccaggtctttctgagactttcagtgattcaccacattagatgac

SEQ ID NO: 125426 - DNA, 2250 bp, Homo Sapiens
tttttttaaaaagaaataaaatgttttactcatttacacaaatacacacactgaagtccaccctgggagctggtaaaacaatttcagtctcagacccgtctgttttccagggtcctccgagcctgggcttcctcaagagcgtggcccaagggccccacagcccagatccggcagccccaccaccttcactgaggaggccccgaagctccgttcccgctgctccttagagacaggggaggcagatatgcacaaacgcgcctcggcccagcttggggctggcgggggaggctgtgtcttcaaacctttgcccccagttgggtcagtagaaccaccagtgtcctccccttctacctcccagctccactttggaggctgaggaagcgagaggttttctaggcagatttggagccctggagattgagttcacagtgtatgttctgggggcgctggtgcagtcagcggtccagtctccagcctgcaggcgtgcacactggggtggacgatgggtggccccgcaggtgtacacatttgggtggccccggcccctataccccagtgttctctttgatccagtcccgaaacagagggagccttgtgtacacgcctggcttgttcctctgagcgcagccgtctccccagctcaccacaccggcctggaagatccgcccatccgcctccacgctggacaggggtcccccggaatcaccctggcaggagtccacgccgccgctgaggaagcccacgcacatcatgcgcggcgtgatctgctgcggcaggaggttctcgcaggtggtctggttgatgacgcggatctcacccttttgcaggatcagcgcgccagtgcctccatactgggtgtgtccccagcccgtgacccagatggccttgccggcagggaagacatgggaggcgtccggcaggcagatgggccgcaccatggagctgtactctgccggtttctccagctccagcagcgcgatgtcatagtcgaaggtgaagtcattgaagaaggggtgggagatgatgcgcttgagcctgcgctcctgcaccccaggggcgctgcgctggctctggtcgtgcaagcccaggaaggccgtccactgcgtggggtctgagtacctgaatcctctgtcatcgatgtagcagtgtgcggcagagaccagccagttgggagagatgagggaagcaccgcagatgtggccctggcccagagcatgcaggcttacctgccagggccactcgccctcatccgcatccgtgcccccaacaacacgagcctgtctcgtgaatgaccgcagcccacagtcgcagtccttctcatctgagccgtcgctacagtcctccttcccgtcacactcagggttgcccttgctcaagcagagcccattgaggcagcggtaggtgtgtttggtacaagtgacgacgttcaccttggggcaggaggcctcgtcggacccgtccccacagtcgtccttcccattgcactgctggcttttcgagaggcacttcccattggaacacctgaaggtctgggccggacaactgcacccctgctcgtcgctgttgtctccgcagtcgttcacactgtcgcagacccagaagaggggcttgcagaacttgttcttgcacgtgaactggtggccggcgtcgcaactgcagttgagctcatcgctgtggtcggtgcagtcggcccagccatcacagcgcagctccttccggatacaccgccccgtgcggcacgtgaactgccccgggcatgggtcactggagtcgtaggagaggtattcagctaagaagccggtgtcggtgtaggactgatctgagtggaagcgaactgtgatcttgttgctgttgctggtgacgacgaactgggacctctctccgcagtatttctccccattgatctccacgtagtccttggggcaggtgcccgcaggcacgccgggctccagcaggtagaagaatttgaagcgcaccttcacatgctggttgttgggcacctcaatgttccatgtgcagtcaatgttgggtgggtagtggcctgggtagtacggcggctcgcttgaatgtcccctgggctttacgtaagcggcctccacagctgctcatcctaggcagctggaagaaggtggcctcaaagccgggatgccgccgctcagtgttggttatcagtgtgatgagcaggacgttctggcctcgtgccgaattcgccacccaggcctcgctaccttaggaccgttatagtactgc

SEQ ID NO: 125427 - DNA, 1480 bp, Homo Sapiens
  misc_feature (1293)..(1334): n is a, c, g, or t
cagtcgacggtaccggacatatgcccgggaattcggccattacggccgggataagagttgacccgaaactgctcacttcacattggatgacaccatgttcttcctctttgaaaagaaaaggggaatgtgtcccactagtgaaaggaaaacttttcaacactatccctgctttagtctcagcaaactcagactattctgcttagccttcattagtcatctgggtgtgagtgtgtcttgttctgtttttctttttaataaaacttttaaaccatatatttagcctgtgaccaggggggccaaaccctaagatttctggtaaacctgaagggtggccctcctcagacaatttatctcccagcaatgaccctactacactcgcgtactgtgaatttgggaggaggtaaagttgacttctcctcgtgggcagttttccaatcaccttgtgagtagacacctgccaatattgtttgaaacctttttttaatatgacatcctctcttgtcattctcttctcccctttcccacagacttccctcctgggtccaggttcagaaccaagacttctgtacctagtgctgcctgattggtgaacattgacttcaagtagcatagcccttgtgtgactcacaactccgtgtccttcctaaagtttcgggaagccgggttgtctaatatgcacatttcttattttggtcatatttttactttagtgtcactcaccttttacaaagtgactttgtactcatttagggctctatcggaaatgcttccattttgccttttctacagttaggccaattttgaaatatataaattctatgcaacatttatgttgagttaccaatggaagccaaaagttctcttcccaaactgccaagaatgatacaggccataattgaaatgggaataccttttaagtttcattaggggtggggtgggagtgggacaggaacaagacttgcctagatctttgttgtatcttggggacttttactttgttgtttgatgcttaaacttcaaaattctctgtattcaaatttgattgtggcgaatctacttcaaaaaggaaaaataatccaactttgtggatattaaatggaaggtttgctgttttgatctagttgtttccagtggagcagttttatgaaatatgttctataagatgtacattttttcattgtaacatagaaattgtaaataattgattaaagtgctgcattttgatgaaatttttctagccatttttaaagagaaaactaggaattgagtattttgtgtacggtatgtttccannnnnnnnnnnnnnnnnnnnnnnnnnnnnnnnnnnnnnnnnnacctatttaattttcatttgtcatgaggtttttggatttgccaatgatctgctggacatcatgccccatgtcatagagaataaagctgatgattgtacctgtcttaaattattcatgattcaataaaattgatgcttatttattca

SEQ ID NO: 125428 - DNA, 333 bp, Homo Sapiens
  misc_feature (138)..(179): n is a, c, g, or t
ctataagatgtacattttctcattgtaacatagaaattgtaaataattgattaaagtgctgcattttgatgaaatttttctagccatttttaaagagaaaactaggaattgagtattttgtgtacggtatgtttccannnnnnnnnnnnnnnnnnnnnnnnnnnnnnnnnnnnnnnnnnacctatttaattttcatttgtcatgaggtttttggatttgccaatgatctgctggacatcatgccccatgtcatagagaataaagctgatgattgtaccagtcttaaattattcatgattcaataaaattgatgcttatttattcagaaaaaaa

SEQ ID NO: 125429 - DNA, 975 bp, Homo Sapiens
tttttttggggctgttcacgctgtttatttgcttctctgggaaaatcaagaacatcgggggcctcgtcacacaccagaagcagagggggttatagcaagggcacttcagcgaaggctcgcggctcgagggactcaggcagactccagggaggaggagggggttccacggctgacgcccaggtcacccccgagagggcctctcctcccagccacccaggggcagagcggaggcagggacccaggctcccatccgaggtggcccctgtacctgccctgccgaggctgcaggtggtgactggaccaggaggtggcctgagcactgggcaccaggctggaggtccctagggcagggaccaagttggggcctggttgtccaaagccaacgtgtgagacggtgtctgtgagaatgtgcacgaatgtgcctctggggacgagtgtagctgcccccaggagggaagccccttgccacttccaatgagagggggctgggggcaggctcacattggtctgggtggcaaatgagggtctcctgctccaacccaagaggcttcctgtcccaggctgtgtccctccctccactgcccggacgtgctccaagcccagtagagctggcaggtggggcctgatctcggggtatggttgggaagacccaggacctggtccaagcaggatggagaagaggccgggggcggcccctggggtccccaaattagcaccaggaggaaggagggcccagtgggggcgggagcttcgggaccaggagtggctcactcggtccctgccctgtgcagggggcaggtcaatgaccctggttcgccccgtctagaagatagcccaggggttaccggcccctcccgggtgggggcatgtccccggggttccccctcccccagactccattgtccactggttgggcccacacagggcataggggcacagcagaggggcctgtcctccacccaagcctcgtgccga

SEQ ID NO: 125430 - DNA, 1035 bp, Homo Sapiens
  misc_feature (444)..(970): n is a, c, g, or t
tttttgctgaaatacattatattgtacgtttgagataattctagtacaaagtataataaaactagatgtataataaaccctttaaatcattggtaagtgtacaagtggtggaactgaagcatttactggacaaagtaatgttactctaatggttacttgctcgtgcgttgccacactgtgttataatttgcttcatttccttgctatttgatacatagtgtgcatttctctgtcactgtaactattgtaatgacaaattttcatcttactgcacaatcaaaatgacattgataggaatgaactccagaggctgggcctgaacagggaggtggtcgctcaggcctggtgctcagtcgtacgacctgtacctctcaacttttgccctatctgttaaatatatgctatgtcattaaatgcttttaaatccctcgtgccgaattcttnnnnnnnnnnnnnnnnnnnnnnnnnnnnnnnnnnnnnnnnnnnnnnnnnnnnnnnnnnnnnnnnnnnnnnnnnnnnnnnnnnnnnnnnnnnnnnnnnnnnnnnnnnnnnnnnnnnnnnnnnnnnnnnnnnnnnnnnnnnnnnnnnnnnnnnnnnnnnnnnnnnnnnnnnnnnnnnnnnnnnnnnnnnnnnnnnnnnnnnnnnnnnnnnnnnnnnnnnnnnnnnnnnnnnnnnnnnnnnnnnnnnnnnnnnnnnnnnnnnnnnnnnnnnnnnnnnnnnnnnnnnnnnnnnnnnnnnnnnnnnnnnnnnnnnnnnnnnnnnnnnnnnnnnnnnnnnnnnnnnnnnnnnnnnnnnnnnnnnnnnnnnnnnnnnnnnnnnnnnnnnnnnnnnnnnnnnnnnnnnnnnnnnnnnnnnnnnnnnnnnnnnnnnnnnnnnnnnnnnnnnnnnnnnnnnnnnnnnnnnnnnnnnnnnnnnnnnnnnnnnnnnnnnnnnnnnnnnnnnnnnnnnnnnnnnnnnnnnnnnnnnnnnngaacaggcgttccccctggagtcctcctgcgctctctgttcgacctgcgctacggatactgtcgc

SEQ ID NO: 125431 - DNA, 984 bp, Homo Sapiens
  misc_feature (446)..(459): n is a, c, g, or t
  misc_feature (902)..(911): n is a, c, g, or t
tttttaagatttaaaaaggcattttaatgaacctagccatttattttaccggatagggcaaaaagtttgagaggttacagggtcgtacgactgagccaccaggcctgaggcgacccccttccctgtttcaggcccagccttctggagttcattcctatcaatgtcattttgattgtgcagtaagatgaaaaatttgtcattacaaatagttacagtgacagagaaatgcacactatgtatcaaatagcaaggaaatgaagcaaattataacacagtgtggcaacgcacgagcaagtaaccattagagtaacattactttgtccagtaaatgcttcagttccaccacttgtacacttaccaatgatttaaagggtttattatacatctagttttattatactttgtactagaattatctcaaacgtacaatataatgtatttcagcnnnnnnnnnnnnnnttgaaattacagattatttaaaacagtatcagttttctattccttcttgtatactgacattcttaaccgtcatagcagttgatgcagaaaagccgcatgtcgtgtgttagtaagtgatgccagatacaaatggtttggtctgtagagttaatgtggagctgcactgtggctgcagcaagatcataatatgcgatctgtttaataaaggttagccccatctcgggcacttctaagagtcaagagtcagggtaaccaccagaagtaaatggagagagaatggtgtcaggatattggtacattttgcctctggtgagcacaggaaatattgattaagcaccgctgccttgcataccaacagcactagaggcgggttatttccaacacagcctcacaaaattgaggaacagtttaaatactgagatctaatctatataatttcattnnnnnnnnnntctggccttccctctgcacctcaaacttttgtaacttggagataaagtgtttaggtgtgtttcccccaccctt

SEQ ID NO: 125432 - DNA, 2667 bp, Homo Sapiens
  misc_feature (2386)..(2433): n is a, c, g, or t
ggcaatttatttatgaaatttattttcttatataaattacttatttctctgggcagacagccttcaccttattgcactaatagcacatctgtaatatcaagctacaggacaagtcttaacaagaggtttgtgttcttcaatgtagcacttgtctaccaggcactgtagaggggagtgatgaggaaaagccaggactgcttaggaggtgaaggatgggaggggagggggtcatcatacatccttctgacaattggtttcctcccaggaaggggaacatgcagagcttacttctggattctgggagtgggaagagttgggaggccaagaagcccaatgcaacgctgcagctgagctccttttatttctgagggaagcaaggactcatcttttgctcatttgtaacaaatcactccagcctagctgatgctttggggtaaacaatggagtaggagtcatcatcagaattagaattagcagcaattaacaggcaatacactgccacagtgaggcgggtgtcatccaggtcctggggacctgcaggctgtgtatcctagggagaggtgccattcaagacctggcgctggctctggaagagtctcttaacctaatgcagctgggactcattaggctcagacggctcttgaccacactaattattagcaaagctctggtgttgggttccaaccattggtcaaagctgtaataagactgagtctgtaggcagagtgaagggggtgcctgagtaggaagggggaggcccgctgggagagggtcagtgggcagtgattgtaacatgattaggccttccttgcagatggcggctgtgctgaacggggagtggggttggaaggagccacaagccccctcactctgcctttgtactacactgaagacaggttgctcacatactctaaagcacattcttgatacaggaagaagggcttgtggggaaagcggcgatttggtattgggcaagagccacgttaagccttcatgagggcagccaccacagccttggcattgaggctgcgtaggtcacagtaggtctggccggtgcccacaaagacgatgggtttgcttgtgatgtacgtcatagaaatagcagctcccaccttgtcatcaatggtatcaaatttggtaagaacaatgccatcaatgagccgaggtgtctgagccatagaatggtcagccaaggctctgttgaacttgaccagctggtccacggcttcattgcctactaaggcttctcctacaaacagcaccaaatcaggtgtattgacagtaatgagtttggccagggcagtcatcagaggggcattgtcttgcatgcggcctgccgtgtccaccagcaccacgtcaaagccttggttacgtgcaaaagcaatggcttccatggcaatgccagcagcatccttgccatagcccttttcaaacaactgcaccatggtgcggccaccatgcttctctggagggtgtagggcactcaaacgccgggtgtgtgtacgcagctgctccacggccccagcacgaaatgtatcacaggcagcaatgaggacactgaagccattctctaacaaccagaaggaaatcttggcaagattagtagatttccccactccattaacgccgcagaaggtgacgacataagggcgctggcgacgctgggcatccatgatgtcccggagcatgtctacacgacgctgtggctgcagaatctgcaccagggactcctgtagggcttgctttactgtggaagtcaccgtgctgaacgtccccatcaccttcccttccaacttgttggcaacagattcacagagctggacggcaatgtctgcagccacgttcttagcaatgagatgatcacgcatcttgtccagcacagattccatgtcttcacgactcaagctctttgaacccacaaggcccttcagcataccaacatgccacccagtgttcccttggtcgcactaggtttggtagagttttgagcagccccttcgtcatcagagctgctgcagtccagatcctgaagctgccccccagacccagtccctcgaatcaggttgatgtcctcagacaaggcagcctcaggggttccattggtggtgggagtactgtaatccaacacttctttgttagcacagccacccagttcccacacccggggtgcttttttgcccttctcctttggagcatctgacttcgtggacttgttggacttctccatacccctcccatgcttctgaatgaactcctcgcgcttcctgcggatcagctcctctttggaaagttctactccgttctcaggacccactggaagacctgacttttctgcagggactggtttgctggtagccaaaggaccatcagaaccttccttcttggnnnnnnnnnnnnnnnnnnnnnnnnnnnnnnnnnnnnnnnnnnnnnnnngtgtctcaatcatggacctcacaggtttcttggccttttcagaatcttcaaatttcttcatggtagtgggagcacggatcttactgctctcctctgcttcacgaaggagccgcaggaagtcattttggaaatcaaaagtgccatttaataaacttaaagcactttgctgttggatctctgtgcggtacttgtcccgaaacagccgatgcacgtcatctatcaattttctacata

SEQ ID NO: 125433 - DNA, 428 bp, Homo Sapiens
tttttatttatgaaatttattttcttatataaattacttatttctctgggcagacagccttcaccttattgcactaatagcacatctgtaatatcaagctacaggacaagtcttaacaagaggtttgtgttcttcaatgtagcacttgtctaccaggcactgtagaggggagtgatgaggaaaagccaggactgcttaggaggtgaaggatgggagggggagggtcattatacattcttctgacaattggtttcctcccacaaacgggaacatgcagagctgacttttggatgaactcctcgcgcttgctgcggatcagctcctctgtggaaagtgctacttcgaccttaggacccactggaagacctcactgttctgcacggactggtttgctggtagccaaaagaccatcatgaaccccacttctt

SEQ ID NO: 125434 - DNA, 776 bp, Homo Sapiens
atattatttacataccttcatgttaaataatttatggttcttagataatcattttaaaagttttttccgtttcagacccatagtagactgaatttatcagggatagtttgtggtagccaaggaccatcagaacttcattttggccccttttattgataatctttgctttttccttgggcttttccccccgtgtctcaatcatggacctcacaggtttcttggccttttcagaatcttcaaatttcttcatggtagtgggagcacggatcttactgctctcctctgcttcacgaaggagccgcaggaagtcattttggaaatcaaaagtgccatttaataaacttaaagcactttgctgttggatctctgtgcggtacttgtcccgaaacagccgatgcacgtcatctatcaatttgtctacatatgtcagtgtcaggatcttctgaaaaccaaccacaaacaccagctcaaactggttgtccagtttatacttgagtgtgagtgcctcatgggtgaaggagttgttacctccccgttcctgcagcagcacggaacgaatcaacgcgttaacgggtccggtgcatgagtcgctaacgccctggaagcaccagagcacaagcccgcccttggagaaaatggtgaagaagtcgagcatggcggcagcggcagaggagctggggccggcgccgggaattcaggccgcgttcgccgccgcttcctgctgcgcctcgtgccgaattcggcgcgccgtcgacttcatactctctcccccttaa

SEQ ID NO: 125435 - DNA, 795 bp, Homo Sapiens
ttcctccctctcaagttttaaagaattcttgcgtttctgtggtcagttctttttgaaagtttaatccgttctcaggacccatagaagactgacttttttgcagggaatggtttgctgttgccaaagaaccatcagaaccttccttcttggccccctttttttggctattctttgctttttccttgggcttttccccccgtgtctcaatcatggacctcacaggtttcttggccttttcagaatcttcaaatttcttcatggtagtgggagcacggatcttactgctctcctctgcttcacgaaggagccgcaggaagtcattttggaaatcaaaagtgccatttaataaacttaaagcactttgctgttggatctctgtgcggtacttgtcccgaaacagccgatgcacgtcatctatcaatttgtctacatatgtcagtgtcaggatcttctgaaaaccaaccacaaacaccagctcaaactggttgtccagtttatacttgagtgtgagtgcctcatgggtgaaggagttgttacctccccgttcctgcagcagcacggaacgaatcaacgcgttaacgggtccggtgcatgagtcgctaacgccctggaagcaccagagcacaagcccgcccttggagaaaatggtgaagaagtcgagcatggcggcagcggcagaggagctggggccggcgccgggaattcaggccgcgttcgccgccgcttcctgctgcgccaagcgcgggacacgcctcgtgccgaattcggcgcgccgtcgacttcatactctctcgc

SEQ ID NO: 125436 - DNA, 873 bp, Homo Sapiens
  misc_feature (126)..(126): n is a, c, g, or t
  misc_feature (153)..(153): n is a, c, g, or t
  misc_feature (189)..(189): n is a, c, g, or t
  misc_feature (429)..(485): n is a, c, g, or t
tttaacacagcttcgctccaactgcaccaggttcttgtgcatagttggtgatttggcagccctagtctcagagtgtgcagtcagatctgagctgcccccagaccattcctcgatcagttgattctncagaacaggcagcctcagggttccatntgtggtgggagtactgtatcccacacttctttgtangcacagccacccagttcccacacccggggtgcttttttgcccttctcctttggagcatctgacttcgtggacttgttggacttctccatacccctcccatgcttctgaatgaactcctcgcgcttcctgcggatcagctcctctttggaaagttctactccgttctcaggacccactggaagacctgacttttctgcagggactggtttgctggtagccaaaggaccatcagaaccttcnnnnnnnnnnnnnnnnnnnnnnnnnnnnnnnnnnnnnnnnnnnnnnnnnnnnnnnnntgtctcaatcatggacctcacaggtttcttggccttttcagaatcttcaaatttcttcatggtagtgggagcacggatcttactgctctcctctgcttcacgaaggagccgcaggaagtcattttggaaatcaaaagtgccatttaataaacttaaagcactttgctgttggatctctgtgcggtacttgtcccgaaacagccgatgcacgtcatctatcaatttgtctacatatgtcagtgtcaggatcttctgaaaaccaaccacaaacaccagctcaaactggttgtccagtttatacttgagtgtgagtgcctcatgggtgaaggagttgttacctccccgttcccctcgtgccgaattcggcgcgccgtcgacttcatactct

SEQ ID NO: 125437 - DNA, 879 bp, Homo Sapiens
tcgttcagagttccccagagagggcttccgccgaaacatcctcgcaagatacaccccacactccacagcccacaggtgtgcatatgtggactgcagaagacttcggagctcgtaccagagtgtaacaaccacgggtgtaagtccatctggtactgtagattctggccaggccaaagtcagccagcttgactgttccaccacttgtcaccagaaatgttctctggcttcagatctcggtgaacgatgcaattggcatgaaggaaatctagcctcttagaaactggcgcatcagatccttgatcgtttcggctggcaagcctggtgggggtgccttgtccagatatgtccttaggtcctggtctacatgctcaaacaccagggttaccttgatctcccggtcagttcgggatgtggcacagacgtccatcagccggacaacattgggatgctcaaaagcctccagtcgcctcagtaaagccacctcacgaactgtgctgatgggaaggcactcactccacttcctcactccattggggactctcacactcttgaggtccacaatagtggccactgtggggatcacgggccttgtacactgtcacacataggcaccgacaaccaatttcagccactggctctatatcgagaggtagccattctcagatcaagggagaccctcacgccagcccggggtgctgtggggcggcccgttatcggggccccggagcctgttcctacggccccatacacccgagctcggtccggagcagctgacgcagagggcccgaccatagacacaggccgcaagctagagaggccccctcacccccaccctcaccatcctcgtgccgattccaccccagcctcgtactagcggtt

SEQ ID NO: 125438 - DNA, 1083 bp, Homo Sapiens
  misc_feature (990)..(990): n is a, c, g, or t
catcgtcagtaccacgactgcacgggcgggccctctgggggaaaggttccaaggggcaaggaaacatttcgagccagtcatcctctggaggcaaccccatcaggtcaaagattttgccccaactggtcggcttcagagtttccacagaagagaggcctttcgacgaaacatctctgcaaaggatacagccaacactccacatgtccacaggtgttgcatatgtggactgcagaagaacttcgggagctcggtaccagagtgtaacaaccacgggtgtaagtgccatctggtagctgtagattctggccaggccaaagtcagccagcttgactgttccaccacttgtcaccagaatgttctctggcttcagatctcggtgaacgatgcaattggcatgaaggaaatctaggcctcttagaaactggcgcatcagatccttgatcgtttcggctggcaagcctggtgggggtgccttgtccagatatgtccttaggtcctggtctacatgctcaaacaccagggttaccttgatctcccggtcagttcgggatgtggcacagacgtccatcagccggacaacattgggatgctcaaaagcctccagtcgcctcagtaaagccacctcacgaactgtgctgatgggaaggcctcctccacctcctcctccattggggactctcacactcttgagggccacaaagtggccactgtggggatcacgggccttgtacactgtcccataggcaccgacaccaatttcagccactggctcatatcgagaggtagccattctcagatcaagggagaccctcacgccagcccggggtgctgtgggggcggcccgttatcggggccccggagccggttcctacggccccatacacccgagctcggtccggagcagctggacgcagagggcccgaccatagacacaggccgcaagctagagaggccccctcacccccaccctcaccatgtgaccagctgccnaagaggcgcgcggaaactgggagggcggggcgaacgccggacgtctagggcacgtgaccgccctcgtgccgaaatcgccacccaggcccgctc

SEQ ID NO: 125439 - DNA, 2152 bp, Homo Sapiens
  misc_feature (199)..(199): n is a, c, g, or t
  misc_feature (309)..(317): n is a, c, g, or t
  misc_feature (540)..(550): n is a, c, g, or t
  misc_feature (752)..(763): n is a, c, g, or t
tgataacgggcggtacgtgctagtgcggggataaaaggcgcggggggataggaggcgcgcacaacgggtggggtggggataccgggggcgggaaataggtataacgggtatttacccgtgagcgcgccgtttccggggtcccggtgagggagagctgtagtgttaatttggcggattgtctacacgcagatggggacanaggcgcgcaacgctgggcgggattcgggagtgatgatcgcgcacgcctgcgggttgggaaaaagcggatctacgcgggcggttaacgacagagggcatgcttaataagcnnnnnnnnnccggccaaccggtagatcgggataaaagatggtgggcgacgtgatgggggcggcgggggcggggaaggtgtttagatatgcgtagagaacgcccggcccttatgggggtcccgcggcttggtgtgataaataagccccagggaaaggggaggccaaggaagaatgcgccgctgagggggatggtggctcgaaaaacgggtgggtttgtcggcggccggggcgnnnnnnnnnnngggggggagatgctcgcggccctctttgtggtgggcgcagggttctctgtagggaagacgagagtgggccccgttttgcgacttcgcctaggggggccgcgcgccacaaaagagaagttgtatagaaatttttctcgagggcgcggggtcgggcgcacaggatttttttgtattgggtcggagattgggcagggtttggttnnnnnnnnnnnngaccattatttctttgttttgtttttcctgtataaaaaaggaccccaaatataaaggtagggaaagggacaagagggaacataccccttagtgtagagaaatgggaaggagaaggagaagcctcaaaaggagaggtgggaggggaatgtcattaaggcagcaaagtaatctctgtagaaagatggaggaggaccctccatagcctcagagataaaggcaaagattgccctctcagtgtccagaagggaaatggcagcttttcttccttccatggcagccactccattgctcactccggattaccttcatccttatgtagataagagtgctgcagagctcgaaaggcagagattcgcttgtgtgggttaaaagtcagcatttccagcagcagctgtgctcccgactcctccatctcaggtaccaccgactgcactgggcggggccctctggggggaaaggctccacggggcagggatacatctcgaggccagtcatcctctggaggcagcccaatcaggtcaaagattttgcccaactggtcggcttcagagtttccacagaagagaggctttcgacgaaacatctctgcaaagatacagccaacactccacatgtccacaggtgttgcatatgtggactgcagaagaacttcgggagctcggtaccagagtgtaacaaccacgggtgtaagtgccatctggtagctgtagattctggccaggccaaagtcagccagcttgactgttccaccacttgtcaccagaatgttctctggcttcagatctcggtgaacgatgcaattggcatgaaggaaatctaggcctcttagaaactggcgcatcagatccttgatcgtttcggctggcaagcctggtgggggtgccttgtccagatatgtccttaggtcctggtctacatgctcaaacaccagggttaccttgatctcccggtcagttcgggatgtggcacagacgtccatcagccggacaacattgggatgctcaaaagcctccagtcgcctcagtaaagccacctcacgaactgtgctgatgggaaggcctcctccacctcctcctccattggggactctcacactcttgagggccacaaagtggccactgtggggatcacgggccttgtacactgtcccataggcaccgacaccaatttcagccactggctcatatcgagaggtagccattctcagatcaagggagaccctcacgccagcccggggtgctgtgggggcggcccgttatcggggccccggagccggttcctacggccccatacaccccgagctcggtccggagcagctggacgccctcgtgccgaattcgccacccaggcctcgctaccttagaaccgttatagttactgctccggtcg

SEQ ID NO: 125440 - DNA, 1147 bp, Homo Sapiens
tgtctaggtagcgaggctgggttgatgaattcggcacgaggcgcgggtcccgtgcgttctgcagcacttcccgcgccgcgcccccagcccagtgcgccggctctgtgccggggtgcccgggcggtcgggagaatgagccgcatctaccacgacggcgcgctccggaacaaggcggtgcatagcgtccggctgccagggtgcctgggaccccgccgcccaccaggggggaaatggtgtcctgctggagggagaactgatcgatgtatctcggcacagcatcttgtgacactcatgggaggaaggagcgctactacgtgctgtatatccggcccagtcacatccatcgccgtaaattcgacgccaagggaaatgaaatcgagcccaacttcagcgccaccaggaaggtgaacacgggcttcctcatgtcgtcctacaaggtggaagccaagggggacacttgacaggctcacgcccgaggcgctgaaggggctggtcaacaagccagagctgctcgcgctgacagagagcctcacccccgaccacacagtggcgttctggatgcccgagtcagagatggaggtgatggaactcgagctgggggccggggtacggctgaagactcggggcgatggtcccttcctggattcattggccaaacttgaggctggaacagtgaccaagtgtaatttcactggtgatggaaagacaggggcatcctggacagacaacatcatggtccaaaagtgttcgaagggtgctgcagcggagatccgagatcatggggatggggcagaggactaggagtgggtaggtacctggtgttggtgcagttgtatctcctggcaggagcatggtacatactggttgaggttgtgggtaggatgagaagacgacaggatgaatcttaccccccagctttagtggaattctgtgaaacacctgggaatgtgttagcatcaggagaattcctctaaggtatgaagaatgacaacctgggacctttcttgtaggtggctctgaacctaactattccccaaagattcccaagtggtaggaaggagggggtgcagagggatattaatcatggtcattaagtctcaaaacatttctacttcaagtgaatacattaaccatgctgaggcagttg

SEQ ID NO: 125441 - DNA, 753 bp, Homo Sapiens
  misc_feature (742)..(742): n is a, c, g, or t
tttgtctcctatcaaaatttattgaaatggtagatttttggtaagtacagaaacacaagcgaaggaaccaggaggaacgtgcacccctctacctgtggggcagaggcacgtttcccttttaatgttaaaagcaaacagaggtgggaaacagctttctatcctgaagccgttttaactgctcaacccttagattactataaacaagagaggaatggattgcattagtcgctggttgaaagcagcaatgccatttcctttcccataataacactgtttagctcagtcccttctggggctaatcccctattacacccaccggaaacacagatactaaccaaagcatgtgagtctcttccctgagtccatttctgctaaagcttgtctgaaagatgaattggtccacggaagccaggtgacctactggcttgtttaatgatgcctgggcttcctccaggagcaacacaattccctccaatctcagctctccttatccctgctagagctcacaagcaggctagatatcacccgaggagctgagccccctccagtctgaggcagatgtgggaagaaggccaacaagtcacaagtagatctctggctccaactctgctcagcagaaatgcctacaatttgcccatcttcagtcctgcgagcgtcagagatgaagcaagtttcagatgcctagaagctttactctctgttcctccaggattcctgcggtcacaccttgcaaccagtctcncactcatctgc

SEQ ID NO: 125442 - DNA, 1509 bp, Homo Sapiens
  misc_feature (252)..(253): n is a, c, g, or t
  misc_feature (255)..(256): n is a, c, g, or t
  misc_feature (258)..(259): n is a, c, g, or t
  misc_feature (261)..(263): n is a, c, g, or t
  misc_feature (265)..(269): n is a, c, g, or t
ccaggaaacgctcttcgggtttttccccgcccccggggcctttttttcctatttgggtggggagaattcccaaagcccccttagtttcatggccccaagggatttttcctaagggaaacccagccttattggacccaatgttccccctttacccttaactgggggccccgcggccgcccaaaacgaaatgggttctagaaaagacttcctccgaagggcccgagggcgggccgacaaagtttcttttttttnntnntnntnnngnnnnnttccaagagcaaacaaccaaactttatccagaaaagcatatttgtaatcaccactaaacaatgaggcacatcggtcccctctccccaaccaccctcactcttcccaaacccactctctcttttggcttttatagaacactgtagaaatcctttcctgagtctgcaaatggccccagactgggatgggagctgcccagagtagtcttgggctggactgagtcctggtgcccagagagggagacctatgcaactgcctccagtatccaaaagttctgggggcaggtcgggtggccacccctatggcacagggccttgagggagggtgagtgtggtggcggtcttacgtgttcttctcatacctggcagacagagtgagcacaagccgctggaagccaagcgggaaggcacatctagaagggcagtgagctctggaatgctacaggcacgtgtggatggatgaggctccatggcggccaaggagatatctgctcctgagtaaggtcacctgaccacagacagcaccaggggctggggggctaagaaggagatcttgagaaggatggacctgagctaaagatgtaacttagatggtgatctgaaaaaaggaaaaaagaataaacgctggaactcaaatccactgtttagggtacaggagtacacagctaagttccaggtatccagaatcttgtgtccaaatcatagcacaaggagaacaggaattctcttgagttaaggcaaaatcaatcttcacccatctgggctcttccattgcatggtttggaaaggaaggggctgggcagagatcattcctctccccatctccccctactgccagtgaagactctgaaagcttctgcaggccaaggccagaatggtgttgccagcccagggcagcgggccctgagagcggtcggtgtgaccagctctgggaatctccatggcctcagcaacatggaaaccttacaggcccagccagcaggtcaccccagcgccagagagtggttcttctctttggtaagggagacccaccctgtcagctgctccagatcagtgccgggatctcttgcaggtgactttcctttagcctgggaaaaccatctgaataactttggcttcatttctccaacatgtaaaggaatgttcaaattccccagttcagtctctggctagcgacgcgtgggtcgacgatatcccgggattccgaccgtaccagcctgctttttgacccactgttcatatt

SEQ ID NO: 125443 - DNA, 717 bp, Homo Sapiens
  misc_feature (682)..(682): n is a, c, g, or t
taacattcaaactgtgttttattgtatcaccaatggattatctactttttctcatgcttcaaaaatgaaaaacttttaaaagtaattattgtctggatatctttagcccatcatgcaatgttttcataagaaaaccaagctcaacataatacgttttaagcaaacagggatttaacatttaattccaattcaccaaatctttattgaacatctgttgtcagatgtagacatcctattaaaaacaagtacctctatttcagttggtttatttctgtaccatctcctacccacagccgtaaagaagacattaaaaaaggcttactgaaattatactatatagtatttttttagataagacacacacacacttcatgtctatgacttgtttacctaagataaaagggacctaattcaacttactttagcaaacatactactgccaattaatcatttcttaacccttttaggccagtgatacatgtcttgatgtgattggtggccgggacacacctggagctaaagtagctctatggactgaacatgggcaattcaggcagaagtggagactgaataaaaatggaactatcagctcttatctcagtgatcaacttgtccttgatgttaaaggtgggcctttgatgatacccactgttgtgtccctggatattagtttcagttccanatctcctcattttgggtaaaggacatccttatgta

SEQ ID NO: 125444 - DNA, 1466 bp, Homo Sapiens
  misc_feature (609)..(609): n is a, c, g, or t
aaacaattcattctctaaaagagaaacatgaacttaaataattttattaataggaatctactacctgtaaaagttttatttcaaaaagggttaaaaagtagggaaactctttaaactactgaccaagactgccaccttcataattcagatgagttagtgcagagatggccagggccagaggtcgcccagaacctgcgtgtgcagactgcgctctgttagtcttctgcctgtcagcctcagcccagtctgtcttgcttaagggtgcgcctccccagggctggatgatgctgtgctcaagcctgcgggtaggagggctccagcttgcagatcccatgcgtggatgccatatatagatggttgaaaccagcatcagaggaaggaaggtgaccttacagccactgccgagaccaacgtgtgccctggcccagtcacagctggaaatcccagggctggtctacacccgactctggtttggtttaattaggtccttacgtgttggtgttgtcccaggcagttggcatggcatcagcactgagggtgtgagaccctgaggactcagcctcccgtcctgccagtagactgcctgcagccccaccctctttccctcanaaaagaaggaagccaggcaagagagcagaggcccagggcgggggagtgaaagggccaatttaatgagaaactacaaactgagactgggccacgattcacagtgacaggaggccatgcagtggcagtgcgagaccaggaaggacagtggcaggatacagtggtccaggtgagcaagttcacaaaccattcaggaaataaagacagggcgaggctggtgtccaccaaggcagttctaccacttgtggctgctccttcctcgtccctagcccagtgtgcctgcaggagcaggtgtgagcaggcacagcaacagcctgtcagctggggtgaggggcccggcacttacagggaagaaaatccatggagaaggctctgcacatccaagcgcacccacaagggggaccctctgccatctcttgcccagttgggatacaccagccaccaggcagaggtcatacccacacgcagtgaggacacagggcagacgggaaggggctaggctcaggggctccttccggccccagcaatacagggttcacagaggcatggcctgaaagggggtctgcacactgactcaaagggacaagttccttcttagctaccagggtctgatcattcacccaggtacagtgtcctctctacctgacaccaggcagctctcgggcactgggacagggtattagacatcctgggcttctatacctgagagttctgagggccagagttggcagttttacttccagccaccatgccccacctctagcaccccagaggcgcaaagtacccagaaacaaacccaggctttgtgaccctgtcctacgtgggcccacctgactccagacaacttacccattctcggc

SEQ ID NO: 125445 - DNA, 1059 bp, Homo Sapiens
  misc_feature (791)..(791): n is a, c, g, or t
  misc_feature (794)..(794): n is a, c, g, or t
  misc_feature (802)..(802): n is a, c, g, or t
  misc_feature (866)..(866): n is a, c, g, or t
  misc_feature (894)..(895): n is a, c, g, or t
  misc_feature (1006)..(1006): n is a, c, g, or t
ttccttattcctgatgcaggaagcttcatgtttaatgggtggagatttttaaaaatctgtttatatcaagattaaatcaaagcctttattaaacattcctctttcaaacagcctttcaaacctatacccctccccagacttgggaactgccagagctgtgaatcattttcatctgacaggggtcagatccattcagacctcacaatattgaaaagccaagccagacacaccacactgggcagagatccaccgtctgtgccccactcgggatataggaaaaaggttggtagcgccagctctcaaaccagagctcaagcacaggagaagaggaacccacagtctgaccctgctattatagttccagacctagccatgctaaactggacaaacagctcctgggctgccatttgctgaggcgcatgcgtgtgcttttccttctcttctccacaggaaaaggtgagagatggaggaggcaattttcagttgtgtgtgggtttgatttaaggctttggctgtggtctattgatattaaaatactttctgggaacgccatcttccaagctccccattggaacaaatgtattttcaaaaatgaaaacattgagcaaagatgtggagcggcaatgctgctgctggcccaggcctctcatgtcaggatggtgtcgtccacctgctccgtggagtcggcctggctggccagcttcttcagggaccttcggttaacctcgttcagcacctccaaactggccacatccaggatcttggagagggactgaaacacctcttcaccntgncgcatctngaggagggtgacaattgctggtcgctgtaggccctgacacggtgttctatccttggtgtgtcangagagcctcaggatgggctgatggctgnnggtcaggggagcagtggtcctattgcccacaatatctctcagcacagctgattcgctgctcgtgcgattctggctcgaggcaatcctataggagcgataatcgtacagtcnactgttctgtgtgatgtatcgtcacatcaacacaacagccgagatagtgtagc

SEQ ID NO: 125446 - DNA, 792 bp, Homo Sapiens
tctagaggatcctgtggatgaggaacgtcactcatgggaccttcatctacaaagactggagaaataccacctttcctgctcaaaaaccagcaaaattagtgttttcatcaaaaggaaagatctcaaattcaagagactcatggacaacaaggattatactccacaggaaagaatgggaccttgtcaatgcaacaaaacactcttctgtcctttttaatgtaaacagagttacaaaaaccactccaaagtgaaggctcccatcctacacacagatatttgcttactgtgtgggccgatagctgtgaactatgtaaggttttttaaacaatagtttaaatttttagactttaaagacactaaccatataacttttatgtttcttccagtttctctccctccccccgcattttgctgcatatgcctttaaaatcaatgcagtattaccattaaaacatgggactctaactaaagccacttaggagcagacagcagcgttgttaggtactgaagggttcttcctccctactgttaccattgaagctgctagtcattggcaatcattttaaaccaaaaagctgctggataacatttgtcattcatattctttgcaagcattactttagcattttagcatgtttggggtcataaacagaggaagtatcagttattgatatctacttctattggagtccatgttgcatttcttgtgaactataaatggtgcttctcattttctgataatttttctcttgctaaataaatgtattaaaagatattttcataatgccaacc

SEQ ID NO: 125447 - DNA, 1412 bp, Homo Sapiens
gctcaagaagaaaaagaaggactgaactccatcgccatcttcttcccttaactccaagaacttgggataagagtgtgagagagactgatggggtcgctctttgggggaaacgggctccttcccctgcacctggcctgggccacgcctgagcgctgtggactgtcctgaggagccctgaggacctctcagcatagcctgcctgatccctgaacccctggccagctctgaggggaggcacctccaggcaggccaggctgcctcggactccatggctaagaccacagacgggcacacagattggagaaaacccctcccacggtgcccaaacaccagtcacgtcgtctccctggtgcctctgtgcacagtggcttcttttcgttttcgttttgaagacgtggactcctcttggtgggtgtggccagcacaccaagtggctgggtgccctctcaggtgggttagagatggagtttgctgttgaggtggctgtagatggtgacctgggtatcccctgcctcctgccaccccttcctccccacactccactctgattcacctcttcctctggttcctttcatctctctacctccaccctgcattttcctcttgtcctggcccttcagtctgctccaccaaggggctcttgaaccccttattaaggccccagatgatcccagtcactcctctctagggcagaagactagaggccagggcagcaagggacctgctcatcatattccaacccagccacgactgccatgtaaggttgtgcagggtgtgtactgcacaaggacattgtatgcagggagcactgttcacatcatagataaagctgatttgtatatttattatgacaatttctggcagatgtaggtaaagaggaaaaggatccttttcctaattcacacaaagactccttgtggactggctgtgcccctgatgcagcctgtggcttggagtggccaaataggagggagactgtggtaggggcagggaggcaacactgctgtccacatgacctccatttcccaaagtcctctgctccagcaactgcccttccaggtgggtgtgggacacctgggagaaggtctccaagggagggtgcagcccttttgcccgcacccctccctgcttgcacacttccccatctttgatccttctgagctccacctctggtggctcctcctaggaaaccagctcgtgggctgggaatgggggagagaagggaaaagatccccaagaccccctggggtgggatctgagctcccacctcccttcccacctactgcactttcccccttcccgccttccaaaacctgcttccttcagtttgtaaagtcggtgattatatttttgggggctttccttttattttttaaatgtaaaatttatttatattccgtatttaaagttgt

SEQ ID NO: 125448 - DNA, 1549 bp, Homo Sapiens
  misc_feature (109)..(132): n is a, c, g, or t
  misc_feature (1047)..(1047): n is a, c, g, or t
  misc_feature (1100)..(1130): n is a, c, g, or t
cagtcgacggtaccggacatatgcccgggaattcggccattacggccggggagtctgaggcaggtgcccgacatggcgagtgtagtgctgccgagcggatcccagtgtnnnnnnnnnnnnnnnnnnnnnnnncctcccgggctccggctccggcttctgctgttgctcttctccgccgcggcactgatccccacaggtgatgggcagaatctgtttacgaaagacgtgacagtgatcgagggagaggttgcgaccatcagttgccaagtcaataagagtgacgactctgtgattcagctactgaatcccaacaggcagaccatttatttcagggacttcaggcctttgaaggacagcaggtttcagttgctgaatttttctagcagtgaactcaaagtatcattgacaaacgtctcaatttctgatgaaggaagatacttttgccagctctataccgatcccccacaggaaaagttacaccaccatcacagtcctggtcccaccacgtaatctgatgatcgatatccagaaagacactgcggtggaaggtgaggagattgaagtcaactgcactgctatggccagcaagccagccacgactatcaggtggttcaaagggaacacagagctaaaaggcaaatcggaggtggaagagtggtcagacatgtacactgtgaccagtcagctgatgctgaaggtgcacaaggaggacgatggggtcccagtgatctgccaggtggagcaccctgcggtcactggaaacctgcagacccagcggtatctagaagtacagtataagcctcaagtgcacattcagatgacttatcctctacaaggcttaacccgggaaggggacgcgcttgagttaacatgtgaagccatcgggaagccccagcctgtgatggtaacttgggtgagagtcgatgatgaaatgcctcaacacgccgtactgtctgggcccaacctgttcatcaataacctaaacaaaacagattatggtacataccgctgtgaagcttcaaacatagtggggaaagctcactcggnttatatgctgtatgtatacgatccccccacaactatccctcctcccacaacannnnnnnnnnnnnnnnnnnnnnnnnnnnnnnccatccttaccatcatcacagattcccgagcaggtgaagaaggctcgatcagggcagtggatcatgccgtgatcggtggcgtcgtggcggtggtggtgttcgccatgctgtgcttgctcatcattctggggcgctattttgccagacataaaggtacatacttcactcatgaagccaaaggagccgatgacgcagcagacgcagacacagctataatcaatgcagaaggaggacagaacaactccgaagaaaagaaagagtacttcatctagatcagcctttttgtttcaatgaggtgtccaactggccctatttagatgataaagagacagtgatattggaacttgcgagaaattcgtgtgtttttttatgaatgggtggaaaggtgtgagactgggaaggcttgggatttgctgtgt

SEQ ID NO: 125449 - DNA, 1412 bp, Homo Sapiens
tttttaaagaaaatacagtgaagacactaagcaaacactggtccaatgggggctctcctcacttcccgagatggtcaaatggcacacttgtctgtgaggctgggatccgggagacctcttgccgcccagtgaggtctgaggaggagacgttggcgggcgcacccctgtgcagcctcatactcaccttcctctcccggtcgacccgcgagatcgctctgggagaagtattgccagccggctggatgcgggaggctggcgtggaagccacgggctcggcggcactgcggagccggttggcagtggcccccgtgggtgggccagggggcagggctcgggtcgcggacccccgtagctgccccatcctctcctcgcgttcgtgttctcgccgctcccggtccacatcctcgggattccgggctgcaccgaatttcagcatgttccagtcaaagacgtagtcataggagaagccctgccggtggaagaggttgcggaagagctgacgtaggtaagagtagtcgggcttgtcgtcaaaccgcagggagcggcagaagttgaggtatgttgagaattcggagggatagcctttgcagaggacctcgatgggcgttgacatcttcttctcgctgatccgttcatacttctggcgcttggtggctgctttgagcccctgccagggcagggagcccaggttgaagtacatgagcacgtagcccaggctctccaggtcatctcgacggctttgctcaatgcccaggtgcgtgttgatggaagcgtagcgggccgtgccggtcaggttcttgttttcccggtagggaatgtgctggtgggtgcgggcgtcccggtacttcttggccaggccgaagtcgatgatgtagaccaggttgcccttcttccccagccccatgaggaagttgtcgggcttgacgtcccggtggatgaagttcttggagtggatatactcgatgcggctgatcatctggtcggccaagagcagcaccgtcttgaggctgaatttgcgggaacagaagttgaacaggtcctcgaggctaggccccagcagctccatgaccatcacgttgtagtcgccctcagctccgcaccacttgatggacgggatccccacgccaccctgcatcatcttgtagaacttgctctcgatgtgcagctgggggtgctttgtcttcacacactccagcttgatggcgacttcctcaccagaggcgatgttggcacccaggtagatatctccgaaggacccgctcccgatcttccgtcccaggcggtacttgttccccacacgtagctccatggctcactcttgcccgccgggaaggcgccgatgccgggccactgctcgggggctgccgcggcgcctcggtgccgattcaccacccagcctcgtactagcctaa

SEQ ID NO: 125450 - DNA, 980 bp, Homo Sapiens
  misc_feature (73)..(73): n is a, c, g, or t
cttccaaagtcattcttttccggggattggtttcaatttccaaagggtgcgtggttgaatggaagggcgttanccgcgccgttcccccgtggaggtttcttgttttccacgattagggggatgtgctgggtgggtgcgtgcatcccgggtacttcttggccagcccgaaagtcgatgatgtacaccaggttgccctttcttccccaggcccatgaggaagttgtctggcttcacatcccggtggatgaagttctttgaatgaatgtattcgatgcgactgatcatttggtcagcaagcagcaggacggttttgaggctgaatttcctggagcagaagttgaagaggtcctccaggcttggccccagcagctccatcaccatgacgttgtagtccccctctgccccgcaccatctgatggtggggatgcccactcctccctgcatcatcttgtagattttgctctcaatgtggagctgagggtgtttggttttgacacattcaagcttgatggcaacctcttctcctgcagcaatgtccgtaccgagatagatgtctccgaaggagccgctgccgatcttccggcccagccggtacctgttcccgactctcagctccatggcggcggcggcccgattcgctcctgccctcccggccgcttcctgggtctgaactctgggaggcggcgccgctgctgccgctactgcgggtccggctcccggctccgcccccctcacggccccgctttcaccatcgctttcctgtcgccccgccgctcccagcgcctcaatacggggcggatgggacagtccgagcgccgccgccgctgctccggcccctaccggtcccgcttgccctctccccgccgcggatggactcggatcttccgggcctaaatcccctttcagctgcctaaaggagcctcgtgccgaattcgccacccaggcctcgctaccttaaacccgttagagttacttgccta

SEQ ID NO: 125451 - DNA, 1223 bp, Homo Sapiens
attataattcggtatacgcgctacttctgagaaggactgcggacctgtgttaccatgttactccaggttgatataccgcgctgcgcatgggtaattttcacaaaggatcatcagtatgtggttacggtccatagatcgtttggagaaataatgagatggaagctgaggcggcaaccgatatgtctgtgctctgttcccgttccggtacccgatattcctacgggggaaaagccccctttcgcattaaacacgattttccgcaaaatgtcgctccctgtgttgtaatagtttcagcttttttccttcaaaaccgcaaggggaccgggcagaattttcaggttatggtggcaaatttcggaaggggtaggcctttaccccaccacttcggatggggggtggacattttcttctcggctaatccttttcgtatttctgtctcttggtggcagccttcagcccctgccaggggagagagcccaggttgaagtacattagcacgtagcccagagactccaagtcatctcttcgggattgttcaattccaaggtgcgtgttgatggaggcgtaccgcgccgtccccgtgaggttcttgttctcacgataggggatgtgctggtgggtgcgtgcatcccggtacttcttggccagcccgaagtcgatgatgtacaccaggttgcccttcttccccaggcccatgaggaagttgtctggcttcacatcccggtggatgaagttctttgaatgaatgtattcgatgcgactgatcatttggtcagcaagcagcaggacggttttgaggctgaatttcctggagcagaagttgaagaggtcctccaggcttggccccagcagctccatcaccatgacgttgtagtccccctctgccccgcaccatctgatggtggggatgcccactcctccctgcatcatcttgtagattttgctctcaatgtggagctgagggtgtttggttttgacacattcaagcttgatggcaacctcttctcctgcagcaatgtccgtaccgagatagatgtctccgaaggagccgctgccgatcttccggcccagccggtacctgttcccgactctcagctccatggcggcggcggcccgattcgctcctgccctcccggccgcttcctgggtctgaactctgggaggcggcgccgctgctgccgctactgcgggtccggctcccggctccgcccccctcacggccc

SEQ ID NO: 125452 - DNA, 2297 bp, Homo Sapiens
  misc_feature (38)..(38): n is a, c, g, or t
  misc_feature (300)..(329): n is a, c, g, or t
cacctctcggttcacagtcctctcccaagggaccaganacgcatcttccaccttgaatcttgggactcccaattgtcctgctagggtctcaaagcctctgcttccaagctctcagctgcctgcccacctcctggggaagaagcgcgcagtgctttgcctggtaacacccactgcacccctgccccgcggcagcctgcggtccctaactgctctccgagggcctcaagagttcctgacagcaggcatgtcaattacgggaggagggagggtgagacgccaaaatcaggttgaagaggtccnnnnnnnnnnnnnnnnnnnnnnnnnnnnnngacttttgatgagaaatctcctctccaaagcggacaataaaacactgcaaaacaaacacagcacacacccttgagatccacctgcaccttctccctgcccgactccacctcatacactaactccaagccagcctgtctcagaattccttagtcaacattttttttgtaagactgcaaaaacagacaagaaacaataaaaagacagattttctttacacagatttaagccaataatttttagcaaaatgatacaaaactgtcttaaccaagtagaagattggtagttacagtggaatcgtcagggagtacagggcggccaccactggagggagctgaggccctggaaaaggagtctgattctctgcaattctctctctgcttttcttcccagccccgttacaaccgagttcacgtggggggccgcagtgcagccccagcggtggcagctcttggagtctgtccgtttagtatgtttcccccacgagcgtcgctgggtgagtggcctggagagctcccggtgttaacatttcgatcctagaccgggggacgtgtcactagtaaagccattggtaacagagtagatcagccatgcattgtctgcccttcacagcaataaggagagttctcatcggtgcacgacagactgaagaccactggaagccacccgaccaggaatccagtgctgccttccgatgggagacgagcagctacttgccgtggtgttcgaaaggaatgctattctgtgaggtggacatgcgagaggtatcttgtcggcctgtgaggtcggacgaggagatgttgacgggggccccgcggtgcagccgcatactcactttccgctctctctccatgccggagacgggccggggggaggtgttagccgtgtgtgaggtaggggtgaggggtgtggggggagccacttcctgcgtcccccgcaggcggccggaggctgtggaagggaggccgcgggtagccgggttccgcgagtgtctcagccgctcctctcggtccctgcgctcccgctcggcgtcatcggcggcccggctggcaccaaatttgagcatgttccagtcgaacacgtagtcataggagaagccctggcgatggaacagattccggaaaagctgccgcaggtacgagtagtcaggcttgtcgtcaaaacgcaaggaacggcagaaattcaggtatgtggcaaattcggaagggtagcctttacacaacacttcgatgggggtggacattttcttctcgctaatcctttcgtatttctgtctcttggtggcagccttcagcccctgccaggggagagagcccaggttgaagtacattagcacgtagcccagagactccaagtcatctcttcgggattgttcaattccaaggtgcgtgttgatggaggcgtaccgcgccgtccccgtgaggttcttgttctcacgataggggatgtgctggtgggtgcgtgcatcccggtacttcttggccagcccgaagtcgatgatgtacaccaggttgcccttcttccccaggcccatgaggaagttgtctggcttcacatcccggtggatgaagttctttgaatgaatgtattcgatgcgactgatcatttggtcagcaagcagcaggacggttttgaggctgaatttcctggagcagaagttgaagaggtcctccaggcttggccccagcagctccatcaccatgacgttgtagtccccctctgccccgcaccatctgatggtggggatgcccactcctccctgcatcatcttgtagattttgctctcaatgtggagctgagggtgtttggttttgacacattcaagcttgatggcaacctcttctcctgcagcaatgtccgtaccgagatagatgtctccgaaggagccgctgccgatcttccggcccagccggtacctgttcccgactctcagctccatggcggcggcggcccgattcgcaatcccggga

SEQ ID NO: 125453 - DNA, 791 bp, Homo Sapiens
  misc_feature (56)..(74): n is a, c, g, or t
gtagctaaaattaccctcaactaaagggaataagcttgcggccgcatacgcggtcnnnnnnnnnnnnnnnnnnnaaaaagacagattttctttacacagatttaagccaataatttttagcaaaatgatacaaaactgtcttaaccaagtagaagattggtagttacagtggaatcgtcagggagtacagggcggccaccacttggagggagctgaggccctggaaaaggagtctgattctctgcaattctctctctgcttttcttcccagccccgttacaaccgagttcacgtggggggccgcagtgcagccccagcggtggcagctcttggagtctgtccgtttagtatgtttcccccacgagcgtcgctgggtgagtggcctggagagctcccggtgttaacatttcgatcctagaccgggggacgtgtcactagtaaagccattggtaacagagtagatcagccatgcattgtctgcccttcacagcaataaggagagttctcatcggtgcacgacagactgaagaccactggaagccacccgaccaggaatctgtcggagccaaagcacaggagaaggtcagcatggggctgggggagccggccaggcagataccacagtgacggtgctgggcagggaggggacgcaccgccaccgcctagccccagtctagacgcctgcgtctcccgccacgcacaggggcctctgtggctgggacacgtgctcagcagaacgagtgacaggaagacgggaaggaggaagaggcatgcaagcaaggtgcccgcgg

SEQ ID NO: 125454 - DNA, 1496 bp, Homo Sapiens
  misc_feature (117)..(173): n is a, c, g, or t
  misc_feature (453)..(528): n is a, c, g, or t
  misc_feature (717)..(728): n is a, c, g, or t
gcggccgcagcagcgccgcctcgtcccccgccgccggccgctcgcccgccgaccaccgcggctacgccagcctgcgcgccgcctcgcccgccccgtccagcgcgccctcgcacgcgnnnnnnnnnnnnnnnnnnnnnnnnnnnnnnnnnnnnnnnnnnnnnnnnnnnnnnnnngacgacgagttcgaagacgacctgctcgacctgaaccccagctcaaactttgagagcatgtccctgggcagcttcagttcgtcgtcggcgctcgaccgggacctggattttaacttcgagcccggctccggctcgcacttcgagttcccggactactgcacgcccgaggtgagcgagatgatctcgggagactggctcgagtccagcatctccaacctggttttcacctactgaagggcgcgcaggcagggagaagggccggggggggtaggagaggagnnnnnnnnnnnnnnnnnnnnnnnnnnnnnnnnnnnnnnnnnnnnnnnnnnnnnnnnnnnnnnnnnnnnnnnnnnnntaagcagggctcgttcgcccgcgttctcgtcgtcggatcaaggagcgcggcggcgttttggacccgcgctcccatcccccaccttcccgggccggggacccactctgcccagccggagggacgcggaggaggaagagggtagacaggggcgacctgtgattgttgttattgatgttgttgttgatggcnnnnnnnnnnnngcgactttcgagtttggctcccctttggcttgaagagacccccttccccctttccaacgagcttccggactgtgtctgcacccccagcaagagggcgagagttagttttctaagagacttgaagggagtctccccctttcctggcttcaccaccttgggttttgttttattttgcttcttggtcaagaaaggaggggagaacccagggcaccccttcccccccttttttttaaacgcgtgatgaagacagaaggctccggggtgacgaatttgggccgatggcagatgttttgggggaacgccgggactgagagactccacgcaggcgaattcccgtttggggcttttttttcctccctcttttccccttgccccctctgcagccggaggaggagatgttgaggggaggaggccagccagtgtgaccggggctaggaaatgacccgagaaccccgttggaagcgcagcagcgggagctaggggcgggggcggaggaggacacgaattggaagggggttcacggtcaaactgaaatggatttgcacgttggggagctggcggcggcggctgctgggcctccgccttcttttttacgtgaaatcagtgaggtgagacttcccagaccccggaggcgtggaggagaggagactgtttgatgtggtacaggggcagtcagtggggtgagacttcccagaccccggaggcgtggaggagaggagactgtttgatgtggtacaggggcagtcagtggagggcgagtggtttcgg

SEQ ID NO: 125455 - DNA, 421 bp, Homo Sapiens
  misc_feature (249)..(305): n is a, c, g, or t
tgcctgcgcgcccttcagtaggtgaaaaccaggttggagatgctggactcgagccagtctcccgagatcatctcgctcacctcgggcgtgcagtagtccgggaactcgaagtgcgagccggagccgggctcgaagttaaaatccaggtcccggtcgagcgccgacgacgaactgaagctgcccagggacatgctctcaaagtttgagctggggttcaggtcgagcaggtcgtcttcgaactcgtcgtcnnnnnnnnnnnnnnnnnnnnnnnnnnnnnnnnnnnnnnnnnnnnnnnnnnnnnnnnncgcgtgcgagggcgcgctggacggggcgggcgaggcggcgcgcaggctggcgtagccgcggtggtcggcgggcgagcggccggcggcgggggacgaggcggcgctgctgcggccgc

SEQ ID NO: 125456 - DNA, 2231 bp, Homo Sapiens
  misc_feature (522)..(597): n is a, c, g, or t
  misc_feature (788)..(799): n is a, c, g, or t
  misc_feature (1485)..(1524): n is a, c, g, or t
  misc_feature (1958)..(2047): n is a, c, g, or t
  misc_feature (2076)..(2084): n is a, c, g, or t
gcggccgccgcgagggtgtgagcgcgcgtgggcgcccgccgagccgaggccatggtgcagcaaaccaacaatgccgagaacacggaagcgctgctggccggcgagagctcggactcgggcgccggcctcgagctgggaatcgcctcctcccccacgcccggctccaccgcctccacgggcggcaaggccgacgacccgagctggtgcaagaccccgagtgggcacatcaagcgacccatgaacgccttcatggtgtggtcgcagatcgagcggcgcaagatcatggagcagtcgcccgacatgcacaacgccgagatctccaagcggctgggcaaacgctggaagctgctcaaagacagcgacaagatccctttcattcgagaggcggagcggctgcgcctcaagcacatggctgactaccccgactacaagtaccggcccaggaagagggtgaagtccggcaacgccaactccagctcctcggccgccgcctcctccaagccggggggggtaggagaggannnnnnnnnnnnnnnnnnnnnnnnnnnnnnnnnnnnnnnnnnnnnnnnnnnnnnnnnnnnnnnnnnnnnnnnnnnngtaagcagggctggcttcgcccgcgttctcgtcgtcggatcaaggagcgcggcggcgttttggacccgcgctcccatcccccaccttcccgggccggggacccactctgcccagccggagggacgcggaggaggaagagggtagacaggggcgacctgtgattgtcgttattgatgttgttgttgatggcnnnnnnnnnnnngcgactttcgagtttggcctcccctttggctttgaagagaccccctcccccttccaacgagcttccggacttgtctgcacccccagcaagaaggcgagttagttttctagagacttgaaggagtctcccccttcctgcatcaccaccttggttttgttttattttgcttcttggtcaagaaaggaggggagaacccagcgcacccctccccccctttttttaaacgcgtgatgaagacagaaggctccggggtgacgaatttggccgatggcagatgttttgggggaacgccgggactgagagactccacgcaggcgaattcccgtttggggcttttttttcctccctcttttccccttgccccctctgcagccggaggaggagatgttgaggggaggaggccagccagtgtgaccggcgctaggaaatgacccgagaaccccgttggaagcgcagcagcgggagctaggggcgggggcggaggaggacacgaactggaagggggttcacggtcaaactgaaatggatttgcacgttggggagctggcggcggcggctgctgggcctccgccttcttttctacgtgaaatcagtgaggtgagacttcccagaccccggaggcgtggaggagaggagactgtttgatgtggtacaggggcagtcagtggagggcgagtggtttcggnnnnnnnnnnnnnnnnnnnnnnnnnnnnnnnnnnnnnnnngatttttttcttctcttaatcggaatcgtgatggtgttggattatttcaatggtggggttaatatagcatgttatcctgtctatcttttaaagatttctgtataagactgttgagcagtttttaaaatagtgtaggataatataaaaagcagatagatggcgctatgtttgattcctacaacgaaattatcaccagctttttttcattcttaactctttaaaggattcaaacgcaactcaaatctgtgctggactttaaaaaaacaattcaggaccaaattttttctcagtgtgtgtgtttattccttataggtgtaaatgagaagacgtgtttttttccttcaccgatgctccatcctcgtatttctttttccttgtaaatgtaatcagatgccattttatatgtggacggtatttatactggcccaacatannnnnnnnnnnnnnnnnnnnnnnnnnnnnnnnnnnnnnnnnnnnnnnnnnnnnnnnnnnnnnnnnnnnnnnnnnnnnnnnnnnnnnnnnnccgggcttctttggggcacttgtgggtannnnnnnnnattacacgtccccttccccgaacgggcaaaaatttcaacttttaatttgtttatactcaaaggcggggtgtttgcacctctttggccgccgacccccggcccgggcgagtgggcgacccttgggatctcttaccccggggggcgtct

SEQ ID NO: 125457 - DNA, 495 bp, Homo Sapiens
  misc_feature (32)..(32): n is a, c, g, or t
  misc_feature (35)..(35): n is a, c, g, or t
  misc_feature (38)..(38): n is a, c, g, or t
  misc_feature (323)..(379): n is a, c, g, or t
tcttcgtctgtccttttcgtttctttttttcnctnttntttttctcctctcctaccccccccggcccttctccctgcctgcgcgcccttcagtaggtgaaaaccaggttggagatgctggactcgagccagtctcccgagatcatctcgctcacctcgggcgtgcagtagtccgggaactcgaagtgcgagccggagccgggctcgaagttaaaatccaggtcccggtcgagcgccgacgacgaactgaagctgcccagggacatgctctcaaagtttgagctggggttcaggtcgagcaggtcgtcttcgaactcgtcgtcnnnnnnnnnnnnnnnnnnnnnnnnnnnnnnnnnnnnnnnnnnnnnnnnnnnnnnnnncgcgtgcgagggcgcgctggacggggcgggcgaggcggcgcgcaggctggcgtagccgcggtggtcggcgggcgagcggccggcggcgggggacgaggcggcgctgctgcggccgc

SEQ ID NO: 125458 - DNA, 255 bp, Homo Sapiens
  misc_feature (119)..(175): n is a, c, g, or t
gaaagttaaaatccaggtcccggtcgagcgccgacgacgaactgaagctgcccagggacatgctctcaaagtttgagctggggttcaggtcgagcaggtcgtcttcgaactcgtcgtcnnnnnnnnnnnnnnnnnnnnnnnnnnnnnnnnnnnnnnnnnnnnnnnnnnnnnnnnncgcgtgcgagggcgcgctggacggggcgggcgaggcggcgcgcaggctggcgtagccgcggtggtcggcgggcgagcggc

SEQ ID NO: 125459 - DNA, 439 bp, Homo Sapiens
  misc_feature (267)..(323): n is a, c, g, or t
ccccccggcccttctccctgcctgcgcgcccttcagtaggtgaaaaccaggttggagatgctggactcgagccagtctcccgagatcatctcgctcacctcgggcgtgcagtagtccgggaactcgaagtgcgagccggagccgggctcgaagttaaaatccaggtcccggtcgagcgccgacgacgaactgaagctgcccagggacatgctctcaaagtttgagctggggttcaggtcgagcaggtcgtcttcgaactcgtcgtcnnnnnnnnnnnnnnnnnnnnnnnnnnnnnnnnnnnnnnnnnnnnnnnnnnnnnnnnncgcgtgcgagggcgcgctggacggggcgggcgaggcggcgcgcaggctggcgtagccgcggtggtcggcgggcgagcggccggcggcgggggacgaggcggcgctgctgcggccgc

SEQ ID NO: 125460 - DNA, 416 bp, Homo Sapiens
  misc_feature (244)..(300): n is a, c, g, or t
tgcgcgcccttcagtaggtgaaaccaggttggagatgctggactcgagccagtctcccgagatcatctcgctcacctcgggcgtgcagtagtccgggaactcgaagtgcgagccggagccgggctcgaagttaaaatccaggtcccggtcgagcgccgacgacgaactgaagctgcccagggacatgctctcaaagtttgagctggggttcaggtcgagcaggtcgtcttcgaactcgtcgtcnnnnnnnnnnnnnnnnnnnnnnnnnnnnnnnnnnnnnnnnnnnnnnnnnnnnnnnnncgcgtgcgagggcgcgctggacggggcgggcgaggcggcgcgcaggctggcgtagccgcggtggtcggcgggcgagcggccggcggcgggggacgaggcggcgctgctgcggccgc

SEQ ID NO: 125461 - DNA, 1487 bp, Homo Sapiens
  misc_feature (519)..(546): n is a, c, g, or t
  misc_feature (1162)..(1229): n is a, c, g, or t
gggtgctctaagctgcagcaagagaaactgtgtgtgaggggaagaggcctgtttcgctgtcgggtctctagttcttgcacgctctttaagagtctgcactggaggaactcctgccattaccagctcccttcttgcagaagggagggggaaacatacatttattcatgccagtctgttgcatgcaggctttttggcttcctaccttgcaacaaaataattgcaccaactccttagtgccgattccgcccacagagagtcctggagccacagtcttttttgctttgcattgtaggagagggactaagtgctagagactatgtcgctttcctgagctaccgagagcgctcgtgaactggaatcaactgcttcagggtcaaggatgtactcacccgaaagacttgcctgggaggccgcgagaaacttgcattggaagcttcagcaaccagcattcgagaaactcctctctactttagcacggtctccagactcagccgagagacagcaaactgcagcgcggtnnnnnnnnnnnnnnnnnnnnnnnnnnnnctctccagcctgggaactataactcctctgcgagaggcggagaactccttccccaaatcttttggggacttttctctctttacccacctccgcccctgcgaggagttgaggggccagttcggccgccgcgcgcgtcttcccgttcggcgtgtgcttggcccggggaaccgggagggcccggcgatcgcgcggcggccgccgcgagggtgtgagcgcgcgtgggcgcccgccgagccgaggccatggtgcagcaaacctaacaatgccgagaacacggaagcgctgctggccggcgagagctcggactcgggcgccggcctcgagctgggaatcgcctcctcccccacgcccggctccaccgcctccacgggcggcaaggccgacgacccgagctggtgcaagaccccgagtgggcacatcaagcgacccatgaacgccttcatggtgtggtcgcagatcgagcggcgcaagatcatggagcagtcgcccgacatgcacaacgccgagatctccaagcggctgggcaaacgctggaagctgctcaaagacaagcgacaagatccctttcattcgagaggcggagcggctgcggctcgcccgccccgtccagcgcgcnnnnnnnnnnnnnnnnnnnnnnnnnnnnnnnnnnnnnnnnnnnnnnnnnnnnnnnnnnnnnnnnnnnngacgacgagttcgaagacgactgctcgacctgaaccccagctcaactttgagagctgttccctggggcgtttcaggtcgtcgtcggggctcgaaccgggaccgcgatttaacttcgaggcccggtccggatcgcacttcgaagttcccggacttatgccagcccaggtgaacgcagaagactccggaaacggctcagaccaccatctccacccggtgtttcccaacgaacgggcgcacgccggaaaagcacggggcgg

SEQ ID NO: 125462 - DNA, 569 bp, Homo Sapiens
  misc_feature (53)..(99): n is a, c, g, or t
gggggccttgagcttgccgcatttcttgctggagcccttggaggtcttggcannnnnnnnnnnnnnnnnnnnnnnnnnnnnnnnnnnnnnnnnnnnnnncttctctgggctctggctggcgctgggcttggccgaggggtccattttgggctttttccggggccggtacttgtagtcggggtagtcggccatgtgcttgagccgcagccgctccgcctcccggatgaacgggatcttctcgctgtccttcagcattttccagcgcttgcccagcctcttggagatctcggcgttgtgcatgtccggagactgctccatgatcttcctgcgttcgatcttggaccataccatgaacgcgttcatcggccgcttgatgtggcccgacgccgtcttgcaccagtctgggtcgctctcgtccagggccaccgggctgcaagccatgaattcgccctcctccgtgtccagcgcctcccggggcaggttgctctccgcttccaagctctccgcctgctgcaccatgatccgctgcagggctggacgctccaacccgggccgctgggtctcgtgcg

SEQ ID NO: 125463 - DNA, 223 bp, Homo Sapiens
gcctactactactatacggctgcgagaagacgacagaagggggttcacggtcaaactgaaatggatttgcacgttggggagctggcggcggcggctgctgggcctccgccttcttttctacgtgaaatcagtgaggtgagacttcccagaccccggaggcgtggaggagaggagactgtttgatgtggtacaggggcagtcagtggagggcgagtggtttcgg

SEQ ID NO: 125464 - DNA, 405 bp, Homo Sapiens
tcagtaggtgaaaacctggttggagatgctggactcgagccagtctcccgagatcatctcgctcacatcgggcgtgcagtagtccgggaactcgaagtgcgagccggagccgggctcgaagttaaaatccaggtcccggtcgagcgccgacgacgaactgaagctgcccagggacatgctctcaaagtttgagctggggttcaggtcgagcaggtcgtcttcgaactcgtcgtcggaggacgaggagccggaggagaaggaagagtaggagtggaacgagtccgaggagtacgcgtgcgagtgcgcgctggacggggcgggcgagtcggcgcgcaggctggcgtagccgcggtggtcggcgggcgagcgcccggcggcgggggacgaggcggcgctgctgcggcc

SEQ ID NO: 125465 - DNA, 452 bp, Homo Sapiens
  misc_feature (117)..(173): n is a, c, g, or t
gcggccgcagcagcgccgcctcgtcccccgccgccggccgctcgcccgccgaccaccgcggctacgccagcctgcgcgccgcctcgcccgccccgtccagcgcgccctcgcacgcgnnnnnnnnnnnnnnnnnnnnnnnnnnnnnnnnnnnnnnnnnnnnnnnnnnnnnnnnngacgacgagttcgaagacgacctgctcgacctgaaccccagctcaaactttgagagcatgtccctgggcagcttcagttcgtcgtcggcgctcgaccgggacctggattttaacttcgagcccggctccggctcgcacttcgagttcccggactactgcacgcccgaggtgagcgagatgatctcgggagactggctcgagtccagcatctccaacctggttttcacctactgaagggcgcgcaggcagggagaagggccggggggtggtagagaggag

SEQ ID NO: 125466 - DNA, 2227 bp, Homo Sapiens
  misc_feature (669)..(703): n is a, c, g, or t
  misc_feature (1084)..(1093): n is a, c, g, or t
  misc_feature (1104)..(1126): n is a, c, g, or t
  misc_feature (1771)..(1779): n is a, c, g, or t
aatataatttttccccacaaaagaaacacttaacagaggcaagtgcaatttataaatttatatctaaaggggaatcatgattataagtccttcagcccttggactctaaattgaggggattaaaaagaatttaaaataattttgaacgaatttattttcccctcagtttttgagggcattaaaaaggcattaaatcaagacaaatcatgtgcttgagaaaaataaaattaatgaaaacacagcacttatgttggtttagctgcagcctccttggaggtagaatttatttatttaaaattactggttgcatcaagaacccatagggtgtacaaaaggttctataaaatctgcattatagagacaaagaggcaggcaaatccatgtcacaagggtaaagcttacagtttacaaactgggaacgccagggtgtaggatataaaaacgcactcttgagaaaacaaatgtaatcagggtgctgaaaacttgcatggtgctttcagacattagccttgttcaacaaatttcttgtattgacagatccatagtgtgcatgggcagacacattttgcctctatgtctcttaaaattttaattaaaaatactctttccagtaatcctaatttgcacgaagatataatgtccacattacgtgccttgccttgaaatctnnnnnnnnnnnnnnnnnnnnnnnnnnnnnnnnnnntacaacaaagtgacatcactacacttgttttgctgcatttattatcattttaaatctttaccatttttatgacaaaatattttgtactccagacgaagaaaaatgtgtgacatcatggattttttagacagttatacctttatctcacatttataaagcatatcatggctgtgtatagttgccgcttaaaaattgtaatcgaccagcaatattttcagtattttggtgtttttttctattaacctttcatgtttttcatcttccaattaatatttgggggggaggggtttcaaatttatacgaattatgcaataccaagttttgcctatgtaggtagtgcttttagctgtattggttattataggtaagtacacagatttnnnnnnnnnntaatgtatgcnnnnnnnnnnnnnnnnnnnnnnnaattgaccaaagtgggtactgctatttttgcagtgtgatgaggtccttttgtgtactgagagatggacaggggattttttttaatatacatatatatatattcctggggtgggtgggaggatttttaacactttgcagtgtagctgtgaagcagtgcaccctgagatgggcctgggctgcaaagcgactgttctgcctactgtgacaaacttcaacttacacaggttcccctctctaacttcccacctgggttgcaagctgaactcattactggttttcataacaacacaatagtaagaacaagcaaacacaacaaattctcctggaggcagacttggcttaaaaaggcagacttggcttggtgatagtttttcttgaaagttccagatccacagtggagagtgagcctgtctcatatttggcaaaaatatttgttgaaatgtccacataggggatgttggatgtttaacacttttgagagtttaacacatgaatattctttctcctagaaaacacattagacctgttggagggagtctcccgtattccttttctgccacttttcgtccccatttcatttcattaatgataggatatgatttacctgtgacttactacttcaaatggatggcagtgcacttggannnnnnnnnaatatccagaagattgaacagagggttgctattgttgaatgtatttggactgatagattaaaatcaaagttcaatttttaaggaacaaaaaagtaaatcctgttttcattttatctcccctgttaaaactgagaaccagagcagaagggaaatatagaattttaagcaattaatcttcctgtggatgaattaaacccattagatgctgatgggatttttttaaggaatggtaccttaactatatatttgatttcgtttcccctgagggctagaggctgaatggagactggttttattgtgcctttccctcaccgcccagtcccattgagtgtattcattactagaaggaaaatctttcagaattggtgacacatggtaggctgtcttaaggagtcccctggcccccttcccttaggccatggcctaataaaataaactgtcaattgtt

SEQ ID NO: 125467 - DNA, 1019 bp, Homo Sapiens
  misc_feature (322)..(349): n is a, c, g, or t
aggggtatttttgccctgagtccaagagggtcctttagtacctgaaaagtaacttggctttcattattagtactgctcttgtttcttttcacatagctgtctagagtagcttaccagaagcttccatagtggtgcagaggaagtggaaggcatcagtccctatgtatttgcagttcacctgcacttaaggcactctgttatttagactcatcttactgtacctgttccttagaccttccataatgctactgtctcactgaaacatttaaattttaccctttagactgtagcctggatattattcttgtagtttacctctttnnnnnnnnnnnnnnnnnnnnnnnnnnnntccccttcctcactgcccaatataaaaggcaaatgtgtacatggcagagtttgtgtgttgtcttgaaagattcaggtatgttgcctttatggtttcccccttctacatttcttagactacatttagagaactgtggccgttatctggaagtaaccatttgcactggagttctatgctctcgcacctttccaaagttaacagattttggggttgtgttgtcacccaagagattgttgtttgccatactttgtctgaaaaattcctttgtgtttctattgacttcaatgatagtaagaaaagtggttgttagttatagatgtctaggtacttcaggggcacttcattgagagttttgtcttggatattcttgaaagtttatatttttataattttttcttacatcagatgtttctttgcagtggcttaatgtttgaaattattttgtggctttttttgtaaatattgaaatgtagcaataatgtcttttgaatattcccaagcccatgagtccttgaaaatattttttatatatacagtaactttatgtgtaaatacataagcggcgtaagtttaaaggatgttggtgttccacgtgttttattcctgtatgttgtccaattgttgacagttctgaagaattctaataaaatgtacatatataaatcaaaaa

SEQ ID NO: 125468 - DNA, 1082 bp, Homo Sapiens
  misc_feature (47)..(82): n is a, c, g, or t
cccggggggggcccatttccacccctttgggccaattttttgggggnnnnnnnnnnnnnnnnnnnnnnnnnnnnnnnnnnnnggggaaattttctgggggaaccccggaaagggtttgttcccatgggggatttcagccctttgggcccttcagggggccgggcgtttttaagggtggccccaaggacctcccagcagcccttgggtgcagcttctcccgcttcatcgaagatgaacagggtctggtggcagagctgctgcgtctcccggatctggctcatcagctgctccttgtacaggtccacatatttggggtgaggaaagtggaacgtggcgatgaacatcctgacacagtcactcatcagcccgtcccgatacaggttctccaccagcatccgtgccacgaagttcttgcctgtgccagaccagccgtggaacgacagagcaagggccttttctggctggggcgtctctaagtagcccctcactgttcttaggaccagctgctggaccaaatgctggccatgcagccgcacattcaggtcccactctaagcctgtaaagttgttggagattctgcaatcccctctagggcagcagtctttgaagctgcagtaccacgtggtcaggaggtccaggtaccgctggcccaacagaggaaggcgccagcccaggggccccgtggctgcctcctcgtcctcgtcacagtcgtcgggccacacctggcagctgaagagcgtccagtaccgcttggagagggcacccgccgccctgagctgctcctgcaggcgctggaagcccggccaggcccaggccgagcccggctcgtcggttccctcccacggcctggaggcgccgcggggctcaggcgcgcccgggagcagcagcaggagaaagagccaaagctggcgccacggaccgcgaagcatggccggccccgagctgcgggaccatccggctgccggcctagccaggctcccttaagcccggggcggtcaggcggggaccgcacgccacccaggcctcgctaccttaggaccgtatagtactgcctcgttaacacctgctttttgacaactgac

SEQ ID NO: 125469 - DNA, 2190 bp, Homo Sapiens
  misc_feature (63)..(181): n is a, c, g, or t
  misc_feature (786)..(800): n is a, c, g, or t
gattgaagcgccatgggcaacgcaataattgagtagtcactcttaggccccccagcttacacnnnnnnnnnnnnnnnnnnnnnnnnnnnnnnnnnnnnnnnnnnnnnnnnnnnnnnnnnnnnnnnnnnnnnnnnnnnnnnnnnnnnnnnnnnnnnnnnnnnnnnnnnnnnnnnnnnnnnnnaaagaattcggcacgaggttttttagaaaaatcaaaaattttaatcttatcatctttacatacaacaaacatgtcaagaccccctattgtctttgaaaaggtcccccctcccccgccaaaatctgtagaccataagtcttggcctacactgacctggtttgtaaaatatcttcctctgtgtacttttcccttcagcctcaggctcttggctgattcgctcacaacagaagcagcttggctttcctctggaagtaccaatttgaaagcccaccagcccgcaaacctagagtgtattctccacccctgggtcacagaacttcgttctccccggctctgtaacccaaggaccctacagcctctgaggcctaacacccaagctcttccttgcagaagagctgagatgctaaggagaccatctggagtgtcataataagcccttgggatttgctgagctcccacatggctttcttcaaccacctggcccactttcttcaaccacattccactttggaatgcgtgtctttaaggcaccaagtgatcttaagaatgggctctgtttttgaattcagcaatccaagttcctatctatctcggtgggacctccnnnnnnnnnnnnnnnggattggcttggcttctaatgtaaggcctgccttttacacaccagttgtgtgtttgttagtggctgctggatgccagtccacaccctcaaacacctcacagtcccaaacggggtgctcctacaggtcccagggtcctgttagtggaagaaaggcagttccaggaagtcttcctctagccttcatgacaggaagtagttaatcctctgggaaatagacttgcagccctgggaagaaaagagttgttcctccttggggacatacaccatcatctgggctatttcatccagtgtctcttctttatacaggagctcctggctcaggaaggcatcccgtgcacacagcctcacgtgacggtactccaaaggcaggaaggggatgaagtagtcaatcaggttttccttcacaagacggctgtggccaaagccattgtctatggtctccacaatctccgcctggaggtggggctccaggtgttccatcgtaatttcttcccgggaccatccagccttgagcaactttaggaccacctcattgattatatcgcccctgagattactgagaaacagaaagatagtccatggagactcagccctgtggccctcaggggcccggcgttctaagtgtggcccaaggacctccagcagccctgggtgcagcttctccgcttcatcgaagatgaacagggtctggtggcagagctgctgcgtctcccggatctggctcatcagctgctccttgtacaggtccacatatttggggtgaggaaagtggaacgtggcgatgaacatcctgacacagtcactcatcagcccgtcccgatacaggttctccaccagcatccgtgccacgaagttcttgcctgtgccagaccagccgtggaacgacagagcaagggccttttctggctggggcgtctctaagtagcccctcactgttcttaggaccagctgctggaccaaatgctggccatgcagccgcacattcaggtcccactctaagcctgtaaagttgttggagattctgcaatcccctctagggcagcagtctttgaagctgcagtaccacgtggtcaggaggtccaggtaccgctggccacaacagaggaaggcgccagcccaggggccccagtggctgcctcctcgtcctcgtcacagtcgtcgggccacacctggcacgctgaagagcgtccacgtaccgcttggagagggcacccgccgccactgagctgctcctgcaggcgctggaagcccggccaggcccaggccgagcccggctcgtcggttccctcccacggcctggaggcgccacgagggctcatggcgcgcaccgggagcagcagcaggagaaagagccaaagctggcagccacggaccgcgaagcatggccggc

SEQ ID NO: 125470 - DNA, 276 bp, Homo Sapiens
ttggaaaaatcaaaaattttaatcttatcatctttacatacaacaaacatgtcaagaccccctattgtctttgaaaaggtcccccctcccccgccaaaatctgtagaccataagtcttggcctacactgacctggtttgtaaaatatcttcctctgtgtacttttcccttcagcctcaggctcttggctgattcgctcacaacagaagcagcttggctttcctctggaagtaccaacccggcccgtaatggccagtctgcgttgataccactgccc

SEQ ID NO: 125471 - DNA, 1508 bp, Homo Sapiens
  misc_feature (144)..(203): n is a, c, g, or t
agctctgcatcttttatttcagactcagaaaattcagtccaggtctctgaataggtgttcaatagaaaacacacactcacacactctctctatatagatgttcaatagaaaacacacacactctctctataggtgttcaatagnnnnnnnnnnnnnnnnnnnnnnnnnnnnnnnnnnnnnnnnnnnnnnnnnnnnnnnnnnnntctctcttcctctttcccgcaacgtgctgtttgggagcttgaggtttctctcttcttcccaagtttctcaatgtctgggctggggaaggagggcccaggctccagcaggtacggacactgcaccctagaggcaggagcagtgggaatcagtatttccgctgccgagggaagagactactcccggaggatcggagtggggggctggcggggctggggtcctccgagtccaggctgaagaggtccctcccggtacgaaggatctgctcctccagcttcttgtgtctcttcatgtccgacagcaccttgtccaggcgggcctcccgtttctggctccgggctgagcttcctggggtgcgtctccggtcaatcagggagtcctttggtgtcactggctcatcatcaaaatcaaattccgtgggcatgtgtggtttttcctcttcctcttctttggcctccggctcctcatcggatctctcctcttcgctctgggcctccggcgtgggagcccggcggggcaggatctcggcttgcagctccagagtaccgtgggcagccagcagttcatagagccgctggatttcggagggcgggggcatccagggctgcccatccgcaggcagctccacctcctcgtcgctgcagggcacgcaccagtcctcggagtcctcctcggcaggctcttctcccccagcgctggggacttctccctgcgcctcctcgcccccggacccctcacgctcggtctcctctcggcctccttccccctcgtcctcggccttaccggccgaggcagaggggcctccggtatcctccacggccagagcctggaggccggaggtcacttccccttcttcagacagaggcgccgccgtactggccgcagtgtctccatggccccgagcaagggacataggccactagggcagggaccctgcgacgacagatactggagtccgaagccagggtcccccagggatcgggctcccctgggggttcgggaccgtttccagccaatcacgctcccgcaggggactccgcggccagaccgcccgtccccgggagggggcgctcagtccccaccaaggaccccgccccggagatcgaggttcggtactccgaggctcccgggccccgcagaaaccactttccgaaagagggaaagggggaggagagggacgggccactcttctcgcttccacgacgcccctctccacacccggacacggcgccttctccccagacctttcagtcctcgtgccgaattcgccacccaggcctcgctaccttaaaccggttatagttact

SEQ ID NO: 125472 - DNA, 2864 bp, Homo Sapiens
tttttttagatctcattagttttatttctataacctttcgatctgatgtcacgttagattttgtcacaactggatttagtggaagcaggggaatcaagttcactattttctgaaacacacaaaaaagggatgggaacaatgacttagaactaagattgctcataaaagaccatcagaaagatccctaaacaaaagctaaatagttacagttaatggtaactggcaagggatttaatgcatttgctggtattaagtttcttatggaatgaatgaatgaacccagcagcattttatgacacagctgccagaacatcccatagaaaaacaattttgtaggaacgtgatggcaacaatcagcagccaatattctcaagagttcctaattaccaaaagcatatacaattttagtctagaaaaataagtcaattttataaaattaagtttttagatcgaaaagcaccccctttaacaggtacagagatactgaaaaatagtccctaaaaatctcactaaatagtttacggagagaaaggcatgccatgttgagttacggagtgcagcgcgtgccctcagctgctggcgagggactggtggatgggcggctggaagcagcgcacatgctccactggcgtgccctccccgtcgcctgacttcaggtacttatccaggatggtgatgatctcatcattgagaatctggaacttgcgaattctctccaccatcttcttcaaaggcacatttttaataatctcatctttgccatcatgtttctggactttaagtagatggtagcagaaatccagcacagcaaaacgccgctgctgcccaagaagtacgatgatcatacagccagcccagtgtagcccatcaccaagagcactgctcgactgtgaactggtgtgtcccccccgggaatgcagtagacaaactgcatggcactcccacagtctgtgaaactccacacactggtccacatgcatgaccccattgctgggcagaggcccgcgccagatggggtcatccagaaagctccggatccgtgtcaggatgacctcaaacatggacaggccgcagcagaggcgctcctttgtcagcaggtccccctctcttgcgatggcaatttgctgaggggtccccagtctttcaatcagtgggacaagatgcagcggggcgtactttgattctagtcttttcattttggcatcaagtctctccccctctttcacatggactcgcggcaagatgttctggaaaggagccgcgtgcagcaggtcacacacttcttctgaagacaggctctgctcgatgagcaggcagaagaggatggcgttccccacctgcccgcaggttctggaagcacaccgtcttcagctctgcgtactccacgatgtccttcagctggtggtggaagaactccaggataccaggagagccgtactcgtgccggggcaggcggcagatcttgggcatcacctccatcagcgtcttcacgtactgcaggattgtgccttgcagcaggctcttgacgaccttcagcagctcctccatgaccacggcgataccctggtagccgagaagccggcagatgacttgaaagtgtggaggtcccacgaagttccggtagctgccgtaaatgctggagtaggccaagttcaaagccttggatccatgcagatactgaggctgtgcattaggctgcttatctctttgaaattcctgagaaaatggtaacactgtccgaacaaaccggttggtagagccgttgtagcagtagttgggcaggaagtcatagttgagctcccagaagacgtgcagggtgatcctcccgtagggcgctgacacgttgtggttggcctcccggaacatggcgtcgaagccgtccagcgtcaggtaccggctcagcagcttgtgggtcatgcggttgatttccaacaggccatccagctcaactatggaggtcaaatcttcactttcaaatcgtccaatcgccagttctagggacttatacatggctgctgagacgcgctgggtgatcagacgattgaggtctattgatctgccgaggagctgcacatgcctctgcttcagcagcgtctcgtagcggttagacggcgggaggtggatcgtggctccctgattcttgcattctgatcgtaaccgtttatcaagaagcaaacttcctgccataaccttataataggcaaatatctggtctgctagcttgtaaacaaattggtcaaaacatagattcacctcggcctcaatttcgtcgtacaggaactgcttgttgaacctggtgagcgcgtagtgggcgctgtcattgtacaggtccagggagtagagcacgtactccatcatcgatgcctccttggtctccaggatgtggtccgtcaggatccagggcatcgacatctcaatggggaactggatcctcctgcccatggtcagctccaggaagaactctcggaaccacagctgcgaaaggtcacagcactgctgcagcgtttcactgaaatttatcaagtgagtgtagaagaatgactctcgatgaaatttttctatgtccaatatggtgggcccctcaaggctacttctcaaggttttcttggaaccacttttgtctgcaatgagggactctagcatggttctcaccatgtaaagctgagtgctggagggtcccacggcgcggcgtggtacttttatgtcgaagccgctcttggggtccttctcgccccgcaaggctgggtcattgaagggctcatgccccgtctcccagtcacacacggtcttcctgatggcctgcaggacactctggatgaccggacgcggggtcgacgatatcccgggaattccggaccggtacc

SEQ ID NO: 125473 - DNA, 1041 bp, Homo Sapiens
tttttatggcaggtttatgtttttatttatgtattttaactgacttatttgtgtatcccactagaacaatacattcacaatatacttgcagaactgtgcctggcgcgtcatgggagcagagaacttgtccagtgaatagttgttgaagaaaggagtaaaatctcccccaaaccctaaaggcatccttttcgtagtgtgtgtcccataggtatggctgctgagcaccagggctgctcaccatgctcccaagaagcagagtcagggaggcagacagcagggtttattaaggtgcacacccatgtctgagccccagctctctccgccttctgtggggagaagccctccggtctttccgagaaccttcaaactctggacagtttatgtcttgcccgcactctcagctaacagtgcagtgctgatcttctagagccaagaaacaggaaaagagagaggctctatgtggccccaggtttctgccacctgacttttcacagccagtcttccagaggtgggtggtagtgcagtgacctccaccctaggctgaggagagaaggatctagttcctcactgccccagagcctagtacctgctcctgacaaagcagggaataatattaaatataaataatttacacaaaatggcttgtacaaaaagctgtaggttagggggagaagacacctctgtgagaggttgagatgagcagaaagggcaggaaaggggaaagatacccccatttctcctagtcccttaacaaagccttccagccacccaaggcctaaaggggggctttggcaggcaggggaggagcagagctgtgccaaaggaccttcatggagccaggctagtgagcagggtagtgaattgcagggcctgccctgccagttctgttacacactgcaccatctcttggatggcagggctggatgggtagcccagggcagctcccttgacagccagcacagtggcccgcaatgcctggcccagtgctgtacctgcagccctgacctgtgctctcatcccgggaattccggaccggtccac

SEQ ID NO: 125474 - DNA, 1057 bp, Homo Sapiens
  misc_feature (210)..(248): n is a, c, g, or t
  misc_feature (724)..(724): n is a, c, g, or t
  misc_feature (743)..(744): n is a, c, g, or t
  misc_feature (805)..(805): n is a, c, g, or t
  misc_feature (808)..(808): n is a, c, g, or t
  misc_feature (879)..(879): n is a, c, g, or t
  misc_feature (894)..(894): n is a, c, g, or t
  misc_feature (952)..(952): n is a, c, g, or t
  misc_feature (966)..(966): n is a, c, g, or t
  misc_feature (1035)..(1035): n is a, c, g, or t
tcgaatgaatgacaactttatttttcttacacttttaaggctgatgaaaaaccttcatttcaattgaaaagtatggtaactgtgtttactcattattattagttttctaaaacacaacttgaaaacatccagcatgcatgtttaatatcagtacaatgaattcaagaccaagtatacatgttacattcagcaaggctagattacagattnnnnnnnnnnnnnnnnnnnnnnnnnnnnnnnnnnnnnnnttcacgttttcttttcaatgcatttgatgattcattggcagtattttgtgatgacatcatattagtggtaataagaatgtttttggacccgattaatgatggattaatcagaacattctgaactgctgaggttgcaggaattgaagcttttacagctggagactgagaagtaggcatctgtactgtaaacctttgacctgtgagggacatgggagtccctactttagttgaaacagacatggtctgtggggttggtgtgcctagtgtgggagtacttggtctgctagtaactgaaccaacacttaaccgcgggactgttattcttcccgcagaagttgatgcctttttctgtaaagatttcagcctatagtttggagctgttaagcagtatctatcaggtggcaacctaggacctgaatatggcttgatcaatggcaaaggggtttgatttctttgccttgcaatatctaataaanatctcttgggggaagaganngtaaaactgatcagcgcggactggattgcaatcgcacatcatctgctcaacagtagcttcntancatggcttgataatttttgcatcatctagaattgtggtacatatcggaaggcaactccacatctgatttanactcctggctcatantctgtatcccatatcttcaagattgtgcatcatctgtgatcttccggatgctcttggnagagcgtcttgcanactcatgataccatgatagactctcgagcaatcaccacatatgttttcatcctgatttgaccaggctcnggcggatcttggctccaggcaa

SEQ ID NO: 125475 - DNA, 1347 bp, Homo Sapiens
  misc_feature (102)..(119): n is a, c, g, or t
tcccttcccagaatatgggatttaggaaatcttttccctttttaaatcccattcctttgcccaaaaaaaaggtttcccttatatttgaaggggatttggatnnnnnnnnnnnnnnnnnnttaggttagggacagtaaagttaactattatttcccctataaaaataaagttagtatttaaatgtggatccggaaattatgctgtcaaagataaatctgctgactaggctgtagaatctgaaacttaaatgctactatcagtgatagaaggcagaaaagtttctcaaaaacagaattgccatattaggactcaacattaatgaaactattaagaaacaagtacttaactgtttgtaattgaagccttactgaaaaacacatttgtatgtttactaaagagatctaacagtttttaactgacgaaaaatactgcagctacatttcagtcttttaaggtaaaacaagatctagaatattctagttcagtatactgggctcaaaaccaactttccttttgaaatgcatctagactagactatattccttacataatatcattgtcatcatcatcttcatgttttctcttcagtgggtttgcttcattggctgtgttctgtgacgaaaccatgttggtggtaataagaatatttttgggcccaatcattgaaggattaatcagaacattttgaactgcagttgttgcaggaactggtttgacaggtgtggactgagaaggtggaatctgcaccgtaaatctttggcttgtcactgacattggagttgcaactttatttgggacagacaccgtttgtggggttgctatagtaggagtagtaggtttgctactaacagcaccaacacttaatcgtggaactagtctcccttggttaggtccctttttaattaaggacttcagcctatagtttggagctgttaagcagtatctatcaggtggcagtctaggtcctgcatatggcttaatcagtggcaaaggggtttgatttttctgccttgcgatatccagtaaaaaatctcttgggggaggagaggtaaaagattggtcagcacgacactggattgccagtctcacatcatctgcatcaacattaggtttcttagcatggctcgaataaatttttgcatcatccagaattgtagtcacataacggaaagcaaattccaacatttgatttataacccttggttcatactctgtgattcccatatccttcaggatctgtgccatcaccaaggcatctctcggagcgttcttgggaggcgccatcttgcccgactccatgttatccagccactcgtcatccgcggagacagaggagagagcggccgc

SEQ ID NO: 125476 - DNA, 1295 bp, Homo Sapiens
  misc_feature (375)..(386): n is a, c, g, or t
  misc_feature (1037)..(1037): n is a, c, g, or t
  misc_feature (1090)..(1090): n is a, c, g, or t
  misc_feature (1110)..(1110): n is a, c, g, or t
  misc_feature (1141)..(1142): n is a, c, g, or t
  misc_feature (1152)..(1152): n is a, c, g, or t
  misc_feature (1159)..(1159): n is a, c, g, or t
  misc_feature (1166)..(1167): n is a, c, g, or t
  misc_feature (1174)..(1174): n is a, c, g, or t
  misc_feature (1176)..(1176): n is a, c, g, or t
  misc_feature (1178)..(1178): n is a, c, g, or t
  misc_feature (1277)..(1277): n is a, c, g, or t
ggggttaaaccccacttgttttaccattagatgtgttaatatcacgctatatgctatccatcacggtttaaagtggatcaccagaccttatggcatttagagcactttttttaaaataggatattgaccctgagtctgtattacccggaataatatttttaaaattccatgtatggccttctacatttaatagccatggatgagtactcagcctatgggcggaggtgtccagaaaatgaatgggatctagaaagggagttgagtttggaagttaaggaagtccaagttaccttatacatcccaaatggatttagaatctctcctctaaatccatcctttccaaaaaatgtttcctatattgagagatttggtatnnnnnnnnnnnnttagctagtgacagtaagtaactatattaccttataaaataaagtagtatttaaatgtagatcagaaattatgctgtcaaagataaatctgctgactaggctgtagaatctgaaacttaaatgctactatcagtgatagaaggcagaaaagtgtctcaaaaacagaattgccatattaggactcaacattaatgaaactattaagaaacaagtacttaactgtttgtagttgaagcctactgaaaaacacatttgtatgtttactaaagagatctaacagttttaactgacgaaaaatactgcagctacatttcagtcttttaaggtaaaacaagatctagaatattctagttcagtatactgggctcaaaaccaactttccttttgaaatgcatctagactagactatattccttacataatatcattgtcatcatcatcttcatgttttctcttcagtgggtttgcttcattggctggtggttcttgtgacgaaaccatgttggtggtaataagaattttttgggcccaatcattgaaggattaatcagaacattttgaactgcaagttgttgcaggaaactgttaacagagaagaaagccccccaaagccaagctatgaattacccaagaatctgaaacatatgatanaaagtatacaacaaagctgaaatgtattctaaatacaatttcaatagcatgangtgcaactatatcatagaangaacataggtacttatactgcaatgagttgnnataattttanaatcttnattttanntggcaananantgtgtattatttttaatacattttttgaacatgtccgctcgtctcaactgcgtgtctggtcatgcactcgctctgatcaatgatctctgctcagtccantagcgggataaggttcaa

SEQ ID NO: 125477 - DNA, 959 bp, Homo Sapiens
aatttaaagaaagaaaagaagggaatcctcggtggctttatctttagttttattttaagagatcatctgcatttttttctgtaataaacttaaaagatatccacccattttgtcagatttatttattctttagcaatttaagtattaaaatcacagtttttgtctcaatccttaataatactatattcattatatttcatgtttagctttctcatggagaaaaagaaacacaggcataaacctatatactatccacctgctggttctgcaacatgattttaataaagtgttactgacacttgaacaatttctatgatgtcggcagagatatcaacaagagtgattattaagtagctagccttataagtcaagagttatgatctttgatccactgctcaatccatttcaagatctgatctacattattttctagctcttctggtttattactgggcagctgatgcacgatttcttccttgtaggatgctgtggcttcttcataaagaacttgaaaaatctcacactgaatattgtctgttagtttcttctcattataaccccttgtttcaagtctttcgtacaatacattggtatctgttctcagcacaaaaactatatgaaaccagcgttcagggaagaaatcacaaccatggtaatcaacaataactccaccttctctcatttggttatctaactcatcaactactctgtcttcatctaaaatgggacagtcatactcttcatcatagccatcatacaattgctcttctcgagctaaatcacccacattaatgtatttcagtcctgattttgacgcaagttctttgcctagtgtggtttttccaacccctggtgtaccggtgagcaggatgttcggaagcaacatggtccccgccgcgacggcttcccccggaccgtaatggccgaattcccgggcatatgtccggtaccgtcgactg

SEQ ID NO: 125478 - DNA, 780 bp, Homo Sapiens
  misc_feature (18)..(18): n is a, c, g, or t
tggaagcttttttacagnctgaagactggagaaagtaggcattctgtacggtaaaccctttgaccctgtgagggacaggggagtccctactttagttgaaacagacatggttctgtggggttggtgtgccctagtgtggggagtacttggtctgctagtaactgaacccccacttaaccgcgggactgttattcttcccgcagaagttgatgcctttttctgtaaagatttcagcctatagtttggagctgttaagcagtatctatcaggtggcaacctaggacctgaatatggcttgatcaatggcaaaggggtttgatttctttgccttgcaatatctaataaaaaatctcttgggggaggagaggtaaaagactgatcagcgcggcactggattgccaatcgcacatcatctgcatcaacagtagctttcttagcatggcttgaataaatttttgcatcatctagaattgtggtcacatatcggaaggcaaactccaacatctgatttataactcttggctcatattctgtaatccccatatccttcaggatttgtgccatcatctgtgcatctttcggcatgctcttgggagaagccgtcttgccagactccatgatatccgatgatcagacttctcgagctaaatcacccacattaatgtatttcagtcctgattttgacgcaagttctttgcctagtgtggtttttccaacccctggtgtaccggtgagcaggatgttcggaagcaacatggtccccgccgcgacggcttcccc

SEQ ID NO: 125479 - DNA, 604 bp, Homo Sapiens
  misc_feature (190)..(228): n is a, c, g, or t
cttcccccttttaaggctggatgaaaacccttcatttcaattgaaaaggtatggtaacggtgtttcctccattattattagttttctaaaccccccctggaaaccatccagcagccatgtttaatatcagtccaatgaattcaagcccaagtatccatgttcccattcagcaaggctagattacagattnnnnnnnnnnnnnnnnnnnnnnnnnnnnnnnnnnnnnnnttcacgttttcttttcaatgcatttgatgattcattggcagtattttgtgatgacatcatattagtggtaataagaatgtttttggacccgcttcatgatggattaatcagaacattctgaactgctgaggttgcaggaattgaagcttttccagctggcgactgagaagtaggcatctgtactgtaaacctttgacctgtgcggggcatgggagtccctactttagttgagacagacatggtctgtggggttggtgtgcctagtgtgggagtacttggtctgctagtaactgaaccaacacttaaccgcgggactgttattcttcccgcagaagttgatgcctttttctgtaaagatttcagcctctagtttgcc

SEQ ID NO: 125480 - DNA, 927 bp, Homo Sapiens
  misc_feature (211)..(249): n is a, c, g, or t
ctggaatggaacccaccgttattttttctccccttttaggccggatgaaacccctccattccaatgaaaaagtagggtacctgcgttcctccattattagtagttttctaaaccccaccttgaaacctcccaccatccatgtttaatatcagtacaatgattcaagccccaagtatccatgttacattcaccaaggctagattccagattnnnnnnnnnnnnnnnnnnnnnnnnnnnnnnnnnnnnnnnttcacgttttcttttcaatgcatttgatgattcatgggcagtattttgtgatgacatcatattagtggtaataagaatgtttttggacccgattaatgatggattaatcagaacattctgaactgctgaggttgcaggaattgaagcttttacagctggagactgagaagtaggcatctgtactgtaaacctttgacctgtgagggacatgggagtccctactttagttgaaacagacatggtctgtggggttggtgtgcctagtgtgggagtacttggtctgctagtaactgaaccaacacttaaccgcgggactgttattcttcccgcagaagttgatgcctttttctgtaaagatttcagcctatagtttggagctgttaagcagtatctatcaggtggcaacctaggacctgaatatggcttgatcaatggcaaaggggtttgatttctttgccttgcaatatctaataaaaaatctcttgggggaggagaggtaaaagactgatcagcgcggcactggattgccaatcgcacatcatctgcatcaacagtagctttcttagcatggcttgaataaatttttgcatcatctagaattgtggtcacatatcggaaggcaaactccaacatctgatttataactcttggctcatattctgtaatccccacccggta

SEQ ID NO: 125481 - DNA, 2217 bp, Homo Sapiens
  misc_feature (121)..(129): n is a, c, g, or t
tttcaatattaggccacatgatttattcagtagtttttatgttcccaaattacaatttatgtctattcataagactacaaaagttaccattagaattgtctgtgcttataaaataccaacnnnnnnnnnaaactgttacatatactcattaacaccagtctgcaacaagttacatagaatcagaggcacttcaaaggcttaaaaagacgtttacaacttaaatgcatttttaagaacaaaaactgatttttctttaaacctctactcgtaccttcaaattgcaagaaattaacaaatacagtggccaaaggaatctgcagcaacttcttaaaatactgttaacatctttgggtttgctgaggcttgtcagtaacttacatcaaatcctcccaaaagaagatctgattagatagatatgactaaacggttttgtagtaataatccaattttacacattaatttgctgttgcaaatctgcccaaagctacaggtaatgaaaaataaagcaagtgtaaaatggatagtctgacacttaaaaatttatacaaagtggaagttaaagtttacatatttgaaaatcacatatacactaaattaccattatctgaattttccaaagacaaattgcaccatgacagctacaaaaggcatagggtttggttttaagggcacaagaagggagggcagaggagaggaaggggacaacagataaattaacaaagtaagaccaacttggtaaggtcaatctgagacatgctgacacaaatgaaacagctttcatctttgagtcataggaaaaagacaatcattttgtatttgcgcataaaagtttaaaccaattccatgaacatcgagggttttcataacataatattttgccactgctattcacagaacactgcagatgttaaattttaattttatgttgttctaaagaaatacatgaaatgttttaaatacaatgggattttatcattaaagtgccagaatggctctttaatgaaaacaaaaaacaaagatcttcattattctatgcaaaagctttattttgaaaagttcagtgatctcataaatagagacactaagttggagttttacgcataaaactccttagtaggtgccttctgataagcagcactggatggtttgcgttctccaaggtcatagcttccttcatccttctttctcatgcgatacaccaacagcaggataagaaaaattgcaaagagaaagccaataactccaccagcaatgacagctgctaggacttctgtccgtttaaacagactgtctgagtgtttctcagtatacacatttgtatcctcttcggctgggtccattttcctttctgagtcagagaggtgaactttctctttatcagtttcttcaggtgactttgtctgagcaggtatcttgttctgtatattcaagcttcgtggtttccaccttttggagcagcacttagtcaacagtatctttggaagtgttcgagatgttgtcagctctggactcttctacatcctcatcagctcccgagccagacgcagaagcgtagtcatcgtcatccataggatacactcctgaagcttcttcacatggagctgttgtcaaggtacatgtctttatccagatgtcagctctgctctcgactccgccgacacgcaggccaccaagcccaaggtgagcaggatccacgcgcgccgcatattccccagggaccggctgctcccagccgctgcttgcaaccagggcaaaacgaagcctcctgcccagcgctcggcgcagcccgcgcacacgaatccggagccagagtaccgcagcgattgcggctcaggctcggggactcgggctcggggctcgggggcgctcgcttcctcctcctgcgcctgctcccgccgcccgcagctgcgccccgggaacgcggcgccctctcacttgttggtttctgcactcccgacacggagttggtgctccgggaaggctgctctctgaagctcttcttgctctgctgtggttttgctcctccgcggactcctttcccgtgccgaggttcagtttctggttttaaggaataaattcgctggcttgaaagggagctacggcagaagtttaggggcagagcggcgggagcgcgcgatccgcgcggctggagctccgggggtatctccccggccgtaatggccgaattcccgggcatatgtccggtaccgtcgactg

SEQ ID NO: 125482 - DNA, 1006 bp, Homo Sapiens
  misc_feature (890)..(890): n is a, c, g, or t
  misc_feature (895)..(896): n is a, c, g, or t
  misc_feature (928)..(928): n is a, c, g, or t
cacgaggttgaaaggtttaaacgctttattgtgcccaaaaaaaggcccatggaatgaagggaagagccgcgcagccctgagcccggagcgattgtttgtcgcgcacccaaaggcaaggagggtggggagctgggaaaggatgcgcggcctccgcgtccccgcgcgcctgggcccggccaaccagcgaccccgcccggtgggcaggcgcggcctcggccatcggcgcctaggggccagtaaccatgacgacggccgttgccaaggccgagagccaatagaggcgtcgccggggctgtttcaaaaacctaaagcaaacaacgaaaaacgctacatcgttgggggaggggaaagactgagaggacccggggcccctccctgaggctcagaccaggcctcgcggccccggccggcgtgagccgtacaaaatctacgtcacttggggtagaaaaacaaaaacaccgaaaagcccacgccggccgctctgaccggccgacacgctcacttgcggcccttgggcactttggggacgctgggcttggccgccttcttcaccttcttgcccccggcggccgccgtcttcttggccttgccgcctttgtccttcttggcgccagcgcccttcttgtgcgagcgctgctccggcttctggcccctggcgggcttcttgtccgcgcgccgggagccggccgcgcccggggctgccttcttcgctttgtgcgcggtgggggccggggcggttggcggccggcggggctccgcgccgctccccgcggcctccagcttcttgcggttgagcttgaaggaacgttggcgcggtgccttcactgcagagcgtgtcgtctgcacagcgcctgatcgatactgaggtagtgcgccatctgcgtgtcgancaggnnactttctggctcgtgtaattctggcacgacanccgtgcgctcgccacctacgatgtctcacacagctgctgtactgccgctcgtgcgattctgggctcgaggcaatccta

SEQ ID NO: 125483 - DNA, 723 bp, Homo Sapiens
aggttaaaggtttaaacgctttattgtgcccaaaaaaaggcccatggaatgaagggaagagccgcgcagccctgagcccggagcgattgtttgtcgcgcacccaaaggcaaggagggtggggagctgggaaaggatgcgcggcctccgcgtccccgcgcgcctgggcccggccaaccagcgaccccgcccggtgggcaggcgcggcctcggccatcggcgcctaggggccagtaaccatgacgacggccgttgccaaggccgagagccaatagaggcgtcgccggggctgtttcaaaaacctaaagcaaacaacgaaaaacgctacatcgttgggggaggggaaagactgagaggacccggggcccctccctgaggctcagaccaggcctcgcggccccggccgacacgctcacttgcggcccttgggcactttggggacgctgggcttggccgccttcttcaccttcttgcccccggcggccgccgtcttcttggccttgccgcctttgtccttcttggcgccagcgcccttcttgtgcgagcgctgctccggcttctggcccctggcgggcttcttgtccgcgcgccgggagccggccgcgcccggggctgccttcttcgctttgtgcgcggtgggggccggggcggtggcggccgccggggctccgcgccgctctccgccgccctccagcttcttgcggttgagcttgaaggaaccgttg

SEQ ID NO: 125484 - DNA, 1149 bp, Homo Sapiens
  misc_feature (662)..(800): n is a, c, g, or t
gggctgttgacaagtaacctcgctggaaggcggcggccgccgaacagggcgtggtcggcaggaagcggcttctatccgcgctggcaccccgaggcaatcactccctgccatcgtcgctgaccggaatgcgacgtaatccgtttctcccaaataggtttccgcgtcacctccggagggcccagtcgcacagcttgcgagcccagtactacctttccgccgtcatgtcttcttccggctctaactgttacgcgcgggcgcgttcgccgccatgatcaaaaataatgtctcgcgtcacgcgggactacgagctgggcgcgtccacggaggtggacaacggcacacaaagggtaggacagggagtgaggcttcttcggcccagcgaccgaaccggctcgcgcctcgtcccctgcgggcgggatggttctgccgtcccccagctgtgtgtccctcgccccggctggtttcttcttgtggctttccttccctgttctgggatgggggacaacaccgcccgaacccccagccttggtcaccttcttggccattccctcggcggtcgtcactagcagggcctcctcgagctccacggacatggtagcaagagggttggtggcgggcggcgcgcggaagccggggggccgcgccgggaagaggaaggcgannnnnnnnnnnnnnnnnnnnnnnnnnnnnnnnnnnnnnnnnnnnnnnnnnnnnnnnnnnnnnnnnnnnnnnnnnnnnnnnnnnnnnnnnnnnnnnnnnnnnnnnnnnnnnnnnnnnnnnnnnnnnnnnnnnnnnnnnnngggccggactaggggaccgagttgggggtcagagaccgagtccgagccggcggctggagctggggacgtagacctaggccgagccggagcgaagagaaatcccgccgaacgcgagacaccgccgccgcagcttccactggcgcctctggaactcgctgggcgtgcgcgctgcggtctggacgggagggcgcttctctcggctttttatagcttcatggcggaccacgttgagaacaacaacagcctggtccggggccagcgccaacttgtgcttcttggagccccttctccggccgctggcttctcggaccgcgcctctccagcgccgccgcgcccgcagcggggcgcc

SEQ ID NO: 125485 - DNA, 1430 bp, Homo Sapiens
  misc_feature (339)..(366): n is a, c, g, or t
  misc_feature (411)..(452): n is a, c, g, or t
cgtcggacacgcgccgcgtcgtaatggatcgagggtgtgcggagagcggcgtctcggcggttgctcagcgtgtgtttagagggcggtaagctcacgggtgcggacctgttgggcgggtcctacgaggggttcaggtggcgatcttcttctggttaactcgcgtgatggggcatcgacgattccccggtgggcgctatggtctgtggcccggtatctctagctggatgggggcggcgagggaggccgggggccgcgtctggtgcgtgcgtatttcgcgtctgttgcctgtgttggggcggcgtgtagtgcggtcttgggtgtctgcggtgcccggtgtannnnnnnnnnnnnnnnnnnnnnnnnnnncatggtctatgtggggtgccagtgggctgtcaggtcgggctgttnnnnnnnnnnnnnnnnnnnnnnnnnnnnnnnnnnnnnnnnnngggttcgtgggcgtgaaggcgaccatgcgagaaacggcggcatggttgggggaggggacgtgtctgagagctcctcggggcccctccctgaggctcagaccaggccttgcggccccggccggcgtgagccgtacaaaatttacgtccccttggggtagaaaaacaaaagcaccgaaaagcccacgccggccgctctgaccggccgacacgctcacttgcggcccttgggcacttttggggacgctgggcttggccgccttcttcaccttcttgcccccggcggccgccgtcttcttggccttgccgcctttgtccttcttggcgccagcgcccttcttgtgcgagcgctgctccggcttctggcccctggcgggcttcttgtccgcgcgccgggagccggccgcgcccggggctgccttcttcgctttgtgcgcggtgggggccggggcggtggcggccgccggggctccgcgccgctccccgccgccctccagcttcttgcggttgagcttgaaggaaccgttggcgccggtgcccttcacctgcagaagcgtgtcgttctgcaccagcgccttgatcgagtacttgaggtaggtgcgcccattctgctggtcgaaccacggaaccttcttggcctcggtgtagatcttggccagcgacgagccgttgcgctcgcccagcctacggatggtctccaccaccagctggctgtacttgcccggctggttcttcttcttgctattcttcctcttcttagatggggacaacgccgccgagccgccagccttggtcaccttcttggccattccctcggcggtcgtcactggcagggcctcctcgagctccacggacatggtagcaagaggattggtggcgggcggcgcgcggaagccggggggccgcgccgggaagaggaaggcgagggccgaggggtgccctcgtgccgaattaacacccggcctcgtactgagcgctatt

SEQ ID NO: 125486 - DNA, 793 bp, Homo Sapiens
aatccccccacaaagcttttccaactatgtactatgcctcctttcttattgctatggtaatgtggctgtggaaataaaactactgtacatccaaaaaaatagagcacctttaacattaaagtatatgtctgattatttgttctcatgtttattttacaatactaaagcccaaactatggtaaattgctttacatctctaccaggtcacctgatatacaggaaataaaactcaactatcttccctcttgaggtaagcccaagccagagcactgttttagcagagtctaaaagaaaaaggtctcaactgtcgccagggtttacattcatcttcacaccaggagttacattcattcatcttcacatcggcgctgctctctgccgtggttaccgagaaagagtcgaggctccctatcctgctgtggtgaatggtgctacacagaatggaacagcaaaaacatctacgattggttgaaagcacacagaaaaaccacatgtttgtgacttcaaagggacaaggggcatttcccagtggtcccttgatgaggtgcggattggctaagattttttgtcgatggtggtgaaaaaccattctgtgaatttccgcagctgagctgtcgcggtctgggactcctcctgcagcctcatgttgtcctgtctcaggtgctgcacttctgcttggagaacggccttgtcttgtttttcctggtcagagtagaaataaactgagtcttttcaatttatctgtagtagttataaggggctgattttataagagaaacagttctgattatgc

SEQ ID NO: 125487 - DNA, 365 bp, Homo Sapiens
cttgttgtggttagcaaaacgaaaggcttttattgaaaaatatcaagtgccccttccagggctgccggtccctgcccagcgcgagcatgggggcagcggcccgatggggctcgacggggtggtcaagtattggcggtcacccaggccccgtgctccagaagggtgaggtttcacagtccatgcaggttggtccctgggccccgaagtcgactgcccggcccgcaaagccgtggctgctggggaagctgccccagtccagcgcgggggcttcctggcttctgggggtgggctggcctccgaggcaaggctgcacgctggatggcctggtgcgcgctccagctcgcggtggtggtggtgggttgtgt

SEQ ID NO: 125488 - DNA, 892 bp, Homo Sapiens
atcggccaggtcgaggccgggggttaatcggcacgaggttttttttaggaaacaaaggatattttattccttttttctgttgttgttgaggatagatcacgatacagagaacagcaatgggtcacagcgcacggtttggttggtttccgcgggaacacagaggacaggaggggcgggatctgggttgagttcccactctcgttatgaccttcaacctctcactgttcccaagggctgcacggagcctgctgagtctccaacccacctcgctcaccgctctgaccaccgacaggcagagcaaaggatgcgggagttgcctctgctgcccatctaaggggacgtaggcagagaagcaaaggcctctgctctccctccatccatcccggtgtgctggccccaacggaacaggagtccttcaactattgcctgccagagacccaattgcagggactgtagtctgcatctggatgagctgggctgtagattgaagtctcagaagcagggaaggttggaaggggtagggtcccagagcccatggagttattgctgagaagatatgcaggggacacattccccaggggcagagtagaagccctgggcctggaatccccgggcgctctgtgaaggggcggggcagatggggactcctcgtggaagcccctgggaagaaattaaccacggaagggcatagcctgcctgacgtcaacgctgggctcaccagctccttgctttgtatctcacagttggctaagagaccttcacgactgggatacaggtgggataaggaagcaaggtttttgttacaaggagtgaaaggagtccatgaagaatgatgacaaagtgctgcaaaccttcccaggtcccaagacgactgaagaccactgcccgtgct

SEQ ID NO: 125489 - DNA, 991 bp, Homo Sapiens
  misc_feature (710)..(711): n is a, c, g, or t
gacaggtatcaaggctgtttattgactcttcgcagccagcggctcttcctctgcccctctgggatgcctaatccccgtctcccccctgggagccaagtggagtggctctgagcttgaccccaggcgccttcctcttgccaggcttccctgccccgcagccttggccttcctggtttgccacaggggctgttactcctttgattctacatcctcctcgaagtgtgtgaggtaggccatctgagccgaatcgcgcgagccatagagagtgttcatgctgtaggagctgccatggaggcacagggctttggtaacattgactgtgttggccgccaagatgtccgcctgaatgctgtctattttcatgtacaagtcctcagcgttgctctgaggacaggagcaagggggacccggctggggtgccagggcagtctggacttggagttgggcttggcagagggatgttgcaggtggggggcgggtcggcagccaggaagagctggtagagttcctcccccatgcacttgcgcacgtgctccgccaccaaggggaacatctgcacgaagcactccagcgtgaggctggccagccgctggctgttgctgtggtccgtgttgcccatggcggccattaggccacgcaccacgcgcaggtacagcagctcctcggcgatgctcatgtcgttgcgcgccaggacctgggcgggggtttcnngggcgatggctggcggcgcggctgctgcaaaaatcggaagctggggtgactggaaacgagggtcatgaggatctggctgcattggggattcctgacgacgtacacacgcacgagcctgacacgctgggacatctacgacagctttgatactcatgctcaactgactcagtgatctgcacactcaaccatcacagtgggggttggccatatggtggatctgaatctagaactgcggcttgggaccagacaacataactaaactgttggatggatgctggca

SEQ ID NO: 125490 - DNA, 854 bp, Homo Sapiens
  misc_feature (1)..(1): n is a, c, g, or t
ngcctgaatcaaaacctttttaggagtagttacagatattatagggatgggggcggggggcactaaaacaaaagagaaaagcaccagtgagatgtctttcccattttcttctctccgccacggaacacgcacaccaacagagcccaggccactttttgccctcttcccttggaaaaaggaggaacagaagatttaagaattttgaaaggatttttttcttgtgtgaatgtgtgtaaaagtcaatgctataaatctaaaacgaggtctgtttttttaaaaaagttctaaaacaacaggaggaaaacacatggaaagaaacccctcgcggagacctgcttccttacagatggaggctcttttggaggagagtgtgaagggcagagggctccctgcgccggcaggacctgcccggccaccctccactcccctgccatcacccctcctctctccttttaaaaagcaaaaccccactcttgggactcgggtcgtcctccgatccctgctggaaagtgcggcggctacttggcgtcgagcttggccatctcctgcacgtagatgccgatgctctcgctgtcgaagagcaggaagtacacgttcttcagcgaggacgcgctcgagtcatcaaagtgggctgagatggctttgagggtcacctgggccgcagtctgtttgggaaagcagtttctgccgctggggaaaggcgggaacgcgacggactttagcttcttgtcctccgccgctgacaggcagtttttgatggtctcttcaagctgttcttcacatttgtcggagccccactgagggatgtgacagtggatgacaatttggctgcgagtccactggattggctgacg

SEQ ID NO: 125491 - DNA, 702 bp, Homo Sapiens
tttgtgataatacaattttctttattaaaaataatttacagcatcagtaacatatacacaattgtcatcaactgaactttgcctccaatatatttctatacaatacttaacattattgaacttaaaactgttacactgttttgttggctttaaataatagacaatgatttttgtctattacttagtgatagacaaagtgattactttgttacttaagtgagatatatggtttcatagccacatattatgtgtaaaattgatagaaacgtcagcaatatcactctttaggggaaaaaacactgaaaagccaaagtccaccctcttcttctctcttattactccaaccaaactaagataggataaacatccagtatcttagtatctcctcctaaacctaaagacaaaagaaaggtgtcttctattcaaccacagaaaaatgtcaaataatttcttctcatcctctcactcatcactgtgaaagcaaatgcacacgaccttgttaccatatatgcaggcaactatgattctgatttaggtcctagctttactttcctttagtacaactgttgtttgattaccaacgaaaaactaagcaatctggctagagggatactagtaccttctttcaaatgtcagcatggagataaaacaaatagtgataactgtcatcttagaactttttagaaaagggccgagctgata

SEQ ID NO: 125492 - DNA, 645 bp, Homo Sapiens
tttttatctttaacaaaggtgtgtttatttccatatattgctcattacatttttcttgccacagttttatctaaagccaggtcaaaatctttctctaaggtatttattaatagtgtatgttcttcagatataaaatccctctggtcaacatgcaacatttgaatatctattggcactgtacctctatgagatatttatgacatttgttaatagtgaacctcaacctcctgaccccacatccgaagttgggggcgatgtgggggaacatacacaaaattacaaccacattactggtcaagcactttatagctaaaatctattgactttaaaatagcattgtatgtgaattcagagttttaatgtattttgtggatcaaaaggaaagggtcaaaggctaagctgaacacggagggcactaaattagctaataaggcagctagtgcccctgttcttgccccagccctgtcatatcactacatctgattctctcaaatgttataaagaataatgaacttaaaacttcaggggttcctgaaaactggtattaaattaaaagcagagcagtcaaaattctttgcaaatgacttctgtgatagaaaaaaatatttccaacctgcgtcagaggagaattatcttttaggtgcc

SEQ ID NO: 125493 - DNA, 719 bp, Homo Sapiens
tttatataaagtggttttttattaatgaaacatttcattgcattaagggtagaaataaacatgtcaagaaccgcatgaagtgaaccaactgtataagctacatgaagagcattctggtcagtattcttgttaacaggcacaagcaatttagtgataatgtccagagggccaaggatgcggaccaccttttgcagaactcatatctcgagcagtttaaattaaaaattagcctcccttaagttaaaaaccccaataggggttagtcgtgtagtgcttgttccacttgaccattagtgatctttctagaacatgaggaaatcaagtctggttagaaaagcctggagctaaaagtggcaaagcccatttcctgtcctgtgctcaactcctaattttccctgagagaagtgagttaagctctctgtcttggtttcttcctctctaagttgaggatcatggtaccagaagcttgcattctgtgatcatgacagtgcttacaatcacaaagcctttgggggtctttctaagataactgccgcaagaaaatgagcatgagaaataattcatcttcaacttaaagccaaataggtgcattcattcctcttaatctataattttgactgtagtttgtagatctgtctcagacttttcagaaggatagtatcaaatgtgatttaaaccaagtaactattaagaataaaaaaacatccagcctaaaaaaa

SEQ ID NO: 125494 - DNA, 1716 bp, Homo Sapiens
ttgtgtgtgtctttaacatttattgacggggtttcccacagggtccgcagtcaaagaatcgctgaaccgcgtttcctcgagagacggtgtgtggcatgggcgccttgctgctgccccagtcccagagcttctcctgtaggggtgtcggctacaggaaccttatcccagctccaaactggacgccatcacatatcctgtcgcctgtctgtactcccatggggacgcagtaattaagttccaaccgagcgatgttgccaagcctgaggacaatcccggccccgtacgaccagcggatgcactcagccagcttacgaatatgagctttggggccctccccatagttgaggttgcagaggtttcctgcgttgagaaagaagtgtgttcggaaaagttctccaaagccaccctggcctggccggaaaggtaatggggtgtagaggtgcaggccgccggcccagtacgcttctccacctaggtagtctccttcgctctgtggcccgatgctgtgcatgctgaatccgcggacgcttgtgggtcccccgaggtaaaacctatcagcaatgcttgacggcttatcaccaatgggtaccaacattccgccccagaaagacgctgaaaaaactgaatcaaatatgagttgcttgttcaactgaagttcaaaatcttctttgatgaagctcacatccccgccagtgtagcctgccagttcctggttaactttcagcaaagcacctctccttggtaagatggaagaattccgagaatcgatgaccatggcgtgcgaaagagatgatttcagtgaatgtccgctttcttttcgaacagcaaatgacgccgtccttgagaggcagcccagttctcgccatacgccttcccacttgacagtgtggctggtcttccatatgggaaaactgtactcagctgacattcctctgtccgtctcccgcagtgagctccaagggaactgtccagtaactttatataagtttacagagaaatttctttcgaagtttccgggccgtggtttgaagaaggacaggccatacgaagtttcttttgttccataggaaaactgaaaggtcaccttttctgcacgaccaagaagattaggaagcttgaggccaagtaccatactgccttcattgttcccaaccatggtgttataactgcccgttaatctcctcaattcagttacttcaaaggtaacgtctaacccatttggaagtgcgtcatcaccttgacatgtgtcaatcaaaacatccacttgtctaaaaattccaagacggagcaatttttcacgggcttcatgagatttccgcattacctcaattaggtttttggccttgaaaacatctccaatttcacaaatgatgatatcatctttagtccttccaagtccatcaaaatgaacatgttgaacaaccacatctttgttttcaagaatttcctgtttagcttcaggctcaacttcaacaaattcagcttcttctcctaatcctccaaaatcaggtccacttgatggaagaggctccaaactccgggcgtgcacagtccccatggttccctctccagccgctgcctcgcagagctgcccgggcgggacagagcgtctgctgctgagggcagaaggcgggtcccggtggcggagctgcaggtcaaggcagctcccacaaacccccgctcgtgccgattcacaaacccaggcctcgtactagc

SEQ ID NO: 125495 - DNA, 876 bp, Homo Sapiens
gcacgaggttttttcttattcatcattcattcatttatttgattagttgaaaacacttccgactaaggaagcagagagcccacaatcctgtgggaaaacaggcctgggaactaatatctcaggggtagtgagggtcgggcccagatcctcaaaggttccctgcccctgaaattgcacctttgacagctgctgaattccaagcacagcggtaagtgctttacatggggtaaccctaaaaaacacactgggcctcagacactcccgtacacacacccaacctctaccctgtggatgtcctagataagggttttctcttcacaaaggtaaatcaactctttgcctccttagggagggaaggaataaaggcattatttttgagacttttctgcagtccattctgcaggtatcagtagtgggtaatccctccaacgtccaggactccaaacgagcagctgctccctaaagctcacccaccaatcctggccctccacctgctactggggtagaggcctgggctacagacacagaggctgggcttctgcccagctgccagtggtgagacatggccttcaggagctcaggtggctttttaactgcaccatgaagattccaaacttggtggagttcagtgtccacacataacgaatgagaacaggtgtcagcagtgtcaaccaggtccgcaaaggggagaataaaaaagctagggtgccgtatgttgcataaagaaagtagcaggaataaacctgccagatgtacagcagtagcataagtaggtgaacaggcataattttcaagtattttctttgatggagatgagacctgaagttgtgaccaaagcaccgctgcagcaagctccaacacatgtaagccatcaag

SEQ ID NO: 125496 - DNA, 456 bp, Homo Sapiens
attgaaagactcctgttggaatgctggcccccgcaggaaccaccatgatcccgattcacccaggagggccaccctcccgtccagccccccaagagcagcagggctccctcttgcccttgaacctcctctgccctgacaggcggcgtcacccagggctcaggatcctggcttccagcattccagaggtgactcaccaaccaaagtgtcactcaccaaccgaaggaccttgcacaaatgcaccagcctccccatgcctcagtctccccatctgtaaatgagtgttatgacggtactgtcataaactccctggaggatccaggtggtcacgttactgttggtgacattgtccctctgttggctgcagacgcatcttctctccagactgccgatcccagaaagccaggtgatcaccattaaccccgagctgcctgtggaggaggcggctgaggactacgc

SEQ ID NO: 125497 - DNA, 1082 bp, Homo Sapiens
gtggtagcgggcggatattaccagcaacgctccttttaatatccggatgtccagagccacagcctgtgtgttgagccccgggtagggctgctggccggaggctgttggcttccagcagcagcacgacgtggctttttgaaaggagagcccggagagtggcggccagcaggggcccagccccatgggccgcgtgcctggtcccagctgcggcgtccctctggccagctacaaagtggaatgcttctcgaagggcacggtcaggaggcgggcggccgcctcgtccaagaaccagcacagtttcccggtgtggggctggaccagggcggcgggcagcgggttttcctcctggtcctccaaaatgcgcttcagaacagctgccttgccttctccagttgccacaaagatgacagttcgtgctgcattcaggacaggtagcgtgagggtcacacgctgtggcggtggcttcggggagtcactgatgggagccacaatcttctcccgctcctgtaggagggggtggtctgggaagagtgagcaggtgtgaccatcggggcccacccccaggatcagcaggtcgaaaaccgggatggagtccccttggaatgcctgtctcagcttcttggcgtagtcctcagccgcctcctccacaggcagctcggggttaatggtgatcacctggctttctgggatcggcagtctggagagaagatgcgtccggtagaggccgtacgtgctctcggcgtgatcgaagggcacgaggcgctcgtcgcagaagcccagcgtccagcgcgctaagctagctggcccggcaggggcgacggcggcgggtagctcgcgggctagcatcgagacgaggctcccgcccgacaagccgagcgcgaaacgggcgcgggcccctgccaggcagcatgctgcgcgctgggccaccagctgcgctagcgccgcacccagctcctgggaactcgagaacaccgagatgaggcccggggccggcgcggccatggcgagggcggcggcggggaggaggcctcgtgccgaattcgccacccaggctcgctctgagggatgttggaggcgggaga

SEQ ID NO: 125498 - DNA, 1033 bp, Homo Sapiens
ttttcaaaatgttgctacattttattttcaacttaaaacttcattataaaatttgccaaataaacatgtcaaaaacaaacttaaaaacaaagtgtagctgatatccagaaattgcagcactgtattgataaagggctcttttcattaccagggaaagaatttaatgtccttccttcctccccaaaagcttccttggtgcaatccagtacagaaaacgccaccactttctgatgccaggagaaaagcaaaataaaaaaactgcttgcacacattagcactgataaaacaatgacaatttcactaaaagaatgtttaaagactaccggatgctggagcaaaccaacttcatgactgcattaacataagctaagttacatacacttcaaatgcagtatagaattaacactgcatatctaaatggctcatatataaaatgtgtaattaaaacccaaacatacacactatgtttattacattcccctacattgaaagtactgagaacaatttaactctgaacacaaaagtttagtgaatttgctactgttccattacaggacaattaaaaatgagactatatcaacttcactagaatttaattgctaaagctaccttatgcacatctattaaactaaaagaaacgactttaaccccttcagttgtttttaagacagcactcctttacagggagtcaggtttggtaaatataaaggatacataaaaaatacagtataaactgcataagcttaacagtagcaagaacacttatgaacttttacaaagtcagaatacataaaatattagcttgaatggcaattttcaacacgatctgtgtaaaatggttaatattgatgtactccaaatagaacttattcagtgtttctatttgacaacttataagggaagaacacctcattgagtgtcaatcgattcccagctgtggtaagagaaccctcccattttaacacacctctaacatatggagattccattgtcaaattttagtcaatacttaaaattttttaatctgaggttg

SEQ ID NO: 125499 - DNA, 1462 bp, Homo Sapiens
  misc_feature (1346)..(1380): n is a, c, g, or t
tttttaacattgtaacaggtttatgcattttgaagtgccttctacacatccacccagaggctctgctgatttcacttatgcccaggctataaaatgcctttctctcatcccccagtagagcactgggatcaccactaggcctagggggcatatcaagggtttaatagactgggggaatgggcaacagaactggctaccttagaggctctggaatgccccccacccatccacccaccaatggaaggaaagtcaggcatcgcctaaaaggagtggtccctatctagccccaagtctggagcagaaagggcaggtccattctggcccaagtgacattgttagatcctgtcccctcccccaatcactgctgcttgccagggtgcctcttcacagttcccatgtggcagcagtagtggcagaggcagaagtggacttattgtagattgcagtacagatacatggacacaatcatggcagccagctcgaggcccccaattccagctgccacaccacccacggtgactgcattagttcggatgtcatacaaaagctgattgaagcaaccctctactttttggtcgtgagccttttgcttggtgcaggtttcattggctgtgttggtgacgttgtcattgcaacagaatgggggaaaggcactgttctctttgaagtagggtgagtcctcaaaatccgtatagttggtgaagccacagcacttgagccctttcatggtggtgttccacacttgagtgaagtcttcctgggaaccataatctttcttgatggcaggcactaccagcaacgtcaggaagtgctcagccattgtggtgtacaccaaggcgaccacagcagctgcaacctcagcaatgaagatgaggaggaggatgaagaagaacgtcacgagggcacacttgctctcagtcttagcaccatagcagcccaggaaaccaagagcaaagaccacaacgccggctgcgatgaggaagtagcccacgttgacaaactgcatggcactggacgacagtggcccgaagatcttcagaaaggatgccccatcgattgacacccagatgcccactgccaacagggctgcaccacacagaaagatgagcaaattgaagaggatcatcatggtcttaatgaagctgaagcactgcatggtggctcctgttcagggctcttggcagtgagttctgaaagagggaactgctgaggctccacaaaggacaaaacagctcccgggtgttgccactgagtgggcaggcagagggacgcctggctctcacacaccactgctccccggccgtaatggccgaattcccgggcatatgtccggtaccgtcgactgnnnnnnnnnnnnnnnnnnnnnnnnnnnnnnnnnnncgccgcttcctcgctcacaaactcgctgcgctcgtcgttcgctccaggacgagctagcgccctatatgagtctatacacttg

SEQ ID NO: 125500 - DNA, 950 bp, Homo Sapiens
  misc_feature (332)..(341): n is a, c, g, or t
cgttcagcctttgaatttgctcacaaagggaaacctttcttttaagtaggtagcccaaaccgaatgtggtgaaccccagcactgaccctttcatgggggtgtccccactgtgagtgaattctgccgggaacccagatctttctgatggcagccactaccagcaacgtcaggaagtgctcaccattgttgggtgtacaccaagggcgaccacaagcagctgcaacctcagcaaatgaagatgaggaggaggaatgaaagaagaactggtgtggggaatcaggggtcttggcttttagggagagacagtccctcatgccctccttgccctaatnnnnnnnnnnggaaaagtgagacagaagcctgagcctaggggggtccaaagcagggtttgggaatcccagggcctggtgtcaagggcgaggggactcttggtcatcagcctgtggagctgggtttcacacaccgtcacgagggcacacttgctctcagtcttagcaccatagcagcccaggaaaccaagagcaaagaccacaacgccggctgcgatgaggaagtagcccacgttgacaaactgcatggcactggacgacagtggcccgaagatcttcagaaaggatgccccatcgattgacacccagatgcccactgccaacagggctgcaccacacagctgaggccccatttggctcccctccagaatccaacttcaggcccgcccctcatgtagacaagacctccttgcctcacaagaggaaagtgaggtaccagtgggaatacagccagagcttctcttaaaggctgtctagctcaactccaaacctcagggggaattctgaggcctagattgaggagggccctgcgcagttcccacagatcttagaggaaagcctcccggcccagggcttcagtgggatgaatcagcccctcggccgatcaccccggccttactt

SEQ ID NO: 125501 - DNA, 1419 bp, Homo Sapiens
  misc_feature (703)..(703): n is a, c, g, or t
cccattttccagtgtcagccttgcccacccccacccccaggccaccccagctgtgagcctgactcttcctcccactcagcaccccctcccccctcatgcatcccctaggggctggaggctccacttccctggagggccagatcccaggaggaactgtggggtggaaaaaacggaggggggggaacagccccagatccacctgccccccaggtctccagccaccggcaccaggtgcaccaggtactcctcttggctctcattaaccctctcctggtcatgctactagctggggaggggtggtggggtactgatctgggggaactccctctgcacccctctttgccccggggccggctcggggctctcctcactgaggttggggggctccctccctccatcatggggggagagcagtgaaacccccaagtttaaataccttaatgaaagcaggggctggggaggaaggggctttagatctaataaattattagcgttttagtgttccgtgggattgggggtggggttggggcaggatgttgccttccaggggcccctccctcccctttactggtgaatctcattctctatgaggctgtcctcgcaagactggaagtctgtgtccgtgagggcgtcgggtggcatcagcaactcctcatcttgggatgaggatgatgggggctcatcccctgagctcccaggagcnccatccccatccccgtccacctctgagtcctgcagcacctgagcgatgtatttcgcagatttggggacagcagcagcagtggggggccgtccattgcttctggggtccacagtatctgtctccgtgtgctcaatcttgtagttgtgggcactgaggtatttgaagtgtccaaagcagacgtggcagagacagatgacgatggtgatgaccaggaccacaaatgtgaacatagacgtgggagctaggaaccccgtgcgcatggtggaaaagaagagcagccagaagaggcagaggatgggcgcggccaccacctggttcacagcccccgagtggatcttcttgtccagcttggccggcaggtaggcgtagtagagattgtacctgtctaccaggtgcttcagcagcatgtacatgagcccgaagggcacgatgatggggcaggtgatactgtaggtcatgaccaccgtgaagacgcacatcatccaggcgtaggctgcgccaaactggaactcgtaggcctgatgccgcttcacgttgcgcctctcggcggccgagcgcgccaggcagagccggatcatgtacatgagcaggcctgggatgcgcagcaggtccatggcgttgccgataaaggctgaggcaatgacgtagttcacgaagaaggcgccgtttcgggcaggaacacacactcacctcgtgccgaattcgccacccaggcc

SEQ ID NO: 125502 - DNA, 844 bp, Homo Sapiens
atagtaaataaactttatttatctgtttctcagagatgaccctgccaccaatcacaggatttgcatccaattcagttatgtattggctattcacaatttacagtagtgttttttcctctgaaaaatataagtacaaaagctaagtaaacaatgaggtactgccatttgggattttttacatgtcttagcttaaagaactggtctttagcaaatattcaacagatcaacctgaataaaatagtcaattaaatgctctaatttatcagaaaaaatccactaagtttcacctcaaaatgtattgcacaagtctttttaaaaaatcaccctaaaaataaataggaaaggtaagccgttctttaaaaagaatggatgaaaggaatattatgtaagcccataaagcaggttaagttatcaaaatatcttttaaacaacataaaactcttcccaagagaaaactgaagaaaaaactatcaccatttctccactgataaaatctattttaaaggcagtctgcaacttatctgtgggccagatttttcttggtcttttggctacatgaggggccctgaatgacaacttcattctcaaagagtagcaagtgtggacagttttccaagcagcagtcacccaatgtcactcttcttcaagatgaagatcggagccatgacatcagccgagcatcttctctttccaaaattttctgagtctgatcatcagggaacttcagtacggtggttataacttttgccatggtcttagtctcacgacccatcatatactcaaaaagcacttttcgcaaatactcaaattcggtaggttctccaaagagtgagacatccgtacc

SEQ ID NO: 125503 - DNA, 1100 bp, Homo Sapiens
  misc_feature (707)..(707): n is a, c, g, or t
  misc_feature (725)..(725): n is a, c, g, or t
  misc_feature (755)..(756): n is a, c, g, or t
  misc_feature (759)..(759): n is a, c, g, or t
  misc_feature (824)..(824): n is a, c, g, or t
  misc_feature (852)..(852): n is a, c, g, or t
  misc_feature (867)..(867): n is a, c, g, or t
  misc_feature (884)..(884): n is a, c, g, or t
  misc_feature (955)..(956): n is a, c, g, or t
  misc_feature (968)..(968): n is a, c, g, or t
  misc_feature (990)..(990): n is a, c, g, or t
  misc_feature (1026)..(1026): n is a, c, g, or t
ttttatagtaaataaactttatttatctgtttctcagagatgacactgccaacaatcacagatttgcatacaatacagttatgtattggctattcacaatttacagtagtgttttttcctctgaaaaatataagtacaaaagctaagtaaacaatgaggtactgccatttgggattttttacatgtcttagcttaaagaactggtctttagcaaatattcaacagatcaacctgaataaaatagtcaattaaatgctctaatttatcagaaaaaatccactaagtttcacctcaaaatgtattgcacaagtctttttaaaaaatcaccctaaaaataaataggaaaggtaagccgttctttaaaaagaatggatgaaaggaatattatgtaagcccataaagcaggttaagttatcaaaatatcttttaaacaacataaaactcttcccaagagaaaactgaagaaaaaactatcaccatttctccactgataaaatctattttaaaggcagtctgcaacttatctgtgggccagatttttcttggtcttttggctacatgaggggccctgaatgaaaacttcattctcaaagagtagcaagtgtggacagttttccaagcagcagtcacccaatgtcactcttcttcaagatgaagatcggagccatgacacatgttaactaagcacagactgatggtttactcangaagatccactgcgaggntgaagtaacatcagccgagcatcttctctnntcnaaattttctgagtctgatcatcagggaacttcagtacgggggggttatacttttggcatgggtcntagtctcacgacccatcatatactccanaagcacttttcgcanatactccaattcggtanggtctccaaagagtgaggacatcggtatggtacacattgcacctttgtaaggtgtcccacagttgttgcannaacatcttttanatttcttcaacggtctcttatngtggatctgtttctgactcttgtctttcatttcgancatgataaagccgctctgtggagcgtggcggtggtcaaaatgtcatatcaatggtcctccgctcactttggggg

SEQ ID NO: 125504 - DNA, 792 bp, Homo Sapiens
gttttgtaaactcgagggattattatttcttgattggagaaagagaagacagcatttggtgacaaagtcatacaggtggatgtcagggagagtgatcaatcaaaggatgggaactggaactgagaacccagcaggtacttctaggaagactcagcagtcagtggtgacggtggctgagagctcctggatgcgccaggcgctgcaggccttgcacaagatgtgcccatccagcgggtagcagccctgacactcgccctcagaggagagcagcagcccacactcctcgcacttgtaacagccaatgtgaaaacttcgatccagagcaacaattctcacagtctcctcctgacctggctcaggcattatggccccaccgcacactgagcatcttggggcaaacttcctgtgaaagtcctcaatgcagtggatctggctcgtagcatccactgtgaaggggatgccgtcgaggccgcggtgacacaccacgcaggtgaagcagccagggtggtaggccttccccatagcccgcaggatccggtccaggatgggctgggagcacgtggcacatttctccagggtggcctgttgggaaggaaggcaggaagatctgggagcgggcgggagccatggcagctcaacaggaaccccagcaacccagccatttaatttctgcagcctcctgcatgcagcctcctgcatgtgattcggtgaaaggcagacttgagcagatctgagttcaggtcccagcactatacacggtatttaaacactatgagaaaaacaggaatcagg

SEQ ID NO: 125505 - DNA, 1872 bp, Homo Sapiens
  misc_feature (42)..(59): n is a, c, g, or t
  misc_feature (1757)..(1767): n is a, c, g, or t
tcctaggtagcgaggcctgggtggcgtattcggcacgagggnnnnnnnnnnnnnnnnnngttttgtaaactcgagggattattatttcttgattggagaaagagaagacagcatttggtgacaaagtcatacaggtggatgtcagggagagtgatcaatcaaaggatgggaactggaactgagaacccagcaggtacttctaggaagactcagcagtcagtggtgacggtggctgagagctcctggatgcgccaggcgctgcaggccttgcacaagatgtgcccatccagcgggtagcagccctgacactcgccctcagaggagagcagcagcccacactcctcgcacttgtaacagccaatgtgaaaacttcgatccagagcaacaattctcacagtctcctcctgacctggctcaggcattatggccccaccgcacactgagcatcttggggcaaacttcctgtgaaagtcctcaatgcagtggatctggctcgtagcatccactgtgaaggggatgccgtcgaggccgcggtgacacaccacgcaggtgaagcagccagggtggtaggccttccccatagcccgcaggatccggtccaggatgggctgggagcacgtggcacatttctccagggtggccacgtagcagccctcgcaatatgccctcctctccacggcgtagaaatgctggccgcgaagctgggcccggcatgtagaacatacaaagcagcccacgtgaaagacgcgatcaagggccacaaccccagccccatccccaaccacatcttctccgcagccaccacactggccaaagtactccccgctgggcgggtggttcatgtcgtgaaccagcttcttcgtcagcctatccagctcatcctctggaggctggctcaggggcacctggggcccgtgctcgcctcctcttcctcttcctgcagggccagagatcccagcagcttcctctttggcccctggccctggctctctctggctcctatagccaggcccccagacttcacctcggcctgggagaggaaagtgggggcccgggaggggcccagaggcctgagaggctccccgcctgggtgggccgcagcccctcactggctgtgccaccttcacttgcacggggaaggctgggccagccggggtgctggcggtagtgtaagaggctggagtggggcccccatagggagacgctgggagcggcgaggctggatttggcttcagggagcccgtgcggtaggcaggaggtggcgggggctcatatgcctgtcggtctggtcgccgtgacgcatgaccccgacccccattcagctcggccagcgtgctgctcagcaagtctatctcggcgtccaggcttccagggcgaaggccccccctgtctgcagggagcccctgcgtgtgctggagtactccatgggaccccacccacgccggcccccgatcctccggtccccctggggcctggtaacactgctcagatggaagggggcaaaaattgaccctggggtggggctggagtgctgctccgtgggccggtggtggccccggggtgccgcgggggatcgccctcccctgaggggctctggcgggctccggctgcttcgggggcagccaggtgggccccgacatggcctggaaagggggactccagacagcggtcttgaagccccgagcctctggccttcaccccctcttccgtcccgcacctcgttctgggactcccagaaaagaaaactttttctggcnnnnnnnnnnncctcttcctccctaattttgcggacgcgtgggtcgacgatatcccgggaattccggaccggtaccagcctgctttctgctaccaacttgttctatattcactatt

SEQ ID NO: 125506 - DNA, 1020 bp, Homo Sapiens
gccagaaaaagttttcttttctggagtcccaaacgaggtgcgggacggaagagggggtgaaggccagaggctcggggcttcaagaccgctgtctggagtccccctttccaggccatgtcggggcccacctggctgcccccgaagcagccggagcccgccagagcccctcaggggagggcgatcccccgcggcaccccggggccaccaccggcccacggagcagcactccagccccaccccagggtcaatttttgcccccttccatctgagcagtgttaccaggccccagggggaccggaggatcgggggccggcgtgggtggggtcccatggagtactccagcacacgcaggggctccctgcagacagggggggccttcgccctggaagcctggacgccgagatagacttgctgagcagcacgctggccgagctgaatgggggtcggggtcatgcgtcacggcgaccagaccgacaggcatatgagcccccgccacctcctgcctaccgcacgggctccctgaagccaaatccagcctcgccgctcccagcgtctccctatggggggccccactccagcctcttacactaccgccagcaccccggctggcccagccttccccgtgcaagtgaaggtggccacaagccagtgagggggctgcggcccacccaggcgggggagcctctcagggcctctggggcccctcccggggccccccactttccctctccccaggcccgaggtggaaggtctgggggggcctgggctattaggagcccagaagagagccaaggggccaggggggccaaagagggaagcctgcctggggatcttctggccccttgcagggaaaaagggaaaaaggaaaggcgaagcacggggccccccaggtggccccttggaaccagccctcccaaaaggaattgagactggggatagggctggaccgaaaaaaacctgggtttcaccaacttgaaaacccacccggccccaagcgggggaagtaacttttgggcccaa

SEQ ID NO: 125507 - DNA, 2855 bp, Homo Sapiens
  misc_feature (131)..(131): n is a, c, g, or t
  misc_feature (638)..(648): n is a, c, g, or t
  misc_feature (1051)..(1069): n is a, c, g, or t
gggcggaatgcggcgccactgacaaacaggtccggtgacacacacgttagaaggagggatagaataatatgcgagatgggtggcgaacacggttggggagataaataatcatcaagacctgggggtggtgngggtctattgtgaggttaacgcttagttggccggctgagtacttacggatatcaaacagaaggggtgcaggggcgacggccggagatccagcgcactcacgcggagaaataagccggtgtgggcaatatcggggcacgagagatataaagcagaacgacacagccgggtgcctatgagaagaagtgtccggcggaaggggcggtaggtataaaagttggacacgtcggcacagaaatgcgcagggtgaggggacgcccagggtagagaccctgaaggtggtaccgctgaggcatggtgtttcaggggggaggccgatgtgccgcccggacggtttattagtgggggaagagttacccaggcgcatagtcccgtaacccaagggtttccctaggaaggcggggtatgacgcagttttccccttaccatgggggggcccgcaggtccacaaggaagtgggatagaaaagttgcttaagggccgaagcgcggccgggcatggaaggcgtnnnnnnnnnnnttaagggaagagagggggcaaaatacaatttcatttaacaaattgaatttgctgcgcctgctaatcacgtctggtgtcggctctgatcagagacagaaagaggaggctgcagccccgggggtccttgtggtagcggtggtgggagcggagcggtgtacacattgagggagacaaatcactgtttggcccaggggaaccccacccacagtaatggaaactcagggcaggttagcattttattagataaaaacaggaaggagggtgcctacccacccctgcctgctactggctctgaagggcactcctcaacttccccaagaaagaggacgcgtctctgacactgtgatcatgacaggggttcaaacagaaagtgcctgggccctccttctaagtcttgttaccnnnnnnnnnnnnnnnnnnngatcttctcagttacaaattctgggaagggagactatacctggctcttgccctaagtgagaggtcttccctcccgcaccaaaaaatagaaaggctttctatttcactggcccaggtagggggaaggagagtaactttgagtctgtgggcctcatttcccaggtgccttcaatgctcatcaaaaccaggcatggggaaggccctggcaaactgctccacccgttgcctgaggttggccagacgctgacttgtttctgagtccttaagcaggaaggatttgaaatcctggagcttggcagtcttgctcttcacctctaagccaatgttgaccccttcatctataaagtccacaactctccggaagtcatcctcacggaactgtcgagaagttaaggctggggccccaagccgcaggccgcccggtgtgatggcacttcggtctccaggacaggtgttcttgttggcagtgatggatacaagctctagcacccgctcagcccgagctccatccaggcccttgggccgcaggtccaccagcaccaggtggttgtcagtaccacctgataccagtgagtagcctcgctctagcagggcatctgccatggcccgagcattcttcagaacctgcagggagtactcccggaacatgggggtgcaggcctgctttagggccacagctactgcagcaatggcatgattgtgggggcccccctgcagggatgggaacacggcaaagttgattcggtcctcaaatgtgtaagggatctcccggccagtcttggggtccacagccttcacccctttccggtagaagatgagccctgacctggcccctcgaagagtcttgtgagtagtggtggtgacgatgtccgcgtgcttgaaaggcgagggaatcaccttggcagccaccaggccactgatgtgggccatgtctgccagcaggtgtgcttggacttcatcacacacctctctcatgcgggcgtagtcaatgaggcgagcataggcgctggtgccagctatgatgagccgtggccggaaaagtcgagcagtcagtgccagctggttgtagtcaatgaggccagttttggggttgagcttatagggcatagactcgaagaagatggacgtggctgatatccgcttgacgtcagacatgtagccgtgggtgagatggcccccatcgggcaggtccagccccatgatccggtcgtgaggttgcagaagggctgtgtagacggccaggttggctggggacccggagtagggctggacattgactccccactgtgcaggatccaggtcaaaggcttccaaggcccggcgctggcacagcagctcaatttcatccaccacctctgctcccccatagtatctcttgccaggataaccctccgagtacttgttgttcagacaggaccccagggcctccagcgcagctcggctgcagaagttctctgaggcaatgagctccaggccacgacactgcctgtccttctccctctgcagcaactcccacatctcaggatcactgtccgacaggctctcctggcctgtccagcccctgtttgcttccccagtctgagtctgggctgcgttgctgtgctgagcccgaatggccatcctgaccagctgcccacatctctgcagaggccgagccgcccaaaacaaagagaagtacagcatcgcaactcggaagtcgcaggaggtccagccaccaactctggtctagggcagcaagctgtcggaagaagaccgttagcggacgcgtggtcgacgatatcgcaaaa

SEQ ID NO: 125508 - DNA, 1053 bp, Homo Sapiens
gcccccccagggatgggaacccgccaaagtgatcggtccccaaatgtgtaaggaatttccggccagtcttggggtccacaggccttcaccctttccggtagaagatgagcctgacctgccccctcgaagagtcttgtgagtagtggtggtgacgatgtccgcgtgcttgaaaggcgagggaatcaccttggcagccaccaggccactgatgtgggccatgtctgccagcaggtgtgctttgacttcatcacacacctctctcatgcgggcgtagtcaatgaggcgagcataggcgctggtgccagctatgatgagccgtggccggaaaagtcgagcagtcagtgccagctggttgtagtcaatgaggccagttttggggttgagcttatagggcatagactcgaagaagatggacgtggctgatatccgcttgacgtcagacatgtagccgtgggtgagatggcccccatcgggcaggtccagccccatgatccggtcgtgaggttgcagaagggctgtgtagacggccaggttggctggggacccggagtagggctggacattgactccccactgtgcaggatccaggtcaaaggcttccaaggcccggcgctggcacagcagctcaatttcatccaccacctctgctcccccatagtatctcttgccaggataaccctccgagtacttgttgttcagacaggaccccagggcctccagcgcagctcggctgcagaagttctctgaggcaatgagctccaggccacgacactgcctgtccttctccctctgcagcaactcccacatctcaggatcactgtccgacaggctctcctggcctgtccagcccctgtttgcttccccagtctgagtctgggctgcgttgctgtgctgagcccgaatggccatcctgaccagctgcccacatctctgcagaggccgttccacctccttccagccctcactgccgccgggacccctgcctgatgcaagcagtgaagctcggttgcggacgcgtggtcgacgatatccctggaatccggaccggtccac

SEQ ID NO: 125509 - DNA, 794 bp, Homo Sapiens
ggctaccaacaaactttaacggctacaatagagcacaaaggcctggccacttttattacctgccgaaaatcgacatcaggcaactgttgtatcaatgagccagttttggggttgagctataggcatagactcgagaagatggacgtggctgatatccgctgacgtcagacaatgtagccgtgggtgagatggcccccatcggcaaggtccagccccatgatccggtcgtgaggttgcagaaggtctgtgtagacagtccaggttgcgctggggacccaggagtagggctggacattgactccccactgtgcaggatccaggtcaaaggcttccaaggcccggcagctggcacagcagctcaatttcatccaccacctctgctcccccatagtatctcttgccaggataaccctccgagtacttgttgttcagacaggaccccagggcctccagcgcagctcggctgcagaagttctcatgaggcaatgagctccaggccacgacacatgcctgtccattctccctctgcagcaactcccacatctcacggatcatctgtcacgacaggctctcactggcctagtccagcccctgtttgcttccccagtctgagtctgggctgcgttgctgtgctgagcccgaatggccatcctgaccagctgcccacatctctgcagaggccgagccgcaccaaaacaaagagaagtacagcatcagcaactcggaagtcgcaggaggtccagccaccaactctgcctcgtgccgatttaccacccagcctcgtacctagcctt

SEQ ID NO: 125510 - DNA, 854 bp, Homo Sapiens
ttgacttcatcacacaccgtcttctcatgcgggcgtagtcaatgaggcgagcataggcgctggtggcccaggcttatggattgaaccccggtggcccgggaaaaagtcgaccagtcagtgccagctgtttgtagtccaatgagccactttttgggtttgagcttatagggcataagactcgaagaagatggacgtggctgatatccgcttgacgtcagacatgtagccgtgggtgagatggcccccatcgggcaggtccaagccccatgatcacggtcgtgaggttgcagaagggctgtgtagacggccaggttggctggggaccacggagtagggctggacattgactccccactgtgcaggatccaggtcaaaggcttccaaggcccggcgctggcacagcagctctatttcatccaccacctctgctcccccatagtatctcttgccaggataaccctccgagtacttgttgttcagacaggaccccagggcctccagcgcagctcggctgcagaagttctctgaggcaatgagctccaggccacgacactgcctgtccttctccctctgcagcaactcccacatctcaggatcactgtccgacaggctctcctggcctgtccagcccctgtttgcttccccagtctgagtctgggctgcgttgctgtgctgagcccgaatggccatcctgaccagctgcccacatctctgcagaggccgagccgcccaaaacaaagagaagtacagcatcgcaactcggaagtcgcaggaggtccagccaccaactctggcctcgtgccgaattcgccacccaggcctcgctaccttagaaccgttagtagttactgccg

SEQ ID NO: 125511 - DNA, 1054 bp, Homo Sapiens
cccgttccatgtcgtgagctcgccttactggtcctcgatggccctgccatcccgcttgggccccgcgaggcccgcatgtcgccaaggaggttccgcgttggcccacctccccttcgtagagtgcccgcctgccccgaatctttgatatggtgtacgattcggtgctgaagcgaggatcaccttgcacccacggccactgatgtggccaattctccaccagatgtggtttgacttcatcacacacgtgctctcatgcgggcgtagtcaatgagcgagcatagccctggtgccagctatgatgaccgtgccggaaaagtcgacagtcagtgccagctggttgtagtcaatgagccagttttgggttgagcttatagggcatagactcgaagaagatggacgtggctgatatccgcttgacgtcagacatgtagccgtgggtgagatggcccccatcgggcaggtccagccccatgatccggtcgtgaggttgcagaagggctgtgtagacggccaggttggctggggacccggagtagggctggacattgactccccactgtgcaggatccaggtcaaaggcttccaaggcccggcgctggcacagcagctcaatttcatccaccacctctgctcccccatagtatctcttgccaggataaccctccgagtacttgttgttcagacaggaccccagggcctccagcgcagctcggctgcagaagttctctgaggcaatgagctccaggccacgacactgcctgtccttctccctctgcagcaactcccacatctcaggatcactgtccgacaggctctcctggcctgtccagcccctgtttgcttccccagtctgagtctgggctgcgttgctgtgctgagcccgaatggccatcctgaccagctgcccacatctctgcagaggccgagccgcccaaaacaaagagaagtacagcatcgcaactcggaagtcgcaggaggtccagccaccaactctggtctagggcagcaagccctcgtgccgaattcgacacccagcctcgtacctagcctagag

SEQ ID NO: 125512 - DNA, 608 bp, Homo Sapiens
ccgcatgaaatcttatgtggaaagttgtatgtgaaagaaatgaaagcggagctgcgttgatggtgggcccagaagctttggcctttcagtcccaacgtttccagtaatagaatccgcgcttcctctaaacttgcacagaagtctctccttgaacttcttcatctttattttgatgttcaactttctgcagaagcctggggcccagtaaaccaataagcagacttccaattggggctgtgatgaggatggacaaaaatgccactgtcaacacatccattccatagtcttctaattgtttctctccatgtgaccttgctgtgtccaaagccacagatcctattgcagcctgaactgtggcctttggaagccatgcaaaagaaataaatatcttttcttttaagttaaaaccagcaaaacacaccatcagaaatgtagtcaaaattcgtatcaatactgcaatgcctacggtggcaacacaaaggcctacagtttctggtctgagagatgcaatagatacctctgctccaattagtccaaaaagaaggggctgaaaaatgtcccaggcaactgcaattatcttttcaacctctgccttttcgctggtccat

SEQ ID NO: 125513 - DNA, 748 bp, Homo Sapiens
  misc_feature (358)..(410): n is a, c, g, or t
  misc_feature (705)..(705): n is a, c, g, or t
  misc_feature (718)..(718): n is a, c, g, or t
  misc_feature (731)..(731): n is a, c, g, or t
ttttccagttctaaaaccaaatctttattctctagtttgaaaaggaggggtaaatggttgttctgtttagttccagagaacagaacaaggcccaataggtagaaattataggaaagcagaattcattcattataaggaaggatttctaacaattagaatttctaacaattagaatcatccagggcctcaggaggtgcggaagttcctgtcacctaagtgctcaagcagaggccaggtgtccatatgctagaaatggagaaaaggaaactcaccagcaacttcccctcagctggccctccatcaccaatgcggcagtccttgccgtgacatgctgagctctggaaggagcgaaggaggnnnnnnnnnnnnnnnnnnnnnnnnnnnnnnnnnnnnnnnnnnnnnnnnnnnnnggctctcagcgctgggaggggcgacagataaagcgagacagaccaaggagtaaatgccttgggatctgctctttgggaaggaagaggatggaagtattaacagcagacgggtctctccaagtctgggtgcctacgcagggggcaggtgggaggggaagggagaggtaagagtggcttcgcttcacctcttgctgctggcaaaggcccaagtgctgtctaacaaggccagcaggttctccaagctgtatctagcccagagcattcatttacaggactctaccacgcctgcttccanaaatgatcttaangtacttacagtanacctcgtgcccgattct

SEQ ID NO: 125514 - DNA, 1499 bp, Homo Sapiens
  misc_feature (776)..(776): n is a, c, g, or t
  misc_feature (808)..(808): n is a, c, g, or t
  misc_feature (1061)..(1098): n is a, c, g, or t
tttgctgagatgttacgctttggtgacaggatgttctataaggattggtggaactccacgtcatactccaactattatagaaccgggaatgtgggggtccaggactggctatattactatgcttacaaggactttctctggtttttctccaagagattcaaatctgcggccaggttagctgtcttggctgtatctgctgtagtacacgaatatgccttggctgttggcttgagctttttctatcccgtgctcttcgtgctcttcatgttcttgggaatggctttcaacttcatggtcaatgatagtcggaaaaagccgattgggaatgttctgatgtggacttctcttttctggggcaatggagtcttactctgcttttattctcaagaatggtatgcacgtcagcactgtcctctgaaaaatcccacatttttggattatgtccggccacgttcctggacttgtcgttacgtgtttaagaagcttggactttgtttcctccttgtcactgaagatggggtagctccctgatttggagccagctgtttccagttgttactgaagttatctgtgttatttggaccactccaggctttacagatgactcactccattcctaggtcacttgaagccaaactgttggaagttcactggagtcttgtacacttaagcagagcagaactttttttgtggggctgggttgggggggagaagaccgactaacagctgaagtaatgacagattgttgctgggtcatatcagctttatcccttggntaattatatctggttttgttttcttgactctngtccaatcagagaataaacatcatagtttcttggccactgaattagccaaaacacttaggaagaaatcacttaaatacctctgggcttagaaattttttcatgcacactgttggaatgtatgctaattgaacatgcaattggggaagaaaaaatgtggaatgatttttgctatttctagtagaaagaaaatgtctgttttccaaagattatgttatacatcctattttgtaatttttttgaaaaaagttcaannnnnnnnnnnnnnnnnnnnnnnnnnnnnnnnnnnnnnaggtcatgatttctgtgaagcaaaaagatgccttttaccatgaattcttgagtttacatcaataatattgtatattaaggggatcagaagtaggaaggtaaaaaataagagatagcagaggaaaaagaaaaacatttcctcttataacttctgaagtaatttgtaaaaaagatttgtagagtcaatcatgtgtttaaattattttatcacaaacttaacatggaagatattcctttttaactttgtggtaacttctttgaagttatttagaaatatcctttggaacaattattttattgtctaataaatattgacttctcttgaattattttgcagactagtgagtctgtaacataagtattaatcacctccactcatattaaagtgatcattaagaatcc

SEQ ID NO: 125515 - DNA, 609 bp, Homo Sapiens
gtcacgatgcttccacatgaggccgcgtcacaccaccatcgtttggaaatccagcaccccagccgttttaccctaagataacagtgcagcacttagtgtggttgaatgtgtcatgtgggaatgatttttggtcaccttttcagttcattgttagtccttttatgtttgtgtgcatctatgttcgtctgtgtgtttggtaaatatgaattgaatagattacttcttattttatgttttaggccaagattgacagacacctaatattcatgacttgagaatattctgcagctataaattttgaaccattgatgtgcaaagcaagacctgaagcccactccggaaactaaagtgaggctcgctaaccctctagattgcctcacagttgtttgtttacaaagtaaactttacatccaggggatgaagagcacccaccagcagaagactttgcagaacctttaattggatgtgttaagtgtttttaatgagtgtatgaaatgtagaaagatgtacaagaaataaattaggagagattactttgtattgtactgccattcctactgtatttttatactttttggcagcattaaatatttttgttaaatagtcaaa

SEQ ID NO: 125516 - DNA, 1026 bp, Homo Sapiens
  misc_feature (786)..(786): n is a, c, g, or t
  misc_feature (810)..(810): n is a, c, g, or t
  misc_feature (831)..(831): n is a, c, g, or t
  misc_feature (838)..(838): n is a, c, g, or t
  misc_feature (874)..(874): n is a, c, g, or t
  misc_feature (892)..(892): n is a, c, g, or t
  misc_feature (895)..(895): n is a, c, g, or t
  misc_feature (900)..(900): n is a, c, g, or t
  misc_feature (940)..(940): n is a, c, g, or t
  misc_feature (965)..(965): n is a, c, g, or t
  misc_feature (996)..(996): n is a, c, g, or t
  misc_feature (1001)..(1001): n is a, c, g, or t
tttgactatttaacaaaaatatttaatgctgccaaaaagtataaaaatacagtaggaatggcagtacaatacaaagtaatctctcctaatttatttcttgtacatctttctacatttcatacactcattaaaaacacttaacacatccaattaaaggttctgcaaagtcttctgctggtgggtgctcttcatcccctggatgtaaagtttactttgtaaacaaacaactgtgaggcaatctagagggttagcgagcctcactttagtttccggagtgggcttcaggtcttgctttgcacatcaatggttcaaaatttatagctgcagaatattctcaagtcatgaatattaggtgtctgtcaatcttggcctttttctttttcgttcattctcatttagcctctgtttcatctgctgcaccttctgagctgtggtggcctttctgtcctctcgaatacgtttccgtagagcactctcactgttctcctccattgtatcttgcattttagaggaaagtcctgtacatcggtcacctgtcagtttttcttcttctagacctattctgttcccattgtatttttcagtcattattttgtttggtgaatgatcaaaggcaggagataagtcttccttagaaagttctttccatcgtttctgtatactagaatctccctttatacattttgcttccttctattatagccatgtatgagaatctcagttgatctggggtctgaataagaccattcggtattttctcatgttcaagtacacttgttttatgtntatatcatctcctttttccatcanaacaagacaagtgtctacaanagagaanggtgcagagcgcccaatgctgcactacagtggatcnacgcaggcccatggtcanggntcaanggagcagattctctcaattgatattttctaattgtagtanatgtactgtatatacgactcacatnctctgacaagagctcacactgaatcctgttnctttnaacagcatctctgggcatctgttgg

SEQ ID NO: 125517 - DNA, 734 bp, Homo Sapiens
  misc_feature (45)..(87): n is a, c, g, or t
  misc_feature (637)..(637): n is a, c, g, or t
  misc_feature (705)..(705): n is a, c, g, or t
tttttttggttgtggaatgcatacatttccatgtatttttacagnnnnnnnnnnnnnnnnnnnnnnnnnnnnnnnnnnnnnnnnnnntacaattagggtgttgagtcctcccccccaacattctttcaggcatcaactgtgtaacggagggagacaaattcctaaatcgtttgatttcatcatacaaaatactcatccattatctctcatcaagacatttacattaagtgggggaggggggcggcgggattaaggaaagtaggctcacaagaatcagtttccaatttaaggttacagcagttcaaagaaaactatatctttctgcataatgcatagtccctgtacagtacaatatttccaaacaaatctgatgtgtggaattcaggtgaaactgccacaccaaaaagtccacggattgagacaagcccaggtgggtagcacatagattttaaattgccaaatatcatcttacaacaagaaggacatcaagatgttaacttcaggatatattcccaaaatccaccttgatttcatttatttaaaactctggatcacaattgagagcatcagtcatttaacatcacagattttgttagaactagtgagaagaatcctagcagtggagccctgggaatanaatctccaagtcagctcttaggaacttgatgaaaaagacatcattattcagttgtactcttcctcagncttactacagctcaatgtatgctttgtat

SEQ ID NO: 125518 - DNA, 455 bp, Homo Sapiens
  misc_feature (43)..(61): n is a, c, g, or t
ccctcactaacagggaataagcttgcggccgcggctgtaggcnnnnnnnnnnnnnnnnnnnccactttcatgagtttcctttactgtattctcaacttgggccttgcttcaagcaggcaaacatacattgaagaatgcactttggtactgtttaaataacaacacatcagcccacttgattccatgccatgtccttgctgacagaaacatccccaacagggcatgccctggtccaagtcctctgtctttgtcaaaatgctcttctgatgagttggagaggaggcagccagcagtggcagtccacaaggatccaggtaccttctccaatcctaaagcagacagcaggttgaataaaaccaatacacaacctattttctaggcaggaggggaaaaggcccttaggacaataatatttgtacaaagagttgagagtaaacaaacagtatatcaggttc

SEQ ID NO: 125519 - DNA, 832 bp, Homo Sapiens
  misc_feature (598)..(598): n is a, c, g, or t
accattctctgaagtggtgaattttaatattgtataaaaaatccaacttgttccacaagtacatatgtcctatgattttatgcatacatccatatacatatatcaaggtaaagtccagtacaaaaaaacagcatttcctatggccagtgttctacagaagtaagactgtgcaaactttatcgtatagtcaaatgagattgcacactaaggcaggatgaggcagaagcaagttgtgtccacagtatattacaaaataccttgcatagcttattcattctcacctggtaaattcatcttagaattctgaaggatttttttcctagataaatttatacaagttagtgtatacttcttgtctttgttctgtggcaaaccaggtttctcagtactgattgttttacttcacaacattattgatttaacaatagcctgagctttggggctctgcactgcgttcattgtaatctccgtgatacaatgactacaaatgtgtcgcgatttctaatcttcatctgtatctcaggcgattttccagggcttccattctctgtgtcatttcttctaagcgctgtgttaattttcttacttcttcgtttgnaaggttctggaacattataaggttttcacatttgcattgatcgtgtttttcttccaaagggcttcctgaaggttttgttgaatgggaaagcttttgtgtagaccgtaaaagattgtcttcttcaaacagatatctgtgttgcactgcaaaattagaacaggaaagtaggtcttggatatttatggtgactggctcagattctgttggctgttggaccgtttttggcagttcccc

SEQ ID NO: 125520 - DNA, 2561 bp, Homo Sapiens
aaagctctcaaccagttttatttttcctcacaatgaacggaagaaaaaggcagaaataaatggtagggtcatttgctagtagaaaagaaagctgggattccccatttactttggaaactgaggagaaagaactgctttccccactcgtgtctgggcaaagggtgtgcccagatgttggcaaaggaaccagacaaaatcaacagccagcagttttctgttccaaacagttagctcctctacagtccagagggaagctattcctgagttcattcaaggtgacagcagaagtgtttctctctttctgcttggcccaactgtgcctgagggctgatggatccagaccttgtaaacattcagctaggtgtaacataaccagaaaggctgaaggaaggctcttggccttcccagcttgagaagtaggggcctcatgtgtatctggtggcctgcagagcccaaagcagagagctatgatgaataaaatatttttattgcttttctaaaataactcctttcatatacaaggattccttcagttaggtcctctattatcctaaatgctctctggtcatgagcaggtgaggttctatttagccaagataagtggctgcctcagagtttctcatagggaaaactgaaatctgattattttcttttcttcacatagtctctaggttgagaactccaagtagtaagaggcacaggataaggatgggagagactgagcatttttgagagaatactcctctgctgaatgccactttgaagggaaagaagtcgaatggccatttccagtccattttgggttggccccttggaggctgtggcttctgggtaatgtccacaaagttcacaagagttgtcaaagatacttctgtaacttgctgagaatcctgtatagactggcactggtataggaatcgaactcctgatacatgagcttgcgggttggacaggagacctacatatgcccacaatacctggatctccagggaaactggtatgagacagcaggaagtacagtttatagctgaaatgctgcagtgcctgttgaggatcctggtccaccctcctttctgggctgggtcagcattaccaaagatggcaacatactctggtctgggccttccatgaagagtctgataaatctcctgctgcaagtggctgcagtctgccttcttcaacctgagcttgcatccagatattgcattcactccaaactgcactttcatgttcttttaacaggagcaacttccattaccctggctctgtaagagggtcattgagtaacttatatcatcagtcagagccaagagtggcttcccaactatatagccaggattcccacttctaggactggtgagagaagcagctgtgctctgttgaaaagccctgaagcgaaggatgaagtgttgctgtaaggaagcgcctggctcaacagtcaggttggtttgtcccaaactgacagaaactttctggattccaaaagtcccattggtctctatctcataggtgacctgagaaactacattctgacaagtgtttccagccaacagaggagcattagcctgtgaggtaagtattacaggaacctggaactccatattctgtggatcagtcatgcttcttggaacctttaagactgtgaagttatagtaagaggcagcattgagggctgaatccaaggtacagctactagccaggttcttgaaaaaacgagtgcaagttgtacttttactctctaggaaacctgcaggattgctttcagcacagagtcccccagctccaactcctgcaggttgtctcagcaagcttattacagaccacttggggaagtaagtaagaatggggtccccagccctgtaaaaagatggtggtgattgtgtttggaatgttgaagtgaatgattcgcctccaaactctgcagccagggcctggaagttggttgcattgaccttttgaagcttctggaaatagtttaagtttgagttgttcacatggacacaaaactgcctgattccattagaatccatgaaaactcttgaaggaaacggggaattactcctgaagataacagagttgtctacacaaacccagcttgaagaccttacgctgcctggaaggcagaaggagaaaactgtcctcggatggagaagatagcagtccctgtcgcagcagcaatttatatcgcaggctccaggagtcaagtcacagacacagatcggtaagactgggaagaggtccacagtcctattcccaggggccgagggagtcacgagagtagggaccactgtagggagtccaggcacggccgggcgagttgcagtcgcctctgaaggggactggagggttccgccatccgtccctcgctgcagctccaaagacgtgggcactgcccctgatggggaggaagagggctgaggccggacgccatcggggaacaccagaaagaacacttgcaggagcgcgagctgtggggtgcgcatggggcattcagggcctccgggtccgacgtaggcctccgcggtctcggacgcgtgggtcgacgatatcccgggaattcc

SEQ ID NO: 125521 - DNA, 1403 bp, Homo Sapiens
ctaggctcacgcctgaccaccggggtttttcaggcagtgcaaaaatgtttattctgctttcttccttggtgggtgggtcatcaggctgctttggctacgaagctcaggctctgtgacctgggcggcccgagcagtacagagcaccatggctgcccttgggcctcaggagcagcaaggcacagaggtgagtcctgcatcgggtggcacggcgtgggcgtgtgagcaccggaaggggagaggcaggcgcttgccatgcctggggcacggggcctcttcagggacagagcagctccagtgtctactgagagggcacagactgacccaaacacgcattccacagccagttccttgggatattcacagcacatgcagccagtagacagctgcaacaccactaaggacacctgtgagcggccacgggctcagctccagagcaggccccacccatcctgctgggggagacccttgctccaggcttcctcacaggacctggtcaaaggaaccaagtcacaccccccatgctagaggatccccctgtagctccgggaagggctgcgaagctggagctgtctcaggttcccgttgaggcccagtaccctgagttccatgactccttgggggacagagcacaggagggaaaaggggaatggacttctacaggatggggtgggggacggcctgtcccggggacaccctggttctttctacgcgatggccgctctggcctggggagaagctggcaaggagagggcaccgggtaaggatggggtgctgcatgacccagctctgcccaaggtggccagggagaccactatgaaggctgcctggtgtgagcgggaccctggtggggtgcagagtgaggccctgtgtggggactcagggaggatgctgggcgggagagaggcccagggtgtcccctcacccatgcaggtccctgggtgtgatcatggaggactggtaaggctgctgctgcccagtggcgaccatcaccagggtcaggagtgggggagtcagtgcagagacccagggaagggcccacttcccaggacgtttagtgtcagcaggcggagtctctccacaggctctggctggcgtgcctctacgcctcactctggtaccgcagccgggagaaccggtccctgatggcttggtcactgtctggcccaccctcacccaggcggaccaccctgctgcttgggacaaggtcccgcaccttgtgcttgatcacagagaccaggccgggtgcctctgagtctgccgggcctgtcagaaggatgtaggcggcgtggcggcttggctcaaacaggacggcgtcaaaggcgacaatgtgggtagagacattggccagctccagcagcacgcgcggcagggtggggcctcgtgcggaattcgccacccaggcc

SEQ ID NO: 125522 - DNA, 1219 bp, Homo Sapiens
  misc_feature (91)..(140): n is a, c, g, or t
  misc_feature (187)..(196): n is a, c, g, or t
  misc_feature (225)..(233): n is a, c, g, or t
  misc_feature (404)..(405): n is a, c, g, or t
  misc_feature (407)..(415): n is a, c, g, or t
aatacaacgtttaatcatctggttgatcaagaaatgcaatgctcagtctaggaacagcagcagaaatagcgagagacacgggacttttatnnnnnnnnnnnnnnnnnnnnnnnnnnnnnnnnnnnnnnnnnnnnnnnnnnccagagaccaaaggcagcatccttgctaattttcatctacattaagnnnnnnnnnntcttgtaactaatgtttttattttccttnnnnnnnnntatttcgcttaggcacaatttgctggtggctttagaagaataagccaggtttccacagcatcccccttgagtgatatgtttccatttctccgctttttatagttaaggcatttttttcttctctgacaaagtgtatgttttgttgcttgctttcaggttttgtttactggnngnnnnnnnnntgctcctgtcagcccaggcaacagggccaagatgcagtttcaggatccatgggacaggtcacagagtgacacggtggctgagattcggggacagggggagcgaggccagtgagtggtaggccagggccccagggagctcctggacccagtgtcaccttggccgcccccatcactccgaaccttgtcaggttggtgttggctcgatgctgacaacaggtgtgtgaggtgtggatgtggatgaagcccggggtctcgagtggccgttctggggccagagcacagggctgaaagcgggtggctcgtcccacggaggcatacctttcacatgtgcccggcggggttgtgggcttcgctcaggcctgggtggggagctgaaagcaccatctgggggtctccaaccacacctgacaccttttcctcttctcgccgtttcaaacaggctgctttgggattcaggttccgctctcgcacctgctgctccagccccaggatgacctgcacggcctgctgcaggatgagcagcttggtctgcgctttgtccgacttgaggtgcatctggcacatgcgccccagctcccggaaggcctcgttaatatcccgcacgcgcacccgctcccgcgcgttattggccatgcgcctctcccggtccctcaggtctttctcctccagggacagcacctcgtccgtactgctggtccgggcccggggggccttcagctccttcttctcctcctccgagtggtcagccgctgacgtgttctcctcgtcctccttctcctcccgcttgatctcgctggcggccgc

SEQ ID NO: 125523 - DNA, 192 bp, Homo Sapiens
  misc_feature (47)..(96): n is a, c, g, or t
cttaatgtagatgaaaattagcaaggatgctgcctttggtctctggnnnnnnnnnnnnnnnnnnnnnnnnnnnnnnnnnnnnnnnnnnnnnnnnnnataaaagtcccgtgtctctcgctatttctgctgctgttcctagactgagcattgcatttcttgatcaaccagatgattaaacgttgtattaaaaag

SEQ ID NO: 125524 - DNA, 1115 bp, Homo Sapiens
gcggccgccgtggcacctgctcgccctagcccactgtaggagtcgggaggccgagacaggtcagggagggtgcctggctggctggggagggccgcgtggttgtgcatgaggctggtgctgcctgcgaggccgtcctcggggtggctgcctccaaccaggcctgcgtgccgcccgcccagcgacatggggccggtgaaacctgaggccagcgccccgtggccaggcagcagcgtgtgcatgtcgccggctgtgcccacggcgtggctgcggagcacgtggatggcctcgtccaggtggtcttctatcttactctgcaggccgtggagacccccgtcgtagctgggcgataaggcaccgggggctcctgctcgaggccactgtgacgttcctgccaggccctggggggagcccacgggggtagaagggctggacgagaagttattgcttgagtgatccggggagtagatcgaggccagtgctttgccgagggcatccccggagctgccagctgtggtccctcgggagcccaggaggctgtcggccccgctgacaggcggcgtgtggctggagacgccgccgtacgtggctccgggggctgaggagaaggaggatgcagatgggagcccaccgttcacctctgctccatgcagctggtagcccatacgctcgtgctggtgcaggccaccaaacgtgctgctgcttccactgctgcccaccgggccgctaccgggcgggaggggcagcggggatgagcccccacccagcatgggcccgaagcccgcctggcccgggggactccagagctcggctgaggggtgcaggctgccatctgccacgtagaagggggcgggataggtgctgctgggggtcttggcggacgggtaggcggtggcatccctgccgtagtcctcacctgagctgggtgggtacaccgaggatggaagacccggcgggaccttccggaccttcttgggctgcgtgtctaggctgccgtctgccgctctccgccgggagctgccggagtaggaggggtagtactgggaggtccccttcatgcccgaaggggacaggggcccggggctgtgcctcgtcggaatcccacccagcctcgctcc

SEQ ID NO: 125525 - DNA, 619 bp, Homo Sapiens
gtgaactgtggctcccatctgatcctcttctcatcagcaactgagccacgtacgcgcgtctccagccacactgcgccgtcagcgtgccgacagctcctggctcctgaggaccacagctgcagctccggggatgcctctgcaaagcactggcctcgatctactcccctgatcactcaagcaataacttctcgtccagcccttctacccccggtgtgctccacccaagggcctggcaggaacgtcacagtggcctcgagcaggagcccccggtgccttatcgcccagctacgacgggggtctccacggcctgcagagtaagatagaagaccacctggacgaggccatccacgtgtccgcatgcacgccgtggcacagccggcgacatgcacacgctgctgcctggccacggggcgctggcctcaggtttcaccggtcccatgtcgctgggtgggcgcacgcaggcctggttggaggcagccaccccgaggacggcctcgcaggcagcaccagcctcatgcacaaccacgcggccctccccagccagccaggcaccctccctgacctgtctcggcctcccgactcctacagtgggctagggcgagcaggtgcacggcggtcc

SEQ ID NO: 125526 - DNA, 532 bp, Homo Sapiens
  misc_feature (13)..(13): n is a, c, g, or t
gctgctccagccncaggatgacctgcacggcctgctgcaggatgagcagcttggtctgcgctttgtccgacttgaggtgcatctggcacatgcgccccagctcccggaaggcctcgttaatatcccgcacgcgcacccgctcccgcgcgttattggccatgcgcctctcccggtccctcaggtctttctcctccagggacagcacctcgtccgtactgctcgcacttgctgctccaagttcaggatgaccgagacagcctggtgcaggatgagcagtttggtctggggcttctcgctgttgaggtgcagttggcacatgcgccccagctccttaaaggcctcgttgatgtcacggacccgcagccgctcccgggcgttattggccacccggcgctccttctcccgctcggccttctgctctggtccgggcccggggggccttcagctccttcttctcctcctccgagtggtcagccgctgacgtgttctcctcgtcctccttctcctcccgcttgatctcgctggcggccgc

SEQ ID NO: 125527 - DNA, 468 bp, Homo Sapiens
agcgagatcatcttgaggagaaggaggacgaggagaacacgtcagcggctgaccactcggaggaggagaagaaggagctgaaggccccccgggcccggaccagcccagacgaggacgaggacgaccttctccccccagagcagaaggccgagcgggagaaggagcgccgggtggccaataacgcccgggagcggctgcgggtccgtgacatcaacgaggcctttaaggagctggggcgcatgtgccaactgcacctcaacagcgagaagccccagaccaaactgctcatcctgcaccaggctgtctcggtcatcctgaacttggagcagcaagtgcgagagcggaacctgaatcccaaagcagcctgtttgaaacggcgagaagaggaaaaggtgtcaggtgtggttggagacccccagatggtgctttcagctccccacccaggcctgagcgaagcccacaaccccg

SEQ ID NO: 125528 - DNA, 1245 bp, Homo Sapiens
gcagtctcgaggaatcagttagaatcgtgtatagacccactcccatcatgagctcagatgcgacagctgagctcagcacaacacgagctcctccagcactgacgtccatgctgggttacccaggctcacctgcccttcttttgtaactgcgtatgttccaccacaggcacgcccctacagaggacatcactgtgtacttagaactacaccagaatcggggagcagaaaaagcctattttgtgatgggttccccaagaccagaatgggcgctgtaagcccctctgtagatggtgggagcctggagcctggtgggacaccgggtctacacagcccaggggaccaggaaccagccttcgctgagcatgagtaaaatgtctagaagcctgaactggaccctctctaaggaccagggaccatcctgatggcccacgctgctttcccaagagcaggaatagagtggggaaacctgcccattgcactgctggtgggtcagacacccaggcctaagacgggcgcagttttgtttttctttatttgtctacattcagcttaattcagatgtactgcctgaatgacccagacataaaaagaaaccccccactctttcccactggtttttaaaataaaatcttcacttataaaactgaaacactaaagcattaaaatacagaaagctcgtttaactcacttcacaaaagcattaacaaatgacgtatcccttctgtaactatttaaagacaaactgagttaccactaacacgaagtgtgaatagacagagggatactgaactgcaaaaactcaaaaactctacccagacaaagttgtaatggcaactaacaaaccattgaagacacggagtcccaaacacggctaaatatgggtcacaggacgggccacagggtgacccgctgcacctcacgacacagcaacgtggacgggatgggggcgggggcctggagggccagctgacatgttaactgtgatgcataaaactcgatcttctgatggggagtaagtgcagaaggtagaaatctccgccccgcgggggcttatctgtactggtagttcatgctgtggtctgcgtttctgccatagccgccttgtgaggactggtaggagctgggagggccactgtagttctggccggaccccggggagttgtagttcgactgtgagtagcctccttgtttgccttggtaatgaggagccgcccccagaacctccgccgtagcccccgtgtgacc

SEQ ID NO: 125529 - DNA, 1724 bp, Homo Sapiens
  misc_feature (850)..(850): n is a, c, g, or t
  misc_feature (879)..(880): n is a, c, g, or t
  misc_feature (882)..(883): n is a, c, g, or t
  misc_feature (885)..(886): n is a, c, g, or t
  misc_feature (893)..(969): n is a, c, g, or t
attgtttctgtatgtgtagtagtcatatagagcactcgcccagctgagcgaggcgtgttttttgccccgcgcgccgactattgttttgctctcaacacaaatagtgtggttgtttccagcaacccagatgttggcgagagggctgtgtgtttcaacggaggtgtaaaagaaacctctcctcgcccctcgtagggcttcccactaataataagcgaggtatgtcaagagggggggagcaacaagagtgggggtaatgcgttttattttaccagggcaaatatccgcccagtgggcgcatggagtatttggcccgcttgtctgttcccgaagttttataaggccccagtgccaccgccaaggtgcatattatcatttatttgggaatcccccccgtgtgttttccccttaggcaggccaaaaagtgtttttctcgcgtggagtgcccacttcaaaggggtctttaatgggccgcaattgtccctttttaagggcttccccgaaatgggcccattccccacaatgggtcttcgccgcggtggcacagcaagtaccacttaatggatttttctcctccagggtagcgccattgattttcttaagggtgctggcctttcatgtcaatttaatggcccccgcttgcacatcgggggggacagaatttccgaagagtctccatcaggcacccccgttgaggtttttacaagggaatttggcgctgatccccgcagcgcctttaatgtggtgcaggacccacagcgccttggtcgttcccgtttcttccggggcagtcgcctttggtcccggctcggttgcccttttgggtgggggcgcctggggggtgggttttggntgtgttcttgggggtcgggggcggtgggnntnntnntgtttgnnnnnnnnnnnnnnnnnnnnnnnnnnnnnnnnnnnnnnnnnnnnnnnnnnnnnnnnnnnnnnnnnnnnnnnnnnnnntaacattccaaaaccttattgaacagaactttcttcatgacacctctcggaatgtaaacagagcttggtgtgaagaagatcaatctgatggctaaagatcagtatgactgcgtaaggcagtttgacatctacccatccctaacagattttcctaaaactctgtggaacaaccaaggagaaggcatattcctccctttccaaaggtgggcaatgtgcctcttcctggaaggttattttacaagcacgggcccctgaaagcagcagcctccccatcagccattttggcgtgagcagttacagctgcacactttgcaacttgtcccgccttgagtctgatgtcagaagagcatgtcagtccacttccacttcagagagggttggtggtgtcaggcagccctgctgtccaaggttctatcctttgatcacagcaattggtctcagtttaatggctttcttgctgattccagcatcatggcaggtatttaccacatctgtcacattcttataggactcaggagcctcttccataaccagtttgggtgaggcaacacggatcgcaattcccatatctgccaatttgtctaagacatcctggaaatctaaattacgtcgagattttgctcgggacaatgcacggcccgctccatgacaggttgttccaaaggtctcagtcatgcccttgtcagtgccagtaagaacataactacaggttccattgtgccaccaatgagcactgccttgcccataggttggta

SEQ ID NO: 125530 - DNA, 1877 bp, Homo Sapiens
cccaaggccccggggcccccctggaaaagccaaggcagcccttccccccttcaaagcccaatttttggcggtggagcccttttccaggctgccacccctttggcaacttgttcccccccttggagtttgaatttccagaaggaaccatggtcagttcccctttccccttccagagaggggttggttggtgtcaggccagccctgctggtcccaaagggttctatcctttgatcacagcaatttggtctcagtttaatggctttcttgctgattccagcatcatggccaggtatttaccacatctgtcacattcttataggactcaggagcctcttccataaccagtttgggtgaggcaacacggatcgcaattcccatatctgccaatttgtctaagacatcctggaaatctaaattacgtcgagattttgctcgggacaatgcacggcccgctccatgacaggttgttccaaaggtctcagtcatgccctgttcagtgccagtaagaacataactacaggttcccatggtgccaccaatgagcactggctgtccagtgagttggtaatcaacagcaatgaggggatggtgaggagggaaagcgcgggtggatcccttcctgtgtactaacagtgtccgttcctttccgtccaccacatgctgctccactttggcaatgttgtgagaaacatcatagatcacatgtaggtccaagtcatcaggggttgtgttgaagaccttggcgaaagccctgacgggttaagaaggtcatggaagagcggttgacccaggcatagttcccagcagctgccattcccttcagatagtcttgaccctctggggaagcgattcgagcacaagccaactgccgatcattgactataatcttgtctctcttcatggccttctccatagctaccagcgcatctgtggctacttggtggcccaagcctctgcttccactgtggatcatcacacacacctgtcccttatggtcgatgcccatttttttagcagcatactcattgaaaatctcatccacaacctggatttctgcataatggttgcctgctcccagggtccccaactgaggaaggcctcttttcttcgcccttgcagaaactttattggggtcagcttgcagcatccttccgtactcctcgcagtgctccttgtcttcagcccaggcatacccttctcttaaggaccagtccacccccatctccaaggcctcctccaagtctttggcattcattgggatgacaccttttgaccccaccccaacaggaatgtggtcaaacatagcttgggcaagttgctccttcacaggctggacatcactttcatctaaattggttcttagcaagcggacaccacagttgatgtcaaacccgacaccacctggggatactactgcttcagggtcattcatatcaaaggctgccatgttcccaatagcaaacccatatcctgaatggacatcaggaagcccaatagatcgatgaacaattccaggcagggctgccacattgccaatctgtttcatggctggcaggaagccaccaacaccaccacctcgacaggcattccttaattcctcaaacatcaatttctccagagcatcattcacatagaaaacaccttcaacctgcatgttgggcacgaagcccttcttgatcctccagcagtttttattgatcttctccaagaactgcagctcatcattatagctgcgactcatggtggcgaaaactgtagcaaaaactcccggctccgctttgaagagccgctgccgcgtagtccggcttctcagagcaccgccttccccccggccgtaatggccgaattcccgggcatatgtccggtaccgtcgactg

SEQ ID NO: 125531 - DNA, 816 bp, Homo Sapiens
gaaaatctcatcccccaacccgggaatttttgccttaattggttgcctgctccccagggtcccccacctgaggaaaggcttcttttctttcgccctttgcagaaactttattggggttcagcctgcagcatctttccgtactcctcgccagtgttcttggtcttcagcccagggcataccctttcttaaggaccagtccaaccccctttcccaaggcctcctccaagtctttggcattcatggggatgacaccttttgaccccaccccaacaggaatgtgggtcaaacatagcttgggcaagttgctccttcacaggctggacatcactttcatctaaattggttcttagcaagcggacaccacagttgatgtcaaacccgacaccacctggggatagtactggttcagggtcattcatatcaaaggctgccatgttcccaatagcaaacccatatcctgaatggacatcaggaagcccaatagatcgatgaacaattccaggcagggctgccacattgccaatctgtttcatggctggcaggaagccaccaacaccaccacctcgacaggcattccttaattcctcaaacatcaatttctccagagcatcattcacatagaaaacaccttcaacctgcatgttgggcacgaagcccttcttgatcctccagcagtttttattgatcttctccaagaactgcagctcatcattatagctgcgactcatggtggcgaaaactgtagcaaaaactcccggctccgctttgaagagccgctgccgcgtagtccggcttctcagagcaccgccttccccc

SEQ ID NO: 125532 - DNA, 896 bp, Homo Sapiens
  misc_feature (355)..(366): n is a, c, g, or t
tattttattaaatttattgttcattgtaaagcaaatcaattacacagtaacatgacaattccaacttgttcacaaaaagtgataattgagttctattcttaagctctgctacattacaccacttatcacctgattaaataaagtaatgaacatttacaaaggcaccgctgtgtaccttgacagattcaatacattcaagatttcaattcagaagtttctttccaacgttttggaaaatgtactcagaagcagaacgattagtcatccttttccctcttgttactttaaagattttggctgagtttgtttggcaagaatagcatcaaacttactagcctctcttttaaactactannnnnnnnnnnnaaaactaagcagaatacaaaaatctaaaaatctctcatttggataaataatttatgaaaattattcaataaacttcatagtacaatcttcagtattgtctttttcaagcacagtgatcagtgcatctcaaagatgagggaactgtcaaagtaatatacacactaaaatttaaatttttaaagaaatcaaagccttcaagttatccaatgaagaatgaggtttgtatattaaaaaggtagtgtaaaattataaagcatttaaagaaaaacaaccgaggaactacattttgctacactgggacagaaactggacttttcgaatagcttctaacccagaaaacaaacaataactaatagcagccagaattcttatactactattaaaaaaataatttaaaattttacatccagtttgagatcactttgagaataaaatacctgcctagcagctcttttgtaaaatgttactataggaaaaagaaaccaagcatattattatactttctgattcctaacaaaaaacataaaaaa

SEQ ID NO: 125533 - DNA, 671 bp, Homo Sapiens
  misc_feature (483)..(527): n is a, c, g, or t
  misc_feature (580)..(580): n is a, c, g, or t
  misc_feature (602)..(602): n is a, c, g, or t
  misc_feature (622)..(622): n is a, c, g, or t
ttttttggagaaaattataaactttattgaaagatatttcaaaggcctaagtaaatgaagagctgtaccatattcatgtattggaagacaacattgtaaagatgacatggtttaccagattaatctataaattcaatacaaatccaatcaaaatttcaatgctcttgggtttgtttgatttataaattgttggtctaattctagaagtaatatggaggaacagttggctaagaatagccaagacactccaaggaagaacaattttgtggtgatactggagacagaggtgaaattggttacaattatgacaaaatgtggaggcatcttggtttttatcagaccttttcctaaagttgcaataatcaggactgtactgtactgctacaagattagacaaattgatgtcagtcagaatagaaaccatcaaaagacccacacacatacacaaaaatttaatttatgaaagaggcagtgttacaaatnnnnnnnnnnnnnnnnnnnnnnnnnnnnnnnnnnnnnnnnnnnnncacttcgaatatgaaaaatgttaagttgaatttctaactcataattttcacanaaatcagttcaggacagactanagacacatgtgaaaggcaanactataaaatttccacaaggcagtaaagaatatatttatgactttgggt

SEQ ID NO: 125534 - DNA, 2125 bp, Homo Sapiens
  misc_feature (2013)..(2047): n is a, c, g, or t
cggagaaaattataaactttattgaaagatatttcaaaggcctaagtaaatgaagagctgtaccatattcatgtattggaagacaacattgtaaagatgacatggtttaccagattaatctataaattcaatacaaatccaatcaaaatttcaatgctcttgggtttgtttgatttattaaattgttgggtctaatttctagaaggtaatatggaaggaacagttggctaagaatagccgagaccctccaaaggaagaacaattttgtggtgatactggagacagaggtgaaattggttacaattatgacaaaatgtggaggcatcttggtttttatcagaccttttcctaaagttgcagtaatcaggactgtactgtactgctacaagattagacaaattgatgtcagtcagaatagaaaccatcaatagacccacacacatacacaaaaatttaatttatgaaagaggcagtgttacaaatcactggggaaaggatgaacttttcagtaaatagtgcagagacaaccacttcgaatatgaaaaatgttaagttgaatttctaactcataattttcacaaaaatcagttcaggacagactaaagacaaatgtgaaaggcaaaactataaaatttccacaaggcagtaaagaatatatttatgactttgggtaggaaaggatctccccccaaaccaatttgtattcagctttatatgatactttttaaaaacatttactttcagcaggaaataggcaacaatctataacattttacaatttccaaactcccctcctccaaaagtcaccgtaaaagttaacaagatatgtcgttgctgttttgaacaagaaagattttcagagagggtggacacttcacatgaggcatgtatgagcttttctcaggcccactttgacatggagggactaaagtaaaaccagcaggatgaatccacaaactgaaaacaggaatcttggctcttttaagtgacaccatctcgatgtcatcaacagaaagcctgagttttgttacctaacacagctgattttagggttgccaaggccacatcaaaactctcggtttaaggaagtcaagtctatgctgatggcatcggggaaagaggagacacgaagttttggttccccacactgtaaggcttccgtgccaaagtggctgacacgtgaatgtcagagaatctctcctgggaatcaagggaatcaagaacaatcttcaaaaaccaggacagaaaatcctattttcccttatttcaattcagtttctgagatacaccctattagtggtacttgccctttccacaaaagacaacaaggaagtgtcctgtgtgctaacaacataacttaaaaaagccaaaattctacacttttataaaacttgatttaaaaaaatagtatttcaaacagtagagtcactataagtacagagctctcaaaaatgtacatttcacttggcatccccagtgccttccgctttctgggactggagtgtagaggcatctcggttttttgcagggttgttcccatcctttccagcatctgctttcccctttctccctttgggaagcttctctcccttctttgcagaggcctttttaggcctgggctctggttttggaggagctggtttagcagacaaccgagctgatctcctctgtggctcatccttcacctttgctttatcacctttagcatctccttttgcctttctcttgggcatggtagcagcagtgttcgcaggtggcttgagcagtcctgttgggtgcttctgtcctcctcacgctgttcctggaaagatgtccgagtctcgtggccgtccgaggggcgcgggaatcccagctgaggcccgtgacgcgccggagccctaggcgtgggcagggccagcaccagccctaagacagagaagacgagcggagcccggctccgccaggaacaggaaggcgagggaccccggccgtaatggccgaattcccgggcatatgtccggtaccgtcgactgnnnnnnnnnnnnnnnnnnnnnnnnnnnnnnnnnnncggccgcttcctcgctcactacttcgctgcgctcgtcgttcgctacgacgagtagcgcctatagtgattaaatctttt

SEQ ID NO: 125535 - DNA, 625 bp, Homo Sapiens
  misc_feature (528)..(575): n is a, c, g, or t
caaccctaaaatcagctgtgttaggtaacaaaactcaggctttctgttgatgacatcgagatggtgtcacttaaaagagccaagattcctgttttcagtttgtggattcatcctgctggttttactttagtccctccatgtcaaagtgggcctgagaaaagctcatacatgcctcatgtgaagtgtccaccctctctgaaaatctttcttgttcaaaacagcaacgacatatcttgttaacttttacggtgacttttggaggaggggagtttggaaattgtaaaatgttatagattgttgcctatttcctgctgaaagtaaatgtttttaaaaagtatcatataaagctgaatacaaattggtttggggggagatcctttcctacccaaagtcataaatatattctttactgccttgtggaaattttatagttttgcctttcacatttgtctttagtctgtcctgaactgatttttgtgaaaattatgagttagaaattcaacttaacatttttcatattcgaagtgnnnnnnnnnnnnnnnnnnnnnnnnnnnnnnnnnnnnnnnnnnnnnnnntgtaacactgcctctttcataaattaaatttttgtgtatgtgtgtgggtc

SEQ ID NO: 125536 - DNA, 794 bp, Homo Sapiens
  misc_feature (459)..(471): n is a, c, g, or t
gttataagtgactttgtgatcaaactgtcaggcttgggttcttgttatagaatgcttggtatagaaaaaccatgccatcattaatggctaacaacacgtagggacttcatgtcatgtcaaagatagctctttgcaagtgccttgattaaaccagaaaactgtcatcgtttaacccaaatatctgaatggtcatctggtaactccatgggtttttgggcctcataagatgggtccactctgtacacaggcattcctcctgcaataatgttgtatctttgagaccgttgtcagtgtacacaacttcacatccttcataattgaagggtgactccatttttctgcacacttttttgatgtgatgcttgacgtgaggcccgacactaggattctcaatgcaagaatccagtaccttgcacatagaagtagcaacccatcccttgcctattttcatcttgctgnnnnnnnnnnnnnaaaaaaatggatgtgacttgttttgaatgttttgtattatacttgtttttgtgtgtgcataaattcattctgtaggatcttaagaaaaagagtcccagaatgttgcttctattattgtgcacaaccattgagaggtgttacaagaatgcagttaattttaacatgtgtgatgtgccatggtggaaaagtactatcggaataactctgcagtgacagaatttgaagtttggctagcatccatacttttctactgtaaatatttcactctcctctagctatccttgatgagcttctcactttaagaataaatgtgtttgatataa

SEQ ID NO: 125537 - DNA, 1745 bp, Homo Sapiens
ttttgaaaaacaaactggtttttattctaaacacgtactagggcagcatgctggggggcctctcctgcctccagaggtgcccctgctccccactgtggccctctttagacagagtaggagctcgggctacccacatgcagcccagcccttagcacccaagggcctgcctgtgccccactctctgcctgggctagggaggcccaggaccctcggagtgggcaggcccaccctttccatgggtcaccagggtctcagtgcccacttgtcctccaaccaacagtgacacggcaccctccacacggcctgtggctgccagtgccaccaccgcctgctccgtagggaagcccatgcgctccagctgctgcagccgcagagaggagacagaggacttggacagccatggtgcgctctggggttcctgggctggcccgtcaagaagcgaggcctggatgccctcctgcagcatctgctcatccaaggccgcccacatcggagtccctggggagaagctggccccagcccagtccaggcctgcctctgaggagccctcccaggtgggctgcacaggcctcaggcttggtgggggcagggctgagtcttcccagtgggaccagaggtcaggggaggccacataaggcggtccagggatgggaggcctcactccggcaggatgggtgacaggcagctccgccaggctacccggggtggcaaggagcctcaggggccagcaccccgccaaggtcctgcacaagacgccctcctgcagcacctgcagccgtcgctctgagggttccagccaccggaaggccccagctgcataggccaggccggcaaggaggccgcaaaggagctgcaggaagggtggctcagagctgagcagtggggtcagggcaagcagcagccacggcgacagccacggtggcagtgccccacggggccgtctagggcggtgtccctccccagccagcatggccaggtggacaggcatgtatccacagctgccggctgcactggacagcccaaggcctgccagcagcactgccagcagcccagaagccagggcgagcagggctgaggcatgcaggaatctcagcgtgcccaggtggcactcctgctgccagcccacagtgggcaggagcagcaggctcaggagcaggcctggcagggccgtgtggcccagggcatgggtcagcagccggtgcacctgccaggggtccagcaacagctccggggccaggaccaggccggggccggcccccaccagccacagggtgctcatcagcagcatcaggactgaggaggccagaggcagtgctggggacagttggccatgggggcccctggcatgcatcgcttggttgaggacggtcaagggtggtcctggggctgtgtgcttactgggaagccgggagggcagaatggaaagacaaggacggagattcttccggtggcggatagagtagggggtcccaggatctgtctggttcgaactcagctggtgactttgcagagatactcaatttccttgggcctcagtttcccctttgcagagcgcgcccggcaaccccgaaaggccggtcggggaccccggctgggagtcaggactctagctcccgggcgcgacccgagaaccctgaatccattccgcgcacacccggccgcgtgacccctgccgaccggctggcgcgccacccattccccgcggcccgcggattagtcagcagttgttctagtccgggtccctt

SEQ ID NO: 125538 - DNA, 2395 bp, Homo Sapiens
  misc_feature (246)..(494): n is a, c, g, or t
tggggtgtttttgggtttttttgttgcgcccccaggggctggaaagttcccaaggggggggcacttttattgggttttaatttggcagcgcttcccaaacttgtccagttttccaaggccaaacccttccttacggtccagtgtccccggaagtaagctgggaaattaccagggcatgccaccacccacacttggcttcatttttaaaaaaattttcttgtagaggacaggatcttgctaccttgnnnnnnnnnnnnnnnnnnnnnnnnnnnnnnnnnnnnnnnnnnnnnnnnnnnnnnnnnnnnnnnnnnnnnnnnnnnnnnnnnnnnnnnnnnnnnnnnnnnnnnnnnnnnnnnnnnnnnnnnnnnnnnnnnnnnnnnnnnnnnnnnnnnnnnnnnnnnnnnnnnnnnnnnnnnnnnnnnnnnnnnnnnnnnnnnnnnnnnnnnnnnnnnnnnnnnnnnnnnnnnnnnnnnnnnnnnnnnnnnnnnnnnnnngtggtgcccagccgacaaccagaactttccgcagaccttgtgcttttggaccttgggtatcttctgcaggtcaagccatcctgaccactctgagaacttacccagggtgactcagctgtcactccaggtcactcataagcccaacgggtagctccacccgtggacagctggatacacttgtgtctgttctctaaagtcatggatgacctgacaagagggaaaggaaagagggaacctccacttccctgggcaagttggaaaagggtgaggtgagggcaggattccttctcattggagatggcacacagagggcttggcctagtccttcagctgggagacctcatacaggtacgcggccagcatcttggttccctctatgtagttatacctgttgagcttttcattctgggagtgggctccgtcatccgctgaccccacaggcagcagcatgacgttcttgcccgtggcctcctgaaaggtcaaggtcacgggaatactgccgccttccctggtcaagtctggctcaacaccaaaaactgtcttcatggctcttctcccagccaggtaatgagggtgactgaagtcggagacccagggcttcccaccgtggcccatgtacaccttgaactcattggggctgcgtagttcagcaaacttcttagttaggtagcttgtgacctgctcgccgacgacttcaggagtcatgttcggcacgagcctgatggagaacttgccaaccaccttcctgggaatcacggtcttggccccagacccagagaaggcgccttcgatgccatggagggacagagacgggtaccgccatcggtgcatgaggatgtctttcttgtggctgtgcaggaggatctgcgcccccacatccttggcaaactcctctatgtcaaagtcgatgtcgtcgtacagcttgtgctcctcttccgtgacggcggccacggcctcgttaatgccggggatcaggatgttccccctcttgtccaccaaagagcccatcagcaaaatgagatcagtcatggcctcatgcaccgagcccccgtacaccccagaatggaggtctttgttgctgcactccacctcgatgaaaaagtagcaaatgcccctgaggccgtaggtgatgcagggcttcttctttcccagccagtaattgtcagaaatgcagacatagtccacatccttaaagaatgtgtctttccgggcaaaaatcagctcgtctaggccctcagagcctgactcctccatgccttcgaggcagaatcggacgttgacaggaatctcctggcctgttttctgatacgcttccagggcgtttatccagccggccaccgggcccttatcatcagtcgaacctctcccatacagcttgccgtctcgctccaccagggtgaagggctcgctgtcccagccgtcctccagggctgcaggctgcacatccaggtgcccgtaaatgcacacggtcttcttctgtgggtcggagcccagcctgccgagcagaataggagggagcgggatctccgagccatcagggagcttttgttttccgatatccaccagttccacagagccccccaactgcttaacatctgcagcagcaacttccatcatcctcctgatttcgcctctcttctccggccacgcagacacactctggatagccacccattttgcgagtttcttaatgtagcgatcctgattttcatctatgtacttaaacagggtagtgagggccgccatctttcaaccagaccccagaccgcagatctcgaaggttctgggaaggaaggcccactaggcaaggccctgttaccagcagcaagcgcggcgccggttccgtaccacgtgtcctggccaccggacgcgtgggtcgacgatatcccgggaattccgga

SEQ ID NO: 125539 - DNA, 1113 bp, Homo Sapiens
  misc_feature (55)..(65): n is a, c, g, or t
  misc_feature (215)..(215): n is a, c, g, or t
  misc_feature (251)..(251): n is a, c, g, or t
gtccaaaaaaatggaatgttcgttggttccaagccttggggctccctttttcccnnnnnnnnnnngggccacgggccttcgtttaaattcccgggatccagggatgttcccccctccttgttcccaccaaaggagcccccttcagcaaatggagatcagtcatggccttcatgcaccgagccccccgtaccccccaggaatgggagtctttgtgnctgcactccacctcggatgaaaaagtagcaaatgcncctgaggccgtaggtgatgcagggcttctctttcccagccagtaattgtcagaatatgcagacatagtccacatccttaaagaatgtgtctttccggcaaaaatcagctcgtctaggccctcagagcctgactcctccatgccttcgaggcagaatcggacgttgacaggaatctcctggcctgttttctgatacgcttccagggcgtttatccagccggccaccgggcccttatcatcagtcgaacctctcccatacagcttgccgtctcgctccaccagggtgaagggctcgctgtcccagccgtcctccagggctgcaggctgcacatccaggtgcccgtaaatgcacacggtcttcttctgtgggtcggagcccagcctgccgagcagaataggagggagcgggatctccgagccatcagggagcttttgttttccgatatccaccagttccacagagccccccaactgcttaacatctgcagcagcaacttccatcatcctcctgatttcgcctctcttctccggccacgcagacacactctggatagccacccattttgcgagtttcttaatgtagcgatcctgattttcatctatgtacttaaacagggtagtgagggccgccatctttcaaccagaccccagaccgcagatctcgaaggttcttggaaggaagagcaactggtcagtcctgtctctagtggagactgaggggcgacctgggaaggaaggcccactaggcaaggccctgttaccagcagcaagcgcggcgccggttccgtaccacgtgtcccggcctcgtgccgaattcgccacccaggcctcgctaccttagaaccgttatagttactgccgtt

SEQ ID NO: 125540 - DNA, 1825 bp, Homo Sapiens
ctgtggaagacgggcagagcgtgagtgggcagggaggggtcaccctggcaggtgtcggtctggggggctccgcctcacccccctgcctccccagggctgcatctgttaccgccctgaggagcaccaggtctgcttcctccgcctgatggaggacagtgatcgggagaccctgcggctgctggtggatacctccaaggtccaagaggcttgggtccccagccaggacgcccaccacacccaggagctgctggcagtgcaggggagcctcgaagtggaccccgcccaggcgggggctttggtgcagcgcctgtgcatgaggacccccatctactgggcccggcgagcagaggggccccggagacagcggctgatttatctctgcatcgacatctgcttcccgagcaacatctgcgtgtcggtctgcttttattacctcccagactgagcccccgacctggcccagcctggcccgtccccaatccagtgggctggccaggccacctgcaccagggaggacagctgctggcagggactaataaacccttccacctggccatggtggtggtgttctctatggaccgaggccctgaaacgcgggcagggaggggcagagaacacactagcttgggggtgggcaccagcctcagacccctcagcagctttgggccctcggccgactttcccaggcagtgcaggctagcccagtccaggagtgtgcagcctggcttgggtcgagctctgtcacatctggataagcaactgggggctgagagtcccagggcagcctggcccagcaggtcaaggcgccacagggggccatcaggtccagctggcgcaggccggcaggggagggtctgctctgacctgggtgctgcatgggtccctccagctgccaccacctgcaccaggcagtcccgaggggtcacaggctagcccagcacactgtcattgaaggccaggcagacaacagccttctggtggccgccatactctctcttgatctctccagtctccacacaccagagccgggccaggttgtccgaggaagcagtgacgatgtactgggagtcccccgagaaggcgcagccccacatccagccgcgggaggactccccggggttgccgctcttgatgctcagctccgtcatcagggagaagttggacgtcctccagatcttgcacgtctgatcagccgagcaggtggcgaggagcgtggagtcggggctgaagcgacactgcagggcgtagcgcgtgtgggcagggatcttagtcttggggatgagctgggtcacctcgtcaccaatgccccccgtcagattccagacatagcagtttccggtgctattgacagctgccatgtagctggcgtcgggatcgatgtgggcggacgtgatggagacctcgggctcagggatcagctgctcgttgtggtctgttttcaagtcccagatgtggatagccccgctctggtcacccacgatgagctctgcctggttggggtgcaggcacacgcagttaatgggtgcgttcacctggaagatccgctggcactgcaggttccgggacctgaggtcccagatcctggctgtgcagtcctcgccgcccagtgtacatccaagcggccgtcttcgtggaagcccacagacgcgatgttcttgttcgacgccgtcgtagctgatgatggggttagggttattggagttgagatcatacatgcggatgtcgctggtaacctagggacacaggctgaactgcagcagcaatcatgctgcggtccggtgtgacctccaaggcattcacctgggagtcctggtgctgcaccgtc

SEQ ID NO: 125541 - DNA, 1204 bp, Homo Sapiens
gcgggagcccggggccgtcagagcggctcttacgggagatggacccccgagtttgcagtggatcacgaacagtgcgaggacctaaggggcgacatgggcgtgtccagagcaagcgagccatcgagaacccgtcaccgtggccagcccccagcccagcaggccccctcccgggccagcaggccctgcacgcacgtggagtcggggctgaagcgacactgcagggcgtagcgcgtgtgggcagggatcttagtcttggggatgagctgggtcacctcgtcaccaatgccccccgtcagattccagacatagcagtttccggtgctattgacagctgccatgtagctggcgtcgggatcgatgtgggcggacgtgatggagacctcgggctcagggatcagctgctcgttgtggtctgttttcaagtcccagatgtggatagccccgctctggtcacccacgatgagctctgcctgttggggtgcaggcacacgcagttaatgggtgcgttcacctggaagatccgctggcactgcaggttccgggacctgaggtcccagatcctggctgtgcagtcctcgccgcccgtgtacatccagcggccgtcttcgtggaagcccacagacgcgatgttcttgttgacgccgtcgtagctgatgatggggttagggttattggagttgagatcatacatgcggatgtgctggtaacctagggacacaggctgcagcagcaatcatgctgcggtccggtgtgacctccaaggcattcacctgggagtcctggtgctgcaccgtccgggtgcagatgccgctgtgggcctgccagaagcgcacggtgtggtcgtagcctgcagtggccaggatgaccgggtcactgcccaccgtgcctggggaggtgttcatggtgtggcctgcacgggccctagagctgaacggcaggggtcaaaggtcagagcatctgcagagaaggatgtgaagtacttagaagacactctctgtgctaagtagattatagacccacaaggcgctgccgaatggcgcttatcattcccattttagagttgggacaagaagcgcaggtaggttcagggacacgcgtcacacgcgtgatacctggctccggggcgacgcgtgggtcgacgatatcccgggattccggaccgtaccagcctgcttttttgtaacacactgtttatgtcctatgc

SEQ ID NO: 125542 - DNA, 1093 bp, Homo Sapiens
catgaacagtgtgacgatgtctgggagtcccccgagaagcgcacccacatccgccgcggagaactccccggggttgccgctcttgatgctcagcttccgtcatcaggaagaatttggacgtcctccagatcttgcacgttctgatcagtccgagctaggtggcgaggagcgtggagttcggggcctgaagcgacactgcaggggcgtagcgcgtgtgggtcagggatcttagtcttggggatgagctgggtcacctcgtcacccaatgcccccccgtcagattccagacatagcagtttccggtgctattgacagctgccatgtagctggcgtcgggatcgatgtgggcggacgtgatggagacctcgggctcagggatcagctgctcgttgtggtctgttttcaagtcccagatgtggatagccccgctctggtcacccacgatgagctctgcctggttggggtgcaggcacacgcagttaatgggtgcgttcacctggaagatccgctggcactgcaggttccgggacctgaggtcccagatcctggctgtgcagtcctcgccgcccgtgtacatccagcggccgtcttcgtggaagcccacagacgcgatgttcttgttgacgccgtcgtagctgatgatggggttagggttattggagttgagatcatacatgcggatgtgctggtaacctgcagcagcaatcatgctgcggtccggtgtgacctccaaggcattcacctgggagtcctggtgctgcaccgtccgggtgcagatgccgctgtgggcctgccagaagcgcacggtgtggtcgtagcctgcagtggccaggatgaccgggtcactgcccaccgtgcctggggaggtgttcatggtgtggcctgcacgggccctagagctgaacggcaggggtcaaaggtcagagcatctggctccggggctccagggcgcgtgctccatccccgccccacgcacacggcgggggcgccgtcccccctccacctccgcagccggcaggggggagtcacgcgcgggcgcccggacgcgtggtcgacgatatcccgggaattccggaccggtaccagcctgctt

SEQ ID NO: 125543 - DNA, 969 bp, Homo Sapiens
ctgggagtcccccgagaagggccagccccacatccacccgcgcgagacctccccgggttgccgctctgatgctcaagctccgtcatcagggagaagttggacgtcctccagatcttgcacgtctgatcagccgagcaggtggcgaggagcgtggagtcggggctgaagcgacactgcagggcgtagcgcgtgtggcagggatcttagtcttggggatgagctgggtcacctcgtcaccaatgccccccgtcagattccagacatagcagtttccggtgctattgacagctgccatgtagctggcgtcgggatcgatgtgggcggacgtgatggagacctcgggctcagggatcagctgctcgttgtggtctgttttcaagtcccagatgtggatagccccgctctggtcacccacgatgagctctgcctggttcgggtgcaggcacacgcagttaatgggtgcgttcacctggaagatccgctggcactgcaggttccgggacctgaggtcccagatcctggctgtgcagtcctcgccgcccgtgtacatccagcggccgtcttcgtggaagcccacagacgcgatgttcttgttgacgccgtcgtagctgatgatggggttagggttattggagttgagatcatacatgcggatgtgctggtaacctgcagcagcaatcatgctgcggtccggtgtgacctccaaggcattcacctgggagtcctggtgctgcaccgtccgggtgcagatgccgctgtgggcctgccagaagcgcacggtgtggtcgtagcctgcagtggccaggatgaccgggtcactgcccaccgtgcctggggaggtgttcatggtgtggcctgcacgggccctagagctgaacggcagggtcaaaggtcagagcatcttacgggcggctccgcactccgccgtgtccaggacggcgaggatcccgggaattccggaccggtacc

SEQ ID NO: 125544 - DNA, 2171 bp, Homo Sapiens
  misc_feature (1062)..(1070): n is a, c, g, or t
  misc_feature (1743)..(2117): n is a, c, g, or t
  misc_feature (2122)..(2123): n is a, c, g, or t
  misc_feature (2126)..(2126): n is a, c, g, or t
  misc_feature (2144)..(2144): n is a, c, g, or t
agtgttaggaagatttatttccaaacagtggcctccacactgcgcggcagcacttctttttagtatttgtaagcttttgcccactttcaattgagccagccctagcgtggtatgtattgcatgctgaacaatatagagtttgtttttcctttctgatgattttaaactcttaaagaacaggaaagcatctggtaagaagaaatcatgagtccgtcagtgcccttactcatatgcgtctccagtggcctcatgttgtggtcacaggagtttcctgttcacagcaatgtgtgtgatatggacccagcatccactgtcgtgcttttaaactgattcctgggacatagcttaccactggaacagcagaccagtgttgcactgtttctaaagctaagcttttccttatttattttggtactacctaagtgacttggttttgactgtccctaagagagggaaccactttgctgaatttttaaaaagtccaactgctctttcatcttttatgcttagaaacctgttctctccagatgcacttctgaggcatggatgagctgagcgtatggctagaaattggaagtttacagctattaccagggggctaactcccggggcatcgcagtagcttctggcacccgtggcttcatgtctttagcaaagtcttgatgtcatggaaagagaaaaagtgtatgcagttagttacctgattttgtaaacaaacagtggctgacctgggcccttaaatcaccttcacaccttttagaaccacaagtggttctttttgactccaacaaaggaaacgaagttgaaaaagtcaagcccctgtgtactggggccggacttcccatcatttgagtgcagcactttagttcagaatctctgtgccatgtggttttttaaacaggaagattgttggttccttagtattaagatagatagtccctattttgagtggaatttttcatttgtaaggggtatgttccttctctgattcttgctttcctcaaacaggatactgcctgctgtaagaccatcctctatggttgtactttaataaacagtaannnnnnnnnacccaaaaaattgtattttgtttctacttccttgaaacctgctttccaatttaatttttaagtgggaacctgcacagtggaaataaaggcaccgtgtgtagatttacagatgtgcagattcatgtgtggatgatatgaaggccattcaaatacgtgtaaatggacattttcattcaagtatattaatgtagatattttaaagtgggttataagtttatcattgtctttaaaatagaagtcacagctatcttccagcctgtcttctctaggaacgctgttgacatgccagggctccgtctacactggaagcagctatacagctgtgaccacatcgagctttagccagtcacacttctggaactgtccgttcagtccatcccatttctggctaagctcctcacgtaggtgcgtaggttctggttaataaaattcactgttgtgtgaaagacatcacggagcaaggacggcgtgtgactggccaccttcttggccagcagcagggccagcaccagcatggtcttctccttctccatgtctctagggtaggcctgcagcagctgctccagggcagtggccaggtccctgttccggtcctcctccgaccggctggtgttcctgagctgcagggccaggccgttcaccaggcccggagggatgcctcttgcccgaatcnnnnnnnnnnnnnnnnnnnnnnnnnnnnnnnnnnnnnnnnnnnnnnnnnnnnnnnnnnnnnnnnnnnnnnnnnnnnnnnnnnnnnnnnnnnnnnnnnnnnnnnnnnnnnnnnnnnnnnnnnnnnnnnnnnnnnnnnnnnnnnnnnnnnnnnnnnnnnnnnnnnnnnnnnnnnnnnnnnnnnnnnnnnnnnnnnnnnnnnnnnnnnnnnnnnnnnnnnnnnnnnnnnnnnnnnnnnnnnnnnnnnnnnnnnnnnnnnnnnnnnnnnnnnnnnnnnnnnnnnnnnnnnnnnnnnnnnnnnnnnnnnnnnnnnnnnnnnnnnnnnnnnnnnnnnnnnnnnnnnnnnnnnnnnnnnnnnnnnnnnnnnnnnnnnnnnnncgcannganacatgtgagcaaaggcancaaaggcaagatcgtaaaaggcgcgtg

SEQ ID NO: 125545 - DNA, 1159 bp, Homo Sapiens
tattatgggtttttcgcacttccccgtggaaacccctgtcttttccccaaatttaattttcttaaggggggggaacccttgccaccagggggaaattaaaagcgcccccgggtgtgttagattttaccaagatggtgcaagatttcatgtgggggatagatatggaaggcccaattcaaattagtggtaaaatggccatttttccattccaagtatattaatgtagatattttaaagtgggttataagtttaacattgtctttaaaatagaagtcacagctatcttccagcctgtcttctctaggaacgctgttgacatgccagggctccgtctacactggaagcagctatacagctgtgaccacatcgagctttagccagtcacacttctggaactgtccgttcagtccatcccatttctggctaagctcctcacgtaggtgcgtaggttctggttaataaaattcactgttgtgtgaaagacatcacggagcaaggacggcgtgtgactggccaccttcttggccagcagcagggccagcaccagcatggtcttctccttctccatgtctctagggtaggcctgcagcagctgctccagggcagtggccaggtccctgttccggtcctcctccgaccggctggtgttcctgagctgcagggccaggccgttcaccaggcccggagggatgctacggtccatgctgtccccgacctgggcgaggtgcctggcaatattccggatgatgtcttcttgactttcagaatctgcctctattcttcccaagcgggagtggctgctgcggttgccatcagtctgcagctcatcgtagccctcccactggggagccagcactggcagctcgtggcccagtgcgtccagctctctgcggaagctgttgtcagaacagctttggaggaagccaaacaccagtaggtttgtgatgcactcatccctgaggctggaaccgttgttgacctcacagtccatggcctgggcagcgcggcagctccgactcactcctggttcacagtgtcccagtggcgaccaccctccagccgcgggggcgcgggcgcgtccgggccgaggcagcgtctcccaggcgcgcggacacggtcgactaccccctcgtgccgattcaccacccgcctctaccta

SEQ ID NO: 125546 - DNA, 982 bp, Homo Sapiens
  misc_feature (78)..(78): n is a, c, g, or t
tttggatgagacatgactcaaaagcccgtgtagtgtctgtggcgtcgcagagtgtcttctccctgagggtgcggcagngtgtaggccatcacggttccacctttccccttcgcggagacccccgcggcgccacaagcgaataggttttttaaaaaagctttcttcagagggccggaggccgggctcaccaatggtatatctccgcatgcataccgtataaacgcgccggaggtttccatctttaaaggaatggccttgggaaaataacgtcccttcccatgcccaccaatattacagttttcggagtcccagtaagatacacagaattacatccgtaattaatatgaatgccaacatgtcaagcagtatttggttacatggcaaacaaaatcaagaaagcaaccatcaaacaaaagagacccatagcttcagacaaggcaaatcccaggatagcatatgagaacagctgctgcttcagcgaagggtttctggcataaccaatgataaggttgccaaagactgttccaataccagcaccagaaccatccactcctactgttgcagcacctgcaccgataaatttggcatgcagtatcaatgtctctgctgattgcactggtctgaaactccctttggattagctgagacacaccattctgggccccattaaataccgtagagccctctccagtcctactagcctctggtcgagataacactgatgcagaaattggtctgtatgcaactctggatccagctcggatcagagagggggtgcaggcgagcttggcgcaggcgaacatcttacactcttcgggactgcgcggctggagatattgggtgacaggcgacgtgggctcctctcccgcttcctctcttcccaggaggcggcggcggcacgggctgcagcagaggtcgaaggagtgggactccccggccgtaatggccgaattcccgggcatatgtccggtaccgtcgactg

SEQ ID NO: 125547 - DNA, 1111 bp, Homo Sapiens
  misc_feature (240)..(241): n is a, c, g, or t
  misc_feature (260)..(261): n is a, c, g, or t
  misc_feature (266)..(266): n is a, c, g, or t
  misc_feature (271)..(281): n is a, c, g, or t
  misc_feature (283)..(285): n is a, c, g, or t
  misc_feature (287)..(289): n is a, c, g, or t
  misc_feature (295)..(295): n is a, c, g, or t
  misc_feature (297)..(297): n is a, c, g, or t
  misc_feature (300)..(301): n is a, c, g, or t
  misc_feature (303)..(327): n is a, c, g, or t
  misc_feature (335)..(335): n is a, c, g, or t
  misc_feature (339)..(339): n is a, c, g, or t
  misc_feature (341)..(341): n is a, c, g, or t
agttgccgccagtaaaaaggacctctccgcggaacccttcccttcctgggggtgtgtttgtccacgaaacccgctccgggttgttcccccccgggggcggtttttttattcgggggaggaatcccaggcccccttggtcctgtaccccgggttcttctttggggaaaccaggcttttgccccatggtccccttttcctttttggggggccggggggccaaaaaggaatggtttaggaaanntttttgtggggtgggaggnnttttnccaannnnnnnnnnntnnntnnntttttntnttnntnnnnnnnnnnnnnnnnnnnnnnnnnttttcgtncggngngtgtttttttaaagttttcatctttaatgaaatgactttggaaataacgtacattcccatgacaccaatactacagttttcggagtcacagtaagatacacagaattacatccgtaattaatatgaatgccaacatgtcaagcagtaatttgttacatggcaaacaaaatcaagaaagcaaccatcaaacaaaagagacccatagcttcagacaaggcaaatcccaggatagcatatgagaacagctgctgcttcagcgaagggtttctggcataaccaatgataaggctgccaaagactgttccaataccagcaccagaaccagccactcctactgttgcagcacctgcaccaataaatttggcagcagtatcaatgtctctgctgattgcactggtctgaaactccctttggattagctgagacacaccattctgggccccattaaataccgtagagccctctccagtcctactagcctctggtcgagataacactgatgcagaaattggtctgtatgcaactctggatccagctcggatcagagagggggtgcaggcgagcttggcgcaggcgaacatcttacactcttcgggactgcgcggctggagatattgggtgacaggcgacgtgggctcctctcccgcttcctctcttcccaggaggcggcggcggcacgggctgcagcagagcctcgtgccgaatttgccacccaggcctcgctaccttagccgttattttggttgttgggggtgtgtgggtgggttgga

SEQ ID NO: 125548 - DNA, 1153 bp, Homo Sapiens
ttcactgatcggacatgttctctcctgtgcgtgactatgtgtgttcataatgatattgttttgtggtgcgcatgtccctctcacattctcgcccgagctttttggggacaaatcttgcctcagttatatgggggaagaacagtgatatttcggtcgggcccaaccccgcccttggccgggacgccctttaataccccggtttgcttaaaacccagggtgttttgggctccaaccacctggcttcctctgggtcttcacaatgctgggctaccttccctggagagagccaaagtccaggcttggtaagaggcctgtggtccaacagcgcaaaccaacgcgcccatcagacgcttcggaagtagatgcgtccggagttccaatgacatcggggacatggcccccactcctgttctggaggtcacgggcctgctgaacctcttgtaccaggtcagccaccaggttcatctggcaggacctgagagcccccaccaggtgggccactgttgcgttctccttctctgtgttcttccagattctcagtgactcccgcacacgctctgtcaggttgcgggggtatctgtcctcgatgctgtcgatcttggtgtctgagactttgagctgacgagccagccttctccaatctttccccacattatcacatatgacgttaaatgctgcacacaggtcttcttccccaggcgcggccccggccgccgcccccgcctcgaagtcgtcgacgcgccgcagcaggtcgtggcgccgcagggaggcgagcagctcgcgcaggagctcggtgtgcccgggctccaggtcgttctgctccagcagcatggagaagaggtctaggccgctctgcacgcgctccagcttgcgcttgcccacgcgcccgaggcataggaacttgagctcggtcagctcgctgctcgacaggctggacgacaccgagtgcagcagcaccaggaacgggtccatggcggggtctgcaagcggccggggctgcggcccggccctccgcgcgccctctgtcctcggctcgctggccctggccaggtctcgccgcttgcccagcggcccaaggattccacccccgaacctgcactccggtgcctgattcactcctcgtgccgaattcacacccagcctgtacctagcc

SEQ ID NO: 125549 - DNA, 2236 bp, Homo Sapiens
  misc_feature (16)..(16): n is a, c, g, or t
  misc_feature (112)..(112): n is a, c, g, or t
  misc_feature (191)..(253): n is a, c, g, or t
  misc_feature (337)..(349): n is a, c, g, or t
  misc_feature (592)..(636): n is a, c, g, or t
accgttagataatgtntgaaggggtggcgcggcggcgtatggaggaagaagggtttttctaagtggtcggcggttgttattcaccaggggcgggaaatatatatattaccgncgcgtaagcggagagcaaaagggtggtgtaaattttaggcgcgtgggcgatatagcgcggcgtgtttcacacgatagcnnnnnnnnnnnnnnnnnnnnnnnnnnnnnnnnnnnnnnnnnnnnnnnnnnnnnnnnnnnnnnnaacgcccggttctaataaaaatattctgccggcgggcggcaggtttaatttttaatattcggaacgcgtctgtgggacttcccnnnnnnnnnnnnntcccagtaaggggcgcgccggaggatcccctttttgggggttgtttaggataaccctcgggtggccggaccggggggttgtttttgttgtgtgggaaacccgaggccgctgatttgtaggtgccggggttttttcttggagagaaaaggttggggcccagtttcgcctttcctgttttgggcggcgcgccgccaagaaaagggtttgtggaaaattttttgcgggggcggaggggtcccaaannnnnnnnnnnnnnnnnnnnnnnnnnnnnnnnnnnnnnnnnnnnnggtttgttttgtattattgtgatgtttgtagtgggttagtgttttggcgttgtgtgttgtcttttttatagaaaattttttgtaatatggaagttgtaaagctgtgttttaataggattaccttaggaataagaggactgctttttaaagatacgagatcccgctgccttggcaattctgttatcagaaagatagtgattttgatacaaaacagtaagaaactgtagaattgcaggacccataatcctcacaaggaagatttagagagtgctgtgtgtcaatcactcatcagcacctcacagatattatctcaattcgtcctggcaaccatcactgcccctacttagcagtctcagagaggagactcaactcacacaggggccaagagctggaccacggccaaccaggtctccccacccccaccccagccatgcctctccccaccacaacagcaccccgcctgaccctagtgtccaggtctgtcccggtggcctccaaggaaatgggacaaaacatcctttctgccaactgcaggggcagcagaacgccacagtggttgagcatgggctctggtgaaggatggcgggggttcaaatcccagttctccacctctctgcttcgctccgattcctgggcctctgagctggtctcctccgctgtggagtaacagtgtgactgctcatctgcacagattccttctgtgctggacacggttccaactttccaactactcccgcaggagctcatttagtggagacaagatcttgctcagtgtcatagtgaggaagaaatggaaatatctgtgcagggcccaagcccggcctggtgcgggagaggcattaataaacgcagcttgagttcagaagcaggtggtctgtggctcactcagcctggcttcctgctgggtcttcacagtgctggctaccttcctggagagacccaaagtccagtctgtgtagatgcctgtggtccaccagcgcaaagcagcggcccatcaggacgcttcggaggtagatgcgtctgagttccatgacatcggggacatggccccactcctgttctggaggtcacgggcctgctgaacctcttgtaccaggtcagccaccaggttcatctggcaggacctgagagcccccaccaggtgggccactgttgcgttctccttctctgtgttcttccagattctcagtgactgccgcacacgctctgtcaggttgcgggggtatctgtcctcgatgctgtcgatcttggtgtctgagactttgagctgacgagccagccttctccaatctttccccacattatcacatatgacgttaaatgctgcacacaggtcttcttccccaggcgcggccccggccgccgcccccgcctcgaagtcgtcgacgcgccgcagcaggtcgtggcgccgcagggaggcgagcagctcgcgcaggagctcggtgtgcccgggctccaggtcgttctgctccagcagcatggagaagaggtctaggccgctctgcacgcgctccagcttgcgccgacgcgtggtcgacgatatcccgggaaatccggaccgtaccacctgctttctgtacccctggtctatattactata

SEQ ID NO: 125550 - DNA, 910 bp, Homo Sapiens
tgggggggagaggcaatttaataaaacgcaagttgaatttcagaaggcaggtgggttcggtggctccatgcagcctgggctttcctgcggggttttccacagtgattggccttcctttcctggggagacccaaagttccaggctgtgtagatgcctgtggtccaccagcgaaaagcagcggcccatcaggacgcttgggaggtaagatgcgtctgagttccatgccatcgggggacatggcccccactcctgttctggaggtcacgggcctgctgaacctcttgtaccaggtcacccaccaggttcatctggcaggacctgagagccccccaccaggtgggccactgttgcgttctccttctctgtgttcttccagattctcagtgactcccgcacacgctctgtcaggttgcgggggtatctgtcctcgatgctgtcgatcttggtgtctgagactttgagctgacgagccagccttctccaatctttccccacattatcacatatgacgttaaatgctgcacacaggtcttcttccccaggcgcggccccggccgccgcccccgcctcgaagtcgtcgacgcgccgcagcaggtcgtggcgccgcagggaggcgagcagctcgcgcaggagctcggtgtgcccgggctccaggtcgttctgctccagcagcatggagaagaggtctaggccgctctgcacgcgctccagcttgcgcttgcccacgcgcccgaggcataggaacttgagctcggtcagctcgctgctcgacaggctggacgacaccgagtgcagcagcaccaggaacgggtccatggcggggtctgcaagcggccggggctgcggcccggccctccgcgcgccctctgtcctcggctcgctggccctggccaggtctcgccctcgtgaa

SEQ ID NO: 125551 - DNA, 1069 bp, Homo Sapiens
ttgacatgcatttttactgtctttattcctgacactgagatgaatgttttcaaagctgcaacatgcatggggagtcatgcgaaccgattctgttattgggaatgaaatctgtcaccgactgcttgacttgagcccaggggacacagagcagagagctgtatatgatggagtgaaccggtccatggatgtgtaacacaagaccaactgagagtctgaatgttattctggggcacacgtgagtctaggattggtgccaagagcatgtaaatgaacaacaagcaaatattgaaggtggaccacttatttcccattgctaattgcctgcccggttttgaaacagtctgcagtacacacggtgacaggagaatgacctgtgggagagatacatgtttagaaggaagagaaaggacaaaggcacacgttttaccatttaaaatattgttaccaaacaaaaatatccactcaaaatacaattcaacaatgcaacagtcatcttacagcagagaaatgcagagaaaagcaaaactgcaagtgactgtgaataaagggtgaatgtagtctcaaatcctcaaagagttgtgtttatttcatcgacaaatagattattcgtattcaattctgatgtgttttaaagactaagatgctcattttacgattagcgcacatgtgtatattgtcacctgttctccttagaaaaatgctcttcctcatggttaatgtttccctttggtaccaattttgcctgtttgcataaagtatttcatttttaaaactcagcataaaatatagactgcatctgaaaagatattgaatataacatataaagcagaacacacaagttccacatttcaaaagcctcgataacaaaaaaagaaagatcaaatcccttattagtctctgtaaagtcatttataaagctcctgctgatcctgttaagcatggatataattgatctttctttttcattaaaatgtaagcttttccccaagacatgtcaaagtgctaagaatgaataggaattgtccatgtttttcgcttttgaccacgggcaccatcggaactgaactca

SEQ ID NO: 125552 - DNA, 1070 bp, Homo Sapiens
  misc_feature (57)..(108): n is a, c, g, or t
  misc_feature (112)..(146): n is a, c, g, or t
tactttcctctcgattccctctcctcctccccacacacccccccctaagggcgctannnnnnnnnnnnnnnnnnnnnnnnnnnnnnnnnnnnnnnnnnnnnnnnnnnnccgnnnnnnnnnnnnnnnnnnnnnnnnnnnnnnnnnnncagtcgacggtaccggacatatgcccgggaattcggccattacggccggggagtccaaggtacagtcgccgcgtgcggagcttgttactggttacttggcctcatggcggtccgagcttcgttcgagaacaactgtgagatcggctgctttgccaagctcaccaacacctactgtctggtagcgatcggaggctcagagaacttctacagtgtgttcgagggcgagctctccgataccatccccgtggtgcacgcgtctatcgccggctgccgcatcatcgggcgcatgtgtgtggggaacaggcacggtctcctggtacccaacaataccaccgaccaggagctgcaacacattcgcaacagcctcccagacacagtgcagattaggcgggtggaggagcggctctcagccttgggcaatgtcaccacctgcaatgactacgtggccttggtccacccagacttggacagggagacagaagaaattctggcagatgtgctcaaggtggaagtcttcagacagacagtggccgaccaggtgctagtaggaagctactgtgtcttcagcaatcagggagggctggtgcatcccaagacttcaatttgagaccaggatgagctgtcctctcttcttcaagtccccccttgtggcggggactgttgaaccgaggcagtgaggtgattgctggctggggatggtggtgaaatgactggtgtgccttctgtggcctggacaacaaaccagcacagagctgtcacgtggtggagagtgtctttcaaagctgaatgaagcccagctagcaccattgccaccagcatgcgggattccctcattgacagctcacctgagtcaccttcaagtggttcatgggccctggctctggatggggcaaccttctcacttccgccatctgtaccgagcgg

SEQ ID NO: 125553 - DNA, 957 bp, Homo Sapiens
tttttgagcacaacctttcccttggccaaaggcctcccgggttaccaagaattggggccggaaaatgtgggagaaagggttgggcccacagtcccaggagcccaggaggcccatgggaaccaacttgggaaaggtgactccagggtgagggctgtcaaatgaggggaatcccgcatgctgttggcaatggtgctaggctgggcttcattcagcttgaagacactctccaccactgacagctctgtgctggttgtgtccaggccacagaaggcacaccagtcattcaccaccatcccagcagcaatcacctcactgcctcggttcacagtccccgccacaagggggacttgaagaagagaggacagctcatcctggtcttcaattgaagtcttgggatgcaccagccctccctgattgctgaagacacagtagcttcctactagcacctggtcggccactgtctgtctgaagacttccaccttgagcacatctgccagaatttcttctgtctccctgtccaagtctgggtggaccaaggccacgtagtcattgcaggtggtgacattgcccaaggctgagagccgctcctccacccgcctaatctgcactgtgtctgggaggctgttgcgaatgtgttgcagctcctggtcggtggtattgttgggtaccaggagaccgtgcctgttccccacacacatgcgcccgatgatgcggcagccggcgatagacgcgtgcaccacggggatggtatcggagagctcgccctcgaacacactgtagaagttctctgagcctccgatcgctaccagacagtaggtgttggtgagcttggcaaagcagccgatctcacagttgttctcgaacgaagctcggaccgccatgaggccaagtaaccagcggacgcgtgggcggacgcgtgggtcgacgatatcccgggaattccggaccggtaccagc

SEQ ID NO: 125554 - DNA, 894 bp, Homo Sapiens
  misc_feature (782)..(782): n is a, c, g, or t
  misc_feature (827)..(827): n is a, c, g, or t
  misc_feature (843)..(843): n is a, c, g, or t
ggtacagtcgccgcgtgcggagcttgttactggttacttggcctcatggcggtccgagcttcgttcgagaacaactgtgagatcggctgctttgccaagctcaccaacacctactgtctggtagcgatcggaggctcagagaacttctacagtgtgttcgagggcgagctctccgataccatccccgtggtgcacgcgtctatcgccggctgccgcatcatcgggcgcatgtgtgtgggagacagaagaaattctggcagatgtgctcaaggtggaagtcttcagacagacagtggccgaccaggtgctagtaggaagctactgtgtcttcagcaatcagggagggctggtgcatcccaagacttcaattgaagaccaggatgagctgtcctctcttcttcaagtcccccttgtggcggggactgtgaaccgaggcagtgaggtgattgctgctgggatggtggtgaatgactggtgtgccttctgtggcctggacacaaccagcacagagctgtcagtggtggagagtgtcttcaagctgaatgaagcccagcctagcaccattgccaccagcatgcgggattcgctcattgacagcctcacctgagtcaccttccaagttgttccctgggctcctggctctggactgtggccaaccttctccccattccgcccaatctgtaccggatgctggcagggaggtggcaaaagagcttcctggggactgaggggctggggcaccccacccttttttcacctggggcttatccgcctgggatgtntggtgtacggcaaaacccttggctctgggggggctgggcgggcanggccccggtgggctgnctgggctgagaggtctcggcctggccctggggccgccccatttggaggtgg

SEQ ID NO: 125555 - DNA, 1277 bp, Homo Sapiens
aagtttttaaaaaatctttttctaagggcccagggcggccccaacaaaagaaaataggccggatatgtgggatgtagcaccaaaattgggaaagagggggggcggttcgggggtttcacttcgggtgctatgtccgataactttcatttgtgcactaggtgtttgaattttttttttggcccggagggaactgcactttaatggggtggcacaggacagcagaaccctcagccagcagccacagggcctgccagccagcacaacagagcaggtttttgcagtaatgatagatccaggcgataagcacaggtggaaaagggttgggtgcccagcccctcagtcccagtgagctctctgccacctccctgccagcatccggtacagattgggcggaatgtggagaaggttggccacagtccagagccaggagcccatggaacaacttggaaggtgactcaggtgaggctgtcaatgagggaatcccgcatgctggtggcaatggtgctaggctgggcttcattcagcttgaagacactctccaccactgacagctctgtgctggttgtgtccaggccacagaaggcacaccagtcattcaccaccatcccagcagcaatcacctcactgcctcggttcacagtccccgccacaagggggacttgaagaagagaggacagctcatcctggtcttcaattgaagtcttgggatgcaccagccctccctgattgctgaagacacagtagcttcctactagcacctggtcggccactgtctgtctgaagacttccaccttgagcacatctgccagaatttcttctgtctccctgtccaagtctgggtggaccaaggccacgtagtcattgcaggtggtgacattgcccaaggctgagagccgctcctccacccgcctaatctgcactgtgtctgggaggctgttgcgaatgtgttgcagctcctggtcggtggtattgttgggtaccaggagaccgtgcctgttccccacacacatgcgcccgatgatgcggcagccggcgatagacgcgtgcaccacggggatggtatcggagagctcgccctcgaacacactgtagaagttctctgagcctccgatcgctaccagacagtaggtgttggtgagcttggcaaagcagccgatctcacagttgttctcgaacgaagctcggaccgccatgaggccaagtaaccagtaacaagctccgcacgcggcgactgtacttggcctcgtgccgaattcaaacccagcctcgtactagcc

SEQ ID NO: 125556 - DNA, 858 bp, Homo Sapiens
  misc_feature (99)..(99): n is a, c, g, or t
cccgaggactcacttaatggtgcacagacacagacctcaccacaccccaggcctgccagcagcacaacagacagtttttccataatgatagatccagcngataagcacaggtggaaaggtttggtgccagcccctcagtcccagtgagctctcttccacctccctgccagcatccggtacagattgggcggaatgtggagaaggttgccacagtccagagccaggagcccatggaacaacttggaaggtgactcaggtgaggctgtcaatgagggaatcccgcatgctggtggcaatggtgctaggctgggcttcattcagcttgaagacactctccaccactgacagctctgtgctggttgtgtccaggccacagaaggcacaccagtcattcaccaccatcccagcagcaatcacctcactgcctcggttcacagtccccgccacaagggggacttgaagaagagaggacagctcatcctggtcttcaattgaagtcttgggatgcaccagccctccctgattgctgaagacacagtagcttcctactagcacctggtcggccactgtctgtctgaagacttccaccttgagcacatctgccagaatttcttctgtctcccacacacatgcgcccgatgatgcggcagccggcgatagacgcgtgcaccacggggatggtatcggagagctcgccctcgaacacactgtagaagttctctgagcctccgatcgctaccagacagtaggtgttggtgagcttggcaaagcagccgatctcacagttgttctcgaacgaagcttcggaccgccatgagccctcgtgccgaattcgacacccagcctcgtacctagctt

SEQ ID NO: 125557 - DNA, 1052 bp, Homo Sapiens
cttccgggggccttatgggcgcccaacctaagacagaaggcttcacaaagagcggttgcgtatgataccgcgataccggtgaaggtgggtccaccccatcccgtgagtgtttcgccactcctgacagaatcggtacagatggcggaattggagaagttgcccacagtccagagccaggagcccatgaacaacttggaagctgactcagtgaggctttcaatgaggaatcccgcatgctgtggcaatggtgctagctgggcttcattcagcttgaagacactctccaccactgacagctctgtgctggttgtgtccaggccacagaaggcacaccagtcattcaccaccatcccagcagcaaatcacctcactgcctcggttcacagtccccgccacaagggggacttgaagaagagaggacagctcatcctggtcttcaattgaagtcttgggatgcaccagccctccctgattgctgaagacacagtagcttcctactagcacctggtcggccactgtctgtctgaagacttccaccttgagcacatctgccagaatttcttctgtctccctgtccaagtctgggtggaccaaggccacgtagtcattgcaggtggtgacattgcccaaggctgagagccgctcctccacccgcctaatctgcactgtgtctgggaggctgttgcgaatgtgttgcagctcctggtcggtggtattgttgggtaccaggagaccgtgcctgttccccacacacatgcgcccgatgatgcggcagccggcgatagacgcgtgcaccacggggatggtatcggagagctcgccctcgaacacactgtagaagttctctgagcctccgatcgctaccagacagtaggtgttggtgagcttggcaaagcagccgatctcacagttgttctcgaacgaagctcggaccgccatgaggccaagtaaccagtaacaagctccgcacgcggcgactgtaccttggactccctaaaaaggtttccgtttcctcgtgccgaattaacacccagcctcgtactgcctatggt

SEQ ID NO: 125558 - DNA, 973 bp, Homo Sapiens
ggggggacggaggccgggatacttgggaaaggatccgccggccttgaactcccgcctccgccgcccctaggcctcatggcggtccgagcttcgttcgagaacaactgtgagatcggctgctttgccaagctcaccaacacctactgtctggtagcgatcggaggctcagagaacttctacagtgtgttcgagggcgagctctccgataccatccccgtggtgcacgcgtctatcgccggctgccgcatcatcgggcgcatgtgtgtggggaacaggcacggtctcctggtacccaacaataccaccgaccaggagctgcaacacattcgcaacagcctcccagacacagtgcagattaggcgggtggaggagcggctctcagccttgggcaatgtcaccacctgcaatgactacgtggccttggtccacccagacttggacagggagacagaagaaattctggcagatgtgctcaaggtggaagtcttcagacagacagtggccgaccaggtgctagtaggaagctactgtgtcttcagcaatcagggagggctggtgcatcccaagacttcaattgaagaccaggatgagctgtcctctcttcttcaagtcccccttgtggcggggactgtgaaccgaggcagtgaggtgattgctgctgggatggtggtgaatgactggtgtgccttctgtggcctggacacaaccagcacagagctgtcagtggtggagattgtcttcaagctgaatgaagcccagctagcaccattgccaccagcatgcgggattccctcattgacagcctcacctgagtcacttccagttgttcatgggctctggttctggactgtgggcaacttctccacatcccgcccaatctgtaccggtgctggcgggcggtggcagagcccctgggactggggtggggcccccctttccaccgtggttccgggcttattgaaccgcttggcgt

SEQ ID NO: 125559 - DNA, 969 bp, Homo Sapiens
gggggaaacggaaacctttttagggagtccaaggtacagtcgccgcgtgcggagcttgttactggttacttggcctcatggcggtccgagcttcgttcgagaacaactgtgagatcggctgctttgccaagctcaccaacacctactgtctggtagcgatcggaggctcagagaacttctacagtgtgttcgagggcgagctctccgataccatccccgtggtgcacgcgtctatcgccggctgccgcatcatcgggcgcatgtgtgtggggaacaggcacggtctcctggtacccaacaataccaccgaccaggagctgcaacacattcgcaacagcctcccagacacagtgcagattaggcgggtggaggagcggctctcagccttgggcaatgtcaccacctgcaatgactacgtggccttggtccacccagacttggacagggagacagaagaaattctggcagatgtgctcaaggtggaagtcttcagacagacagtggccgaccaggtgctagtaggaagctactgtgtcttcagcaatcagggagggctggtgcatcccaagacttcaattgaagaccaggatgagctgtcctctcttcttcaagtcccccttgtggcggggactgtgaaccgaggcagtgaggtgattgctgctgggatggtggtgaatgactggtgtgccttctgtggcctggacacaaccagcacagagctgtcagtgggtggagagtgtcttccagctgaatgaagcccagcctagcaccattgccaccagcatgcggggttcccctcattgacagcctcacctgagtcacccttccaagttgttccatgggctccttgcctctggactggggccaacccttctccacatttcggcccaatctgttaccggatgcttggcagggaggtggcaaagagctcacttggaacttgaaggggctggggcacccaaacccttt

SEQ ID NO: 125560 - DNA, 867 bp, Homo Sapiens
gggaaacctttttagggagtccaaggtacagtcgccgcgtgcggagcttgttactggttacttggcctcatggcggtccgagcttcgttcgagaacaactgtgagatcggctgctttgccaagctcaccaacacctactgtctggtagcgatcggaggctcagagaacttctacagtgtgttcgagggcgagctctccgataccatccccgtggtgcacgcgtctatcgccggctgccgcatcatcgggcgcatgtgtgtggggaacaggcacggtctcctggtacccaacaataccaccgaccaggagctgcaacacattcgcaacagcctcccagacacagtgcagattaggcgggtggaggagcggctctcagccttgggcaatgtcaccacctgcaatgactacgtggccttggtccacccagacttggacagggagacagaagaaattctggcagatgtgctcaaggtggaagtcttcagacagacagtggccgaccaggtgctagtaggaagctactgtgtcttcagcaatcagggagggctggtgcatcccaagacttcaattgaagaccaggatgagctgtcctctcttcttcaagtcccccttgtggcggggactgtgaaccgaggcagtgaggtgattgctgctgggatggtggtgaatgactggtgtgcccttctgtggcctgggacccaaccagcacagagctgtcagtgggtggagaaatgtccttcaagctgaatgaagccccagccctagcccccattggccacccaagcatgcggggatttcccttcattggacaggccctccccctgaattccacccttcccaaaggttggtttcacttggggccctccc

SEQ ID NO: 125561 - DNA, 932 bp, Homo Sapiens
ggtcctaaggtagcgaggcctgggtggcgaattccgcacgaggcaaggtacagtcgccgcgtgcggagcttgttactggttacttggcctcatggcggtccgagcttcgttcgagaacaactgtgagatcggctgctttgccaagctcaccaacacctactgtctggtagcgatcggaggctcagagaacttctacagtgtgttcgagggcgagctctccgataccatccccgtggtgcacgcgtctatcgccggctgccgcatcatcgggcgcatgtgtgtggggaacaggcacggtctcctggtacccaacaataccaccgaccaggagctgcaacacattcgcaacagcctcccagacacagtgcagattaggcgggtggaggagcggctctcagccttgggcaatgtcaccacctgcaatgactacgtggccttggtccacccagacttggacagggagacagaagaaattctggcagatgtgctcaaggtggaagtcttcagacagacagtggccgaccaggtgctagtaggaagctactgtgtcttcagcaatcagggagggctggtgcatcccaagacttcaattgaagaccaggatgagctgtcctctcttcttcaagtccccccttgtggcggggactgtgaaccgaggcagtgaggtgattgctgctgggatgggggtgaatgactggtgtgcccttctgtggcctggacacaaccagcacagagctgtcagtggtggagagtgtctttcaagctgaatggaagcccagcctaacaccattgccaccagcatgcggggattccctcattgacagccctccccctggagtcaccctttccaagttggttccatggggctccctggcttcttggaatggggggccaaacctttcttcccacttttcccgcccccaatcttggta

SEQ ID NO: 125562 - DNA, 782 bp, Homo Sapiens
tacaaaggggttatataaatttatttttcatgtaacaattgattcagttagaaaaatttcccattttcaatgttaattccatctctcgtttttggaaaaaaatcactaaaaggacaaaaacccacagaaaaatacaatctgtatctgttctatatttacagataaccagtcattattaaggcgcagattaaaagttaacatttattcaaatcatcaaaatattttgtgcatcatataacaacaactctgtatactgtagtgtcatattcccttcattgcatcaagagaaagtgagagaaagaatttccagtgtttttatttatttttagccaccctacttaatctaatttaagtgggacagttttccctttggcatatcaaagcactgttcataaatcaacttaatactgcatattcattacatcttcctcctgttgcaaatgcatggtagacagctgggaaaagagctccaagattattatctgggaaggtcttattaaaagcataacaacatttagagtactgagttgttgaacaggacataaatctggtattgttaacctgtactacatgtttagcatgatgcattaatacaatcaaataagatggatgatcatcacatgatccacatgaccatttgtacacatatgcacaggatgagtaaagggagtgattcagttcaacatccttaagcagataaggcttagtttagcttaaaaagggcagtccctcggtgccagttataattgataattttatgacaggcccattatctatgcctt

SEQ ID NO: 125563 - DNA, 1229 bp, Homo Sapiens
caccacgcagcaaggagatgataagatagagtagtagttacagataagaaaacacgaagagataagatagtatctgtttgttctccctcctgctcacttcacatagtcgagctgccacccaaaccgccgctgtggggcttctttacaaggggcggccccatttaagatagtgccccccccagggggggatatctcgcgctccggagctgttctgctcctacaatacttccaaataaggttgtagtgcgccacattgtcttaaaacgctttttatggggccacaacacggggtcccacggagagattgggtaccataggatttggataagttaaggatgtttcccaaccagcctgtaagtctgggtcctgaataagtaatatccctctcgtgatgccgggtccctcctgttttccagggaacatcgtggacaaagctgtgccaaagtccagtcagcttcttttcaacgtcaacaaaagccaggatacaacagaccctagattacacctgtgggtgacaggctgatttcatacacacccttctctgtcaatcactcgtggctcaggagctctacgtactacctgctgaggttctttgaacacaaactctctgtcagagagatgatgctctttgttcttccaggtctggccaggcttctggtggagatggctcttagcagtggtagctggctgagcaatggcctggcttttaacaggggcagcccaggctccctgaactcgggctcgccgtcttttttcctccatgttgaccaaaaaggcttctgctccgagctttcagaagattttgttcctgtttcaaactactccatggtatctttctgagccccagtttttcctcagtaaacagggcagtcactttccgaacggttgaggtgcagactaagcgagctccgcaggtggaagagcttggtcgtggataagggcacttccttttcctaatttagatccttctctttaaggaggcctagaatgaggccccggaggtcgctcaggaagagacttcaggggtggtactcgcacccccagccccgcgcacccagcagtaagtcaggaaggcgcacttgcgggcggagccgggcgcggccgtgcaaacccggtaggacttggggcagccctcgcagccctgacccactaccgcagtctgtgatcctcgtgccgaatttaacacccaggcctcgctacctagcccgtaattggttttctcccccccc

SEQ ID NO: 125564 - DNA, 2617 bp, Homo Sapiens
  misc_feature (42)..(42): n is a, c, g, or t
  misc_feature (107)..(107): n is a, c, g, or t
  misc_feature (209)..(209): n is a, c, g, or t
  misc_feature (239)..(239): n is a, c, g, or t
  misc_feature (242)..(242): n is a, c, g, or t
  misc_feature (362)..(362): n is a, c, g, or t
  misc_feature (451)..(451): n is a, c, g, or t
  misc_feature (502)..(502): n is a, c, g, or t
  misc_feature (525)..(525): n is a, c, g, or t
cggggttgaggggcggggagaagagacgcggggcgtatatantggcggtggaaaagagtgttatagactggaggggcgcgtgtttattgtggtaatgggtcgggagnacacaataattatcgagcggagaggagttggtgggcacccaacagacatagaatcttctcgtgagacggccgccgcacggcaattatgagtgcacacttatntttgtgtggtgcgtccccgcgcgcggcgtnttntctccctcccgctgcgcgtcagagacaataatagtcgcgtgcaccagcgcgagaaggggtggacaccacacaaaggtgatgtgtcgtggggtagaacagccacgggcggcggcggaaatnaaatacaaggaagtgtggcgtgacgcaaagacaagagcggcggggtcgcaataagtataaggctctcttccacagaagtgatagtggtnggcgaggacggggccacactcgttaaatagagaacaggccgcggtggcaangaaccacgcggtagcggcggcgntcaggcgaaaacacagacacgcgggcggtagaaggacagggcgtgagagggcggagaaaaatttgtgagacgaacgggcggaggggcgccggcgcgcaagaggcgccgcgccctctgtttgtgggataggaagatcccgcaggtgagttgaggccctcctccccagggaccccgccctgccttagggaaatttgttgtttacagagccgcggtgtgtgtggttaacacccgcgggggggttttttttatcggtgggaagaaaagccgcgaggaccctatggggcgtagggcccgggggttttgtggggggaaaaacaagatgggacaaaagggttattgtgccataagggagaccgccgcggccaaacggggggtgttttggaaaagtttttgggaaagcggggggaccggaccgaagaaatttctaggctatagaggggataggggttcccgcggggaccattacgattcggcggttcgtgcttgtagtcgttttgcgatcgggttttggtgagggaaatattggagatgtttcggattgtggttgtgtcatgagcactgccacatagattttaatttgcctaaagatgatagcgattttgagctgtggttagggataactgttcccacagtagacctattaccaacatgagttgctggctttcatttaataggactccaagctggcaaacaaaccccaccatcttcccaacagccacatcatgagatctagcagcaccagcctcttgaagtggcttctcagtggaaggtttgctccgtttcagtgaagcttctctctcaaagctctgacgtcaccagggtgcccctcgagggtctggatagactgtccgaaaggtcaggttcactctcggttctctagagtggtattctttgggcactcgatgctgccagtcagcttgtgtcgctccttccatgattaacaaggtaccatgatccaagggtatcttcactctttccacatatgtgtagtctccattctcttctggtggtggcttctttctcatctcaaatgtgcgtgtggcaccaaaacttagtgaagcaataatggggcacctccctagtgagggttcatcatcactgtgccagtccacgctgtccttctcattgcgataaagattgcagagtaaggagttgaaggtgtggccagtgttctcttcaatgcggttctttagtgtgcgcagcacagggtgccagtgaggatttggttccatagtgattcttgaataagctgtaaggaagttctccataccatgctgtaagtcttggttgctgataagttagtatcctctctgatgccggtcctctgtttccagggaacatcttgacaaagctgttccaatatccagtcagcttctttcacgtcaacaaagccaggatacaaacagaccctagatacacctgtgggtgacaggctgatttcatacacaccctctctgtcaatcactcgtggctcaggagctctacgtactacctgctgaggttctttgaacacaaactctctgtcagagagatgatgctctttgttcttccaggtctggccaggcttctggtggagatggctcttagcagtggtagctggctgagcaatggcctggcttttaacaggggcagcccaggctgcctgaactcgggctcgccgtcttttttcctccatgttgaccaaaaaggcttctgctccgagctttcagaagattttgttcctgtttcaaactactccatggtatctttctgagccccagtttttcctcagtaaacagggcagtcactttccgcacggttgaggtgcagactaagcgagctccgcaggtggaagagcttggtcgtggataagggcacttccttttcctaatttagatccttctctttaaggaggcctagaatgaggccccggaggtcgcccaggaagagacttcaggggtggtactcgcacccccagccccgcgcacccagcagtaagtcaggaaggcgcacttgcgggcggagccgggcgcgcccgtgcaaacccggtaggacttctggtggctagcctcgtgcgctagctcactgacccagctccgccctcgtgccgatt

SEQ ID NO: 125565 - DNA, 1622 bp, Homo Sapiens
gcttataaacatcctttattgtacatagacagtggatactgagaatgatcaagtaaatggaattttgaacaggtaaagaggaaacaaagaattaaggtatccctgtggaatagtgcaagaaaggagtgccccacccatagtgttatctacaataggtactccggggaaaggaccccaaggagtcagaccacaaatgtatgaccagcacaattctatgatcaaactctacctctagcaaggcgtctcaacaatcaagttctatttaaatcattcgctcgtgtcttctttcagtcatgatgaaataatgagaatatcataaggaacagaaggtaatgcattggtcaccacccttggagaggctggtgggatgtatctggattagtcctcacggggggtgctattttcctgcatagtcttcattatccagtcaacatagttctttacccgtgtgtagagcccataggtcccacactggggcccccaggacaccaggccagctgcgtagaatttggtcttgtcattgggatcctgtacagcaaaggccccaccactgtcccctttacagctatccatgcccttctctcctccagcacagatcatgttaggagtgaaaacataggcctctgcatctgctgtgggtttctccactttcacttctttgcattttcttaaaggagctacaggtaaccttgccgccttgaggcgaacagcacgatctctcttctctgttcggccccagcctgagatcagtcccaggtccccatccatgaggttgtagtcggaagaggtgcctggtaggcagatgggagagacggtgggtcccattttcactgggtctttcagccgcaccagtgcaatgtcattatcaaaattggttcgtccttctgggacttccagcagcttccatcccggatgaataaacacatgctcaggagtgagcatcttggattttgccagccgtgaggtctgcactgaggtggacccaacatacattgttggctccctgtttccctccacaacatgagcagccgtcagcacccagtactcattaatgagcgctccaccagcccatgggttgtcaaagaagacttgccaggggaagtttttaatatctgcatcggatcctccaattatcctctgtttttcttcaaagggttctctggggactccacagactggaacacatttcggcagctccgggcccagcacctcattcacccagctcccgttaccagcacagtgatactccccacctcctccattttccatgtagtaatatggctcctcacaagtgtagcggatgacagaaccaaacaaagtgctctctgggtcttcaactttaccattctcaatggattcaggaatgccacagtccacaggttgacatttcagtttggaattactccactttccattgctttgacaagtcgaatagaaagatgttgcaccaacacgtccctccacaacttcaaacccatccagacaggttatctgcaccacatctctaaagacatattttgccttcgcaggctcccaaacagaattgggagtgtctttcttagggcagggcataggatctccatgccctgacgctgtaaactgaccctgacgctgtaaactga

SEQ ID NO: 125566 - DNA, 1690 bp, Homo Sapiens
  misc_feature (28)..(28): n is a, c, g, or t
  misc_feature (74)..(74): n is a, c, g, or t
  misc_feature (86)..(86): n is a, c, g, or t
  misc_feature (111)..(111): n is a, c, g, or t
  misc_feature (139)..(139): n is a, c, g, or t
  misc_feature (143)..(371): n is a, c, g, or t
  misc_feature (384)..(392): n is a, c, g, or t
  misc_feature (1136)..(1150): n is a, c, g, or t
ttcataccacttattcacatgtagcttntagcattgaatagatgaatagtaatcgagctgatatactggttgtnccacacatagtnaataggatcgatcctcccaaaaatntaaggtaggctagtgtgtgatcatgccntgtnnnnnnnnnnnnnnnnnnnnnnnnnnnnnnnnnnnnnnnnnnnnnnnnnnnnnnnnnnnnnnnnnnnnnnnnnnnnnnnnnnnnnnnnnnnnnnnnnnnnnnnnnnnnnnnnnnnnnnnnnnnnnnnnnnnnnnnnnnnnnnnnnnnnnnnnnnnnnnnnnnnnnnnnnnnnnnnnnnnnnnnnnnnnnnnnnnnnnnnnnnnnnnnnnnnnnnnnnnnnnnnnnnnnntgactctgtctcnnnnnnnnnttaagagtaaagaagagggcttaaccatttgagaaataaacatcaaggtctgccattctaaaaaagcattaatggattacaatagtttcaatagtttacatggttttcactctttaagttcaatgaaaattgcatatattgtttttactcttgaacacagtggttaatactatatcagggtggttagtcacaagaaagacgcaaatacagaaaggataaccttatccaacttcagtattattttagtagtaatgtgtataaaatccaaccactgcttgggtgaccttaggagacagcaagcctaagagatgaaaacatttacaccttttaattaaattacactgtcaccacataaaagtgtgaggttcaacatttgttttcttaaaaacagagcactaaacagtttaacacaggacctaacttacggctaagatgtttctaaaatgtatgcagaacccttaagactatactgcatcaagtagttcttttgaattatgtatactcaaatgatggtgttataatttacattgaaatgccacaacaaaatcttgataaaacaagatataggagaaataaaaattaatttctgaaccaaatgtgtactaccttaccctagagtaaatcactgggaaatacaggcagaaaacagacatcctgcctgtgaaaacaattgcatattcaaactggagagagtcatagcacgtatgcttttaaaagtaagtttcgaaaaactgttttatcagnnnnnnnnnnnnnnnggagcatgtcttttctaaataattctcacttatcattccagaaaatataacaaacagtttgtaagaactcatgcaaaaatgtttctctaaggccataaattggtttgctaagttgcattgttttattcaagtaaaaagcccttctagagaacaaggagtctgtaaagaaaaccaatcaccttcaactcttgggcctgtacacctgttaggagctctatcactctgaaagccaaaagatagaatgctcatttgagcatttgcaaaatgttctctatttatatttttaaaaatctgatacatgtaagtttttctggcagattctttttgtatgttacaaaacaaaacatcaaaagctcagagtaagataagaatccctttttcttagaaaggtcaagcagatacttcttgacatcatgtcctttatacaatggcatattgttcatataaaaggtctcttatcctataaaaatcttgacaaaggcagccttctaatccaatgcgtccagtttccgttctgcggactgctacttgattgttgca

SEQ ID NO: 125567 - DNA, 1124 bp, Homo Sapiens
  misc_feature (991)..(991): n is a, c, g, or t
tttttttccaggtgtggatttttattttcacaaaaagacaacaatgtcttccccacatacaagtatttacaaaacccaactgattcacccatctagaacctgggtttttttccacttctcaacatagttgggaacatggaaacattaatacccacacaattcccagagatggaatttatccatcaaacaaacagtgcagattacctaaaagtgcacttacctgcacaactcggtctaagaaccttgtgaaacaaacctcatggccaaggtttcatgaatctatttggtttcataccatgcaaacctgaacaagtgtgctgctacactaaactgaaaatcggttctcattttacaattaaaaaggttctcaacactttagcaactatacagaatatgaaggtttatttcaaaaaagattacatttttttaaaccaggatacacagatgcacttaatgtaacagtaccttctgcaaaaataggttacataatactcagaaatgcaatgaacaatcttattctctaaaaattagacagctaagacttcttaagtgtagacagccttcaaaatggaggctgaaaatgcttggtaaaaagaagtaactctagagccagacaccacagagctaaggctgcaaattaaaccactaccacacagctgcaaactactctttatattcacacagcgttaaacaaaacgacttcaattccatcttttcaaatgtgcctcggtgctgcaagaaaaaaagttgaatgatacacaaaactattaaaagttacaacagaactatttaaacatcttctccaaaattgagaaaagcaatcatgttaaatttttaaaaagaaaagtctgacagaactctcaagcaagtcagaggtcctcttcataagtagtcaagtaaagtttacaggagatttcaataaattatcttaaaaccttggcagagagctcattttcagaatcgtcgcggaggtcacccttaaatggcttanatccggagccacttcctcttggcatggaattgccactgatttgtacatttctattaattggggatgcgttacttgaatgttgggttatcatgcctgctccctgcccggcgtcacccattcgcctcgtatcatg

SEQ ID NO: 125568 - DNA, 1852 bp, Homo Sapiens
  misc_feature (509)..(522): n is a, c, g, or t
  misc_feature (1389)..(1763): n is a, c, g, or t
  misc_feature (1768)..(1768): n is a, c, g, or t
  misc_feature (1772)..(1772): n is a, c, g, or t
  misc_feature (1774)..(1774): n is a, c, g, or t
  misc_feature (1794)..(1794): n is a, c, g, or t
  misc_feature (1800)..(1801): n is a, c, g, or t
  misc_feature (1808)..(1808): n is a, c, g, or t
  misc_feature (1810)..(1810): n is a, c, g, or t
  misc_feature (1814)..(1814): n is a, c, g, or t
  misc_feature (1831)..(1831): n is a, c, g, or t
tttagtttcacacttaaggtttacttacttacagattttcttcaatttacattgaacaaaataatacagtatcaagtttagcctgggtgaggggacatgttttggcatcttttccctatagtagtagttttggttcaaattaatttttgaaaaatagcttttgtatggaacagtataaatgggcttatagttcagatactgagcaaatacacaatactactttttactaacaggcacataaaggaaatgacaactattcgtgggctcaaaaaactgcatattttaactaattttcaaaatttacaaatcagtatctcagagaagttaaagaaaatggaaaggaacaaagcccttttagaataattaatatacattgccttgcttctttccaaaaggaacatgtacttgtcaccctagcttttgttatttagagcactggtacagatacgctgtcccatacatcaggatccaattattagtttcagtttcacattttaggaatttaagannnnnnnnnnnnnnaacacaggaaataatctcatcatttccaaagatgtcttcatgtcccatcaatgacatgctaccagacatatcagattccacaggataatggcaccaagctacccaagtagatgtttctggtattctagactgccgttcatgcttgtttcctaaagtatacttaaaagtttcaaatacagtttcacttagaaactgcaaccctccaagtaatgttatgtttacttaggtattaatgttatgtttacttaggtatgtatcagaggcaataatttccaaagcagatcttagaatataaccaatttgttagataactaactttatctctatcacatctgtttacaagcaaagtattactttgtctggacttatttcatcttcagtgtctgggatcgtgggcaacagagcagatcgcgttaagccccaaaatttttgaggtgacatgtcttttttggtggccgtaaacttccatccaatatggcttgcacagatcttacactgggcaacagtccaggcatacccaggaaaccagctgtgttctgtagaaggccggcctatcagattcaagttgcaagccttatacacagtaagtgtctcatgcacatatccatgaggattcacataagctgccatcggcccacataaggataaactgaatatttcatttttggttgttatttctgtttcttgacattgtttacagcaaagggaagtacatttattcataatgtctaattcacagcgaagtcgctggatagcactgccaattttaaggagctgaattctcaatacatcatcaataggaagacaagcagctactctgtaagaaaaatctattggatttgaaggaagcctcgtgccgaattcttnnnnnnnnnnnnnnnnnnnnnnnnnnnnnnnnnnnnnnnnnnnnnnnnnnnnnnnnnnnnnnnnnnnnnnnnnnnnnnnnnnnnnnnnnnnnnnnnnnnnnnnnnnnnnnnnnnnnnnnnnnnnnnnnnnnnnnnnnnnnnnnnnnnnnnnnnnnnnnnnnnnnnnnnnnnnnnnnnnnnnnnnnnnnnnnnnnnnnnnnnnnnnnnnnnnnnnnnnnnnnnnnnnnnnnnnnnnnnnnnnnnnnnnnnnnnnnnnnnnnnnnnnnnnnnnnnnnnnnnnnnnnnnnnnnnnnnnnnnnnnnnnnnnnnnnnnnnnnnnnnnnnnnnnnnnnnnnnnnnnnnnnnnnnnnnnnnnnnnnnnnnnnnnnnnnnnnncgcanggangncatgtgagcaaaggcagcanaggcanngacgtananggcncgtgctgggttttcaangtccgcccctgagagtcaaaa

SEQ ID NO: 125569 - DNA, 663 bp, Homo Sapiens
  misc_feature (548)..(601): n is a, c, g, or t
cattttctccattttatttgtcaatataaaaatactcaaatatttacaacaaataaatacgcggggacacaataagttacactgttaggagccctcctcctagggctggaagagagtatgccattgtccacagcaggcccaccctctcccttctctcccctcacacagcctttcccagccctgtacaggaagaaggcaagtataaaataccactgaaccccggggccaagtgggaggccccacccacccttccccccaaacacacaggaggctccatctccctccccccaccctgaaaacattcacagccctaggagcaggactaggcccaccccaagccctgcactccctctgaaggggcacagcaccctgtccaccccacctccatatgtacatcgctgcccgacactcggggcagtgggggtaggagagacaaagtgatacgaccccttccccttcatagctccaatgactcaccaggaggacccaggccaagggaagacttgacagaaacaggaaggctatgccacaagcgcgcacgcgcgtgnnnnnnnnnnnnnnnnnnnnnnnnnnnnnnnnnnnnnnnnnnnnnnnnnnnnnntcttgaaacttctgccttgaaaagttttggcggctggggtcccgcgtgtctgtgattcacag

SEQ ID NO: 125570 - DNA, 953 bp, Homo Sapiens
  misc_feature (77)..(77): n is a, c, g, or t
  misc_feature (112)..(112): n is a, c, g, or t
  misc_feature (170)..(223): n is a, c, g, or t
ccaatagtaacatcgctgcccgacactcgggggcagtgggggtaggagagacaaaagtgatacgacccccttccccnttcatagctccaatgactcaccaggaggacccagncccaagggaagacttgacagaaacaggaagggtatgccacaagcgcgcacgcgcgtgnnnnnnnnnnnnnnnnnnnnnnnnnnnnnnnnnnnnnnnnnnnnnnnnnnnnnntcttgaaacttctgctttgaaaagttttggcggctggggtcccgcgtgtctgtgattcacagagaggaggaagatgccttctgcgaggctggtgccctggtgagccacaccaagtggcagtgcccgtgctgagcagagcaggtcctcatggccgggtgggtgctgggcagtatctgtcccagacagagcaggtgcccgtgccatgtccctgaggtagctggtgcctgtgcaaaagtaggagctacacctcccacgcttcccgccgacgcggtgggggttcccctcatactgatgactcctcggggttggagtcgggcagtggctggcgttgctgcagtttgcgtctcagttcatccgcgagctcaggcagggggtgcccgagccctccccggtcctcccctcctagttgtaagcgcacgtaaccattggcatttgagttccgcccaccccccaggtgaagccgagttggagaaggcagaggctggcctgggatgcctggaggtggcgaagggggccccccaccgggctggcaccgggcatgcccaggtactatcttaagggagccatctgaatagtagtaaccgacaggatcccaaagtttctcatctggttcaggacagggccggaaggggggactggtgggctccttgggcagctccagggggtacaccaaggtcctctcagtagccctcgtgccgaattcgccacccaggcctcgctacctagaccg

SEQ ID NO: 125571 - DNA, 2048 bp, Homo Sapiens
ttataaatatatcaaatattttatttaacatgcttgaactgtattttaaaatatttcacttattttatattcacattccgagttaaacaagattgctcattttcttatcaagaattttttgtttttctaggttgaatttcaggcaggatctgaaggccaacttctgcctcagcattatctaaatgatcttgatagtgctctgatacctgtgatccatggtgggacctccaactctagtttaccattagaaatagaattagtgtttttcattatagaacatcttttttagtgaaagaatgtgccatattacatattgcaacctaatttgttaaaactaactccagcactaaagctgaaatgccacaaacactaaaagtataaatatgtctgatttttgaaacacataagctttgctctttaggcaggaatgatcttttcaaatcattagcacaatatttaaatatctaaaaatttaagagatccatactttctgtagctttacaattaatttaagtactaaaaagacaaggatttcttttaagaaatttatagcatttactgtgttatttaaatgctaagccaaagtatctgcacttaggtatacctctttatgccaataatgattttaatgaaggctcttttcagatgtaaccttatgaaggaaatatctgctttgtgtatatgccagttagaatactggtttctaaagtctgtcaaattgtatttcagtggcacaaaaaccagttttgaggtcttagacttataattctttgaataaaactgataacttatttgtataattggagtggagacctacctccataattagataaactctttttggattataatcagaattttgccttttttcttctcaaattattacatatgtatgtattatatatccacatatatagttttccctgattaaatggatattaaaataattgcgggtgcttcaggactttttgcttctatatttaagtatattgtttttatagcaagaacatattctgaatgttttataaatctttaataatttatatgtaggtaatatttttgtatcacaatgcattatttttttcctcctttccttccaaactataccactgtatttaccacttctaagagtgactgacgacgggccagatgacccttgaagtagtcattatgtagcaataaatgaagcctgaaacaggtttttttacttccactttaatccttagaaatttcttggcaacttcgcatattttcattgacaccggtgtataagtataaatttaaatgaactaattacttttgcatattttaaattctttatatggtagttattttttataacaggatattaacataagttaaatcctatgtatttgaaattgttacagagctttcctctttacttcaaacagcaaaaaagtggggggcatattgtagtcctgtcatttaagttatgtaaaaaatttaatcattattttgatgctttaaacattctcatgtgtaatatatgtttttgtatcaaaaacactcatatatttcaagaaaaagaaattatgttaaatagccctgttttaagaaaaatatttatgaagcatctcaacttgaagatcaagtcaaagttataactcaggatctgaggtctcaagctaggagagactgagaattttaatcagtttgggcatatagtttggactgaatcacatctgtagtacttagccaaagacaatttggaggagaatatcagccttctggaagtagctacttcctgaacaatgtaaagtgtcgcagatattcaataaaatggcaacctgttataatttgtgaaatttattgaaatggtgtaagatgaaaacaattgcatatcaaacccaatttatgttttctaaatatagtgtatgtattctgccatgtaagtaattgaacagtcttaaaataaccaaatggtagagggctgttccatgatgggacagctttggatttgttttcataaaatctctacattcaataaaaattggaattatgtgcctgaagtttggaggcacattttg

SEQ ID NO: 125572 - DNA, 1000 bp, Homo Sapiens
ggagaataagtccctcagaattccctggtgcttcctgggtgggggggacaggactcccttaggccctgcttaaaggggcagcagatgtcatgagccaagattagtgggtagagaagacaatggggacagccgatcattcagaagacacccggtttgatcaggagcgggggaaatatctgaaggcttcttcgaaatttcacggcatgtgcttttattaacctggctgtttacaggagctgaagctcttgggtttgcggtgatgactcttgaacttctttttcaacgagcccaactgcttcttcccgcgcttctggaccagccctcggtacacggtcgtctctctcctgccctcatcagtggccttctctcttgggggctttgccttctcatcctctttgtctgtcaaaaagtcatcagtgccatccccatcctccgtgcttccaaggtcctttctggtgaatagctcaggtgggtacaggtctgtcatgctgtcatcacttgcagctcccccctcatcactggatgtgggctcccagaaggcttcccgcgggcgaggcccgtcaccgtccatctggtcctccctcctcctcctccggtgcaccaggcaggcaggcacgtactccaccccttgcttctgacattcttcatatttacacagagctcgctggtaccgccggccctgggtgtgcctcagcacgtgttctgggcacttgttgatgtgccgcagggtgagtttgcagaacaactggtgcgggttcttggtgctgggcacgatgtgcggctcgaactctgcatagtcgaaggccggggaggcgcggaccagccgctggtactttttgccgcgggtgtagacctggagctccggcaggcggcagggcagctcgtgacctgtcaggatgcacctcaccttgcgggcgtccgtctggagccgcaggctcgggtgctcccgcagaaacgcccgcacgtcgcccggcaactcgctcatggccgacgcgccccc

SEQ ID NO: 125573 - DNA, 642 bp, Homo Sapiens
ggctttgaaaacgacacttttatttaccacgaatagatggtagtgcaacagcactcgtggatgtttacgataaataaaaatactagtattctggcatcctttgggtacaggcccttttatatttatagatgtctacaatgactcataaaagtaaaatcaataaaggctattaatttgtatttcaacctgaatttgagaaaccaatgaagattaatcatttatttgggatctagatccatatatctgaaaactgaagtataaagtttctcatttccatttaccttgtcaacaaacatatcccaaacatttcagcatctgtaaaaggtgatctatttagcatctgtaataagtgatttatagttatatatgctaaataaaggttgacacagctggatcctagaagctcagattttataaatttaaaatagattaagtatttatgccaaaaaacaagaactggatctaggattttattttaaattatggaagtctctggggaaaaaaaatagcaatggaatgacaatagatgtcagatatttctctgagaagtatatagtttctcaattttcgctaggtagtgcatcccaactgaattaaaactaaagcatatttacagtgcattttttctcactaaaatttccc

SEQ ID NO: 125574 - DNA, 670 bp, Homo Sapiens
ggagccaaaattttcatgtctgatttatggggcttttcttaagaaccaaaactactggcaaaaaggcggcacccacacgcttaaacagctgatatcttattaaagggcagtttgtggttcctgatttggaatttaacaatctccaaacattccagtccattgaaagttttatccgctttcccatataaaaattcttcccatgagagtgacttgattcttacaatcccgttggagtcgtgtgtgagtcctacagtgtgaggttcagcattgccatctccaagtgctcttcgtagggaaacagtttctggtcatgatgaggttctgcttcccatctgatcccggcccggcctagctcggtggtgaacagctggcacgtctttgggttgcggacggtaaaggccacgtagacctcaggagcccgcttgtgctcctggcaggcagccagcctccgcaggacgccgaccagcgacatgatggcttctgggcaatacagcacgtctatggtgaaagcttcaggttactgaaagggaccagtggacagttccagttcatgctgacgtcagcagcagggcgaggccagagaggcagcggtcatatgagactagtagatgccatttgaccatttgggccattagatggaaaggcaattacttgggtgaaaaaggagaac

SEQ ID NO: 125575 - DNA, 730 bp, Homo Sapiens
tggaaggcagagagctgatggaccgtcgcgacgtcccagtccagctgggccactgtcagcctggggctgtctaacttggcagtgatgtctgcctctaatgagaggccattgagaaggaacattccctcggagctgctcaaggacccggctgtgacagtcgctgaagatgtatgcccgggggcggcacatcttgcagatggccaggcctgtgaggccagcaccactgccaagctctaggacagtcctgttagtgaagactgccgggttctcgatggcccattctgcaaggtagagggcggcgtcccatgtgaccaggcctgtggtaccgtaggagatgatggccgtgctctcggagagtgtgaccgagcctcccgagggcagcaaatagctccggtggccctgggtggactccttggccatcagggtctccgccagcgcttcatacagctcgtccaaaggctctgtgtggacagcctcgtgctttttgatgagttctgagagaaagcaccgggcatatttgacggacggcgggtgcttcacacacacaggatgcttcacagtcttgtgccaaatatcccgcagcagctcagaatctgatgagtctcttaactttgcttctaagctctgccaggggaaggagcgccgtgtgcgtgccgccaggaagcggcgctcgaaactctgcagcaagagttcggtccccgcgttctcctcgggcgccatgcctcgtgcc

SEQ ID NO: 125576 - DNA, 1435 bp, Homo Sapiens
  misc_feature (1321)..(1346): n is a, c, g, or t
  misc_feature (1415)..(1415): n is a, c, g, or t
ggtaccggtccggaattcccgggatgtctgccaccacgccagggtgggcagggttctggagactggcatcgagccacgctccctgatccctgcttcccacagccagggtgggaccatggggggtctggtggaaaagctagtgggggagcagaagtcacagaggcctcctactctgctgtcccatttcggtacagtaggctcgggaaagttaggacacaaccccacctgccctctggatttatggagctgacactccataaatgatgctggagccgggtgggccgggctgcagtttaggaagtgatcggatcaggtaggtgcgtgggcaaagggaacttctgggaccagccttgaaagatgggtggaattctgcaaaggttacttgtttcttattgctaaaagtaatacatcattcttgccaacagaatgattggcaggattttcagtaaaggtccaggtcagaagtcatttagactgggtctcctagtctctgtcagaaccatggtactctgttgtggtgtgaaagtagccacagatcatcttcgattaaggggtgtggctttgttccaataaaactttatttacaaacacaggctgtgggctggatttggcctgcaggctgtagtttgtgatccttgattcagacagtttagcaaggctgcaaagaacaccgacacccccttgttacccacagatgggtgggactgcgttggccagaggccgagaggagggtgctcacaggggaatgggcagcacgtagaggccgggaggtgctccagggcaccaagtgtgggaaagtgggacatgcggggaagtttccagaaactgtgatgtcaagttggaggcggagtgctgctggggtgtgaagggtctcgagtccaagtgagggagttagggacttgggaggggttgttgttgggtcggggacctggggtcagccaggtggtgacctgggatggggtggggacaggcaatgaggtaagctctgctctttatttttttgcagatgcttttctcaaactttcctgatcctgcaggcaagctaaaccagttccggaagaacctgcgggagtcgcagcagctctgatgggatgagagctgggtgcagactgtgctccctttggttatggacacataactcctgggccagaggctaaaaccccagggcccctgctgtccttcccgcagcttcttcttggagtctcagggcaaaccctttcgagcagcacctcccagtggccagaagctgaaatgacagcagtggtactgcctggtaaaagaattggttctgtgacccgggaagctttggttggccttgatnnnnnnnnnnnnnnnnnnnnnnnnnnacgccccatgccctgctagcgtattactgttctgccgtcccctccctcgtgccgaattcacacacccangcctcgtacctagccgttat

SEQ ID NO: 125577 - DNA, 1931 bp, Homo Sapiens
cagacatgaaaattctgggctccaaaaatagcattttctttgtgcaaataaaaacgtgtgtatcaagtatgatgttcccccaacgtggacacactcagttcctcacaaagccaagcccactgcagctgccacatccctgggcttacggtgcagcaggtgcttttttcaagacaggaatcaaaatgttaggaacacggcagaaaggggacacctggagaccaaacgcaggatgaggagttctgcagaggtcacagggaagtcacagaacagtaatacgctagcaggggcatggggcgtgaagaacagaagaagagaggaagcgtttccaagcctccagagaagaaatcaaggccaaccaaagcttcccgggtcacagaaccaattcttttaccaggcagtaccactgctgtcatttcagcttctggccactgggaggtgctgctcgaaagggtttgccctgagactccaagaagaagctgcgggaaggacagcaggggtcctggggttttagcctctggcccaggagttatgtgtccataaccaaagggagcacagtctgcacccagctctcatcccatcggagctgctgcgactcccgcaggttcttccggaactggtttagcttgcccgcaggatcaggaaagtttgagaaaagcatctgcagctgagctgccagttcctctgagtcctcaaagaccaggccattttcttcatgtttcaccagctcatgtaaacacttgaagttcacagcacacacaggcaaacagcacccgaacatgtccaccaccttcatgggcaggtccaggccactggaggacgtgtgcagacagacacccaggtccgccgaccctagaagcagggggtagtcctcggcctccagccagggggtgcagacctggatgtgctggaagtgcttctggtggatgaggcggctataatactccctcagaggccctttgcctgttatcacacagacgagagaaggaaggttgtgtccatcaagagtcagttgttcaaacttttctaaagctgccagcaggatggagaagtcttcgtcctctgtccagctcgtgctgctgacccagcagggctgcccgctcacggagacgcgtcaccagcccgctcccagcatcccgctccgtgaaggccgaccgctccgtgatgggtcctcaggttctgagcgggccctgaacggagagtgcatgctgcccagcttcatgaagagccggtgctgcaggtccagaggtgtctctttaaagaaagatgcgggcttgtcgtagacggtcacagccctgatgtgccagttatccgccaggtcttctcgcatagcattggtaacacacaggttcaggtgggacaggcgcccaaagaacttctcgtaccacttggccagcagaacgaggggatggttggggccatgcaccagacccatgatggagtagccatagttgtgccagtcaatgacgagcttgcttccacaaaggcagcccacgaaccagcagacagcaatgctaggcagacctggggggttctggagaaagatataggcacctggctccctccacatcaacttccacagcaagtacatagcctgaagtacaactttgactccgtactggaaaactcggggcccaactgcaagactctgaagttctgtcaaccccacaatctgaattctgttgttctgcaagagctcatcatggggtttggagttgcagaaccccaggagggtcaccgagaagccgtgcatggccaacgacagcgcgtggtactgcatacgggggctgcggcccacgtcgcccagcaccaccgctactacatgccgggccgcccgcccccggcgccagcgcttccatcctcccagcagcagccgcggcagcagcagacacagccgccagcaggaccaagcatgagccgccatcttgctggcc

SEQ ID NO: 125578 - DNA, 907 bp, Homo Sapiens
gagtttcaagcgccgcttcctggcggcgcgcgccctgcgctccttcccctggcagagcttagaagcaaagttaagagactcatcagattctgagctgctgcgggatattttgcagaagcacgaggctgtccacacagagcctttggatgagctgtacgaggtgctggcggagaccctgatggccaaggagtccacccagggccaccggagctatttgctgacgtgctgtattgcccagaagccatcgtgtcgctggtcggggtcctgcggaggctggctgcctgccgggagcaccagcgggctcctcaattctacatggcccttaccgtctgcaacccagagatgtgccagctgttcaccaccgagctatgctggactgggatcagatgggaagcggaagctcatcatgaccagaaactgtttccctacagagagcacttggagatggcaaagctgaacctcacactgtaggactcacacatgactccaacgggattgtgagaattaagtcactctcgtgggaagaatttttatatgggaaagcggataaaactttcattggactggaatgtttggagaatgttaaattccaaatcaggaaccacaaactgcgctctaataagacatcggctatctaagcatgtgggttccccctttctgccagcagttctggttcttaagaaaatcaccataaatcagacatgaaaattctggctccaaaaatagcattttcattgtgcaaataaaaacgtgtgtatcaagtatgacattccccccaacgtggacacacttggtttctcacaaagccaagcccgctgcagctgccacatccctgggacccactcgttttcctcacaaagccaagccccgctgcagctggcacatccctgggacacactcggtttct

SEQ ID NO: 125579 - DNA, 1458 bp, Homo Sapiens
ccttaaaaaaccagctctggttctgggcctatctagagggctttgaatggcagaaagcctgaccctaccgtgaacttcgtgtttcaggtgtctgccgattggtctgctggcttgcaggggtgggcctgtgtccctggccaccgctggacctgtgggtttcagggctgggacccaggactacaggcagagctctgttccaccagagaggggactgagtgtgctggcaggggtgaggggtttttggtggcccagccaaacagcaccttctctcaagggccctgtcctcgtcccagaagtggttgttttcctcctgtggtctctgaaggacacagggcatggctctgggacagagccatgtggtgacgactgtaacgggagtatgcctgtctccaacaacagggctgtggcttgaaggtcaccttaagaggcacccctgtcctttgatgtcaccctggaggcccagagtaactcttctggaagccccatcacgtccatgcccgacagtgtccattgttcccttttcccagagccaagagctgggtagagctgcaaggacaccgcctgcacaggatgcccggggctgggcattacctgctgcaatgacaacatctggctggaaggcagagagctgatggaccattgctacgtcccagtccagctgggccacttgtcaccctggggctgtctaaagttggcagtgatgtctgcctctaatgagaggccattgagaaggacattccctcggagctgctcaaggacccggctgtgacggtcgctgaagatgtatgcccgggggcggcacatcttgcagatggcaaggcctgtgaggccggcaccactgccaagctctaggacagtcctggcgggaggaaaggggaccgtgttttcgactgcaccagggtaagcctgcctcggtgccctgccctgtgccccgaggtcacctgttaatgaaggctgccgggttctcgatggcccattctgcaaggtagagggcggcgtcccatgtgaccaggcctgtggtaccgtaggagatgatggccgtgctcttggagagtgtgaccgagcctcccgagggcagcaatatagctccggtggccctgggtggactcccttggccatcagggtctccgccagcgcttcatacagctcgtccaaaggctctgtgtggacagcctcgtgctttttgatgagttctgagagaaagcaccgggcatatttgacggacggcgggtgcttcacacacacaggatgcttcacagtcttgtgcaaaatatcccgcagcagctcagaatctgatgagtctcttaactttgcttctaagctctgccaggggaaggagcgcagtgtgcgtgccgccaggaagcggcgctcgaaactctgcagcaagagttcggtccccgcgttctcctcgggcgccatgacgtgggcggggccgcagcgttgccggcagaccgggcg

SEQ ID NO: 125580 - DNA, 1118 bp, Homo Sapiens
ggccaggttaatctttttgggcccatttcccccagcttgttgcccgacggcactttgggcatagcagggaggagtgcaagggcaatgccccaggccccaggggcagccccctgagtccccggttcagggaggcaaaagggccgggctatcccacgtgtatccactcaggccgctcacaccactggaaggctaggctgatggaccaagaaagatccaggcccagtgtaaagagggtccaatagatgaggctggtgcctagcatgagggccagtgcagtcaacccatagaagcttagctcccgctccataggcactcggggagtcatcagccagcccaggacagcgccagttattaggccagccagcacctggtgagggaaatgtgctaagatgaagattcgcgacaagccaaccgccaaaaggaaggtgcaataagccaggctaggcatcacccttacccagcggctgcgggcccgagtggccacctgcgaagacagggccgtcattatgggccagagggctgctcctgtgatcatgcagtgtccagaagggctgcctggaccagtctcacaagaagaggggaactggtgaacctgggctggagcctggctgtagtaaccagactcatggacccaccaaaagggcctgtctccaaaaagaaaccacttgaagatgaggttgagccactcggtgatgaggctgatccagagcaccgcgatgcccacacggcgggaggcgtagtaggccgcggggaagtagaacagaaagaggatcttgggatcgcccagaaaggtgatccagagccacacgttctccagccaggctagctggttctgtagcgcctcggctatcacgatgcccgcgcccagcgtggactccatggcggcccagctgccgaccaggccccggcttgctccagggcggaaaccagagtccaggcaacgaagcagcgtcgaccctctgatctccaaagcccacccctctgagccccaggccccgccccgccagcggtcaccaccaagccccgcgcccagcagtcccccgctcctgcaagaccggcctccagccggtactgtttcctcctgcctcgtgccgaattcgccacccaggctcgctctt

SEQ ID NO: 125581 - DNA, 856 bp, Homo Sapiens
gtcccaggggggccccagcagcccccattgcccagcacaaggcagggctatcttcttggccatttccccaggctgtgccgaccgcacctggggcatagcagggagagtgcaaggcaatgcccaggcccagggcagcccctgagtcacggctcagggaggcaaagggccggctatccacgtgtatccactcaggccgctcacaccacttgaaggctaggctgatggaccaagaaagatccaggcccagtgtaaagagggtccaatagatgaggctggtgcctagcatgagggccagtgcagtcaacccatagaagcttagctcccgctccataggcactcggggagtcatcagccagcccaggacagcgcctgcgggcccgagtggccacctgcgaagaccagggccgtcattatgggccagagggctgctcctgtgatcatgcagtgtccagaagggctgcctggaccagtctcacaagaagaggggaactggtgaacctgggctggagcctggctgtagtaaccagactcatggacccaccaaaagggcctgtctccaaaaagaaaccacttgaagatgaggttgagccactcggtgatgaggctgatccagagcaccgcgatgcccacacggcgggaggcgtagtaggccgcggggaagtagaacagaaagaggatcttgggatcgcccagaaaggtgatccagagccacacgttctccagccaggctagctggttctgtagcgcctcggctatcacgatgcccgcgcccagcgtggactccatggcggcccagctgccgaccaggccccggcttgctccagggcggaaaccagagtccaggcaacgaagcagc

SEQ ID NO: 125582 - DNA, 1380 bp, Homo Sapiens
ttcaaagtattcaagggctttattggggccgccctggctgcccctcacagtgttgcaagaacccgctggtcttgctgttgcctttgctctttgggggcttgagaggaaaggcagagggaggaccaacttatctgggagagagaaggcccatctttggggctaagaccaggtggtgcggaagcagatttagggaggggagggcctacttaggggctggaaggggatggggctgcctcctggagtgtggtggtcacagagtgttggctttgtgggagggaaaggaaagggaggcacacaagaagtcaggaagagtggatgggcggtgcttcctgggcactgaacatgtgcactgcccagggcacgagggccaggactaggcatggccagagggtgtacttgaggaaattgaaaatgtagaagaggctgatctgaggggggtggcccagccagtccagggggcccagcagccccatggccagcacaaggcaggctatcttctggccatttcccagctgtgcccgacgcacctgggcatagcagggagagtgcaaggcaatgcccaggcccagggcagcccctgagtcacggctcagggaggcaaagggccggctatccacgtgtatccactcaggccgctcacaccacttgaaggctaggctgatggaccaagaaagatccaggcccagtgtaaagagggtccaatagatgaggctggtgcctagcatgagggccagtgcagtcaacccatagaagcttagctcccgctccataggcactcggggagtcatcagccagcccaggacagcgccagttattaggccagccagcacctggtgagggaaatgtgctaagatgaagattcgcgacaagccaaccgccaaaaggaaggtgcaataagccaggctaggcatcacccttacccagcggctgcgggcccgagtggccacctgcgaagacagggccgtcattatgggccagagggctgctcctgtgatcatgcagtgtccagaagggctgcctggaccagtctcacaagaagaggggaactggtgaacctgggctggagcctggctgtagtaaccagactcatggacccaccaaaagggcctgtctccaaaaagaaaccacttgaagatgaggttgagccactcggtgatgaggctgatccagagcaccgcgatgcccacacggcgggaggcgtagtaggccgcggggaagtagaacagaaagaggatcttgggatcgcccagaaaggtgatccagagccacacgttctccagccaggctagctggttctgtagcgcctcggctatcacgatgcccgcgcccagcgtggactccatggcggcccagctgccgaccaggccccggcttgctcca

SEQ ID NO: 125583 - DNA, 1531 bp, Homo Sapiens
agcatcctttgaatggtaactaggatctttattttcatcttgtggggactcttttgcctaagctggttcccaaatcatggagggaaatctggacctggcaccgggaagggaacaaccttcccaaccttcattgctaggttggtccccagcgcctgggagggatgggtcagcccactgagttattgatgatttccttcctaatttcagtttccactatctctgggttgcagctggacttgtgggagagcacagtgcaagagacaggaataagcagggtaaggcagttcggaggagggtccagtacgccaacagcaagaactcttgggcagtggtgggcccagggcagcccctcactccacgttacggtacttggtgaagaggttgtacaacactcgtagtgtagatttcaggtcacagttgactatgtcttctggccgcggttttggcttttccaaccctccatcttgcatgagctcaaaggcaaaggagacattcaagaccttctgttcaaagctgtccggggtcaggaagaagctgtgcaggggcacaaagtagccctccaggagccccatgagcagcaccaggtacaccccatctgcaaactgggtttccagttctgtgacctccaggttcagtttattcaggtgcttgttcacgaaagtgatgagtgtctttttcaccacattcagcttgtctggggcatggtcgaacaaggtgtcaaaggcatcacgttcatgcctcccggaaagagcctctgtgttaccagttatttcctcttggatttgccgagactggaggattccttctcgtttctggaccacaaccacttggatggaaacatggtctgggagtcgaattggtgcgcggaaatactgagacagagcaacgagcaggtgtaagatggccaccaggctcttggcatgaacagaatccacattccacttgatgctcctgggaggaagtttcagggtttcattgatcttctccaggacagtctgcagtttttgcttctgagcaatctctgactgggtgacctcagccacatttagcttctcactctccagtttctcgaaaagcttctgcaggacttgtccatcatacaaatcttcagctaggtctttcacaatgattctttctccaaccaacacatcattaatccagtcaattaataccttcatcagttcttgaagcttggggtcactgcgtgagtttggatccaccattgttcgcacctcattctcctccagcatcgtgtcctcggggtccagctcaaagggaattgggctgaggggcaggttgatggcgttcattccctcctcctgcagctcggacacctccttggctttcttcctccgggccagggtccctccgagtttccccaagaaggaatcatctttcttgcgggacgggggcgacttgggagtgggagacttggggacagaaggcgacttctgcggggaggtggccatggcgcggcgcaggctgccgcgggccggtcggacgcggagctggcgctgggcggacgcagcgg

SEQ ID NO: 125584 - DNA, 1054 bp, Homo Sapiens
  misc_feature (41)..(62): n is a, c, g, or t
  misc_feature (754)..(754): n is a, c, g, or t
  misc_feature (957)..(957): n is a, c, g, or t
  misc_feature (1012)..(1012): n is a, c, g, or t
ccctcactaaagggaataagcttgcggccgcctgctcaggnnnnnnnnnnnnnnnnnnnnnnaacaaaatgtattcatctttcttggaactgaaaaataaatctatgtacaaaacaggaagagatcaggctcttgtcacccactcctaaccctctgcagatttcctccgggatgctccgagatgggctggacctctgggaggttcccagagggtcggaagggaggtcctgctctgatccggggccagtttcgtcaggaagagggcggggctcaggatgctcataggctgggggcggagttttgtgtcccagactcgggatacgaaggagaggaaactaggatttccaaattctggagcaggactgaagttatttggggcagggagcttggattcgcaagatatggaattctgaagtgcggaaatatactcctaggggctgagtggtcctaggctcccgggctggaggtgggacctgtgctccttgggttaagggtgaaacctcagctcctacaagctgggaggagccctgagtaacgttggtctggctctaggtgagcggttccgaggaggagcttgggtttctaggggctgggcctttaaagactggtaattaggacccagcgtgaggtttccattggccggctgggattctgggagaagagacctatattctaacgactggggcagagccctgggttctgagctggagaaatcgtgggtttgatacagactgtactcgggaccgggaactanggtttgggtagaggtgagggctgtcccctttgggctgggggcagacatgggctcagagttgggggactaagggcggagctgggtcccacaagcggtccgagtcccagtagtcagaggctttgcgctgcgcttgaggaagacagagtgtatcactagggttgcactttctgcttctctctgcactgcgatgtgcgtgagtgcanctgatgcgctgagtgatctggtgcacacagtcttcatgcttcactctatctgaantgagatgacctccgcgtgtatctcggtgtgactgacctctca

SEQ ID NO: 125585 - DNA, 993 bp, Homo Sapiens
  misc_feature (726)..(726): n is a, c, g, or t
  misc_feature (838)..(838): n is a, c, g, or t
  misc_feature (848)..(848): n is a, c, g, or t
  misc_feature (956)..(956): n is a, c, g, or t
aaggtagcgaggcctgggtggcgatttcggcacgaggaatgtattcatctttcttggaactgaaaaataaatctatgtacaaaacaggaagagatcaggctcttgtcacccactcctaaccctctgcagatttcctccgggatgctccgagatgggctggacctctgggaggttcccagagggtcggaagggaggtcctgctctgatccggggccagtttcgtcaggaagagggcggggctcaggatgctcataggctgggggcggagttttgtgtcccagactcgggatacgaaggagaggaaactaggatttccaaattctggagcaggactgaagttatttggggcagggagcttggattcgcaagatatggaattctgaagtgcggaaatatactcctaggggctgagtggtcctaggctcccgggctggaggtgggacctgtgctccttgggttaagggtgaaacctcagctcctacaagctgggaggagccctgagtaacgttggtctggctctaggtgagcggttccgaggaggagcttgggtttctaggggctgggcctttaaagactggtaattaggacccagcgtgaggtttccattggccggctgggattctgggagaagagacctatattctaacgactggggcagagccctgggttctgagctggagaaaatcgtgggtttgatacagactgtactcgggaccgggaacctanggttttgggtagaggtgaggcctgtcccctttgggctgggggcagaacatgggctcagaagttgggggactaaagggcggagcctgggtccccacaagcgggccaggtcttncggcctgggnccggcagatatatggaccccaagtactgcccgcaaggcacagtgggccgatggggcctccctcgggccaccgggcgactgcccgggaacccgggggaaaggtccctgnaatattcccccttacttaccaggaggaaggccggctc

SEQ ID NO: 125586 - DNA, 728 bp, Homo Sapiens
tgtcaggcttagttctcccatgcgccatcctcaagaggcaccagcactttatctgttgagcctttatgtggcaccaactgtgtgcactattacccggttttacagatgatggaggcccagaagcaggaggtggctggtgttaggtcacacagctaggaggcagcagaacggtggggcgctgcctgtgctcttaacccccaggccaagtcaccccatcaggcagtcaggagggctggcggcagggggtgatgtgggtgggaggtagtgccttcttggcattctcaccgcagcctgggtgccgggtgccactctgacctcagccatggcagggtcgggggatgccgatgggcgctgcacgggctctcagaggcccctcacctatggccatggccttgactgtgggggcctctgtccaccgatgatctcccttcatcccctacaggtggggcggtccagggtggtgggggcacagtggccccgggcagtgaccacagggtcctgacccgcggcccccgcaggcgggctgcatgctgttcccccacatctccccctgtgaggtgcgcgtgctcatgctcctgtactcgtccaagaagaagatcttcatgggcctcatcccctacgaccagagcggcttcgtcagtgccatccggcaggtcatcaccacccgcaagcaggtgtgccagccaagcacagcccctctggggacagagggggattagaccccactg

SEQ ID NO: 125587 - DNA, 1486 bp, Homo Sapiens
  misc_feature (69)..(83): n is a, c, g, or t
cggtccggaattctcgggatatcgtcgacccacgcgtccggactagttctagatcgcgagcggcgcccnnnnnnnnnnnnnnnaggtttttaaaaggctttattggggaaacgtagaggggtggggaccgtccttggaggcctcaggacaccatcctccatgttgctgggcagttgaagtccccaggggcccctgctcagaagcgtgtcaccagtctctgcgggggcctcatctgtgactcctggaggggcccagcccggggtaaccactacccccccatccctcgttgctgttgctcctgctccaggttccgctgcaggacctgctgctggttggcaatgacacgccggatgccgttgacaaagttgccctggtcatgggggatgaggccaatgaagattttcttctctgaagagtacaggagcataagcacgcggatctcacacgatgctttgtaggaaaagtgcacgcagccggcgaagccattgtccatgatccggcacaggctcttcagtgtctccaggtccttggtgaagtggaactggaccaggcgcgagttccggaacagcggcactagggtggtcagcagctgctgcgggatgagctgcatgtacagcttccttggccactgctcggtcctcaggatctccccctggttcacgtagacgtgggatggcagccacctcttggaccgactgttgggctcaggcctgggctcctgccactccatgacaccactccatgccagaaacttgttgttgacgatctggactgggcctgagttgacaccaccaggtcccactgcctgcttgcgggtggtgatgacctgccggatggcactgacgaagccgctctggtcgtaggggatgaggcccatgaagatcttcttcttggacgagtacaggagcatgagcacgcgcacctcacagggggagatgtgggggaacagcatgcagcccgcgaagccgttgcccatgatgcggcagagccccttgagcgagtcgcagtctctgttggtgaagtggaactgtgccaactgggagttccggaacagggggcccagggtggtcagcagctgctgagggatcagctgcatgatcagcttctgcggccactggtcggtctccaggttctcgccttggttcacgtaggcttggcagggcagggtccgcttcagctttgcagtggagtcagagtagggtctgcgcttctcctgccactcgaggacgccgctccaagccagcagcttgttgctgagccggtgctcgctcacggccagacccccgagggtgagcccaggtgaggagggaccgatgggacccagtgccccgaagacccgagcaccttccaagctcgggggacgcgccgccggagtggggtcgccgcggccgaaccactgaggcgagcgggggagcccggcgcgtaccaagcgcgtccgaggggcctcggccgattaacaccgggcctcgtactagcggtagtgaga

SEQ ID NO: 125588 - DNA, 681 bp, Homo Sapiens
aagggttttaaaaggctttattggggaaacgtagaggggtggggaccgtccttggaggcctcaggacaccatcctccatgttgctgggcagttgaagtccccaggggcccctgctcagaagcgtgtcacctgggggcaggggtgcagtgggggctgctggccacaggctcccaagcacagtctctgcgggggcctcatctgtgactcctggaggggcccagcccggggtaaccactacccccccatccctcgttgctgttgctcctgctccaggttccgctgcaggacctgctgctggttggcaatgacacgccggatgccgttgacaaagttgccctggtcatgggggatgaggccaatgaagattttcttctctgaagagtacaggagcataagcacgcggatctcacacgatgctttgtaggaaaagtgcacgcagccggcgaagccattgtccatgatccggcacaggctcttcagtgtctccaggtccttggtgaagtggaactggaccaggcgcgagttccggaacagcggcactagggtggtcagcagctgctgcgggatgagctgcatgtacagcttccttggccactgctcggtcctcaggatctccccgtgtttcacgtagacgtggggatggcagccacctcttggaccgattgttgggctcaggcctgg

SEQ ID NO: 125589 - DNA, 1243 bp, Homo Sapiens
tcgtgcttgctgcctcgcgtcgactggttgcgcgtttgtcatctgtgtcctgttgtggtcgcgtctgctagtgtcgggtggtgttcgtctgtaggttgtctgctgcttcgaccgagtgggtgcctttgtcaggtagtgaccttctgttctgttgccgtctgtgtcctagtgttgcgccggtggttggttgctggtgtgtgcccactctctgttggcctctgtttggtctgcggccctggggtttgtgcacggtgctgtgcacgctgtccatggcccagaaccgtgtgggttgccagtctgggctgggcctggttgtgcacctcccggtcccacgtgccgtcttccggttggtatgacctgccgggtggcactgcggagccgttctgttctaagggatgagcccattgaagatctcttcttggacgagtacaggagcatgagcacgcgcacctcacagggggagatgtgggggaacagcatgcagcccgcgaagccgttgcccatgatgcggcagagccccttgagcgagtcgcagtctctgttggtgaagtggaactgtgccaactgggagttccggaacagggggcccagggtggtcagcagctgctgagggatcagctgcatgatcagcttctgcggccactggtcggtctccaggttctcgccttggttcacgtaggcttggcagggcagggtccgcttcagctttgcagtggagtcagagtagggtctgcgcttctcctgccactcgaggacgccgctccaagccagcagcttgttgctgagccggtgctcgctcacggccagacccccgagggtgagcccaggtgaggagggaccgatgggacccagtgccccgaagacccgagcaccttccatgggaggggccgagcgggcccggatccgcggaggctgcgggcctcgggggctggcaggccaggagcgcgagcggacggcgcgcaccacgaggggccgcggagggcggccgcgacccccgagggggcccccggcgccggagcggtacggggcacggcgcggacggaccatggcgggcgcgggccgagcgggcggggagctgccgcgggccacaaggggggctgcgggctccaccgactgaggggcgcgggcgcgggcgcgcggcttcgggggagactggctgagccgtaccaagctcggggacgcgcggccggagtgggtccccgccctcgtgccgatttaaaacccaggcctcgtacctgcgtat

SEQ ID NO: 125590 - DNA, 1006 bp, Homo Sapiens
cccgcctaaaccctgaggggagccaaaatttttaagtcgggcaaccccgtttcccatgttgtagaatgcaccccgcgaccattccaagtccgcacaggttttcatgtttccaggctgtgaagtgaaccggaccagcgcgagttccggaacacggcattaggtggtcaccacctctgcggatgactgcatgtacagccttccttgcccactgcctcggtcctcaggatctccccctgttcacgtagacgtgggatgcagccacctcttggaccgactgttgggctcaggcctgggctcctgccactccatgacaccactccatgccagaaacttgttgttgacgatctggactgggcctgagttgacaccaccaggtcccactgcctgcttgcgggtggtgatgacctgccggatggcactgacgaagccgctctggtcgtaggggatgaggcccatgaagatcttcttcttggacgagtacaggagcatgagcacgcgcacctcacagggggagatgtgggggaacagcatgcagcccgcgaagccgttgcccatgatgcggcagagccccttgagcgagtcgcagtctctgttggtgaagtggaactgtgccaactgggagttccggaacagggggcccagggtggtcagcagctgctgagggatcagctgcatgatcagcttctgcggccactggtcggtctccaggttctcgccttggttcacgtaggcttggcagggcagggtccgcttcagctttgcagtggagtcagagtagggtctgcgcttctcctgccactcgaggacgccgctccaagccagcagcttgttgctgagccggtgctcgctcacggccagacccccgagggtgagcccaggtgaggagggaccgatgggacccagtgccccgaagacccgagcaccttccatgggagggccgagcgggcccgatccgcggagctgcggcctcctcgccgatttcaccgcaggcctctcacctagcctt

SEQ ID NO: 125591 - DNA, 660 bp, Homo Sapiens
ctacagcaaaataaaaacattattttaaaaagcaatattctacattaaatacattaagatattgacaattttataaatacaatcattttaaacagtaaacatgataaatttctgatacaaggttttacatacgttaattgtgaaaatataaaaactttacacacttctcttaaaaagcattcaacgtaatcaattttacaaaattatcaatttaaaaagtgttagatatgcttctattttgttccattattaaggcaatgatagcatatcagatcttaaaaaagaaatggtgaattagggcctaagacatcctatattgcctaaaaacgaacatttcagagactttcttaggcactgagttcaaaaccagtgaaggttgccttctccctagcaccactacccctcatggttgtccgaatcaggagacttcttcctggctacccttagggagagtcttctacacctattatttcctagtttctaggagaaagggtttcagaaagaattttgacatttaaattctatgccagtactgaaactctcccaaagattgaggcattctgcatttgaattttatacagaaagtcatgaatctaattccaaaagaaaagagtgcacttcatttggtcacttaatttcataccacttggcgaggtagga

SEQ ID NO: 125592 - DNA, 1102 bp, Homo Sapiens
  misc_feature (42)..(62): n is a, c, g, or t
ccctcacctaaagggaataagcttgcggccgcctgctcaggnnnnnnnnnnnnnnnnnnnnngagaatatctgccctttaatttgcatttaaaatcagtttctttaaatactttagttacaagttctgaatagtgaagacagagtagtagatgctgcaggcactcagtattggctcccaccccttcccccctcccggagccccaggcctcacttcttggcttaagatacaaaagggcactctctactggccctggtgtcaaacgtcagcagcctcaggcctggatgcagttggatacaaagccatgaatcccagtggctccaaggaattccaatgattgtgcccagatccacgggcaacacaccttagaaatgacctcatccatttcaccactaggtactaacaccctcagggtggtttcctaccccagtccacgtcctccagatctgtgtcctgcagaggaagagacaaggccccgctataacgcaggaaggaacaaaaactgcctcctcagcccaggtgcttacagcaacttaactgaaaagctcaaggcaatgtgagtcagtctagaggagacctcccttccctagtctctaccaggctctggcccttcctcgggaccacgcttggtcccactgccatgatgtgctagaatctgctctaagaacaaggtgctagaatgaggcccagcaaccagcaaaggggttggaaagggttgctacagccccagctgtgtgagattgtgccaagacgagtcttcttggtgtcagcctatgatggagagcgtgagggcaggcctgggctctccttctatgatgattacaatgcatgacctcaggggacctctgccctctcctcccactcacacacccagattccctggcctgtgcttcctggaagaggtagaagaggcatcttgaagtcaatgacaacggagaatgaaggtgccattgaagaagcaaagcagcacctctttgcctgtgttcaatccctccacacaagtggaatcaagggagaatgtgcacagccaggacagaggttgctttgagcttgggaggcacagcatcctcctagaagtctttgcagaacaaactttcaaaaga

SEQ ID NO: 125593 - DNA, 924 bp, Homo Sapiens
  misc_feature (73)..(99): n is a, c, g, or t
  misc_feature (588)..(682): n is a, c, g, or t
gggtgaaaatgtatttatttttttcaaatgatctttttcaagcaataaataaaaccagacatattgacttctnnnnnnnnnnnnnnnnnnnnnnnnnnntcccctaaactatatacatcctacaggaatacaggcattatcaaatgtagaaatggtatcactctgaaagatggggctatttacacaagttacaagaattgcgttgctgtctttaagaagtctcctccttgaataactcataaactctaagggagagagagtactggtggggaagcggggttcaaagaggagacatcctccatctttattgatggacaagacagtctcaaggaaaaacatcaatatccaaacaccgtattgagtcccttaacaaggctccacagatcagctggctttcaaaaagcctggaagggtgctccactcaggaactcccaagagaaaccatcttgtccctcagccaggctgggactggcagtgaggccatgctgagccagtggcaaacccgtggctgtggtttccacaagacaacctggctctgtgctgtcacacccagcctccaacagcgccttgacatccaaaaagcatggnnnnnnnnnnnnnnnnnnnnnnnnnnnnnnnnnnnnnnnnnnnnnnnnnnnnnnnnnnnnnnnnnnnnnnnnnnnnnnnnnnnnnnnnnnnnnnntaggagagcctgggtatcagaactgtataagttccccaagtaattccaatgcgggaccatggctttactactacaggcttggttgatggccaattcccaatctccagcctcttcctgtcatgttggagtcaactatcctatgtccctctctccatcttcccaagatttaaaaacctttctcatggcttcccaaattggaaaactctctggaatccagcgtggatgagcaactgaacaaaatg

SEQ ID NO: 125594 - DNA, 1192 bp, Homo Sapiens
  misc_feature (114)..(124): n is a, c, g, or t
caaaccctctgcagaggtaggaaggtatgaatttcttttttatgtcaagatgcaaaaacaaatcatgatgcttttgttgggagaatttttgtattcagtattttgtatgtaccnnnnnnnnnnnaaattggaaagcacaattcggtttaacatttagctttgcttgactccagtgtaagatgaagatgaccttgtcacagctcccctgacctgaagcagagcccttcccatcactgacagtgttgggggttgagagccccccagcagagcccttcccatcactgacagtgtgtcggcagctgagagctcccccagcagagcccttcccatcactgaacagtgttggcggctgagagccccccagcagagcccttcccatcactgacagtgttgggggctgagagccccccagcagagcccttcccatcactgaacagtgttggcggctgagagccccccagcagagcccttcccatcactgacagtgttgtgggcttagagccccctagcagagcccttcccatcactgacagtgtctggggctgagagccccccctagcagagcccttcccatcactgacagtgtcgggttgagagccacccccagcagagcccttgccacgtacagagattttctgtcagcagtttcccagtatttcagactcataatctgtgtttagcactccagtgttctcttgtaatagccaggtctggaaacgacccatggaaagaggggcctttgtattctgctagaacgcagagcatagtagtagatcacttttctgaagagctttttaaaatacagctaatcaaggagtttgcgatttctcttactttactacagctcagcagtgactaatgatgtgtgactatgcgaatgagtttgatgaattcgtaaaaactaagcgcttaaatggttatagaaatgaaaacatggatatttagaagcctttctatatacacagtgcagttgagatggtttacagcaaatttcgttttatttctgaaaatgttgtaaacatgtaattagtgaaagattttgtaaaacattgtcctgtatttttgtctgtaaatatattgcataagttctaagtataaatatgtcagtatcatgtatgttattttaaattgcctgtacgccactttacacattgacattcaaataaaagccaacacttcagtggcgtgtaat

SEQ ID NO: 125595 - DNA, 635 bp, Homo Sapiens
ttttagtaggtaataggatattttatttcaaaacagtgaagaagctgctaagcataaaatttgtcaaatgctacaaaggtgatgaatatacaactgggaattccaagaaatttaaatttaattacattctttattatcttttcctcaaaagaaataaattagttccaccatttggctaatattatttcattaaagactgaatttagattttaggaaataaaatatggaatctgttataatgtcccaatttatactacagtattaatctcaatcctgatcattacataattatagcatttaccaatctgtgattttataaattaaccaaatttgttaaattaagaagaaattcatagacaccatttttttcctgttacaacatatggaaaagccatcaaaaaacttaacagaaccaaatcaaaaagaagtatattttatgctaaagttactttctgtccaggtcgaaacattgttccactttgattttttctcctctttggattttgaaagctttcatatagctcacaaaatctttccaggcatttactaatggagggggtctttgtgtgacccaggggcagctttaaaatgtgactgctataaccaaccttggttttggatggccctggggggtg

SEQ ID NO: 125596 - DNA, 747 bp, Homo Sapiens
  misc_feature (687)..(687): n is a, c, g, or t
gcggccgctccttcttgagcactttcattgccttttccaactttttcttgtttttggaacttttcttccctgtagcatattgtactagcaggtctcttgctgttggtccatcatcctcagattcggagtcactgtcctgtttttcatcttcatctttcccaagaaagaatgtcaaagcggcaactaatatcttggtgaccttagagaaacatgcagttgtgataacattgacagtttttgcatcattccagatgttccttctgtagagttcaatcattacatctaaagacatcttggctgcggttgcattgctatctcttaacatggtgtacatgaaattttgcaatactacattcactttattgttcttgtgttttgcatttatattcttgatatcagtcacaatatgtgtgtataaagtctttcgcagaagtttatcatggcaacgaaaaagttcaaagaagagttctagcaggcttgatggattgatgagattcttatttctcagcaagatcaaagctttgcaaaatgtcattcgcagatctggatccaatacggtatgattgcaggagagaagatctttcacctcttgaggaaaattacttaggtactctgggtagcagtgactaatctgtgccataaacatcaccagctctgctagttctttgctgggtttatttggttgcnatttgaaaatctccacattggatttgtagtgattatactgctgtagaaactcctcgatgt

SEQ ID NO: 125597 - DNA, 792 bp, Homo Sapiens
agggcccaaatttaaatatttcttggggtgggaccctttaggaggaaaaccaatgccagttcggtggattaaccattggaccagttttttggcattcatttcccaggatgtttcctttctgttagagtttcaattcatttacatttaaaagaccatcttgggtggcggttgcattgctatcttttaaccatggtgtacatgaaattttgcaatactacattcactttattgttcttgtgttttgcatttatattcttgatatcagtcacaatatgtgtgtataaagtctttcgcagaagtttatcatggcaacgaaaaagttcaaagaagagttctagcaggcttgatggattgatgagattcttatttctcagcaagatcaaagctttgcaaaatgtcattcgcagatctggatccaatacggtatgattgcaggagagaagatctttcacctcttgaggaaaattacttaggtactctgggtagcagtgactaatctgtgccataaacatcaccagctctgctagttctttgctgggtttatttggttgcaatttgaaaatctccacattggatttgtagtgattatactgctgtagaaactcctcgatgtaggccggcgggtctcgcttgattagattctgtaactgcggcaggttgctgggaagcttgttgttgtttctgttggacattttggctgcagacagacttcgcggcgagcagttttaaaaaactcagacggccggcaccccgcaatccctgccagctgcagcttggactcgtgtttccccc

SEQ ID NO: 125598 - DNA, 1417 bp, Homo Sapiens
ttaacatgaaaagactagctgtgaaaaggcaaatgtaggcaacacaaaaacaatttagatcaacatctcaaactttataatacactcacatttatacgcaaatttctgtttacaagtacaaaaggcaaagaaacacaaagaagctaagcaactgcatcatcagccacattcaatcgaattaatactgttgtccccagtccgtagttttaatccagaggaaatggtagatgccatttcacacatggactccaccgttagttttagaagttggagactgtgtgtggttccgcagaagtctgggtttctacagagctgaactgagactccatcgtgttccaggccagatcagccagaagaaagtcatccattgctgtctgagtttcgttgctggtgaagaacaagctccccagggtttcaaacccagaactcatggtctgtgtttctgtactgttcaactgaactttgctttctagagcaggtatatttttagcagtggagactccttcagtttgggtctctgtgtcagatgaatcagtactcacggaaaagctggagtgtttcagaatacttcccagaggcagatgagggctactgtctaagaaaaagtttaagtctgtctgtgtctgtgtgtcaaacatctcaaggcctaagaagttagaatttcccctacacccataggactgagcagaggtatctgcgagtaagaagtccgtttgagtctctatgtccagtgactccaagactggctcggtggtcatggtgctaagttcactctcttcagtttgagtctggatatttgaggccgaaaagaactcttcgatatcaaaatcgattccggggttctgggctgggccagatgggagctgggtgtcaggtccaggatttgtgtcagacaaaagactacgatgatccaatgtctgggcaggcagattacttgacaagatgttttccaaatcacttaataaatctatggtttgggtctgattatctgtcatgttctgtgaaggaagcatactattctgtgcactgaaatttataattggtgcagatttctcaatatcttgatttaaagtcttaggctcattctgaggtaacaaactatgagttactgtctctgctactaaactgttgcttataatgttacctgtagcaacattatatgatgaatgaacactctcaaaaatgtctccgcacattccagcttggtccatctgtacatggtcatccgttggactttctatcccactggtttgagtttctctggagaccccacctgactggaaacaggtgtccataaatgcatcagtctgagcagctatagatgaagttaccttagagctgggcaaaaatgtctgagtgtgaacactaatgggaagagaccctcgtgccgaatcggcgcgccgtcgacttcatctct

SEQ ID NO: 125599 - DNA, 1785 bp, Homo Sapiens
tttttttgtggattttccttttaatgcaaaatgttgcaatacaaaacaatgtggagaaagtcctgttcctcaggacactgaagggaggagtgaggaagagaggacagagctggacgtctcctcctatttctccctccccaagtcactctgaggggaagaacactgctgcctgctccctgggcctgcccgcatacaaggttagagccctgggtctggggcatccttagcctgaaatttgttgacatggggcaggagagcaggagggaacattgagggttttgactcttcgggctctaaaaggattactcaggatctggagttccgtatgaaacaaaggagctgaaagaatttgattgccattggctaaaaatatagaggatttgagccacaactggcccacatttgaagaatgaggaacaagaaatttagtggggatataatataaatgtatgggagtgagaaagatgcaaaaaacaaggctagctcctcaaacctcctcctctttcttcctcatctccagcttatagacaatctggtagccatcatcccaggcatagagctggcgttctcgggggttatagcggaggctggcatgggcaccatatctgcggggaaaataagggagtgctgcccgttcaggggtcagggtgccgctggcatcaaaggagcactggatgcgggcccgactggcaggacgggtgttatagacgacatagagggtcccacagatgacaaaggcagcctcagcattctctctgggacatggtgtgtcccactgctgctctgtgtccagtgtctgtggatctaacttggccagacacaagtgcctgtcatcctcccgggtggcatagacagcccaaagaccttcctcatcagctgccaggtcgatgtaggtgtctgctgtcaagccgtagggggggatcagcccctctgctgggaatactgagctgtccaccactgttcggtttgccaggtggaatttgattagctgcaaagtgttctccatctcaccacctccaccaggtcttccaggaggcctccgagcaaaataaagaaagccaccatataccagctgccctgtgcctacccaggggaagggcacccggactcgggaagctttccgggcagccatggcaagggtgaagtcacgcagccttgggaagacaaaggctgtgtcattctgtgtcccatctaacacgtagatcttctctgtttgccccagtggatccttggtccatagaccagctgggccaccaaatcgcttcagaatcttcattgatctcacttgagagattgtgtagccacagtctgtcaccatatcgtacttctcattccttcttcccttgcctttggtcccagggcctccagtcaccttctcatcaaactctacacagggcagagctgggttctgggtctccagatagtctacctcccgctccagacgatccactctcccggagatggtgtcggcctcagttctgagtgcctcccgctccttctctgccacctccagcagtggcagcatcttgttcttgaagtcccgcagctcagcagcatgccgactactctggtcctggcactgggccagccgttcctctaaagcagctagtcggcgttccatgtactccacaaggtggtgctgctgtccttggaggggtcccgaccatgacaaaaggaacaagatgaggagaggggtgctgggccccatggcagcctggagagtggtgccagagtagaaggaacgtacagtcagcctcttcccctatcgcgggaattccggaccgg

SEQ ID NO: 125600 - DNA, 1732 bp, Homo Sapiens
  misc_feature (27)..(27): n is a, c, g, or t
  misc_feature (55)..(55): n is a, c, g, or t
  misc_feature (171)..(171): n is a, c, g, or t
  misc_feature (278)..(278): n is a, c, g, or t
  misc_feature (326)..(326): n is a, c, g, or t
  misc_feature (420)..(420): n is a, c, g, or t
  misc_feature (518)..(518): n is a, c, g, or t
  misc_feature (523)..(523): n is a, c, g, or t
cgtatggcgggaggggtggggggaatncgcgctacagggcgacgagtgatctatnaggacgcggtgtgggtatcaggctggcggcaattatgtgtagtgcgtagggcgctaataaagtcagtgggcgcggggtttcatcacggaggtggacaaaaaagatgggcgtgagcncctcatgcttgtggcgcgcgtaagagacgggtatgtggtacgagccgcgacaagagggggagtggttgtgctcggtgtttggctaccatggggcgcgaatatccgcntctctcggcgtgcaaggcggtgtcacgcccaaccgcgttctcatgggnggtctctctccaaggcacaggggcgtccccgcagggtatagtgtgggggcacgggcgtatatatattggggtgggacgcgaccgcccgcggatntatctcctcagcgcgcacgaggtccagggtgcgtcgaagtgctcgtctgaccgcaccccccccaaagaggtggggtacattcacccaaggcaggtttntcggntggtggagacacgggcaggatccggagggtgggatattgtggagaaggcttgccggccgtcatggaccacagataagtgtggggaggggaacgtgttcccgaaaggtaggcgtcggataaaggggcgtgtggacagggagtgtgtcaacacccgttcgttcgctgggcagaaatgggacatagcgcgggaggccgtgccggggttgatatatcgaggggggcggccttgcgccccgccgccgggagtgggggcgcggcgaaattgccgtgcaggggctccagttatggagttgttttagaaacagcgtcgggtggcccctgggcgtccgtttatgggggggaatccaaacgctagtcgggggcggggtctcctaggaaacaagctatggccatggacgctttcggcgcgggcccgcgcgccgaacgaatggtttcgaaagctttttgagggccgaggcggcccggcaagagtgtgttttttcagaagtttttctttgggcctgttgctttctgggttggtgttgctgttttggtcctaacactccacccacacgcaggtttatttccatcttccaggggtggaaagagctgtccccaagacactcaagaggggtgggcacaggccccatgtgagcccagggtaggacgggctggagagggccccacgcagcacctgccctgccagcctgtctgcggcccacccaccctcccattaaagtcacgttgtctcgaagcatgggtttccaggtccttgagcatagcagtggccgcaggccacctgggagcagcaggcggggcccctggtgaggatgccttgtaaccttgcggcttggcttcaccgcagatccactctggaatgacacggttcccaccccgccaccttccccctcaaaacactgatcgggcgacgatccgctgggccggcagctggagcccagccgtggccctgcctgagccagtccagtttgtaaaataaatagcaagcgttgccggcttctgtacctcctccctgtgcctgccggccccgcccagccactcagacacttgtttccggggtgtgaaccacctccccgtttttctcaggctcagccttcaggaaatgctccacctcccgcaagtccacccccgagtctgcaggaggcttgtggagcttctcctcctccgcggccgccacctcaggctgtggctctttgggcttcttcctaatgc

SEQ ID NO: 125601 - DNA, 613 bp, Homo Sapiens
  misc_feature (397)..(397): n is a, c, g, or t
gaaaggagtggctgagaatttaatactggtaaacactataaattgtaaatgtaagttgtaaatgaccttgtcactggagaggggagaaggaactggagtcagacgtcccagcagaaacagcagcggcaacatgcggtaggcacacctggagagcaacaggcactttggtaagtggttcatgcacatggtcttattttagtctcggggcagccctaagaggtaggtatctggtgtcaccttacacatgacgagacaaaccagagaggtcagcacagcagaagctcatgcagcgaccaagcagcagagcctggattcaaacccgagccctgctgtgtgcaagaacccctgggactcagctgttcctgctcacagcaggctgagcaccagagccacctgngagggcccataataggcaccactgtgcccaggcacgaggcagccaagtggcacatgccacccggggaagacaacttggtggcagggagagcaggtgggcggagccaagaagccaggccaaggcgctcagcacaatccctgaggggaactcaccatacccgggtgcagccctcagactcccaccagccttcatcagtgggttttgatggtgacatgg

SEQ ID NO: 125602 - DNA, 948 bp, Homo Sapiens
aatatacggtcctaggtagcgaggcctgggtggcgaattcggcacgagggagaggaagccggcggcctcactgctatgggccgcaacaagaagaagaagcgagatggtgacgaccggcggccgaggctcgttcttagcttcgacgaggagaagaggcgggagtacctgacaggcttccacaagcggaaggtcgagcgaaagaaggcagccattgaggagattaagcagcggctgaaagaggagcagaggaagcttcgggaggagcgccaccaggaatacttgaagatgctggcagagagagaagaggctctggaggaggcagatgagctggaccggttggtgacagcaaagacggagtcggtgcagtatgaccaccccaaccacacagtcaccgtgaccaccatcagtgacctggacctctcgggggcccggctgctcgggctgaccccacctgagggaggggctggagacaggtctgaggaggaggcgtcatccacggagaaaccaaccaaagccttgcccaggaagtccagagaccccctgctctctcagcggatctcctccctcacagcatcactacatgcacacagccgcaaaaaggtcaagaggaaacatccccgacgggcccaggactccaaaaagcccccaagggcccctcgtaccagcaaggcccagcgccgccgtctcacaggcaaagcacggcacagcggggagtgagaccgagaacgaagcggtgccccagtctaggctgcggggacctgtccttgctcagcttggctgtccctgtagcccagcctgcacctaggtgtgcctaccgcatgttgccgctgctgtttctgctgggacgtctgactccagttccttctcccctctccagtgacaaggtcatttacaacttacatttacaatttatagtgtttaccagtattaaattctcagccactcctt

SEQ ID NO: 125603 - DNA, 878 bp, Homo Sapiens
gagttaccccctccctgcccggaccgtaatttgccgcaatgttttccccccctttccggccggcccgttttaccttcgccgaagcacacaaaacagggaagcgcgccccttggctcaaaagcttccttcccctccagagaactattttcgaattttctttttctttgtttctactttatttcaacttttattaaaccaaatccagtaacttttacaatgccttactagagggttgcctcataactgaaccttcatttctggcagggaagaaaccatggcttcaggatcatgactgaagtttggccatgttccatcattaatgttccaacatcaccagggacacaaagctcagcatgagggcttctacccaaatctccctacgacaggtacttcttcaactcttccaccacctcttgaggctcagggaatttgagtttgcgtgggggccccttcttaatcccagtccagagctccgcactgctgccgtccgggcgcagcagcgtcacctcgaagctgcccctccggggcttcgtcgggttcacctttactggaagctctggggcctccaggcgcagcgcctggctcagggccgcggcgttgcgcccatagacgcgtcagctagtgcaatgctcgataacaacggtcgcctcctccattccctccccgccgttcgccagcttctctcgcttctcggctacggcgaccaccgcggcctcagccttacgcttcctcccgcggggagccatggcgcctagagcccggccgagaatgcagcgggactggtgggtggggggcggagacgcgaccactgagcggaaactgggcaacgaagagcgcagcccggaagctctgctcctacagcggaaacctctctcccc

SEQ ID NO: 125604 - DNA, 1010 bp, Homo Sapiens
  misc_feature (729)..(729): n is a, c, g, or t
  misc_feature (787)..(787): n is a, c, g, or t
  misc_feature (827)..(827): n is a, c, g, or t
  misc_feature (842)..(842): n is a, c, g, or t
gggagaccagtctgcctttattcctgattccctccatgggtatgtgctaaaacttcccaattctactaaaggtggtggtgtacattttgggaagcgcactacataggatcaagggcttaggtaacagctggtttaacagattgccacaaacttagtggctcttaaaaaaacagaaatctattcgaaagttctggatgcttaaagtctaaaatgggtccacagggctgcattcattacagaggctctcagagcagggaggatcagttcatttccttgctcttttcagcttctaggtgtgggaaggctcgtggctccttcctccatcctcagagcacataactccagtttctgcttccatcatcacattgccttctcctgtagtcaaatcttttgtctctctcttaaaaggatactacctgtgattacatttaaggcccacctggatcatctaggatgttctgcctcatcccagcatccttatctgcaaagtcgcttttgccatataagatgataaaaacatgttacatgctggttccttcccaggggctcctgactgactgacagatagatgataaacactgttactgcaaatccaagtaatgtcccttaaatgtggttttattctttcttactgtgagttaagggaatcattatataattggtgatctgactggaagatgaaacggagaaggttttccccccctagtcttagattcgtggcagtatggnaagatctgcacacaggatcaggcagttatgttccagtcctgcatatcagtattggtangtaaataccattttagtatacacatgaataataatatcanagtgcgcaccaaaanacaatgatccaggatgcatgacaactggaccaactcccaaataacgacaggagctatggtaatatgttgcaacacaaagcatcccaagatatgaacagatcatgaacagaccagaccgacagctgcctgtccacaagtcgccctgccactggtggacacggggagggg

SEQ ID NO: 125605 - DNA, 618 bp, Homo Sapiens
  misc_feature (200)..(200): n is a, c, g, or t
ttttttcacattatcctctcaaattttatttgtattctgctctaacaaatatagtatgaaggcaacagttgttttttagtgtatggcacagatgaaaagaaacaaacagatttagaagcagtccagcatttaaatgccggtttaacaaaagaggcacgtattatcctatttagcagtttataccagatatcagaagccanttttttttccttgcaagcaacagactacatttatttgcattaagtaaaaacatatcttgatcaagaaaattactttttttctgattttcctttatatcacaaatgtcagggtaaggcaaatccttaatgaatcatgtaataaaaaccctattccccaagaaaatatattgaacatattctgctaactttgttatttttcaaagcaaagccgacatgcgccacatacagagaaatgtcttttcaaatcaagtgcatcaagcagaactgtattaattcacaaagaggcttttcagtgtttcatagaaagatttacaattagctgcagtgattaatatgtgacccagtatcacagacagtgattcggatgccttctttgtaatcttttatgaaagaagcttgtccatcatctgaatagtta

SEQ ID NO: 125606 - DNA, 1100 bp, Homo Sapiens
  misc_feature (60)..(78): n is a, c, g, or t
  misc_feature (155)..(165): n is a, c, g, or t
  misc_feature (881)..(881): n is a, c, g, or t
  misc_feature (890)..(890): n is a, c, g, or t
  misc_feature (900)..(900): n is a, c, g, or t
  misc_feature (918)..(918): n is a, c, g, or t
  misc_feature (948)..(949): n is a, c, g, or t
  misc_feature (954)..(956): n is a, c, g, or t
  misc_feature (962)..(963): n is a, c, g, or t
  misc_feature (972)..(972): n is a, c, g, or t
  misc_feature (989)..(990): n is a, c, g, or t
  misc_feature (998)..(998): n is a, c, g, or t
  misc_feature (1001)..(1001): n is a, c, g, or t
  misc_feature (1012)..(1012): n is a, c, g, or t
  misc_feature (1038)..(1038): n is a, c, g, or t
  misc_feature (1042)..(1042): n is a, c, g, or t
  misc_feature (1045)..(1045): n is a, c, g, or t
  misc_feature (1050)..(1050): n is a, c, g, or t
  misc_feature (1055)..(1055): n is a, c, g, or t
  misc_feature (1082)..(1082): n is a, c, g, or t
gtgccaagctaaaattaaccctcaactaaagggaataagcttgcggccgcctgctcaggnnnnnnnnnnnnnnnnnnnaattatgcaatttaatttttaataacaaagatactgtattttaacatggtgaaatatacttggctaagtccagattnnnnnnnnnnngtatctagcccaacagtacaattatacagctttgtacagaacattccatagatcaacagaaaatacatttgagcgcaaaaataaaaaatatttaaggagaatctctaagcagcattttatttctgcaaaagacatatcttgtactgattaaatatctacaagtgcttttcctttacaaaaatacatatattcttaatagactaagtcattaacaatgacctggtaattctttcacttcaatttgaatgatttataagctaaatcttacaaccacaaaaaggtttttatttgtattaagatgttaccacttttgacaaaaagcttaaaatattttatatttcaaaggaaaattagcaacataactttacaatatattctatgatattttgattgtgagggctactctatttaaaactgatgatctctgttgtgttgctcagatgcaggaaagcagcagaaccctggtactcccccaacaagctcctgtcgtggaccacagcttcataaggacacttaggcccccacccccattctaaaaaatacaacaaaagaacaccaaacaatgctaggctgatcccattacatttttaatgtgtagaactcctgctccagtggactgatgtgcagaggatggataaatacatttgttgactatctctccatcacccagaaatattaatcttcatttgcactagattagtttccttatccatgangctccatangatgggaganactagactcagtatttancatatctgtttcactttgatctagatttannatatnnnaagtannatctctganaatcagtctcagttggnnatataganaangggcatagcangttacagcacatttgatgagcattanatantantttantttanacttctgaaggatgtcgagcattattnatttgaatatagagcaga

SEQ ID NO: 125607 - DNA, 1308 bp, Homo Sapiens
  misc_feature (1150)..(1212): n is a, c, g, or t
gcagaaaagcagaggcgggtgtcactctttattgcggggtccacactgtgggtgctggggcccctcccactgagggaaggctgagcctctagccagggctggccacctggccacctatgagtccattcttctgtccccttaatctcaggctgagcatttacactggatttctgggggcctgtgagtcctccttgaccttcatcgcccactatcatgtgcttgagagcatcacaagtcagtagcaatgagccaggtgggtggtgggtcacctggcacagcaggcctggggctcgggtcccagcccagcagctgtggagtcccaggtggaggcaggggtggtggccccggccgcactgccctcaggctcaaggtccaggccctcgtagatggtggggagtgaggtgcgctggctcagccgccggcgcaggccgaccagcaggggctggggcagggaagccacatccacgttgttgcccaggtccacccaagccaaagcagggaacttggtggtgtccttgatggcatcagtgagcttgcgggcagtggcccgcgtcagtcggttgccgttgagcaggagctgggtgaggcggggcagcgcccacaggctgggcagcaggaggtgcagcagctcatcactcagccccgtgaagctcaggtccagcaccgccagcacagcaccatggctgctcaggtagcgtgtgatgtgttgcacgtcctgtgtcgacagcgggatgcctgagaggtccacagtctcccctgccagcagagtcttctggaggctgctcttgaggcagctctgggtcttcctctggcgcaggctggacccttgctgctgcttcgagtgaggggtgaggtggtagatgagctgtcggcagatcttgtccgaggacttccagagctcatagtccttcttggggcactgcaggtcccgggccaggttcacaagcaggtcatgggagatggggtcgaccgggttgaggaaggccacatctctgtagaggatatcaggaaggagggtcctctcaaggcccaggtcctggcgcaggaggcgcagcagctgccgggcgcgctccggccgccgctcgcggagcgtggactggatctcgcggagccaccgcacccggcgttcgtagggcgcgggcccgcagcnnnnnnnnnnnnnnnnnnnnnnnnnnnnnnnnnnnnnnnnnnnnnnnnnnnnnnnnnnnnnnntggccgccgcgcgatggtcgccgaaccctcgtgccgaattcgccacccagccctggggcccacgccgaccctactgtttggtgattaaattattat

SEQ ID NO: 125608 - DNA, 1064 bp, Homo Sapiens
  misc_feature (91)..(127): n is a, c, g, or t
cagggagtcaaagcttttattacctgatagtccctagtgtggtgccagagataccgctctggtcctattactccccatgatatcagtggtnnnnnnnnnnnnnnnnnnnnnnnnnnnnnnnnnnnnntatttacagtgcatggtggtacggggacgaccactttcctcgagagctctgagaactttgtgctttttttcttagttggtgccgagctacctggaatggattttgtgtttatcttctttagggaaagatgtattaaccaaagcacaatccagcccaatttctcggctgaggatttcacgatatcaatccaaacatcacactatttaattccccaataaaacattggaaaaaggactatcagtgctaacacatttacatataaaatttccacctaataggtaatagaagcctatgtaccaatttctaaaacagttataagatatatacacaatttggggtatattaacaaaacagaatattacaaaatattaaaggcaatcctcctggtccacggacccttgttgccgcttacttgaagttggcataatctgagaatgcatcaatatactcctgcaccaccttgtagcagaactcatactgttccagtgtctggaccatgtgtggcctctgtagccgcaggctcttgacagtctggaagacatccaaaatcccctctgctttcacacgctccaggacggtgctcagggcacagaaggtccccgtccttcctgccccggcgctgcagtgcacggtgatggggtggttccctgactgctgctgctgcttctgcacggcggcgatgatgctgatcatgccctttccgtcactggggatgcccacttcaggccagccatggaagtggaactgccggatctgccggctcttattctccctggtgttggtgaccaggaggtctcggacggtgtagctctcacattcctcctccttcttcagttccactgtaatatctccataggacaccagtccatcagatggccagtactgggcacacttctcctggcctctctcctccagttctgttagcatcacgatagag

SEQ ID NO: 125609 - DNA, 577 bp, Homo Sapiens
gtctcagggagtcaaagcttttattacctgatagtccctagtgtggtgccagagataccgctctggtcctattactccccatgatatcagtggtggggatgggggaggggaccagggagagaggggagggatatttacagtgcatggtggtacggggacaaccactttcctcgagagctctgagaactttgtgctttttttcttagttggtgccgagctacctggaatggattttgtgtttatcttctttagggaaagatgtattaaccagagcacaatccagcccaatttctcggctgaggatttcacgatatcaatcccaacatcacactatttaatttcccaatagaacattggacagaggactatcagtgctaacacatttacatattaaatttccacctaatagttaataggagcctttgttcccattttctataacggttattggatatatacaccatttggggtatattaacaaaacagaatgatacaaaatattaagggcatcctcctggtccacgggaccttgttgccgcttacttgaggttgcataagctgagaatgcatcagtata

SEQ ID NO: 125610 - DNA, 2560 bp, Homo Sapiens
  misc_feature (86)..(99): n is a, c, g, or t
caaattaggcgcccagaaaaggaagcccattatagaaaatttagggactttatccataattccaaaaatggaaaagttccattatnnnnnnnnnnnnnntgttcccacacagtggcacttgctcaatctctttatttagtggcacacatggaatgaatgaattagctcttacttgcggcatacttaacaagtctgatcttgcttatagaaattggatcttaatacttcattctcagaatacttcaaaacgtaagccacagtttttctttcaaggatgtgggaagcattcctcattcaaatctgattaatggttttataaagtatgtacctcatttttattagccattatcttcatgctggattctaatattctttttaatggtgatctgttcaatgacagaaacttatagagagaaaattccttctcaatttataaacaaaaattttaaaagcagcatttttgatgtggtaggaagatatttatgacaaaagcagctactgccctaaactggcaaaaacaacaaaagaacaaattgttatttaacctttaaataacgagtctctatttgctataaatctacaaatattttaaatatatttcctcctactgcaataaaaattaagataactctctgtttaacagcttttgaagagttaattttataaggaaataaaaaagattgacttgcctcctgaatgtccagtgataaactgaaccctaatttccctacctcaacaacataaaaatgatgtaaagtggatcaaagtatgtaacaagttaatattaaaaatgcttcttcatatggtctttcactaaaataatcaacgtaaaaataatgtaaaaatgtgtttttgcttgaagatttagtgaacgttcaaggaatcacaatttttgagctttttccatccggagtactattctatgtgaaaatattaccagtgcctcatattaaaaaggcacagtgataaatttccaaatgtaaaattgccaaaaatcaaataccagctacattctccataatctttctttatctaaaccctcaaagctatccatctgttttagtggtttgagtgagcactgaaaaccaaacatgtttattcagggtttaaaactaaatttctcctcttgaaatctggaggcaaagatagtagagacacttaaggtaactctgtccaacttcttaagcccatgtatggaaacagtctacaacatctcattatgtcagcattgatgcaccttcttcaccagtggcatcttgggaaatatgaaggtcttcaagcatctcagccagactaattcgaggtgctccttcatcatcggtgtcactttcccacagggatggctgaatctctgtaaatgttgacattttttcgaattgcctcatcttcttcaagatcttcaagaaaatcttggtattgcctttcatcatctgtatccatgttttctctctctcttgcaagctctttcaatttccagtttctacgacgctgacgtttggtccggtcatagctcttcttgattaataccacatctggaactctatctgagttcattttgttgacatgctcatcatttaagttacagttggccaaatcaaaccctaacaccaggtctccgggatttagaagatgtcccaaatgagtacgacaaaaatactgtttatctgtattcatttcagatgtcttctgtacccagacttccccgagggtatgcttttttgatatcattccagcacctgcagcacgttttatatcttggactatgctgcattccatcacaataaactcctctagctgtttgggatgacataaactattgaaagggtgactccagaaagtgctcccatcaatatctgccacttgtagggtttttggatcaatgaggtgaatggcactggttactcgaatacacacacaaatctggttcatatttcccaggctttgtgccagttttggagacagacagacaacattatccttgcatattggaaccatttccacagaaaaagtgcttttgtaattgtatgtgttactatggatatcttgagagatcagtctttgtgatgctttgtatctacagggaactgtacactgaagaaattcgaccatcttctgagcatgttgttttgaggaataataaaaatccagaccatcatgaatctctttgatacgaagtgtattctgatgcattccatatttcagaattaactgttccagatagtagaaagtttttttatgcaaagtcttttgcctcacttgaatcacagccttccagaaatccttagcttctactctatggcaatctccacacatttgggactgaacaacataatccaccacaacacttgttgaaggatagcaccattcatcacctctttctgaatagtcagtttaactttaagtctcttagaatgaggctcagtccaaacaaagcctgcatctacaagccgtaccttactcagaggggctttgatttttttcaagcacaaagccgacgcgtggtcgacgatatcccgggatatccggaccgtaccgccttgctttttgaacaccgttttat

SEQ ID NO: 125611 - DNA, 581 bp, Homo Sapiens
tttttttcagttgcagttgaactttattcatccgttcacacctgggtccctcccggcccccacctaccctggccctgcctactcagggcttccaagattgggtgtcggggtggctttgcttatcctccagatgccttcttcccaggatgtgatccgtgccctccaggatctaagggatgaggactaaaggggtctgttcctcctccaggcagctggcatggaaccgtccgtctcagcggctgcttggtggtggcggtgtggatgggtgtggctctctgtttgctggggggtattctgccaggatgtataggaagccacccagggctgccactgctgtggctgtgttgtgggaggagcagccatctggaaattgtttttctcgcctcttcactctcctcgaaaaatgctgctgatattgaatagctttagatgattcttcatcttcagcatcaggctccccgaagcatccttcctgctgtttctgccagctgagaatggcctccagccaccggagcttgtagaagtcggagaagcgcccattccacagaacatgactggaagtaaagacgggggccctctgc

SEQ ID NO: 125612 - DNA, 430 bp, Homo Sapiens
tcagttgcagttgaactttattcatgcgttcacacctgggtccctcccggcccccacctaccctggccctgcctactcagggcttccaagattgggtgtcggggtggctttgcttatcctccagatgccttcttcccaggatgtgatccgtgccctccaggatctaagggatgaggactaaaggggtctgttcctcctccaggcagctggcatggaaccgtccgtctcagcggctgcttggtggtggcggtgtggatgggtgtggctctctgtttgctggggggtattctggaaattgtttttctcgcctcttcactctcctcgaaaaatgctgctgatattgaatagctttagataattcttcatcttcagcatcaggctccccgaagcatccttcctgctgtttctgccagctgaaaatggccttcag

SEQ ID NO: 125613 - DNA, 342 bp, Homo Sapiens
tttttagctcatcagctatcattaatgttagtttattttatgtgtggcccaagacaattcttcttcttccaatgtgccccagggaagccaaaagactggaaacccctgtttagtccctgcccttgggaaaaatggtttgagtgatcaaagatcagtgtattggcttttacttcttctttctagatttataactcctctcataaagcccatccatttgacaggtaaactgatctctacaagcctaactctatctattactcctcaaatgagtttgcagagcacaaacttaaacctgtaagtggtggtacacatgttggattttcaaaggatcccagtctctac

SEQ ID NO: 125614 - DNA, 464 bp, Homo Sapiens
  misc_feature (422)..(422): n is a, c, g, or t
  misc_feature (436)..(436): n is a, c, g, or t
agtccacaaagaaacaattttattagcccaagaagtgaagacccagtccctctgcttgccccagccccaccccaaagcccctcaaaaggataggtgtgggtaagggagaagcttgggatggaatgtcccctatccctcagaagactggagggaagacgacggtctgtgcaaataggtcaccagagggtaatgtgtggggggttattagaccaggataacaggggaagagggagggaagagtggggctagaacccaaaagtggggtcctttctgaggcagggtggtcccttggctccccttcatcaccctcctcttgcccttgagtttcttcctctttggtcttccgtccccaggacccccgatgaacaggcttgcttgcaaaatgggggcaagtctttccgggtctgaattgaaccaagggntcaagcaacggctnttgtaagcatgagcacaagggagtaccc

SEQ ID NO: 125615 - DNA, 485 bp, Homo Sapiens
  misc_feature (34)..(34): n is a, c, g, or t
ggattacggggaagggccctcactgctggtcacngaccccaaaaatggggtcctttctgaaggccagggtggtcccttggttccccttcatcaccctcctcttgcccttgagtttctttcctctttggtcttcgtccccaggaccccgatgaacaggcgtgcttgcaaatggggcaggtcttccgggtctgagtgagccaggggtccacgcagcggctgtggtaggcatgagcacaggggagtacccgcagcttgtccccatcctcatattcatccaggcaaatggcacagacatcatactggtctcctgggacagaaagaaaataatctagtccttcactgagccacaatgacccagggctaaggcttttaaagccttgcaaaaatttcccctcacctacaaagccagtggaagagataagacaggtaggcaggataaggtcagggcagaacatggaagaatttagggctaagtaaggacaagc

SEQ ID NO: 125616 - DNA, 638 bp, Homo Sapiens
  misc_feature (127)..(127): n is a, c, g, or t
  misc_feature (211)..(211): n is a, c, g, or t
  misc_feature (338)..(338): n is a, c, g, or t
  misc_feature (593)..(593): n is a, c, g, or t
aattcggaacgagggaaaggcgctgttttcaccgaattagaatcgcgggaaaatagagaagagtttgtttgaaggtctcgcgagatcgagtgagtacggctcgccaagttggagcgctctcgcgatnagacacagcaactattcagctgcgaggggacgggagaggtggtgagcactctcgcgagatttgaaggagcggcggaggccagangggaggagaggacgcgcggcctcctcagcctctttccttccgctgccatgcaccctgcagccttcccgcttccttgttggtctttggccgctgtgctgtggggagcggccccgacccgggggttcanttcgagcgacctcggaccacaatgccagcatggactttgcagaccttccagctctgtttggggctaccttgagccaggagggcctccaggggttccttgtggaggctcacccagacaatgcctgcagccccattgccccaccacccccagccccggtcaatgggtcagtctttattgcgctgcttcgaagattcgactgcaactttgacctcaaggtcctaaatgcccagaaggctggatatggtgccgctgtantacacaatgtgaattccaatgaacttctgaacatggtgtggaata

SEQ ID NO: 125617 - DNA, 1820 bp, Homo Sapiens
acaagggggtttttaatagatttatgtttgggggtagtccacaaagaaacaattttattagcccaagaagtgaagacccagtccctctgcttgccccagccccaccccaaagcccctcaaaaggataggtgtgggtaagggagaagcttgggatggaatgtcccctatccctcagaagactggagggaagacgacggtctgtgcaaataggtcaccagaggtgtatgtgtggggggttattagaccaggataacaggggaagagggaggggacagtgggggatctgttgaaggcccaggaaaaacaaggggagctggggctaaggaaccaaaggaggtgggaagagtggggctagaacccaaaagtggggtcctttctgaggcagggtggtcccttggctccccttcatcaccctcctcttgcccttgagtttcttcctcttggtcttcgtccccaggaccccgatgaacaggctgcttgcaaatggggcaggtcttccgggtctgagtgagccaggggtccacgcagcggctgtggtaggcatgagcacaggggagtacccgcagcttgtccccatcctcatattcatccaggcaaatggcacagacatcatactggtctcccttctgatagtcatgtgtaggaatctgtttcagttgctctttggtaagtcgattccgctggagccgtttccggtgctggatacaacgagctatcattactgctcccatggccaaaaccagcagtcccacaatcccctgtgaaagggatgaggtaatagcccaaggggaaggtattgtctggaaccagaagcacccgagcccccttctcgtagacaaagagggcacgcaggtactcggagcttctctccccaataaatacagacgggatccagatctgctgctggatttcctcactattccacaccatgttcagaagttcattggaattcacattgtgtactacagcggcaccatatccagccttctgggcatttaggaccttgaggtcaaagttgcagtcgaatcttcgaagcagcgcaataaagactgacccattgaccggggctgggggtggtggggcaatggggctgcaggcattgtctgggtgagcctccacaaggaacccctggaggccctcctggctcaaggtagccccaaacagagctggaaggtctgcaaagtccatgctggcattgtggtccgaggtcgctcgaatgagcccccgggtcggggccgctccccacagcacagcggccacaaccacaggaagcgggaaggctgcagggtgcatggcagcgggaggaaagaggctgaggaggccgcgcgtcctggtagcaaggagcagaagcggagttctgcgccctccctgcccctcctttaggatcccaggggtccaaccacccccaggtcccacttcccagctacatgggggcgccggggaaggaacaccaactcaaagaatgagatatccaacccgtttagtggagctgggtgggaggcactaaatgtatccttttctggtacggggataaaacgcggaaaggggacggagcctaacacaggtgacagaaaaacttcgggaagggtggcggagctcaaggaggtgggacttcctgctaggtgggccgtgttcccagcctctggaaaagggcttccggtagagaaaatcaggccgctttcagcattggatgcttgagatgaaggacttccggtcctaaaaggccggttaaaaaaaggttagcgatggagggactgcctgtggagatggaaggggcactggtgggcaagaagacgacctaataaacgatcccggaaatt

SEQ ID NO: 125618 - DNA, 1490 bp, Homo Sapiens
tggaccggtccggaattcccgggatgtaactgatttggaaaccagaggaaaggcgctgttttcaccgaattagaatcgcgggaaaatagagaagagtttgtttgaaggtctcgcgagatcgagtgagtacggctcgccaagttggagcgctctcgcgatagacacagcaactattcagctgcgaggggacgggagaggtggtgagcactctcgcgagatttgaaggagcggcggaggccagagggaggagaggaccggaagtccttcatctcaagcatccaatgctgaaagcggcctgattttctctaccggaagcccttttccagaggctgggaacacggcccacctagcaggaagtcccacctccttgagctccgccacccttcccgaagtttttctgtcacctgtgttaggctccgtcccctttccgcgttttatccccgtaccagaaaaggatacatttagtgcctcccacccagctccactaaacgggttggatatctcattctttgagttggtgttccttccccggcgcccccatgtagctgggaagtgggacctgggggtggttggacccctgggatcctaaaggaggggcagggagggcgcagaactccgcttctgctccttgctaccaggacgcgcggcctcctcagcctctttcctcccgctgccatgcaccctgcagccttcccgcttcctgtggttgtggccgctgtgctgtggggagcggccccgacccgggggctcattcgagcgacctcggaccacaatgccagcatggactttgcagaccttccagctctgtttggggctaccttgagccaggagggcctccaggggttccttgtggaggctcacccagacaatgcctgcagccccattgccccaccacccccagccccggtcaatgggtcagtctttattgcgctgcttcgaagattcgactgcaactttgacctcaaggtcctaaatgcccagaaggctggatatggtgccgctgtagtacacaatgtgaattccaatgaacttctgaacatggtgtggaatagtgaggaaatccagcagcagatctggatcccgtctgtatttattggggagagaagctccgagtacctgcgtgccctctttgtctacgagaagggggctcgggtgcttctggttccagaaaatacctttccccttgggctattacctcatcccttttcacaggggattgtgggaactgctgggttttggcccttggggagcactaaatgattacctcgttgtaatcccgcaacccgaaaacgcctcccagcgggaatccactttacccaagaaccaactgaaacagaattcctatcccttgtactattcaaaaggggagacccgctatggatgttttgttgccattttgcctgggatggaatattgaaggatggggaaccaaacctgccggggacctcccccggggggctcttgccctaccaccaaccccccttgccttg

SEQ ID NO: 125619 - DNA, 962 bp, Homo Sapiens
  misc_feature (103)..(145): n is a, c, g, or t
  misc_feature (193)..(302): n is a, c, g, or t
  misc_feature (908)..(908): n is a, c, g, or t
aattgagctttattttctttggagggagggtcttgcttgtcatccaggctgtagtgaatgggcatgtcataactcactgtatccacaacctcctggggctgannnnnnnnnnnnnnnnnnnnnnnnnnnnnnnnnnnnnnnnnnngtaagtgccagcacatgtggctaatttttttacatctttgtagagatnnnnnnnnnnnnnnnnnnnnnnnnnnnnnnnnnnnnnnnnnnnnnnnnnnnnnnnnnnnnnnnnnnnnnnnnnnnnnnnnnnnnnnnnnnnnnnnnnnnnnnnnnnnnnncaaaaatcatactttattcttgagcccattggtcagggtagattcgcacactccctctgcagtgactccaggagcccctctcacagctcagagcggaagctgaggctgcagcctgccatcttctccgcatagtccgcatcgaagcgctcattctgcgccacggtgaaggtggtcttccagtccccagccatgcctttcctcatgaagggggagatgctgtggtccatgagctcctgggggacggtggtgtagttggtcatagggttcttcttcatctccttgaacgacgtgtgctgaaccatgaagtccatggtctcctctggcagggagcgccccacaaactccaggatcttttgaatctcccttttggggttctccttcatgtcttcatagaagaggtagagaacagggtgggtgcggctcagctcccaccactcctgcacgtgctggtaccaggacccgtaggacactagagaagcgggcagggggcaccgacacagggttgctgtacgttatagccaccacccctcggcttcacaccctccttcctccagtcaagcccaccttctccagccatgaacttttccaggaagctgtcccaggtcncaggctcagggtgcgccttttccatacggtggaaatggtagtaggagaccgcac

SEQ ID NO: 125620 - DNA, 716 bp, Homo Sapiens
  misc_feature (95)..(149): n is a, c, g, or t
  misc_feature (197)..(306): n is a, c, g, or t
attttaattgagctttattttctttggagggagggtcttgcttgtcatccaggctgtagtgaatgggcatgtcataactcactgtatccacaacnnnnnnnnnnnnnnnnnnnnnnnnnnnnnnnnnnnnnnnnnnnnnnnnnnnnnnngtaagtgccagcacatgtggctaatttttttacatctttgtagagatnnnnnnnnnnnnnnnnnnnnnnnnnnnnnnnnnnnnnnnnnnnnnnnnnnnnnnnnnnnnnnnnnnnnnnnnnnnnnnnnnnnnnnnnnnnnnnnnnnnnnnnnnnnnnncaaaaatcatactttattcttgagcccattggtcagggtagattcgcacactccctctgcagtgactccaggagcccctctcacagctcagagcggaagctgaggctgcagcctgccatcttctccgcatagtccgcatcgaagcgctcattctgcgccacggtgaaggtggtcttccagtccccagccatgcctttcctcatgaagggggagatgctgtggtccatgagctcctgggggacggtggtgtagttggtcatagggttcttcttcatctccttgaacgacgtgtgctgaaccatgaagtccatggtctcctctggcagggagcgccccacaaactccaggatcttttgaatctcccttctgtcgtcttctcgcagccgtatagtagtagtagtagtaggcgg

SEQ ID NO: 125621 - DNA, 1546 bp, Homo Sapiens
  misc_feature (105)..(220): n is a, c, g, or t
  misc_feature (261)..(296): n is a, c, g, or t
agtcagcccactgcagccataacctccctggctcaggcgatcctcctgccttcacttgtcaagttagctgggactacaggtgccgcaccatcacgtacagataannnnnnnnnnnnnnnnnnnnnnnnnnnnnnnnnnnnnnnnnnnnnnnnnnnnnnnnnnnnnnnnnnnnnnnnnnnnnnnnnnnnnnnnnnnnnnnnnnnnnnnnnnnnnnnnnnnnatgagccactctgcctggcccacaatcatattttattctcnnnnnnnnnnnnnnnnnnnnnnnnnnnnnnnnnnnnaacagaatctcactatgttgcccaggttggtctcgaactcctgggctcaaatgatcctcccacctcagcctccaaattgctgggattacagacatgacctaccgtcccgggccctcaattcatattttattcttgagccgcttggtcaggtttgattcgcacactccctctgcagtgactccaggagcccctctcacagctcagagcggaagctgaggctgcagcctgccatcttctccgcatagtccgcatcgaagcgctcattctgcgccacggtgaaggtggtcttccagtccccagccatgcctttcctcatgaagggggagatgctgtggtccatgaactcctgggggacggtggtgtagttggtcatagggttcttcttcatctccttgaacgacgtgtgctgaaccatgaagtccacggtctcctctggcagggagcgccccacaaactccaggatcttttgaatctcccttttggggttctccttcatgtcttcatagaagaggtagagaacagggtgggtgcggctcagctcccaccactcctgcacgtgctggtaccaggatccgtaggacacttctccgaccatgaacttctccaggaagctgtcccaggtcccaggctcagggtgcaccttggccatgtggtagaagtggtagtaggaaactgccacatcctttgcgttgcgggcaacatagaccaccttgaccttctgatccaacagagtctgggggagcagagccaggggcaggtgtgtcttgatgagtcgtgggggcggtgtgtctttcagagtctccatccctgagggaatccctgggtctttgaactcaaggaagggcacccgcatgaagatgggagctcggtgacacttctccaggtcaccaccctggtagatcatgtccagaatctggctcacccaggtggtgccggacttggggtaggtgctgatgagcaggtcatcaggccgggcctggaagctctgcaggggccccagtgcctctgcaaagtacttgatgagcgggacccccttcacgtactccagtggcgggcgggaggtgtcctggatcagctccatgttcctgagctcttgggaacctggcctcgtgccctcctcgcccgcagtggctgattgtgggtgctgtgtggggaatgcagggttgttctctgagctgagggtttcctaggtccactgtccccggccgtaatggccgaattcccgggcatatgtccggtaccgtcgactg

SEQ ID NO: 125622 - DNA, 1081 bp, Homo Sapiens
  misc_feature (63)..(76): n is a, c, g, or t
  misc_feature (265)..(265): n is a, c, g, or t
  misc_feature (364)..(387): n is a, c, g, or t
  misc_feature (461)..(472): n is a, c, g, or t
gctttgtgggattttatttaggtccaagttcttagtacacggcaacaattccaaatccaattnnnnnnnnnnnnnngtgatgttcctccactcatctggaggtggtttaatggcacacaaggaacattactggcaacagactgctccctcaagttcccctggatggtttttactcaactcataataccaccaactctccctctgggagctaaaagtacaactggccagatcacaaattgtttacattcttttttgtaagccattntaagaaaaatggtgcatggacacaaaatatgataaaaactgcttttccatagaattcttaagttgcaaaagaggtttcattttaatgtgaaaataagcnnnnnnnnnnnnnnnnnnnnnnnncttacaaaaaaccttaagatattcagcaaggatcatttatacacagctaggccccgccgtttcgttttaattgnnnnnnnnnnnnaataattatatgagattctcaaaacaggaacaaaggtcagcacaaagtaaacttaaaggtaatgagctcaatgcctccatttaatcacttttataaggctctctccaataaggctgctgtgctgtgctcctgccagtgttggagtaatataacatttttactgcacacaccttatgggaaagtgtttatactgagtgtagttttaggaggggtaaatgaagattatttccacaaattaagattgcacttagtacacgcctttacacaactctgatggtatttaccaaaacatggcatgtcttttcacgtatattcctgaaaacaccaaatagaactcttaacttttaaagaaaaatacagcacatttagttaagacagttgtggtgcagtggaaaattaagtactgagcactgagtgagaactctgctgttattaactagctgttcatatgaagaagaaaactcacctcatcagtctaatgagacaaccagaaattttaaaaatttcatctagctcaaactcagtgattctaaatcttatatgggggaaattaccaccttaacaccaatcaggagttcccggccaaaaagaccagacctcgtgccgaat

SEQ ID NO: 125623 - DNA, 459 bp, Homo Sapiens
  misc_feature (367)..(390): n is a, c, g, or t
tttttatatgttgggattttatttaggtcaagttcttagtacacggcaacaattccaaatacaattaaaaaattaaaaagtgatgttcctccactcatctggaggtggtttaatggcacacaaggaacattactggcaacagactgctccctcaagttcccctggatggtttttactcaactcataataccaccaactctccctctgggagctaaaagtacaactggccagatcacaaattgtttacattcttttttgtaagccattttaagaaaaatggtgcatggacacaaaatatgataaaaactgcttttccatagaattcttaagttgcaaaagaggtttcattttaatgtgaaaataagcnnnnnnnnnnnnnnnnnnnnnnnncttacaaaaaaccttaagatattcagcaaggatcatttatacacagctaggccccgccgtttcgtttta

SEQ ID NO: 125624 - DNA, 2263 bp, Homo Sapiens
ttttttaccgggcaccaacgttggttttaatggcatcaacacccaggaggtcacacgtcagttctggttggcaacgtctaggggtgaggggctgtggcctccagtcggccccacagcctttgagaactggctgcccggtcccacccgcttcccgccccgccccactgaaaaaacactaaacgattgcactgacagacagaccccagagcgcccggcctcccacacacccacggggctgtcagagtcaaccagggctttggcgtcactcggcggtggcccggggctgcgcccaggatagtgtttatcaaatgtgacacaggttcatttacaaactggggctctggaaggtctacttctgtggctctaagagacttgtctctcatggcttctctcggagtaccggaagttgggcctggataacgctgtgtaggttggttggtttatttgtaaggaatgtgtaaggcattttggtaagttgaacagtaacttctttttccaaagaggaaactcagacagaggtgccctcctttgagctgctgccgtcctctgccttttccagctgttcctgcagcttcttcaccgtgtccttctcccttgccagctgctcctgggtcgtcttcagaagctcctgcagtctcgtggcggcgcgccccaggtcacttgttaacttcttctctttttctagtctctccttcagctgtgaggcctcctctgtttctgaagactctagggggccggctgtgcggagcttctccaattcttcttgtaaccgacatgccgaggtctgagcctcctcaaactcggccgtgagcttctgccgctgtgtctgctcatcctccaggatggcttctgtccactccagctgcgtcttcagctgaacggggtcctgctcggctgggggcgcctctggggaggaagctggggccccagctatgtcaccatcctctacgtggctcttcatttcactcaactgctgcctgaccagggcaagctcatcgctctgtttctgggcttcgctcttggcggcatcgagctgagattgagattctaggagaagttgcctcagccctgccacctccttggcgtagttctggcactcggcgctggcggccgccatgtgcttttccagctctgcctccaaatgcaacgtgtgctccctcacctggtccgaactttcaagttctccttttagcttctctacaatctcttcgagatgcttcactgtgacccgggacttctggagctcctcctctgcggcgcccaccttggccctccacacctgctcctcctcctccacgctcttctgcaggtctctgagcatgccctccgtctccgccaggatgctgcggtactggtcacactcggcctgcagtgtgctctgcgtctcctcggcctccctcaacttggaggccaggtccgaggagggctccgcgggagctggcgggtgcttcagcagcgtggggcctttctctttgagatcctgcagccactcggtgtaattctgttgtgccaagacagagagttctgggagcagagccagcagggcctccatggtctgcgcctcaatcagacagagctgcttctccgattcctccttggcctgggtcagggagtgcagcttctccttgcaggcctgctcggccgtggccagtgcctccatggccttccagttcttctcccggaggtcattgttcttcactttctgctgctcgacggcctccctgagctcgatggcctccttctccagacccgacacctgggactccagctccttgaggcgagtctgctgctggtcagcctccgcctggctggcctggacgtcctgggcatcccgcgcctggcccgcctccagcagggcctcaatggaacggattctctctgtgagctgggagttctccgccctggcctcctggagctgcccgtggaggccactcagctcctcgcatttgctgcgcacctccgcctcggaggactgtaacttgctgtgcagctcggccatctgctgctgttgctcctgggccttctcggcatccgcccggaggctggcgtggctgctctgcgtgtggcacagctcccggctgacctcgtccaggcgcttttgcagggcctcctcactctccctgtgggacgcctgcagctgcaggacctgcttctcgaaggcagctgccttggcttccagagctttccgctgctgctcatcttgccgcacagcctctgacttctccaccagctctttgctgaccttgctgagctcctgccgaag

SEQ ID NO: 125625 - DNA, 974 bp, Homo Sapiens
  misc_feature (79)..(119): n is a, c, g, or t
  misc_feature (604)..(604): n is a, c, g, or t
  misc_feature (625)..(625): n is a, c, g, or t
  misc_feature (641)..(641): n is a, c, g, or t
  misc_feature (794)..(794): n is a, c, g, or t
aaatccttttattactcttttttaacaaacagccccagggacaggggaccatgggaatgtggacggaggggaagtgagnnnnnnnnnnnnnnnnnnnnnnnnnnnnnnnnnnnnnnnnnttatatatttataatctatatacaagccccgggggtagggggcaagaggaactccctcagcggggtgggggcaacccaggctccttgtcccctcgggacccaggctcctctgcccgtcgggagggcccttctcgaggtggcggccctgtccgctcccaaggcttaggtatccagcgcagggcatctggtggggaggcctgctggtaaaggtcgacgcgctgggtgcggaagactccactgtaggtggaaggcgtggccttgagacgggaattgaggccagagaaggaccttccagttgggggagtccgtgatgatccaggtcccccaaggttgctgctcagtttttgataatcctggaacggctttagttccactggatgcagctctgctcgccccaatctatcggggaagggcctgtcatgtgaaggcagcacccgagtatcaggagcaggtgggggccgcacagccatgctggggggctgcanagcatggcccacaggtaacanacaaaggtgaggttgngcaagaggtggtgctggcggcagggagccaatgttcaccacaggcagctgttattctacatgggtacaatctctgctggtcatgatcccctgagggagaaagcactttggccaccctcgtgcctattcttgcctccaggtccaatccctatantgatctatttaatctaatcattcatagctgttcctgttgaattttatcccccacattccacacatccacccgtacataatgtaacctgggtgctaatatggctactcaatattctttcccatgcccttcatcggaacttctgcactcattataccccatcttgcaatctttctttttccc

SEQ ID NO: 125626 - DNA, 2509 bp, Homo Sapiens
  misc_feature (189)..(209): n is a, c, g, or t
aaggcttttgaaagatttattgaaataaattatctttgcctaaaaatttacctatcacctttttcaattacttttcaacattctaaaaactttccgttatgtaaaatacatttaaactttgccaataattgtagattatactggattcttcccaaaaggactaccacaaaacaaagctttcaaagagtnnnnnnnnnnnnnnnnnnnnngtaatccaatggggcataaaactgaggtctgtaacctatgacttcatggttcaaatccttaaagttaaacatgtgaagaatttgaagagatttgggacctgggccctctccaaggcaggtaggttcacaccttaccttctctgctgaattaaaccaggaataacacagctaggaaaacgcagtgctcccaggataaaagatacaaaagttcttttttatttctttaataaagcccttcaaggtttactctcccatcttgcaaggcccacatcttgttcaaggaccaaacccacaggctttagcactgcctaatttacttcaccaatgaatgaaaaccataaaccaaagcttgctgcctaaccactccccaggtccagacgggacaaggaaatgctgagaggggaggggacccatggggcacactcatgagatgcaggagcaccagagttcacggaaatcaagccggctttggactggaggctcggaaagtcagtcccagatgtagtgggacagaaaggggtgacttcatcacaccctatagccctggactttcccctcctctgctccaggtatcgaaccaagagttccttttccaagatgccctgctggctcaggggtgcatgagcccgtgggtctggcctctggcacagtctacatgcttccacaacaacgacagcagtttgataacagatgttaccccacgacgtggggggcgggctcacactgtgcgcctcccccacactcttcccactgggtgtggtgctcaggacacctgcatttgtgggacgtatgcatgaggcaggagtagaagctgcctgctgcaggcaggcgactgctcacttcctcctgatcgtcccccaccccaagcagtccagtcaacaccagaagagatcatacctacagttaaaatttgcagtgtttctaaggggaagagaaatgtcacatagaaagtattacaaagaaggattaaatttatcagctgtccaaacactataagaccacatgctttatacagcggcaatgcagtcaagcccgcttttccatggagcgggcagaattgggacaggcctcctccagtcagtcgggcacagggcgcaggaggcagctgaggaaggcaagggagcgctaggaggtctgctgcttctgaagcctccgttccgcggcggcagccagcatccttcgacgcagggtcacggggtcagaggacgcaccttccgaggggaggaagctctctgaggccgcatcatcttcagaacttttgttcaagaaacgtttgcgagcttgctggaggagttcgtccttacgctgcaccagcatgcgctgtctctcatcagcagacttggagaagcggctcccacgagcctcgaagtcttccacctcactgggctccacttccacctcgccgaagtccagcgtctcctccaggcgaggactgaggtccagtggcacacgctcggtctgagcagaagtttctccctcttcctggtcactgcttggccttttccacaggactgttcaatgcaggtctgatgctatctgaccgctgtgtaggaaaaggtacttgaatccgtccttctaaaatattgtctgttgttatttcaactgagcgtgtcagctggaggtcctgcagtaccagatggtatggaacctggggaaacatctcttgaatctgatgagccattgcattgagctgggagttgctggcctgcgtaatgccaagaatgttggtggtgtgcatcacttcaaccgaaaaactcggcagccagctcgcaatccgagaccacaggtcaggagcatcagtatcactgtcgaccaccgtccacctcctgtcccactggaacgtcttcaggggcagtaacacgcatggagctgtcatctccatcgaaatggaagaagtgattgtgttggtttaagcgaggtctcccttcggctgctgctacaggaaccaaattctcatccaagttctctccttgatgttcttccctgacacgattattgtcggcaatattaagagacattctgcatgttggacaggaggtgtcttgttctagccaggaacgaagacaggagttgtggaaaagatgtccacagggcagtttccgcgcagcctgcatggagtcccaacagatggcacagtcgtcattgttgacagccagctcctctggagttgcaactgcaaacctggcctccatgtttccaaccacacgtagatagttcttgtgccgacgaattcgacgttgcacctcatgaaacaggtaacgcagctgcataaagatgaccaggctggccatggataacca

SEQ ID NO: 125627 - DNA, 1381 bp, Homo Sapiens
aaaccgggccagtactctaagcggttctaaggtagcgaggcctgggtggcgaattcggcacgaggacgagactgggagctgcttcccagtgctgctgcctctgctgagccacaatccaagaacctggattctgggcactgtgtcccggagcccagctcctcaggccagcgcctgtatcctgaggttttctatggcagtgctgggccttccagttctcagatctctgggggagccatggactctcaattacatccaaacagtggaggcttccgccctgggacaccctcactgcacccttacagatcacagcccctatacctaccccccggcccagcccctccctcagcactgctctctggggtagctctcaagggccagtttctggatttctccacaatgcaagctacagagctggggaagttgccggctggaggagttctctaccctccaccttccttcctctactctccggctttctgccccagtcctttgcctgacacatcgttgcttcaggtacgccaggatctgccatccccttcggatttttattctactcctctgcagcctggtggccaaagtggctttctcccttcaggggctcctgcccagcagatgcttctacccatggtagactcacagctgcctgtggtgaactttggctccctgccgccagcaccacctcctgccccacctcccctttctctgttacctgtgggccctgctctgcagccccccagcctggctgtgcggcccccacctgctcctgctactcgggtgctgccttcacctgccagggcccttccccgctagcttggggcgagcagagctgcatccagtggaactaaagccgttccaggattatcaaaaactgagcagcaaccttggggggacctggatcatcacggactcccccaactggaaggtccttctctggcctcaattcccgtctcaaggccacgcctccaacctacagtggagtcttccgcacccagcgcgtcgacctttaccagcaggtgaaggagaaacccttgtggccccaactctaaattcgagttgccacttgatttcctgtccttccgtctcatcgctgacttctcactgtgactcactgtttaacacatgcctgtcccctaggcctccccactcagatgccctgcgctggatacctaagccttggtgagcggacagggccgccacctctagaagggccctcccgacgggcagaggagcctgggtcccgaggggacaaggagccttggttgcccccaccccgctgagggagttcctcttgccccctacccccggggcttgtatatagattataaatatataagggggaaaggggtgggcggggaggggttgtggcgctggggcctcactt

SEQ ID NO: 125628 - DNA, 1067 bp, Homo Sapiens
ttgggggtcaggtggtggtctcctaggagttcagagccagtggaccctcacaaggaacagcattcaggggtgaggagcctccagatgtgaggggtcagggcctctgtgcctgtatctcttggactctgcctgagggtcctgggccctcaggcttagagccccaagaatccagagctatgaggaggtggcaaagattcctcctgtagcagctctggttttctgggagccgctcccgacgtttagggggaaagggactaaccccggcagagtcccgaggagtcccacccacccctctcaccattggccccggctcctcaaagtgggggtcagaactgaggccgctgttgaccctctggggctcgtatcgggttgggggcctaggagaggggccctgaggggcttggggaggcccaggcttgtgccttggatgaccccctggtgcagttacactcccttgacggctactaagctgggccagagcctgttggatgccagcagggttgctgtggataacttggtccaggcggaagacagcagaactgctgggaggtgggggaggcaggggaagccccgggggacgctcctctggaggacgacttcggttcttgggagagggccagctcctcttgtcgcctcgtcctggcccggtccttcctccaggacccccaccgcctcctccactgctgctgccactgctgccagccttgccccctgggccagggcgccgattctgccgttccatgcctggccgctgacttgagaagctccgtttactcaaatccttggctctctggctcagatctccgcgggacatggctgaaatacctggtacggctccacctccacctcccccaggagttcccacagccttgggtgtcagcagtactggtgggggtgcctctttgtcccctcggcgctcactggtgaagtcactgctctctgatgcagtctcccattcctcattggcttggtctgagttctggtttgacagatcaggagacttggcagctgcccggcgaggtgcctcgtgccgaattcggcgcgccgtcgacttcatactctctcac

SEQ ID NO: 125629 - DNA, 951 bp, Homo Sapiens
  misc_feature (117)..(117): n is a, c, g, or t
  misc_feature (375)..(375): n is a, c, g, or t
  misc_feature (671)..(671): n is a, c, g, or t
  misc_feature (673)..(673): n is a, c, g, or t
  misc_feature (677)..(683): n is a, c, g, or t
  misc_feature (686)..(686): n is a, c, g, or t
cgggtgtaggtgacgccaccgtgcgtatgatcgggtagaatgggatcggcaccagaggggcgagcggacgccggggcggtataggacagcgtggcggggtgggattcggctcggtcnccatggcaacgacggcgattggctgccgtaagtgcgaccggcgcggggcggaacgacgggcggttgcgtcggccgtgatagtggtaatggcggtgagcaaatgtcggtacgtggcgagcgggatagtcggtggtcaggatggcggcgtccacggggtcactccagttgcgcgtcatgccggtccgcggtggtcacccgggcttcatagtgatcgtagcactgtacagggacggcgcatagggcggggatccgcggcgncggtgcgaaggcgatagcgggtggtctacgcggggggcggccccccggcgacgtctaatcacggaccgcggcgggccgacgagaggacaggcggtaagacggcaggggcggcggaggagcccgtaggacgaggggccgccgaggagaggggctgtagagacactcggccaggacccggagcggccaggccaaggacagaggggaagcccgcgcgcagggcacgagggaccgggcaggtctgccgcgggcccaaacagcgggcagggaccgggggaccaggggaaggaggaggaggngnagtnnnnnnncanccccagaacccctccccgcccacccctttcccccttatatatttataatctatatacaagccccgggggtagggggcaagaggaactccctcagcggggtgggggcaacccaggctccttgtcccctcgggacccaggctcctctgcccgtcgggagggcccttctcgaggtggcggccctgtccgctcccaaggcttaggtatccagcgcagggcatctggtggggaggcctgctggtaaaggtcgacgcgctgggtgcggacc

SEQ ID NO: 125630 - DNA, 950 bp, Homo Sapiens
  misc_feature (193)..(193): n is a, c, g, or t
tctctcccaggtgggtggcgcccctgctgccagcctttgccccccctgggccaggggcgccgattctgccgtttccatgcctggccgctgacttgagaaagctccgtttactccaaatccctgggctctctggctcagatctccgcgggaacatggcgaaatacctggtagggttccaccttcccctcttccnccaggagttcccacagccttgggtgtcagcagtactggtgggggtgcctctttgtcccctcggcgctcactggtgaagtcagtgctctttgatgcagtctcccattcctcattggcttggtctgagttctggtttgacagatcaggagacttggcagctgcccggcgaggtgctggggccactgtgactgttgtgagggcctcctcaggtccaggagcggaggctggaagggttagggagggcttgccctcagacccccttgcggcattctcccgttcctgcttcagcctccggaaacgaggcggtttatcctgctgctgagccctcccatgtcgcctccttcggggtcgctccccatcttccatgcccacattgctacctccattgctgcctccgcgcgccacaggggacagaggccctgggatcaacttctctttcaaaggctccttacttggtggcaaagggcctgtgggaggtttcttgggagccagagacttggctggagggctccagcctgggcaaacttgaggagggggcctccctcctcctcggccccggcgagatggcacccctctgggagtgaagactcgcccaccccgggcagtgaagcgggctggggctggtgaaggtggggctcctggtggtgggggagcgagagggacctgggtgagtgttccctccttgggtgtgggagcctccttgtctgaaggagccagcctcgtgccgaattcggcgcgccgtcgacttcatactctct

SEQ ID NO: 125631 - DNA, 1268 bp, Homo Sapiens
gctcgactctaagcaggatcccggtcatacctggactactggacctggggagtggttaggcagcaagctttggtttatggttttcattcattggtgaagtatattaggcagtgctaaagcctgtgggtttggtccttgaacaagatgtgggccttgcaagatgggagagtaaaccttgaagggctttattaaagaaataaaaaagaacttttgtatcttttatcctgggagcactgcgttttcctagctgtgttattcctggtttaattcagcagagaaggtaaggtgtgaacctacctgccttggagagggcccaggtcccaaatctcttcacccaactcaggatacccagatccagcccacacagaccttgtcactagtgccaaactggactgggggaccaggtcgatgggatggccgaatggggccaggctctgtgcctcggtctgtacgctgtgatcgttctgtgccaatggggccagggggcagaggctgctcccggggcagctcctttctgtccccatcgtggggggcaggtggtggtctcctaggaggttcagagccaggtggaccctcacaaggaacagcattcaggggtgaggagcctccaggcctcttggggggtccctctgctgcccccttgagtcctccatcaggggaacttcgctggctgcagggacctgatgacacctgagaatccccactcaggtccaccccactgtcagactgactcatttctgtgccagccacatcctcaaaaggactcaggggctccatccaaggctccatggagctgggccggtaactctttcggctagtggcagtatgtaaacggttccagatgtgaggggtcagggcctctgtgcctgtatctctggactctgcctgagggcctgggccctcaggcttagagcccaagaatccagagctatgaggaggtggcaaagattcctcctgtagcagctctggttttctgggaggccgctcccgacgtttagggggaaagggactaaccccggcagagtcccgaggagtcccacccacccctctcaccattggccccggctcctcaaagtgggggtcagaactgaggccgctgttgaccctctggggctcgtatcgggttgggggcctaggagaggggccctgaggggcttggggaggcccaggcttgtgccttggatgaccccctggtgcagttacactcccttgacggctactaagctgggccagagcctgttggatgccagcagggttgctgtggataa

SEQ ID NO: 125632 - DNA, 536 bp, Homo Sapiens
gaccgtacgccacaaggactggggcagaaagccggagagtagaggaaggaaggtggagggtagagaactcctccagccggcaacttccccagctctgtagcttgcattgtggagaaatccagaaactggcccttgagagctaccccagagagcagtgctgagggaggggctgggcccgggggtaggtataggggctgtgatctgtaagggtgcagtgagggtgtcccagggcggaagcctccactgtttggatgtaattgagagtccatggctcccccagagatctgagaactggaaggcccagcactgccatagaaaacctcaggatacaggcgctggcctgaggagctgggctccgggacacagtgcccagaatccaggttcttggattgtggctcagcagaggcagcagcactgggaagcagctcccagtctcgtgatacaggaatggcctcagtgactgatgctgttagctccttctctgctttcaagctgtctcctaccactaggcgtaagtctgagtcctgtgggcgtga

SEQ ID NO: 125633 - DNA, 635 bp, Homo Sapiens
tttcatattcaagcacagtataacaaggccagagtgcctgctggacaaggtccctgagttagggcatgctctcttctagtttttctttctatacatcaccacctcacagatcaccatcaccactgtccattcacatggaggtaactcctttgagtttccactgctatgcccttctgtctcttatgccaaacggcacagatagattacagacgaatgattgataaagacagatatatagatgatagataaaaatggactgatagattatttaacaatagatagataagatgaatttagatgaaagcagaattggggaagtttgagaactaccaataacatcagacattaggatacgaatcaaggtatttctcagaacagaacacttactgtaccacataagcttatttatcttatatgtacattggtatgctgtttctgaatttttcttaagaccacagaaagacagtaactatgttttagtgatggtatgcactacaagaagtgcaatcatgctgctttcctgcatgatcatcatgggagttgacgtggaaattatgagaaatgtgaaaaaacataccatttgaatcaaatagataaaattggaagattcacatcatcttcctcgaattctgaag

SEQ ID NO: 125634 - DNA, 3052 bp, Homo Sapiens
tttttttcatggctgtggttgtaggaaccaccctacagcctagaagactttattaagatcttattgcttatgcagttatagagacactgattgagctacaggtttcctgtacctggtctcaggtcactctgtgcagagcttccccaggctgttgggagctgggagactgctaggcaggggcaggccccagagtgggaagcatggtacctcctaggagcctcagagtgggtagcgggcttcaagacagccctcagggtgaacagagaggtcaggagtgtcggcttaagccagggcccaggggctacattccctgagatgagtcaagcccagccctctctggggtttccagaacaaaggctaggtgtggggagcagcactgtggagagggcagggagcatgtctctaggcattgctggaactggaggagactgtcagagtggtttgggtaatggttgtataatctgtggcaactgggccttcttgcatgaaagtggaagggtgaggatcccttatggaagagtcatgcaccatggctgggctggactagccagctccagtggctctgctgggtgactaaagtaggcaaggaaagccacttgttgcccacaccccactttcatcaactctgttcatgcaggacaaagcagggagctgcccaacaaggatggggttatttctcaggcctaggtattgatgttaccttaattctttagtctggaagaacttggttgggggtgggggatggtaagcatttccttaaccaaacccacacttcacatctcctaggggtaccccttcatccaccaacctccagagaataacctggctgccctcacttctccagcttttctcacaaggcacttgttacagggctgctgatgggagagggaggaaggcctgggagggggatctggtggtggcgcccaatctacagggtccggaatcagggtggaagttgtcagggactagcggctgccatagtacaggcgcatggccaggccaatgagcaatgtggccaggaagaaggcggctgtgagctgcagccgtagcaggactgctgagagcacggcgttgaccaccagcgagcaggacaccacaaagaggcgtgtgatgctgctgccatgcttcatgacagcagacatgagcagtccatttagtgcctggctcagcaccacgagtgctgcccatcctgagaaaccttccaggaggcctgggccagagccgccgccagcatgcagacctagattcagaagcacaccaaaagtgtaagaggaagaggttctgaagtgccaggggcagccgcctgtcgcttcaatgagcagctctgtgtacactgacgacaagccctgagatgaggcagtacagaatgaggagcagcaggcctagcggagtgatatgcacggggcatggggctggcagcagctgctggagggggactgggaagggtgttcccgggaacttgaaggccccctgctgcatagcaggctcccgcagccatcagcagcagcagcgctaacccctgacgcacagagaggcggtgccggaggcagaggcagtagagcacagctgtgcttccaatcttgagattactcagcacctggtaggtgctggggtccatgtaacgctgaagatagatcaccaggttgttgttagcgccatagagcagggctgatagtgcgaagggagcagcctggcgccagggtgggggcccctggggccatgcttgccagcctaccagaagggagaaggcgcataacagtagcttggtcagctcagtcagcagcacggctgaggagggccggaagggcactcggccgtccacatggcacagtgccagcaatggggcatgggcaccgtacatggcagtggataggagtagcatcagggtccagcgggcctgcctgggacggcccaggcctggcatacccccatcctctacactcatacccacacaagaccctgggtggctaaggggcagcagggattgcaacacgtttggggaaaatcaagttatggagccagctcccaggaaggagaagccgtggaacattgccagagagaatactgaggatcagaggcatctaccaactccacagtcagggcttgaagagtaaggggctggtggtccttgaagccacagtcttggggcgagtcccatggagctaggaaggggaagaaggaatccagggtgcaggctgaggaactactgtccacaatctgcaggaagggaggcaaggatgaaggtggcaggaaagttggagatagcaaatggatgacagctggggaatccagataaagtgtctccacctgaaggctgagctgctcatcctgcctcttccatggcacctagagctagtcgggccccttgcgtagcaactgcaaatagtcccttaatgtcttctccacgttgggcacagcatatgcctgagccgcatagatgccagtgcaggtgcccacagcaaagcccaatactgctgatgccctcagtttggccaccacatagccagccaggaatcccttgaggaacggggaggacaacagcgagccatcctggcccactccactgttgacttcgtcttctacacgccgctgcaggctttccagctggttcttgagaaatgccaggtccttaagcttaggcagagaatccttgtcatccgccatcttccccgccgaacttgttgcgcaggcgcatccccgcctccctcgtgccgactgccccggccatctttacggagggcgaaggcacttccggagcatttttggaaagggggaggtgctttcctagtggccaagtacgcctctctcagatacttccacgtgaccccctcccgtcgagtctcaggctgcgtgtgagcgcactcacgaccggggcgcgatgatctcactcgtgcgcgagtgcgcgcggcgcatgttcggcgtgtcggtcttcaggcgcctgatgagttcatagttgggcggtggtgtcagcggtttcgctggcgttcgtgggcctcccccggacccacacacgcctcgtgccgaattcggcgcgccgtcgacttcatactct

SEQ ID NO: 125635 - DNA, 914 bp, Homo Sapiens
ggctgcagtcactcgaggagctactatgtatcatacacagtagagcgaggcatcgcgtcactgccaggcagcatggcatgcacctcctgcagtgatagatagctcagttcagcggctgctggacgccagctgggcataccccatctctacatcataccacacagaccctggtggctaagggcagcagggatgcaacacgttggggaaaatcaagttatggagccagctcccaggaaggagaagccgtggaacattgccagagagaatactgaggatcagaggcatctaccaactccacagtcagggcttgaagagtaaggggctggtggtccttgaagccacagtcttggggcgagtcccatggagctaggaaggggaagaaggaatccagggtgcaggctgaggaactactgtccacaatctgcaggaagggaggcaaggatgaaggtggcaggaaagttggagatagcaaatggatgacagctggggaatccagataaagtgtctccacctgaaggctgagctgctcatcctgcctcttccatggcacctagagctagtcgggccccttgcgtagcaactgcaaatagtcccttaatgtcttctccacgttgggcacagcatatgcctgagccgcatagatgccagtgcaggtgcccacagcaaagcccaatactgctgatgccctcagtttggccaccacatagccagccaggaatcccttgaggaacggggaggacaacagcgagccatcctggcccactccactgttgacttcgtcttctacacgccgctgcaggctttccagctggttcttgagaaatgccaggtccttaagcttaggcagagaatccttgtcatccgcctcgtgccgaattcggcgcgccgtcgacttcatactctctccccctaaa

SEQ ID NO: 125636 - DNA, 1268 bp, Homo Sapiens
  misc_feature (100)..(157): n is a, c, g, or t
gagatggcaggggtctcatatgttccccagactagagtgcagtggctattcacaggcgccgtctagcgcactacaaccttaaactcctgggctcaagcannnnnnnnnnnnnnnnnnnnnnnnnnnnnnnnnnnnnnnnnnnnnnnnnnnnnnnnnngtctgccaatactttctatcagtctgtcatgtttactgtcttttcctccatacagaagtttttccttctcagttgggtcaagtccattgacctttctgttacagcttgagttttgtgtcttacgtagaaaaggtgcccctgctctcactttctgcacagctatcaggtccagctcatagcagttcttctatttatccatccactgccccaggagctgcctgggcattcactgccccgcacccctctccagccccaaggtagagctcgggccctgggagtcccaggaccatcccggactggggagctgcttggtgtccagccccgggctcaagctcttctccagctctgcagctacctgaggggtagcagcccggatagcatcctggatgttggttaggtcccactgggtcctcaggagggcactgtctagcgtgaagaagccgtcgcgcgtgcgccgcacttgggtgcagacagcagtggtctttagttccaggccgatttcatgaaccaacttccgcagctctttctgcgtctcatgcatgcactgcacctctaagaggaattccggaggtgcaaagtagaggcatcggatgccagttatcagcatcggggacttgttcatgggccggatcaggcctctcacggccatctcataggcctcctgggtcttcaggtcgaggttggagtacatcaccagggccttctgatgggagccttggataacggccagaatgcggtccagcttctctctggtcacgtggtcataggttgtcttctctaccagcctcccgtcctcacggaagtcatctgtagctttgcccaggaggccacgcactgtgtaatccttggtaagatgagcattgtacatatcggtgaggagcctgcatccatgtcccacgccgagcacaagtactccagaagcctgggcatccaaccgatgtcccacgccaaccttgagatgggcgaatgctggtccacataccttcagaagttgtagctccactgtatcccgcaggtgcttccattttagccccgggggcttatagaccgcgaaaagcccatgcagccgcgacaagccagcctcgtgccgattaaacgcggggccctctgg

SEQ ID NO: 125637 - DNA, 469 bp, Homo Sapiens
  misc_feature (29)..(29): n is a, c, g, or t
  misc_feature (251)..(308): n is a, c, g, or t
  misc_feature (408)..(420): n is a, c, g, or t
ctggagaggggtgcggggcagtgaatgcncaggcagctcctggggcagtggatggataaatagaagaactgctatgagctggacctgatagctgtgcagaaagtgagagcaggggcaccttttctacgtaagacacaaaactcaagctgtaacagaaaggtcaatggacttgacccaactgagaaggaaaaacttctgtatggaggaaaagacagtaaacatgacagactgatagaaagtattggcagacnnnnnnnnnnnnnnnnnnnnnnnnnnnnnnnnnnnnnnnnnnnnnnnnnnnnnnnnnntgcttgagcccaggagtttaaggttgtagtgcgctagacggcgcctgtgaatagccactgcactctagtctggggaacatatgagacccctgccatctcnnnnnnnnnnnnnttctcaataaactatgtgcccacgaaaattaactattaaaaaaaattgt

SEQ ID NO: 125638 - DNA, 374 bp, Homo Sapiens
  misc_feature (218)..(275): n is a, c, g, or t
cagctcctggggcagtggatggataaatagaagaactgctatgagctggacctgatagctgtgcagaaagtgagagcaggggcaccttttctacgtgtgacacaaaactcaagctgtaacagaaaggtcaatggacttgacccaactgagaaggaaaaacttctgtatggaggaaaagacagtaaacatgacagactgatagaaagtattggcagacnnnnnnnnnnnnnnnnnnnnnnnnnnnnnnnnnnnnnnnnnnnnnnnnnnnnnnnnnntgcttgagcccaggagtttaaggttgtagtgcgctagacggcgcctgtgaatagccactgcactctagtctggggaacatatgagacccctgccatctc

SEQ ID NO: 125639 - DNA, 930 bp, Homo Sapiens
ggtagaaatatagaacagtggtgctaaaaagcaggctggtacggtccggaatcccgggatatcgtcgaccacgcgtcgagcgggtgctgtgatcttcaaagtatggggtctgctggcttgtcgcggctgcatgggcttttcgcggtctataagcccccggggctaaaatggaagcacctgcgggatacagtggagctacaacttctgaagggtctcaatgccaggaagcctcccgctcctaaacagcgtgttcgcttcttgctgggccccatggaaggcagcgaagagaaggagctgaccctcacagccaccagcgtaccctctttcatcaaccatccactggtatgtggaccagcattcgcccatctcaaggttggcgtgggacatcggttggatgcccaggcttctggagtacttgtgctcggcgtgggacatggatgcaggctcctcaccgatatgtacaatgctcatcttaccaaggattacacagtgcgtggcctcctgggcaaagctacagatgacttccgtgaggacgggaggctggtagagaagacaacctatgaccacgtgaccagagagaagctggaccgcattctggccgttatccaaggctcccatcagaaggccctggtgatgtactccaacctcgacctgaagacccaggaggcctatgagatggccgtgagaggcctgatccggcccatgaacaagtccccgatgctgataactggcatccgatgcctctactttgcacctccggaattcctcttagaggtgcagtgcatgcatgagacgcagaaaagagctgcggaagttggttcatgaaatcgggctggaactaaagagcactgctgtctgcacccaaggtgcggcccacgcgcgacggcttcttcacgctagacagtgccctctggaggacccaggggacca

SEQ ID NO: 125640 - DNA, 1780 bp, Homo Sapiens
tccggcccggtttcactgctacattttactttattttgttgtaaggaaaaccaattgactaagttgtccccaaaatgttagtgttcactgatcaagaaggaaatgaggtcagaaggcaaacttttcacttcttctcaaacataaattgcaagtatcacagaaaattgtaacaacacatgcaacacgggatggctttcaacacacagagagcctaagcaagaagagtgagtactgaaggtctacagaggtcagactgggagcactaccacaggaagtttgaatctatccacgcagctctttcctcccacagtccaggctcaacacctcttcctattccaaggtggcttatccatatgcagaaatccaggctgttccatatacattaatacttgcccagctgtgtttcacgaggcatctccataagccaagccccgactcaaattctgtacaggaagttcccgttgctgtcaaagaactctcggcccctctgcactactttgctgctgaagttatctggctcctctgccttcaactcctccagcttctgaccacttggcaacgcaccactgccagttcctctggggctctcagaatcactggagtacttctgcagctctcttggatgacctaggggtgcagcaacaggcacaaagctctcctccaggtcctggatttctttatttcttcccttccttctccttggtgtatttgtcctgtgagtgtctgactctatcactttcaaagctgtgctgtgatttgggtctttagatgaggcttcatgccctggcataagcaaagagcctgatacagagtggcctgcagggagcagctttgaggtatttccagagccccggaggtgctgcagcgagtgggcaagcccagctttcttaaggactttttgatcctgcttcagcttctgctccaatgtgggtaaaaacttgctttttaaaactcttcggatcacatcagtgctgacatcaaagccttcagccaacctgggaactgaccaggactctggaaattcctcatgtaaataccgtatctgctccatggcttcccacgtcagggtcctgggcggggcaccaggcgcctccatttgcctccgaattttctggaatcggattgcttgtttctgtcgtttcagggtgctgggggaagagaaccaatggcagaagccatgcgtggaagcagaatggatgtttgaagagcctcaggctaaatcatggagcgcccagccctcttctctttgatcgcaagggcaaccgggccatgttgccggcttagagctgctccgtacacccagaaagctaacacctagaacaataactgcctgtaagcatgccgaactctctaaactgatgatgaaatacgtcactaatgaagggaccagtggtcccaggggagctgaacacctgacgctgcgcccctaacaacgggtaagaagaaacaagggccgctgcgcaagcagcggcaggacacccggcgccaagggggcgcggcctggagcgccggggcacgaggccctgcttcaagctgagggcccggggagaagccggtacctctccacctcctgcagctcccgttcctccggctcccagtcggaatcggggtccggctcccggccaatagggcctgggcccgccaccccccgggtcgcgaacccacagcgagtgacggcggcgcaaacgcgcccgcccagcaagagactcagggtaaccgccatgtcgacgcaagacgcgtgggtcgacgatatcccgggaaatccggacgcgtaccagcc

SEQ ID NO: 125641 - DNA, 1034 bp, Homo Sapiens
ttgaaatatagaaccagtggttcaaaaaagcaggctggtccggtccggaatcccgggatatcgtcgacccacgcgtccggccgactgctgaaggctggtttgcggtcgacatggcggttaccctgagtctcttgctgggcgggcgcgtttgcgccgccgtcactcgctgtgggttcgcgacccggggggtggcgggcccaggccctattggcgggagccggaccccgattccgaactgggagccggaggaacgggagctgcaggaggtggagaggtaccggcttctccccgggccctcagcttgaagcagggcctcgtgccccggcgctccaggccgcgcccccttggcgccgggtgtcctgccgctgcttgcgcagcggccttgtttcttcttacccgttgttaggggcgcagcgtcaggtgttcagctcccctgggaccactggtcccttcattagtgacgtatttcatcatcagtttagagagttcggcatgcttacaggcagttattgttctaggtgttagctttctgggtgtacggagcagctctaagccggcaacatggcccggttgcccttgcgatcaaagagaagagggctgggcgctccatgatttagcctgaggctcttcaaacatccattctgcttccacgcatggcttctgccatttggttctcttcccccagcaccctgaaacgacagaaacaagcaatccgattccagaaaattcggaggcaaatggaggcgcctggtgccccgccaggagcctgacgtgggaagccatggaggcagatacggtatttacatgaggaatttccagagtcctggtcagttcccaggtttggctgaaggctttgatgtcagcactgatgtgatccgaagaagttttaaaaagcaagtttttacccacattgggcaggaagctgaagcaggattaaacagtcctaaggaaagctgggtttgccacttcgctgtagactccggctctggaatacttcaagtgtcccggggcctcgttacggctggtttccggta

SEQ ID NO: 125642 - DNA, 2083 bp, Homo Sapiens
  misc_feature (68)..(91): n is a, c, g, or t
acgacggccagtgccatgctcaaattaaccctcaataagggaataagcttgcggccgcctgctcaggnnnnnnnnnnnnnnnnnnnnnnnngaggactgaaataagagcatgatatttcacaatgaaaataaaaccaggccacgcaagaaccactgcggcctgcccgtgacttggcttcccctgcccagcatcctgtcctccctggtccatctctggtgaggacggctgggagtgggctctgtggctgctagcagggggcagggaggagctgggactgtgggtcgtcctggcccgtgggggctggcggggggtgttcgggccgggcgaggccccgcaggacccgcagggtggccagggccaggcccacgagcaggcgcagcaacaggaaggcgcagggcacggcgatctgcatgaggtggaagatgcccacactgaacctgctcagcaggcaggtggaggcgaaggccagcaggctggcacaggggtacagcgccagcttggcgaacatgagcacatgctcccggccgccaaaccacaccgagggctgcagcgtctccgcctggtgcagcagcgccgtggtccacatggccagctggaagatgctggccaggaagatgatggtgcagctgacacgcacgcgctccagctcatcgcggggctgccgggcgaaggccgaggtctgctggtaggctagtgggaggccacccacgaaggccagcgagagcgtgttcagcagccccatggcccgcgtggccttgcgcacatgcaggaagagtgagtggtgggcgaacacagcagtcccactgtggcgaaggagccgaagtacgccaggaagcgcggcccggtcgcactcagggcggccacgaggctgccgctgaacctctccttcacatccttggggtccgggacgttgtcttcgcagatgtccaggatgagaagcgtggccacgatggcgtagactccgtcgctgaaggcttccacgcgctccttgctgagtggctcgtggaggtcaaacgagaagacttccactgggtgagccgagggctccctgtggcccaggagcctgtctctgcaccagccggtgaccttgctgacataggggaggaggatgacagtcaccatcagcaggtaagacaaggggacaaagaagagagagaagatggccgctgcaaagcacagggccgggccttggaggacgatgcccaggacgtgtcgtcggtacagagccctgtgggcagagcgctggatttgcgggctcagcaggtgcgggaagtgggaatgcgtacccccacaatcagtgcctgcacgcccccgatggcgatcccacacaccccgaccaagaagatgcccagaggcacatcagggaaggtcaccattaacgaaaacgtgtaaggcaggaaggtgatggtcatcatgcaggccaggttgagcagggcaagtgtgtcgtctgttttcccaacaacttggaacaaccttgtgtgtgctgcccaggccactgtcacgatgagaaaggtcatcaggtagacggcaatccgtgttgccagaagcctctgtacacttctgtcgaactgctccaggcctgcaggagcagccggggtgggagtgtccccgctgagacggggcgctggccgcgtttactcagagcagctacgtaaggggcctgcctgctggggcagctgccctcccgcagaggaaacttctgtccttggggcaggcccggaaccttcctcttccaacctgtcctctggctcacttccagggtgctgcctttgtccactgttctggggagatctccgtgtgggtcacaggcaggatcatgacggtggcgatgatggacagcagggcgtcactgaagctgagcatgcgttgggagcactggatcccctccccagcgtcctcgtctctcctgcctggggggcagtcccccggtgtatccacgtgcctgctctggggtccggggctgggacatggcggggccgctgcctggcggttacaggagcctgggcgggaatcgcctcggcgactgttccgcgcgcctccgcttgagtcaagcccggccgggagctatcccgagaattccgg

SEQ ID NO: 125643 - DNA, 816 bp, Homo Sapiens
ggccgccacgaggctgccgcctgaacctctccttcacatcccttggggtccgggacgttgtcttcgcagatgtccaggatgagaagcgtgggccacgatggcgtagactccgtcgctgaaggcttccacgcgctccttgctgagtggctcgtggaggtcaaacgagaagacttccactgggtgagccgagggctccctgtggccacaggagcctgtctctgcaccagccggtgaccttgctgacataggggaggaggatgacagtcaccatcagcaggtaagacaaggggacaaagaagagagagaagatggccgctgcaaagcacagggccggggcttggaggacgatgcccaggacgtgtcgtcggtacagagccctgtgggcagagcgctggatctgcgggctcagcaggtgcgggaagtggaatgcgtaccccacaatcagtgcctgcacgaccccgatggcgatcacacacacacagaacaagaagatgcccagaggcacatcagggaaggtcaccattaacgaaaacgtgtaaggcaggaaggtgatggtcatcatgcaggccaggttgagcagggcaagtgtgtcgtctgttttcccaacaacttggaacaaccttgtgtgtgctgcccaggccactgtcacgatgagaaaggtcatcaggtagacggcaatccgtgttgccagaagcctctgtacacttctgtcgaactgctgggcgggaatcgcctcggcgactgttccgcgcgcctccgcttgagtcagcccggccgggagcttgacagccggaagttcatcgcaagcccggcgac

SEQ ID NO: 125644 - DNA, 772 bp, Homo Sapiens
  misc_feature (149)..(149): n is a, c, g, or t
  misc_feature (560)..(560): n is a, c, g, or t
ccgcgtttactcagagcagctacgtaaggggcctgcctgcctggggcatgctgcccgtccacgccagagggaaagcgttgctggtccctttgtggtgccagggcacgctggataccgttgccgtcgttcgcgacgcgtgtgccctgctngggcttcaactgtgccaagtggtagctgcccatttgtcccacttgaactcgggaaacagagccctaggagcccagtgctcccaccctgcccaaggaggccagggacactccgccggggtgagcacaggctgagcaggacttgttggctccctccctttccaaggaggcccccggcctcccgcctctgcctcctaagcctcagaagcttcgaggcgtgcagggtcagcaccctggtgccaggttgagcctcggggaccctatatcttcgcagggccacaccacgcagagcacagcctgccccgttacctgttctggggagattctccgtgtgggtcacaggcaggatcatgacggtggcgatgatggacagcagggcgtcactgaagctgagcatgcgttgggagcacttgngaagttcccccctccccagcgtcctcgtctctcctgcctaggggggcagtcccccggtgtatccagtgcctgctctggggtccggggctgggacatggcaggggccgctgcctggcggttacaggagcactgggcgggaatcgcctcggcgactgttccgcgcgccatccgcttgagtcagcccggccgggagcttgacagccggaagttca

SEQ ID NO: 125645 - DNA, 1633 bp, Homo Sapiens
  misc_feature (291)..(300): n is a, c, g, or t
ggcataagatcacactttagttcagagacacatttgcataaatacttgaaatggatccacccctgcaggtggcagcctgagaacatgtggctctccaaaccctgcgacgctgcggccctttaggtgatggattttaacactgaagacagtcgtggtcattcttgaagacagcttggggtccagctttggagcctgctttgacattcaccattgactccctgccccacgcctctcttgtactaattttttcccctgtgaggtagattatttatcggggaaaccagatagaannnnnnnnnncatttaagtttgctagtcctttgcaaacagactgacgctgagtgtcctgtctgagtcaataagtgcacttttaccttttaacctatgccctctacttgaacccgagcaaggtccagtccactggacagttgatgatagggtctgccgccccataccctctcctcttcccccttaggaatttgtgcagtactggaggggttgcggcaatgggaggcctgggtgggccgtgctgccttgatatggccaagggacccagtcaccacagtggagacccttgtctgcacctcagtaccgcatgtccaggagcacaagactggcccctgcccccctgaatcacagggggcacagctggctttcgcagggcttggcatcctcgggtttcagagccttgttgcaggtggcagaggcctggccggaggggtccctgcactctacagttcgcctctgccagccggccccgcaggtgctagagcactcagaccagtcccccagcacccactgtgcgtggagcagcggctggatgatgttggtggttgctctctctttgctgctctgcatgctaaagtccacgtcattaggtaccaagaaggtgtatttgacttttggggggaagacctcgccagggactgtcaggagctgcactgtcagaggctctggcaagggccggaagctctgcaggcgctccagggtggcgatggagccgctgtacttcaggatggtccccttcaccaagatgtcctgctctatggcagagatggccaggttgccgttgagcaggtactgcccatcagccgtcttcagcgccaggtagttcccatcgttctgcacacccgggtggctccgctgcttcacgtcaatattagtggcaccagctgggatggtgacaatgtcattgtagccataattggtgggggtgagggacccggagaccttcctgcaggagttgcctttgcccccacacaccccgcatttgtccagcttccgaggcgagtccaccacatggtcacagccggccttgacacactggccacggacacagatggccagtgtttctggcccacacagggtgccatcaatcaccttggcctcgaacactttgaactcgctcctcccccgggctcggcagaacaacttgcagcggtcccggggggacaccccagcatacttggggacccactgcaggagattcccgtccatgtcagtgtaattgtaggcattatacttctcacactgctgctccctgaagcttttcccgtcaggggggcattcctccgtgtggcatgacctcgtgccgaattcggcgcgcctcgacttcatactctctaacactagg

SEQ ID NO: 125646 - DNA, 894 bp, Homo Sapiens
  misc_feature (93)..(93): n is a, c, g, or t
  misc_feature (152)..(152): n is a, c, g, or t
  misc_feature (158)..(158): n is a, c, g, or t
  misc_feature (194)..(194): n is a, c, g, or t
gctctactgctttacggagtctcagatgaaagtgccctacttcttccctagatggatatgaggtggcatgagctgtggctgtgctatatgcanggaccatcacacatgagacctgtcgcactcagtacgcagtcaggagcacagactgcccntgcccncctgatcacaggggcacagctgctttcgcagggctnggcatcctcggtttcagagcctgttgcaggtggcagaggcctggccggaggggtccctgcactctacagttcgcctctgccagccggccccgcaggtgctagagcactcagaccagtcccccagcacccactgtgcgtggagcagcggctggatgatgttggtggttgctctctctttgctgctctgcatgctaaagtccacgtcattaggaacaaagaaggtgtatttgacttttggggggaagacctcgccagggactgtcaggagctgcactgtcagaggctctggcaagggccggaagctctgcaggcgctccagggtggcgatggagccgctgtacttcaggatggtccccttcaccaagatgtcctgctctatggcagagatggccaggttgccgttgagcaggtactgcccatcagccgtcttcagcgccaggtagttcccatcgttctgcacacccgggtggctccgctgcttcacgtcaatattagtggcaccagctgggatggtgacaatgtcattgtagccataattggtgggggtgagggacccggagaccttcctgcaggagttgcctttgcccccacacaccccgcatttgtccagcttccgaggcgagtccaccacatggtcacagccggccttgacctcgtgccgaattcggcgcgccgtcgacttcatactctctccccctaa

SEQ ID NO: 125647 - DNA, 919 bp, Homo Sapiens
  misc_feature (237)..(250): n is a, c, g, or t
tttggcaggtgaatatggttttattcagcaacagctctcatcaacagcttacactagctctctcacactgtccgccctgccttggctgcttgagcccgtggcttccacacacagctgtgcagcctgctctcccttgccttcagggtcagcagcttaactttttctctctctgggcgtgagcaagctgagctgtgtcctggctccttcctgtccatctgcaaaacggacagctttggnnnnnnnnnnnnnntactgggcgccagtgtgcccaccatgtcaagccatgttgagctgagccgaaccccaagagcccctgtacagcattagcaggacaattaccttttacagacaacagtggctcagaccaagtatgaacttacacaaacaggttatataacaagtggaggtgtgtgcctgtgcaccaaacccactgagtcatgcaggcatggatctctgccttggcctattccttgaccaaagcacatccatgtaccttacacctgggtctgaagtagggttgccagatgaaatacaggacacccagctaaatttgaatttcaggtgaacaacaaatcattgtttagattaagcatgttccatgcagttctggggacatacttaaccttatagatttatttcatttatctaaaattcaatgaactggggcagtctgtatttgctaaatctgctggccttagtctagaggcagtggtatgttccagctgactccaatcagctcatgagagtcaactgtaaaatatttaggagatttatgagctggttattaaacccctggtggcttgaaatcaaccatggtgggagtatttacaccacagaaattggtgactaccacacatcagtgtttttcctttacagagctggttatagaacattccccctggctgggtgcggtggctca

SEQ ID NO: 125648 - DNA, 629 bp, Homo Sapiens
ttttgtaggcaggtaaaagattattttattcagcagcagctctcatcagcagcttcctcacactagctctctacactgctcacctttatctcggctgtttgctggggctctgtggctcccgccgcccccacacctgcagctgcatggccagctctcccttgccttcagggtcaacagcttcactctttctgtctctgggcaccagtgcgagccgtgctgtggctcccctctgtccacctacaagaaggacagctctggttctctttctctctttctctgggtgccagtgcacccgctgtgttaagccatgttgagccaagccgagcctcaagagcccctgtacggtgttagcaaggcaattataccttttacagacgatagtggctcagagccaagtatgaacttacacaaacaggttatataacaaatggaggtgtgcacctgtgccccaaactcactgagtcatgcaggcctggacatctgccttggcctattccttgaccaaagcacattcatgtaccttacactccaccctctaggccgagggagacataggcctaggacacacaggtttgatacacaggtttggcacataggcctgacatatcaactttgggcatgcaggcccg

SEQ ID NO: 125649 - DNA, 609 bp, Homo Sapiens
acacctgtagaataaggcttttactgttctagaaacaatattccagaagatgaaatcatccaggatgccccaaaaatatttatttatacaaagattttgagagtaatattcatacttgtctttatacctcagtctatgcgtctggggccaagtcactgtgtggcacatgtgcagcttccccgaatgcctcacatgttgtagcacctgcttccaggaacaccaaatgaacacagggtcttggaggggaagtgggggaagaacccataatgccccaaggctgcatggaaccacaatccagaaatgtgcatcctgacctggaaggcgtctaaccaagtgtccaaggggaaatatgatcgagggagaggtgagaggagggacccagagggcagacaggagagggttgatttccaccctttcttctgcgttcagcatatccaaaaggcccaatacagttgatgggccaggaactgcatgacctggattttctccctgtagtgacccacgatgttaattgatgtagaggacagtttgcaaaagtaatagatttgcccttaatcgcagacagtatgagatacaattctgggactttgtcttcgtaacctgtcttta

SEQ ID NO: 125650 - DNA, 665 bp, Homo Sapiens
  misc_feature (541)..(541): n is a, c, g, or t
  misc_feature (651)..(651): n is a, c, g, or t
gcctctggaggaattaattactcttttattagcacaaaataacagcaacctagcagccgcacggcccgagaataagttaaggcacagagcaggcgacgggcggctttcccagggccaggcctgcatgccccgaacttcctgagcaaactccctaggggctggggtttcgagggtcctggagggcctcttcccttgagatgaggggaacggaacagggcaagaggggcgcccccatgggcgcaaggggtccacgctgcgccgcgatcacttctcgaagtagggcaggtagaagaactggaagccccggtggcccttgaccgcgcagtagatgaagatcacgtgatagactccaggcaccaacaacaggaagcccggcacgaagaagatggcgctggagacacctggagagggggtcgcctccagtcccacgccgaccaggatcagcaccagccccagcagcaggagcaggaaggaggccagcaccactcggcggttcttctggatcaaagggtgttgggtccagctgcagcaggtgttgtangagcgctgggtgctgctgctgatggtgctgaaggaccactgggagctgcggatggaagttcggctggaatccctggtgccgactcccccatccggctccggagaggctgngctcatcctcatcg

SEQ ID NO: 125651 - DNA, 1029 bp, Homo Sapiens
  misc_feature (98)..(98): n is a, c, g, or t
  misc_feature (433)..(445): n is a, c, g, or t
ggtggagggggggtgcggagaggcgtcgccgtggcggacggttagtccatgcgggtcgcgagggattttggttcgttttgtggtcgttcctccgtgtnttgtctgttatgccgtgtatagggatcgtggtgtcgagaccgggggcttgggcagtccctcacaatgtctcgtggttgccgagcctttgagctgctgggcggggctgtctcttctggtggggggcctcggctacccaacaagggcacagcggccgcggacggtgccggtgcgctccattacgtcttgttcgaggtttatcgttggccgccacctgcgggcgcaggcgccgccgttcggtctgtgggtgttggtggccctgtggtggccgcgcggtggtctggtgcctcttgctccttccgatagtgttttggcgtcgcttcttctgccccgggcnnnnnnnnnnnnnccccagcccggctcacccaccacctgagctgaaggtgccctaggcagagaccctccccaggaagctcaccaagctctgtttccagagcaaggcactgagcaggccccagccccagcagcaggagcaggaaggaggccagcaccactcgggcggttcttctggatcaaagggtgttgggtccagctgcagcaggtgttgtaggagcgctgggtgctgctgctgatggtgctgaaggaccactgggagctgcggatggaagttcggctggaatccctggtgccgactcccccatccggctccggagaggcctgggctccatcctcatcgttctccaggttctggtagcgcagccgggactgcttgtcctcgtcagccacctcgaaccgggcccgacgctcgaagtgcagcggcccaaagcgcgcgaccccgctggactcgggcccagggcccccgtcctccagggacagctcgaaggcatcatcaatgctgaactggggccgggcggcgctcatggccccggcccgctcaggcgccgtgcgccgccgcctctgccgattaacaccagccttacctaggacttattt

SEQ ID NO: 125652 - DNA, 1420 bp, Homo Sapiens
cagctgacagcgtcagggaaaagaggtgaactgtgcaggactagcactgggaaaactggcaatttgtgttgtcaagtgtgtgcctgtgcaagtgctccaactgctgctttgggtgaacttcaggccttgcctcttccctatcaccatcgtctccatcaacaccctctttcttttccagcctctcctggtgccttaggaatcagacgccaattaaccacagagcccagcatgtccaccttcgcttttattgagtagttagtgttctcaagctggctcacacccatgcggtcagctggggcctagggtggctctttgcaaagctgaggggcaagctaaggaagccaggcaggtcaggggccctttcggccttctcaagcctccacctgagttctcgtcaatgccagtctccctggtatgattggggacattatcagagaaacatctaatagcgcacatctgggcacccacactctgcttcagttgcatccatcctcccaccccaaattcaactcctgacccaatacaaaagacttttttaaccaggatttcttcttgcaggaaagctgacttggaaacacggggaggtggcagggaggggcaaaaaggactctggcaagcagatccacttgtctgggtccctgcagtgaagaacccaagatccaggtacctcagcctggaagaaaccgtgcactgcaggtcttcccttctatcaaaactaaaagcaaggaacagaagtcaattgaaaccccaggtcatcctacccaccttctggcagtctctggataatgatctaaggaaataagcttacatttataattagaggataatttggagaatttatactatttacacggaccaccctgcaaagatcagggaaggtaagagactgctgggcagagaatggaaacaggctggggggttcctaatctcttttcaccattgcctttgttgttcccacccttcagctcctggcagggacagcagaggaatcagatactcttggggaacacaaggtcccagcagtggctagggtgtgactgctacttttgcataatcaggcagcagggagctatgaggagcagaacagtccctgcctgctgtcctcactcagaggcttggggtgcactgagccttggagtgcccgggatggtggacagcttgagcacaggggcaagggcagggctctactgtagctcaggaataaactgggaccagttgatgttgtcagggcccagtgggtcctcgtccaggccaggaaagctgatgtccagcaggatcttgctgaggctgtcattcattgtgtccaggaccaggccttctgtcagagaacgattggctgcaaggccagaaacctgtggctccggggagcctggcttggagacgtctatatctgagcctcgtttcggaaacgccacccagg

SEQ ID NO: 125653 - DNA, 767 bp, Homo Sapiens
gtaaacgatgtgtgcagtgtaaatgtgtaatatgcatatatatattataccaccatggacttactttcacactggaaatttgtgtttttttccacagaggaaccttttaacagcagaaaatatccggtagcaaattgtcttagggaaattactacactgttgtaacaaaagggctggcaagtgactaaatgttcattaccttttggttagcgttgctatcactgtagctgtgctgccttaacattgagagttgagttgtggacttagtcattgagtgaatgttgaactttcttccttgaatcagcgttagagtcaaatgtgggtttaatgtgaatgctaaatgaatatgcaacatagtttcaaatggaacatagaaatttcacttttgaaaataataaacccacaacctaattgcatggttttgggctgaccgtcctgtctcattcatgattttactccctgcccagcttgcagatacatgcatttgaattttagtagtctgtcatatttaaaatcccacatatgtgagttaaatatgcaataaagaatacgccttgctgattagccacacccaggcaatttaatatccatggtcttctataatgtttataccacattgtaaatattcagagaacttgttttaaagtttatgctttctgattctgtgattttcaaaagaggaatttttttggaaattaaggactatcgtttgataattatatatgtaattaagatttagccaagcattaaattaatttttaaataaa

SEQ ID NO: 125654 - DNA, 1699 bp, Homo Sapiens
taacggtccccgggccgaaacttcccctctgtgggggcggtcatcactccttgtgaatgtagcggcgccgaacgagtaaaaagcgcgcgggacattgtcttagtgggcccccccaacgaaaatggggcgggcaaggtgttacggccttaagaccaaggatgggtgcggacccacatatgcggcgagaaatgcgtcctgcacgtttttctttctggttcaaaacatttgcttttattgcgttatatacattctgcagctgtagaatcagaatctgggggaagccaactgagaccccgaaggcccagcaggagtccatctgaggtacagaacctgtgcttctgccatgttcctggggcaggggcattccatttccccctgatgctttttcttcctgaagagaagtccaacagactgccagcccaggtctgaaatgcaaggtgggactcctgaacacagtcggggggatggggcagaggcaaacagccctcctgtttcacctgcagacagggtgggccagagtgctatggagcagactgggttgtggaagcctcgtgtgctgaggaatcagtccctgcacacaggagcctgtgcgggggccagcacgcatcgcagcctggcagtacagcctgtgcttttccatgcctccggtgccaacaccccgcacgtgccacaccaactgctccacctaacatgctcagtggcacaggctcaggcagcaaacgtgttccaacccacctgggcagaagaggccaggccagcagaccaagtcctgtgtgtacgcgtatgtgtgtgcattcacacccatgtgcaggaagggggacgcgagatggcatgaaacacgggagaagcagaataaacatttcagcctccctctttccccggtccccgccccccacatagacaaggcttttgtcttaagtggaaagcaaactgggagaaacagggaggaatgaggccatctcctgagcagccagctgcaggcctggctcctctgggaacagaaaatggctggtgagggactttgatgattgagtgactctgcagggaatggctgaaaaaccaagaattccagcccggatgagcccccggggaacttcatcagcagtgctttgtcccacagagagcaaaactggtattttcgcaaacaggagaggactcgaggccacagaacacccattcctcttggaccctgaccccaccaacagccccatcccttccagcttgaagggatctggggctcaaggagaatatacattaggttcaggtgacaaataattacacctcaccctccacaggccagcaagaagtcaggaacgctggggcaggtctatcaggcacagttggggtggcacagggcgaggggctggatttgagctggcacagacgcaagagggaaaaggggtcctgagttacatgttcacagagaatgaaggagaaggccctggggcccaccaagctgccagccacagccccgggcggttgttaagaagcatccgcagaactgtaggggaagaacttggcggccttgcttggggtggaggggtttgggcactccgcctcctcgttcagcttgaagaacatctcctgctcccgcttcttctggttcagatcctcttccagagccttcttgcgcggccgaagcttgtcccgccattccttcaggttctggttatggctctcatccagggccttcagtttc

SEQ ID NO: 125655 - DNA, 676 bp, Homo Sapiens
  misc_feature (403)..(403): n is a, c, g, or t
  misc_feature (474)..(474): n is a, c, g, or t
  misc_feature (550)..(550): n is a, c, g, or t
  misc_feature (610)..(610): n is a, c, g, or t
  misc_feature (662)..(662): n is a, c, g, or t
tttcaaacatttgcttttattgcgttatatacattctgcagctgtagaatcagaatctgggggaagccaactgagaccccgaaggcccagcaggagtccatctgaggtacagaacctgtgcttctgccatgttcctggggcaggggcattccatttccccctgatgctttttcttcctgaagagaagtccaacagactgccagcccaggtctgaaatgcaaggtgcttctcctgggctacctgaattctggcatccattgacacgggtcgggacttccgcaggggcacaggcactgccaggccgttctcatttccaggggccacgactgggggactggtggtttggagggatctgtccccagagggctggctgcagggctcattcacactgtcctgagactgngctgggtgccagcgggtggaggtgactcctcgagaggcttgtcagcattgaggcttggcggactcacctcnagagagttctgagtatggttctccagggtggaggcgggcatccacgcgtcctcctcttccccctcatcccggccgntctcgatctcttccatcacctcggcctttgcctcagccaccagcttccgcagaggcttgntactggtgtgctgctgacgaagggattgctcagcagctgcgcggcacttggntcggtttcttggtc

SEQ ID NO: 125656 - DNA, 544 bp, Homo Sapiens
tttaggtctttagtcttcaattttatttctattttaaacagcaactaacagcttggaaatgtccctaacagctaggacccgccccatgcattccagaggctcccccaccaaggctggggtccaggttccaggaattccccctcatcaggcctgatttctctctggagacttgggacagaagaggctgtccagttagaggggaagttggcactaaaggtcaccgtttagaagggttgggctcagacacagctgcctttgttagtcttaggatattttgagatttggtagcgtgctcagattgtgggtatggagaagggttcctgaactcctctccggcctcacttgctcctgggcaagcctcacagcaccccttcctcttgctggctcggcacgctgcctttggaagaggggcacctgataggctgggtactccagcatgcctttgtgtgacccggtcagctgcagggaagcatgctcccctcaacttctcctggcgtaggcagggtgcggaatcagaaagatggtgaagattcagacctcgtgc

SEQ ID NO: 125657 - DNA, 1869 bp, Homo Sapiens
gggatgcggatcctcacacgactgtgatccgattctttccagcggcttctgcaaccaagcgggtcttacccccggtcctccgcgtctccagtcctcgcacctggaaccccaacgtccccgagagtccccgaatccccgctcccaggctacctaagaggatgagcggtgctccgacggccggggcagccctgatgctctgcgccgccaccgccgtgctactgagcgctcagggcggacccgtgcagtccaagtcgccgcgctttgcgtcctgggacgagatgaatgtcctggcgcacggactcctgcagctcggccaggggctgcgcgaacacgcggagcgcacccgcagtcagctgagcgcgctggagcggcgcctgagcgcgtgcgggtccgcctgtcagggaaccgaggggtccaccgacctcccgttagcccctgagagccgggtggaccctgaggtccttcacagcctgcagacacaactcaaggctcagaacagcaggatccagcaactcttccacaaggtggcccagcagcagcggcacctggagaagcagcacctgcgaattcagcatctgcaaagccagtttggcctcctggaccacaagcacctagaccatgaggtggccaagcctgcccgaagaaagaggctgcccgagatggcccagccagttgacccggctcacaatgtcagccgcctgcaccggctgcccagggattgccaggagctgttccaggttggggagaggcagaagtggactatttgaaatccagcctcaggggtctccgccatttttggtgaactgcaagatgacctcagatggaggctggacagtaattcagaggcgccacgatggcttcagtgggacttcaacccggccctgggaagcctacaaggcggggtttggggatccccacggcgagttctggctgggtctggagaaggtgcatagcatcatgggggaccgcaacagccgcctggccgtgcagctgcgggactgggatggcaacgccgagttgctgcagttctccgtgcacctgggtggcgaggacacggcctatagcctgcagctcactgcacccgtggccggccagctgggcgccaccaccgtcccacccagcggcctctccgtacccttctccacttgggaccaggatcacgacctccgcagggacaagaactgcgccaagagcctctctggaggctggtggtttggcacctgcagccattccaacctcaacggccagtacttccgctccatcccacagcagcggcagaagcttaagaagggaatcttctggaagacctggcggggccgctactacccgctgcaggccaccaccatgttgatccagcccatggcagcagaggcagcctcctagcgtcctggctgggcctggtcccaggcccacgaaagacggtgactcttggctctgcccgaggatgtggccgttccctgcctgggcaggggctccaaggaggggccatctggaaacttgtggacagagaagaagaccacgactggagaagccccctttctgagtgcaggggggctgcatgcgttgcctcctgagatcgaggctgcaggatatgctcagactctagaggcgtggaccaaggggcatggagcttcactccttgctggccagggagttggggactcagagggaccacttggggccagccagactggcctcaatggcggactcagtcacattgactgacggggaccagggcttgtgtgggtcgagagcgccctcatggtgctggtgctgttgtgtgtaggtcccctggggacacaagcaggcgccaatggtatctgggcggagctcacagagttcttggaataaaagcaacctcagaacaaa

SEQ ID NO: 125658 - DNA, 2326 bp, Homo Sapiens
agctgtttttccccaggcagcccctttcccggacaggtagttcagaatcacccccttttgggagccccattgaccaacccccgttcccacagggcttgtttcctgtaggatcctcatctaacttcatcattggtgttagttggtagcctcaaccacacatatgttgccaaacttgtctgccccagccacagtgtcatagtccaggaggctggctgtagtgacccatcgggggtaggtatcatcagcaaagatgataagctggttttcattacgcttgtagcgaacccagatgaaactttcttggacatcagatacaattaccctatgtccgatagtctggatcccagagatataattggcaatatgcttattctcacattttcggagtaacttcttctttcccaggtcatagacacgcaacagcttccccacaccaatcaacaccctcccctggaatggggcaatagcagcagggacctcttccacaggagtcttgtgcaaaaactccagtttttccccattgttcacaagcttgtaagtatagacgaagccccctgccacagatcgggggtttagtatcaggtccttggccacacccaccagcacataccagtcttcaccagtgttggaaaacctgcacacagccacactaaaagctgcctcattctgttccagctggacaaggtccagtgtgttcccttgaatgggattcatcactcggatcacagaggcccactgcccattgccagccttgggagctccaaagatggattcagggaggttttcattgaggaatgctgctgccatctctgcggccagctcccgctcatcctcccctgctgcttccaccatttcctctgccatctgctgctttctctgagctttcgtggcctcagtgtaggcattgtggtccgtttcaatgataataaggttgttactctcagggtggatgacaaatttcctgggtgtgtactgcagtgggaaggctacttgattgaagacagcaccgagcttctctaatgccaaaatccgtagggtgttggtggagatggccacaatgccctcgggacactgttccgaggcaaaacccgatgcaaattccagtgtctcgtaagacagtggggtgagatggaagcgagattggtaagaatagctcaaccatgagcggcttgacatggccaatactgcctcctggccttgcattcggactcggaagagcttcacaggacgggaccccaggtaccgagtgcgagtatcagacaaatccccagtgacagggtccaagacagtcctcagcagcacaccgttctgtagcccaatattcaggtataggaagccaatcgagcccctctcacccagctcatcctgcttctcagtcccacccatttccacgatacacaaggactcaggctgggctgggagagcctgcatgcttagaggttgcaaacagtctgagggatccagggagatgattctgacagtgttgtccacaagccccacagccaggaagcgagaccgctgctctccagggggtacattggccagactcatgcacaccacatctgctgacatctccttccgttctgtgtactcattcagctgtcctgaaggatccatctcgaaatagaccagctctcctcctgtcagggcaatcaccacttgtcgctggttcactgcacacttcacaattgttttctttccaggggtcttccactcattgactctcttgtctgctcgtatgtgccgaatgccatctggatagacctgcaccaaggcatcatctcctaataaggagcaggacaaggtcggggtggtccccaggaacccagagtcagtcacttcttctacagtttctccaatggacaacactagggtggcattcacgaaagacacaatgatgtaggcatcaaactcatcttcaatgtgtcgacgcactgtccagacagcgttggggttaccaggtagctcagaaacagccatttctgacacctcaagtccatgtcttaggactctcagagatgatcggggtcccctaccacaggccacatacaactgtggagtatcttcattggccagatcagctatctggcaaaacagaatgggagagaggctgtccaactcatcaaccagcacaaggtttttaagtggtcttggctgaaaaaagaatgtgtctccttcttccagaggcatggctgatgaaaactcaggttcttcatcatcatctccaagatgtgcaatttgatataagtaatggtttccaaattctgatgctacaaaaaggaaccctcctcgtgccgaattcggcgcgccgtcgacttcatactct

SEQ ID NO: 125659 - DNA, 1625 bp, Homo Sapiens
  misc_feature (29)..(29): n is a, c, g, or t
  misc_feature (32)..(33): n is a, c, g, or t
aacaagcttttggccttaaatcatcttcnganntaaaaactaggtttctatttctggttagattctagagcagtggaactcaggagtgatactataccctacccagtcccaccacagcctgcctccttcctcccacagagataacattgtacaaaactgtatttacaagaaaaccaattaaaaattaagggtgtgtgcaaaagtagacaggagagtcaagacatatcaatgcagggatggctttggggaatgggggactcaggttctacactggaacctggggtcatgtatcatgtaccaggtggggagaagtgtagcaaatctcagtgccaatttgaggggaagccagtcattccaggagaagagctgaggggaaagagctgttgactttcataatgcagtcttaattatccagtcaccctcctgccacatggcagaagccaggtggcagtgatggtggtgggggaaacaaaacacacagtctctggcaagccccaccgggaaaggagggctcagaaggcgtagcgggtccggatatcctcgagtttcttggacacttcgggtggggttcggtccagttcttcagagacgttcttttgtttgttgggttccatggaattgaactgctcacagaggtctccatcaatcacattcttcacagggaagtagtaggagcgaaagctgaggtggtcccgcccacagagagggggatgttcagaccgcaggtgcatttccacatgctggaagaagtcatggtcctcatgggacgtgaatggcacaaggatgccaattcctccagacaaggtggtatagacaagtgattctgagcctccagggatcagcgtggtcttctgcaaggacagcaccgtctccccgacatggtagttcatgatcacctctgccttctgggaggcccccattgagcaagccacggtcccacagggctttgtttcctgtaggatcctcatctacttcatcattggtgttaggtgggagcctcaccacacatatgttgccaaacttgtctgccccagccacagtgtcatagtccaggaggctggctgtagtgacccatcgggggtaggtatcatcagcaaagatgataagctggttttcattacgcttgtagcgaacccagatgaaactttcttggacatcagatacaattaccctatgtccaatagtctggatcccagagatataattggcaatatgcttattctcacattttcggagtaacttcttctttcccaggtcatagacacgcaacagcttccccacaccaatcaacaccctcccctgaaatggggcaatagcagcagggacctcttccacaggagtcttgtgcaaaaactccagtttttccccattgttcacaagcttgtaagtatagacgaagccccctgccacagatcgggggtttagtatcaggtccttggccacacccaccagcacataccagtcttcaccagtgttggaaaacctgcacacagccacactaaaagctgcctcattctgttccagctggacaaggtccagtgtgttcccttgaatgggattcatcactcggatcacagaggcccactgcaatgccagccttgcctcggccgattaacaccgggcct

SEQ ID NO: 125660 - DNA, 583 bp, Homo Sapiens
ctgttaattttttacagctttattttagacagatagtttaagaaccaaagacatacctctgtaatgataaaggaaagaaaacaagctttccttttaagaaaccaaagagcacaaaataagactgtttcattatacataatcaccacaggatattaggcactctgacagggttaggcaagattcttggtgtgaggtgaagcacaggcactttatttgtacagtgctgctgattctaattttgaaggtaggtattataaaagtctttacttgtcaccttatttctggccccaacacagcagcctatagttttaaaagttctgtttctccctggtctttgttcgtatacacatcgaaagtaacttaaaaacaaggatccaagggggccatacttcatatgttatctaaatgttaatatgagaactcaaaagtaggcagattatatgaatacatattcttacctctgctacaaataaaaacaccccaaacccttcatcatacttttataaaaatacagatattaaactgtagccttttatataccatttctgaaaagtatttagttgcataaatagatgccaggatc

SEQ ID NO: 125661 - DNA, 235 bp, Homo Sapiens
aatttctaaacatttttatttgaaatcttttttcacccctccccaaaaagacatgggtaggtacagcaatcataaaaaggagatacaaacacaagagtcaaatgtctctcgcactgacacttacaaaaaactgggaattgtacatggggttagggatgtccctgtagattagttccagaatggggtgtctgtatatactgtattaataggcatgtttgactctcgtaaagggacg

SEQ ID NO: 125662 - DNA, 978 bp, Homo Sapiens
  misc_feature (81)..(142): n is a, c, g, or t
  misc_feature (866)..(900): n is a, c, g, or t
cctctccgcgaagctgcaccaactttatttgcaaaaagaggctccaagcgcacggagaggatgggggctgcaaggtccccnnnnnnnnnnnnnnnnnnnnnnnnnnnnnnnnnnnnnnnnnnnnnnnnnnnnnnnnnnnnnnccggctacacgatcccgaactggcagatgtagggcagctgatcgcggcagcgcttgtcgaaccactttccgttggccgcgcctgacaggaccgcgcagttctcggtcttgccgccatcgggttgcgcggtgatctcaggtctcccagttcttgtaggcgatgcgggcgccggtcatgtccacccaggtgccctcggccgccatgtcgttgaggcccagccagatctcggcctcgttgcccacgctctggcgcaggtactcatacagggcgtcgttctccgagccagtctgaggggtgctcagggtgcccccgcgcgagatgcagtcctcgctggcctcgtggaaggtcttcgtctgggtgaaggccagaaagcatttcatgtgcaccttggtccccttcaggcagaccgtctgcagggcctgctgctccttcagcagggccacctcctgggccagggtgtccagacggctcttgagctcctcaaacatctttgtgttcacaacatctttcttggcatttacaatcttcttgggcttctgggttggtggctcggtggtgacctgggtcaggagggagaagaggcagaggaggaggtaggccccccagagctccatgctgctgcgcgggcgggggctgctgctgcctgcagcgggtctgggtccgaacgcagtccccggaccgtaatggccgaattcccgggcatatgtccggtaccgtcgactgnnnnnnnnnnnnnnnnnnnnnnnnnnnnnnnnnnncgccgcttcctcgctcactactcgctgcgctcgtcgttcgctactaagactaggcccctatatgatcatcacgccttg

SEQ ID NO: 125663 - DNA, 660 bp, Homo Sapiens
  misc_feature (643)..(643): n is a, c, g, or t
aatgttttttaaatggagtttattcttagcacatggctttctatgtagccacatcacaatttgtacagttccacataagtctaaatgcactcccctctccccaaagaccgtgccccagaaggtgacaacagtatctctgtaacagtgtcttaaataaatgcaagtaagaaaaactaacatgtcacacctaccatcaaggtctacacatcttaagaattaaataatcttgtgaggtccacaatgtctactcatttattcagttaaatacaagcttggatgagctgccttaatgggggaagaggaggtaaggaaggtggggaaagggtctgtcttcttctgctttcaacaaagatgcaagtgtatgtccccagtcagcatgggctgtccagctagctgactgtagccatctcaaaagtatttgataccaagtagtccttctcaggtatccgcacctggcagccttgtttcgggccagcaggttgttccaccagccagcatcctggacaactgttctctcttggggtggcaaccagcacagactcttaaccggataatgtcttctttttgattattctttttaccaatttgggtttgttttggtgtctattatggtccaaatggggaggggtggatgaggaacggngcaggagaagagaagag

SEQ ID NO: 125664 - DNA, 718 bp, Homo Sapiens
  misc_feature (17)..(17): n is a, c, g, or t
aagaagaagatatttcntggacaaccaatccctcaaccccggccacagagatttgcctactatacagatgacctttctagtccaccatctgcacttcccacccctcagtttggtcagaggacaacaaaatccaagaagaaaaagggacacaagggcaaaaattgtattatttcttaaccaagtagtgatgcagagcatttgtttaaaacttagccattaaccgtctgaatcgtttccttttcttccgtaggaaagttgtgaaaatagcttaaagtgctttctttgcccatgtaaatgagaactcaactgctgtttacagtgtcagattaacatttgaaaggtgtgatttctccaatttaccctctttggatggtgccaggtggacgtgatatctcgtgcctgtccggtgcgggtgcgttacagatggacgtagctgctttggttttccagtcctcaagggaatactgaagatgctgactgaaggggattggatgttgattttagaagatggagaactccagccacctttgtaaagcactagtgtttgtcatttatgtaagtcaggtcggctcaggtcttgatagtccgtcttggtgtgaggcatgcctgtcacgatgacctagctaacactgtgcatcttattgtgaggccagcttgtcccctcgaaccctctttggccaggtaaacattgtattgtatcagctccagctacagattg

SEQ ID NO: 125665 - DNA, 1323 bp, Homo Sapiens
  misc_feature (54)..(71): n is a, c, g, or t
aagctaaaattaccctcactaaagggaataagcttgcggccgcatacgcggtcnnnnnnnnnnnnnnnnnngcaaaacattcttttattaaaagaacaagtgctgtttacgaactgcccttcgtacaaataacatccgttatacaaagatacaagatccgggttatgcacaattccaggcttggaggtggcaggggggcatcgcctttgggctgaggatatcaaggttttagaaagaatgaaaaaggagcccctgggtttgcaatctgtggcttcccctccctgctccctaggaagggtctgctacatggaaacaggttgggatagaaagggggcgggacgggagcaggggtgaggtctccagtcccaccacccaagtcccaagttgagctggagaaagtgaacaaaggggaatgaaggcacccctcagttcccaacttttcagtaggtcaagacaaagtggtcgggagctagacacactctcaatcctgatggacatggtgggagagagccaaggctacttgcccaccttccttggaattcccagttgaagttacctcaatccctctaggcacctctccccaggaaaataagttgagataaaggagaactgggtgcaagctgcctacccctaactggcccattgcacaccaaggaagatcctagaagctggcagggggagcctgtgcctttgaaaacctgtcttcatttccaatttgggagagagaagcgtggaggttaccctttctcggagctggcccctggcttgggctcctctcatttctctagacccttcctaagagtctggggtgagcacctccctagaactcagtatgggggaaacaggcaggggtcccctcatcagcctcaaggtcaggacaccttgaggcagcagcagacccaggagcctgagggggaaaataccccacaaataggaaaaacaaaccaagacaatccttaaagtgtcattgtccatggagaggatccaccagctctgagctaagacagtcagtgccacatagacaccctcccaccccgggcacagccctgcactcacaccgtgtgtcacacacacacagggacagccagccagccagccatgtggagaccatgttgtggggcaggggaaccaagggccaggaggccacagtcctgagggcttgtcctggccctgtcactgagccccttctaggcttggagctgtcatctgtgatgggaggagctggctgaaatgacccctaaagacaggtccctttggcgctggcatgcaccagttgtgaccccaccctcgtgccgaatatcgccacccaggcctcgctacctt

SEQ ID NO: 125666 - DNA, 961 bp, Homo Sapiens
aaaatggagcgacgtttatttcatctcttgtttacgatttcactaggactcagaaacgagatcgggaagcagaaatatagtgcaatagtgcaacatctctgaatccttttaatctagagaaggcatttcatatttgggggctaaggtttccagtcagatgaggcaaacagcaagagtaagcagtgttacttgcaggtactttggttaatgttgatttaaattttcatgaatgtgctggtgaacactgtgaccaggcttttgtagatggcgatgtgttatagacggtgctcactcccaagggacagcaagtgagcagagatgtactgcaaagtcgccagtcactgctgcaaggtggcctctgcctggggcctccagaagctgctcctttaccctcttggtcccatggctgaagctggagcagcggattgctctggagcagccaaggccgccagcgtgtggagcagagctctcccctcctgctgggcgtgtgtgacactgatgagtttcactgtactgcatgtgacttctcccctgcccttcctcctgatggagtgtgcagacagccatgcgtggccacgggggcagtgtgaggacctccctgtctcccggctcccctcccaggggagccagctgcttgacctagctctttgggcctctcctgccctctgctctgcctggagtgtcggatcctgtgagtaggctgggcctcccctgggcagggttctccaagggcccggtttcccggcccttacctttcctgatgcccctgacatcatcattcttgtgggagacagcagcctgtatgtggtgtggggcgtggatcgagtgtagctgtgaaatccatatatatgaaatgtcctgcgggatacagtcttagctgacttttttttactctgaactcttatttgaattgttttttgtgcatatatttctgctaccacagagattgtactatacaaat

SEQ ID NO: 125667 - DNA, 1701 bp, Homo Sapiens
ggcccccgtcgtcccggccctggccgctcgcagctccccgggcccaccccgcttcggcttctgggtctccaatcccagaccattcacccctccgagttgctgctgtcctccctcggccctcctccttggtcctcttcatcgtcttccaccccatgccgagtgctcaggggcctcagtatccctctctccgagaatccctcggtgtcgtcctcttcagagctgttcaggtcaaaagaggtctttaaattgcttcctgtcctcatccttcctgtcagccatcttccttcgtttgatctcagggaagttcaggtcttccagccgctctttgccactgatctccagctggatctcccggtcacgcagcttgcgccagtggctgtagtaccaggtcaaggggtgtcccctcttccccgggtcagcttctcccaggcttccactgcctgctgctcagagacgccgaaggaaaccctctggcggcggctgcagatgtatgccgagttctcctgaaccttcccaagcagctgctgcacctgccggcagtagttggccaccttgcactcccggaggaacgacttcagctgcaggaccacaggcagcaccagctccgggaagccgatgcagtgtgcctggctgtgcaggtactccagggtgaggtcgtacagctgctccaccaggccgtcccggtacgccttctcctgcaggttgacattggacagcttcaggatcacggagaagttgatgggcttggagctcatgcgccctggcttcctgttgaagtcgacctgctggaacatctccaggatgaaaggcagcaccgggatgaaggcccccgagctccccgagagcagcgtcagggcacggatgcagtgcattcgcagcgggtagaagcgggcagtggggatgagcttgatacagccaatgatgacttgggcaagggggtagaccaagggctggagggcttcgctggggcccgcagtgctcaggacccggcaccacaggaagaggcagtgcacatactgccagttgtacacagactggtatgtttccttcttgcgggtggtcatggcgttgcgcaggtgtatggcgagctggcggatgtagaggaaggcgtgctggtaggccacacccggctccagggccagcagctccgtcaaggtccactgcatgaaactgatgaaggggagggcaccaggcgaggtgaacttgcagttcctcacatacgtgatgtacatttgcttgaggacggggccaaggaaagtgtccttcttgtgccggcagactctgctgaggaccaggaaagccagcacccgcagagactcctccccagtgctccatacgaccaccattctcttgagcagcatgcggcactgcttggggaaggtcaggaagcagggcaccagcacgctgatgtgccgcagcacggccgccaacaccgtcgtctccgacagacaggacaccagctgtatggccgagcccaggtaagccttgatgtccacacgaagcttcccccagagcgggctgctggacggctgcagcatcctgctgctatcctttgccacctttccaacagcagcttctggagacagctgctcggaacgcctgtaccacttcatggaacagctttggagtgaggcgttgctttgctgcctgcttccatctctcaaccatggcgacggtcacaggaacagaattcttgttccc

SEQ ID NO: 125668 - DNA, 915 bp, Homo Sapiens
  misc_feature (30)..(30): n is a, c, g, or t
cgtggggaagtcaggaaccagggcaacaanccacgctgatggcccgcagcacggccgccaacaccgtcgtgtccgacagacaggacaccacctgtatgagccgagcccaggtaagcccttgatgtccacacgaagctttcccccagagcgggctgctggacggctgcagcatcctgctgctatcctttgccacctttccaaaccagcagcttctggagacagccaatgaggtctctgatgcagaaggtaaccagagcattgaatgcagcactgtccgtgacctggaatttgttggcctcagcactttcctggtcccctcgggtggtggccacagctgctcggaacgcctgtaccacttcatggaacagctttggagtgaggcgttgctttgctgcctgcttccatctctcaaccatggcgacggtcacaggaacagaattcttcttccccttcagccctctggggactctgtccccatcttctccttcctccgctccatcctcctcctcactggcttcctccagcacatctggcagggagtggaacggcccctcttcctcctcagagctgtccgagtcgctgaagtttagcaggctctggtcattctcctgcaggaacttgtagaactcggggtctctgtccttcagccgagagagctggtctttgtgctcagaggcacggcctttacgccggctggccgaggggctcccgcccggcttatccggactccgggcagcctcgcgtgcttcccgtgtctccgcttgtggagaattttcggactcggattcggactcggagtcaaagcccgaagctaggaactcgtccaccgtcagctccgccaggcgcctcttgcggctccccgcagctgcccctcgtgccgaattcggcgcgccgtgacttcatactctctcccct

SEQ ID NO: 125669 - DNA, 1701 bp, Homo Sapiens
caaggagcgagcctgggtggccgcatgagctccaagcccatcaacttctccgtgatcctgaagctgtccaatgtcaacctgcaggagaaggcgtaccgggacggcctggtggagcagctgtacgacctcaccctggagtacctgcacagccaggcacactgcatcggcttcccggagctggtgctgcctgtggtcctgcagctgaagtcgttcctccgggagtgcaaggtggccaactactgccggcaggtgcagcagctgcttgggaaggttcaggagaactcggcatacatctgcagccgccgccagagggtttccttcggcgtctctgagcagcaggcagtggaagcctgggagaagctgacccgggaagaggggacacccttgaccttgtactacagccactggcgcaagctgcgtgaccgggagatccagctggagatcagtggcaaagagcggctggaagacctgaacttccctgagatcaaacgaaggaagatggctgacaggaaggatgaggacaggaagcaatttaaagacctctttgacctgaacagctctgaagaggacgacaccgagggattctcggagagagggatactgaggcccctgagcactcggcatggggtggaagacgatgaagaggacgaggaggagggcgaggaggacagcagcaactcggagggtgaatggtcttgggatggagacccagacgcagaggcggggctggcccctggggagctgcagcagctggcccaggggccggaggacgagctggaggatctgcagctctcagaggacgactgaggcagcccatctggggggcctgtaggggctgccgggctggtggccagtgtttccacctccctggcagtcaggcctagaggctggcgtctgtgcagttgggggaggcagtagacacgggacaggctttattatttatttttcagcatgaaagaccaaacgtatcgagagctgggctgggctgggctggtgtggctgctgaagccccacagctgtgggctgctgaagtcagctccgcgggggagctgaccctgacgtcagcagaccgagaccagtcccagttccagggggaggcctgcaggcccctggccccttccaccacctctgccctccgtctgcagacctcgtccatctgcaccaggctctgccttcactcccccaagtctttggaaatttgttcctttcctttgaagtcacattttcttttaaaattttttgttttgcatccgaaaccgaaagaaataaagcggtgggaggcagggccattgtgttgagtggtggctcctggagatttgtgtggccccacccctacccccggcaacctcaacacagaggctgggaagggtcgggggcccctggaagtagagccaaggtcccattctcctgcttgggtgaagtttgaccggcaagggcgtggccccctccatagggggacgtggccgtcgtgggggacaagggctgctctcctgtgccgagttctcgctccggggcccgcagggttggtggctgcagtggcagagccacggggaagctggccacgtagaaaactcggcccaggcgcctggccacctgggcccggatcttgagggcgggccccagcttcagccccatgttggtcagcaggtgctcctccgtcagcagtggcagggtctccccgtcgatcccctgctccctgaa

SEQ ID NO: 125670 - DNA, 1567 bp, Homo Sapiens
  misc_feature (641)..(654): n is a, c, g, or t
tttaacaaacaagaatatagtgctttaccatttacaaatctttcacatacattctcatttgaccctcacaacaaccctgtgaggtaggcatcacggacattctactcattaaacagatgaagacagtaaatctcagagtagttcactgataatgcccaaggctctacagttagtgagtgatttgtattaatatcagtctttggcctaaaaattcagcacccctcttccccttatacttgtcccacctacttcacagggataatgaagataaaatgaattcaaggctagaaaaatactttgagggagaaaagcactatataattatacctacaaactatgattttccccaatatatggctcattcctcttctcatctcagcttgtgtgtgaacccagagttgtatattgcctctgtcctgtgctcagtaagcaaataaggcaggcagggggtacagtgtgatcctgtttaaagttacataaattacaatcagggtaactgctattattaggcaaattgaaaaacagcacagaaaggccagtgtgcaactaggacccactaaagctcagaggaaagcaatgcaagattatcagacaggcatgattgcatagaaggaaaatgtggtgtcagagttcaaactggnnnnnnnnnnnnnngttatctaaggcaaagtggtggcaaagaagttatttgttccatgtcacacaaacaagagcagaagattcatgggaacccgtacaaaagcatcttgtgtcacacagatctctccagctgcctatagggaatatacagaacagtgtcaccttcaaagaatgactgtacctgtgttcatatcctgaactgcaccaaggaatagctccatgctaaactgtcttggctaaaatacaaccagtgccatcattcctaatcagactaataaacagaatgtcttttaaggtaatgagttagatggctgtgtttaggttttgttcaggatttactttggattctcctgctttaagacccaaagaaagttatattgagtttttattgatgattctatgtgtttttaacagagtgtgataggtgaattaaacatattaaaagagttctatagcatctgttcagaaaagattatatactatacaaactattcaagtcatacaaaaccatttttcattgtctttcaaactgagaagaatcctattcagcacgcttctcctcctgaggtggttcatactgagcaagctttgctttcagttttttattttcttctacaatagcttcatacttctctttcatttcggccagttctaggcgaagcagctctatttctggattttctggagtagcagctcctaagtgatgctttaaaaaatccaaagcactgttaggtttctctggttcttcatataaggctaccaacaccttggtcagcgtgtccagcacccccgacttctccaagtacctccggaactgctcacgcttcgagtcggcggctttgtaatgggccatagtgacagcggcagcggcgtagctggcgccggagaccgcgactggcgggttgggagcagcactgctcatgcgccc

SEQ ID NO: 125671 - DNA, 518 bp, Homo Sapiens
aaagagagttatattgagtttttattgatgattctatgtgtttttaacagagtgtgataggtgaattaaacatattaaaagagttctatagcatctgttcagaaaagattatatactatacaaactattcaagtcatacaaaaccatttttcattgtctttcaaactgagaagaatcctattcagcacgcttctcctcctgaggtggttcatactgagcaagctatggggcaaagacagaggaatttaggtgaattttattctaaattgagtaaaaaatagtaaaacaaggtaactgttatattcaacttagttactgtcagtaaattgtattaatatcagtttctataactatccattttaaatcattcagtgatttaagatttaatacaatcaaatctaatgaaagcccttttcatataaacctttaaaattgctttgaaactaaaatttcattccagttcatgactgcactgttcaaatacttgatatgcaataagctatatcttcccaaagaaa

SEQ ID NO: 125672 - DNA, 447 bp, Homo Sapiens
tattgagtttttattgatgattctatgtgtttttaacagagtgtgataggtgaattaaacatattaaaagagttctatagcatctgttcagaaaagattatatactatacaaactattcaagtcatacaaaaccatttttcattgtctttcaaactgagaagaatcctattcagcacgcttctcctcctgaggtggttcatactgagcaagctttgctttcagttttttattttcttctacaatagcttcatacttctctttcatttcggccagttctaggcgaagcagctctatttctggattttctggagtagcagctcctaagtgatgctttaaaaaaatccaaagcactgttaggtttctctggttcttcatataaggctaccaacactccggaactgctcacgcttcgagtcggcggcctgaagagacaccgggggtcagtg

SEQ ID NO: 125673 - DNA, 1017 bp, Homo Sapiens
  misc_feature (437)..(450): n is a, c, g, or t
  misc_feature (472)..(485): n is a, c, g, or t
tttcactttgtagtggtatatttaggatttgatgtgacacagttatttattgctgagtgagcaaacccctagcccccaagtggggactacaggcttcagtgcttcccccacactgcctgagctaccagcccttctgcactggccctcctgccaatactgcctgcactgtccccactccctctggctcccatgatcaccagatccgccctgcaggctccctgtcacctgtggggccctatccagaccccctaatccacttgcctagcagccccactcttccctcgatggctcagatcctgagatccaaggaacaccctgggtttcccaaccactctcttactgcagaggtctgtctatcctgccctggtctcctccaccccaggagagttttcaaaggtagagaggaccctttggtctttattcaccaccatcatacnnnnnnnnnnnnnngcttttaaaaagtggaggtggnnnnnnnnnnnnnnctgaaggtgggagaaaagtaaaagcaaaaataacagctggtgaatccaagagcagtgccctcactgtccataaacacaaacaccctaaatagttctgttctctcctgtgtatgaaggggggccctgcaccctcgtactcgggtttcttccccatccctgaggtccctatgcttacaatttgggtcatgcctcacacttttctcctaaagcccacactctcttcaccctttgcccccaccccacggtcacagcccctttcccgggtctcccctctgctcctcaccttccctctccaacccctcactctcccagtcagtggccgcctcatccccattgggctcccggaggctgacagccagcaccaaggcctgcaggagaccaaagaggcaggcgaagtgcaaagggtgggcagtaagtaggctcagaacagcatggagcccatgcagggcagccaggaaggacagtaggccatgtagccagaggcccagcggtccacgcaggcccagtgtgtccaaggctgcccgcagtggtc

SEQ ID NO: 125674 - DNA, 687 bp, Homo Sapiens
  misc_feature (341)..(361): n is a, c, g, or t
ttttacctgtgcatatttatttattatccacaaagatggaggtgcggaaaagaagagggagacaggagggaaccgtactctcccactggaactctggggcccactgaggcaccattattggggatttcagggtggctgggcactgcaaactgctccctcctctgtggtccctgaaagagccccacacgcctgcttcagacgtgtccacgcacaccagtcctcacagacacacacacacatgcatggaggcaataaatatgttccgtaccagactgcccccagcctgacgcttcagggggccccctccaaaagggaggggtttaagtgctcaatttttttcnnnnnnnnnnnnnnnnnnnnncaaggagatggggattggaaaggccagactctgttatctccatttgctgactagaggccaatcgtggggtcttccccggaaaagggtaggggaaaccagctgtttctctataagccccaggctacccctgtgtccatgctggaacccaggataggggctgccccccacaaacagtgcctcatgctagtctttgtgtcgtccaagggagggagaaacagtgcagtgctcaaagctaatactgatttggttggcagcagcaagagggccgactagaggtgactcaccacaccagggtgatgctcacagtaactggtgttgccccggcc

SEQ ID NO: 125675 - DNA, 700 bp, Homo Sapiens
tgagaccctgatggtgtggcttaggcttaatctcagacagctggaaggtatattccgccctcacccagccacccgagtaaatgagaatgatgactgactgagaccctgatggtggtggcttaggcaagatgaacgtctgaaatggaggcccagggctgccacgatggctctgtagtcatcaagggagggagctccttttatcttgttacctactcccctcttgtgcccctttcttcccttgatctaagaaggttgctccggatctcgccatctggcctgcgttcaatcagcagaagcttcctggaggagcaggaggaggcactgtgctcgcatcacataccagtggccagaagttggcttcagggaagctcaggaaataggatgcgagaagccatgagacctccccaaactctgcagtaacagagtcaacaagacaatggcttaaagatggagagaccagttgatcggtcacacaagctgttccacgataattcttgtgtcagaaggggaggctgactaccaggaccactggccccacttccagcccctccattctgagtacacttcagagggctctggcagggtgagggggtcttggtggtgccacagagagtaaaggtctagcacacccattgtggagatatttcatggggacaacccagtgacttcacttgaagtaaagtgggattttccaacctta

SEQ ID NO: 125676 - DNA, 1015 bp, Homo Sapiens
acctcaatagcaaaattagaatattttaatagtaatataatagaataaaggtttgggagtgcaaccaatcttctagaacctgaaggttggcattcattgttcataaactcagctgaaggcagtgccttccaaatgtggttaaattgccatgggaaagaccagggttagttgcagggcatcattttccaagcagaaccatttcaaatgctaaaactggcccctgaggttacattgagcctcccttcctgagtgagatgtttggaaatgaggtggctttggaaataagcttgtctgtaacagtggtttccacaaagacttcagtctcatggcattggactttgtttggacattgacataaatattttggcatatcaccatatgaggcttttccagaggtggcttccagtatgcttctggagggggtcttccaagaagggtggcacttaagggtcatgaatggccatgacccatgcccagctgttccagaggacatggggagacagagctgtctggcaaagggccaggtgcagagtcagtctgggggccatggatggcatggatagtcaggtcaggatccttcatgccaatctgtggcttcttgctgtccccacctctcctcctgctctcaccaactcccacacccccagtcccacactgcccaccgggcacaccctgggagaaggccctaatgtaaatggagggaggtgaggtaagagctgagggaagctccatggagaaccctgattagcattgctttgcacaaagtcggtctccaataaatatatttgttgatgaatgacctccttcgttggcttctgtctctcaacatctatcacgtagcagctgtgtctctcaacccaggcacccacctctctggaggcagtgagaagaggctgaggaaatgggaatggtatgagcatgtctgaaaccaggaaagccaacctgactggctgttttgtgggccgcagcttgccatccagcttggtgacagtgagacagtagaccgaggtccgcc

SEQ ID NO: 125677 - DNA, 651 bp, Homo Sapiens
  misc_feature (298)..(308): n is a, c, g, or t
tttcttctcatacttcatgctcatttctctagaagggcttatttggtttagagtgggtctggtaacatcctctgtaaataattcagtgctttcacaggatgacttctaggttgtttgcttttatattgggtccctgagctggttattacatcacccatatgtcttagactggaggaagactggggcccagtgaaataagctctcacacaagttggaattagtgcatagcagattccatctgtttttgccactggcttccttctccctcatatcaggacaaagttcttgctataaaagnnnnnnnnnnngtcaaaatatcatagtttcattcccacaggcagtttggctttggttatgtatttgactcttagacctgtaccttgtgcccagcactgaggatacaacgcagaatgggacatgccccagcctcctctcagagccactaagatgtggagaattcttgctgaggaacaaacacatgtttttgcctgtctgtggttttcgaagtttaaaaaatgtttgcgccttcatctctgtaatgtacatgtctaggttctttatttttaatttaacttttgccaatgctaatctttgcctgtttgtactaaaggagtaggacgtggtggttgctagccaatttcctgaaaatat

SEQ ID NO: 125678 - DNA, 1053 bp, Homo Sapiens
cggcaagctgctttattttttattttcatttacattagaaaataatctctcccttgcttgattttacaagggtaagggtggtcacatgactgacagagacaaccatggtgacacagctcttttcagctgttcatcaccagcaacctggatttcctatgcccagaacagcaatgcactgaactcaagtacaaattaaatttaatcccaactttagtccagtctgagattagcgcattcaaagaatctgtcataacgtttactatagactcttgtcgcccacagaatcagtttccagttcgtgtgtgacatgttctattgttgaatcagtacagagttcttatgtgtgtgagttttctatggtgactacacaaaacctcaggcttacaattgtggcggtcagaggtcaaggtgctggcagggcaggatccttcctttcctccatcatgggggctgctggcagaattcagtttcttgcagggctgggacggaggtccccagtcccagctgcttaggggcaccacactcctcggtcctcctctaaggccagcagcgcaggtgcggccctcctcgggttctaacctctcctgcttctggcatctctcagactcagcaggaaaggctctcaagctttaagggcccatggggctgccctgggcctgcaagatgacctaggacaatctccccatgtgaggcactcacaaggtctgggggtcacaacacgggcatcttggcggccattatcctgcctacctcaccgtaattccagggtccttgacatttttcgtaataaaaagtttaaaagtggtaattacagaactataaagctgcatcggatgccccagccccatcaccctccagggccattcccctcacacctgccctcccctgcagcactgagcgaatcccagacactgcagagccttttccagttcacgtctctggaagagcccataaaacagaaacagtataaaccatagtgccattcattatcttacccagaagtttaacggtcatattttaacatcaaatagggactaagtgttctgagttccc

SEQ ID NO: 125679 - DNA, 934 bp, Homo Sapiens
tcacgttaaaaaaagttttatttagggagctccagggaatgcggtgggaaaggagaggtgcagtgtcattgccgccctctcctcccacctagtgcattaatagtggatgggagcatctgacagaagtgagatcaggcagtgggtgtctgcaccccacagcgcatgttggctggaacagcaaagtctatctgctgaggtttaggcaagttcaggttgcccatgattttgacaaactcctcacagctgagggtgagccgagggttcagagtcctctcctcctccacggtggacactgtgaacccatggtaatcgtgagcagggtagatcagacagtctcctggaagtgtgaagatcttttcatggaccgagtggtacaaggtcttggcacagccttgctggaagtctgtccgcccacacccacggatcaacagggcatctccagtgaaggccatgctgtggtcattcaggacgaaggtgacacagcctggggtgtggccagggctggccctggtctccaacgcgaagcgcccgaagcggatggagtctccatcctcaatgtgtaagtcagcctgggccccactaaggcgggagatgacagactggcagccagggaggagggaacggagcagccccgagcctgtaatgtggtccgcgtggcagtgggtattcacagcatagagcagccgcagccccagctccttgatcagctgggcatcccgaggcgctgtttccaggactgggtcgatcagaacggcctcccgggactctctgtcacccagcaggtacgtgaaggtgcagctcacaggctcgaacatctgccgcaggaggatgggggctccagacccgccgcgctggctcagctgccgccgggcgaccctcagtacagcctccgccatcgcgcccactgcggggtcaggaatgagcggaggccccc

SEQ ID NO: 125680 - DNA, 2385 bp, Homo Sapiens
  misc_feature (52)..(91): n is a, c, g, or t
acgagccctagaaaaaggtatggcaaatagtaaaaatgggagctcaaaagcnnnnnnnnnnnnnnnnnnnnnnnnnnnnnnnnnnnnnnnngccaacaattcttcaattcagtgtgcaaacattatataaaaatagaaatactaactctacaggcagtatttcctgataaattatttaaatagcatatctacacaatctgagatatctattccaatggcaatgagaaaataatttataaaaataaagcaatggtataccagatgatagaaaaaaaacataactttcagaaattgtatttaacatttcaatgctatttccttattgggaatacttctctgcagagtttttatgctatgtacaacactgactttttaggtactacagtagctttaagtttgttagacacttaaactctttccgcttgatccaaaaattctttactcagtcacacaacaaatgaggtaatatttgtatgtaagtttcaccttttgtcatttttttctcttttggaaaaatgaaagaaaaaagtgtatatgctttccttctccctggaaatatgcacaagggatggggtaaaacagtattgaagacctcatggctttctttgcaatttaaaacatttgcaaatggataaccaactaattccacttgaaaagataaaacagagaaaaaaagaatcccataacatccactctgagcacaaggggcagagcagcttattagactgattttccttgtgctgttcttgcaagagatttgctgataaatgtcaactacttgctctcaaacactttccgtatgaagcctaaatttccaggcagaacagagttaataaataatctgtatttacaatcttacagtcacgaagactctcaacaaagatgacatggatagtctttacgcttcttcctgttccatgaataatccttcagccagatcttccagaataagtaaaaaataaatattttacatcgtaaagcatttaaaaaaaatctacattccaaaagagagaattagaaaactccatgataattcaggaaaaaagagaaaaggaatgttttagttaggttgataataattttgtgccattgtaaccataaaaatataagcacggctgcccctcctttgggaggcagctggtgctcactgagatggtaggttttcctattttcctgctacatctgcacaagctacatctagaatgaagccaccaatttcaatgtgaccaggcaatggcagccagcactgccttacactggtttgattctgattccctaattctggccactgcaggtgatgagtaagggtggggatcagggaggaagtccagaagccagtctttgtctccctttcctgcttctatttaagtgcctatttacatgggttaatcagctaacgccagtcagcatcatgaaatccagcaatagtctttcaatcccctgaaaatgacttagtaccgaacatgtaacagttcctccatattttcttcatacaatcgtctcgggtatgcgccctccccttagtgctttggcctctgctccccgtgttcctgaaggaggatgtcagggtggttttgtttgctaattctagtgagtcctcccttctctgacatgcctgaaaatgcttttgagtccactgctcagagatggcctcacaatagcaccctgctctgtgacaaaggcagagtggaatgggcaccttcccaactgaagcaagtagatgttttttcaaaaggaaaccaaagcaattgtttatatgcttggaagatgtcttattcattggaggctgaatgctgagtctgtttttgaaaactgcattttcttgaggcaggtcgcacgttctaggagtccacactgatgcaagcacagaaaagaaggaagccaaggagaagtgatcctgggggttttctcaagcccatagttccagaaggtgcaataccagcattggtttatgatcagtctttcaatcaacaatttgatgattagggatctctacattcgtatttcaggtcagagaagaacaccatttcttgagagaagacaaacaaccctagtctaccaccagcataggttttatcatagatgggtcctgagtcagccatgattttcttcccttcatacatcaccactctaatgaaacccgtctttggcctgtggctgagacgccatctgtaggcggtgaaatctttccagcctatgtgacgagggtcatgccacagggtgcgcacctggccaggggtgtttcctgtgtgccacagggcgttccgcaggtgctcgccaggccctgtggtggagtttacaactttcacagaaaggcccgagtatccctgagccctcgtggggttggtgtcccagtaggactgggtccttgcttccacatcacaa

SEQ ID NO: 125681 - DNA, 1313 bp, Homo Sapiens
tttaaacattttaaagtaagtcttttaatgacatctgcattgtattttctagctgaagcaaaacagtgcctgtgggatttatgtgacttcttaaccttgaagtccattcatagaaccctagcttccttttcacagggaggagctgtgtgatgaagcaggcaggattacaggccactcctttacccagggaagcaactgcgatggtataagagcgaggtccaccaatctcctgccggtttatcatagctacagcccaggctaagcctgagagaggtcgttcccacacttcaaagttgtctccctgtctaagctggtacccttgcttgcccaaggggtcctgattgatggcaattacgtccttatcctgaaggagagctttggcttgagggctgatgtgtcggaggtcattagacatgaataaaggagcagccatgatagcccagagggccatctgagttacttgctgattccagctgaggccaaagttgccaatcactaaacatatctgggtcattccaaccccctggtccagcaacatcaacaattctctcctggttaaaagatgtccagtccaagatactctttatacttttccaggaatcatcaatgtcagcaaaatttcgccagtgattgcagtactgtcggatttctgtataattgggcttttgaaagggccacatataaagaggccactcacaggagtacacaatgcttctgccagtcctattcagggccaaggacatgtgcttataaccatctgccaaattttccaaactgtcacagtaacaaccatcaaattttagcagatctactccccagtcagcaaaggtctgggcatcaatgtcgtagtatccaaaactcccagggaagcctgcgcaggttttatttccaacatctgcataaatccctagcttcagtcctttgctgtgaacataattagctagctggcgaatcccatgaggaaagcgctgagggtctgcctgaagtctgccttctgaatctctttggggagccatccaacagtcatcaatgcagaggtactcataacctgcatccttccagccttctgagaccatgagctctgccatctccatgaagagcttctcactgatgcaggaatctggctcttcctggcagtcaaggttgcacatgaagcgctcccagtgcagccagcccatggtaggcgtccttgccaatccattgtccagtgctctagccccagggatgtcccaggaaacgagggccaggaagcgaagcgcaagcgcgcagcccagatgtagttctgggttcctcagctgcattgtcacggtccc

SEQ ID NO: 125682 - DNA, 967 bp, Homo Sapiens
  misc_feature (762)..(762): n is a, c, g, or t
tcaccgtgacaatgcagctgaggaacccagaactacatctgggctgcgcgcttgcgcttcgcttcctggccctcgtttcctgggacatccctggggctagagcactggacaatggattggcaaggacgcctaccatgggctggctgcactgggagcgcttcatgtgcaaccttgactgccaggaagagccagattcctgcatcagtgagaagctcttcatggagatggcagagctcatggtctcagaaggctggaaggatgcaggttatgagtacctctgcattgatgactgttggatggctccccaaagagattcagaaggcagacttcaggcagaccctcagcgctttcctcatgggattcgccagctagctaattatgttcacagcaaaggactgaagctagggatttatgcagatgttggaaataaaacctgcgcaggcttccctgggagttttggatactacgacattgatgcccagacctttgctgactggggagtagatctgctaaaatttgatggttgttactgtgacagtttggaaaatttggcagatggttataagcacatgtccttggccctgaataggactggcagaagcattgtgtactcctgtgagtggcctctttatatgtggccctttcaaaagcccaattatacagaaatccgacagtactgcaatcactggcgaaattttgctgacattgatgattcctggaaaagtataaagagtatcttggactggacatcttttaaccagngagagaaattgttgatgttgctggacccaggggggttgggaatgaccccagatatgtttagtgatttgggcaacttttgggccctccgcttggaaatccggcaaggtaacctccagattgggccctctctgggccctaatcaatgggccttgctcccctttaatatccatgtgcctaaatggaacctcccgaacacaattcaagc

SEQ ID NO: 125683 - DNA, 1012 bp, Homo Sapiens
  misc_feature (429)..(858): n is a, c, g, or t
  misc_feature (881)..(881): n is a, c, g, or t
  misc_feature (915)..(915): n is a, c, g, or t
  misc_feature (940)..(940): n is a, c, g, or t
  misc_feature (959)..(959): n is a, c, g, or t
tttgttttccggatttttctttaatacagttgccatcttacatgatgtactattaagtgccttcttaatagcatctaacctacccttctgttgcaccgtttggcctcctgggatggaactcttgttaccacccatgtttgtggagtactgttcttcagtacagtacacctaattcatattgtcaggccatataattcacgggtagtggtattaatttctaaagctgaattaaagcacacatccaaaccacatatattttttacttttcaacttaaagagttcatacaaagtctatttcctttctacagtagctatcactccagactgtggtttaaaaatccaagaagtgggaagaatgtctttgttttcaatgcttctttcttccatcctttttctatcctccttttttcccctcgtgccgaattcttnnnnnnnnnnnnnnnnnnnnnnnnnnnnnnnnnnnnnnnnnnnnnnnnnnnnnnnnnnnnnnnnnnnnnnnnnnnnnnnnnnnnnnnnnnnnnnnnnnnnnnnnnnnnnnnnnnnnnnnnnnnnnnnnnnnnnnnnnnnnnnnnnnnnnnnnnnnnnnnnnnnnnnnnnnnnnnnnnnnnnnnnnnnnnnnnnnnnnnnnnnnnnnnnnnnnnnnnnnnnnnnnnnnnnnnnnnnnnnnnnnnnnnnnnnnnnnnnnnnnnnnnnnnnnnnnnnnnnnnnnnnnnnnnnnnnnnnnnnnnnnnnnnnnnnnnnnnnnnnnnnnnnnnnnnnnnnnnnnnnnnnnnnnnnnnnnnnnnnnnnnnnnnnnnnnnnnnnnnnnnnnnnnnnnnnnnnnnnnnnnnnnnnnnnnnnnnnnnnnnnnnnnnnnnnggcgcgtgctggcgttttcatangctccgcccctgacagatcacaaatcgagctaantcagagtggcgaaccgacggacatnagaacagcgttcccctganctctcgtggtctctgttcgactgcgctacggaactgtcgctctcctcggaagg

SEQ ID NO: 125684 - DNA, 2127 bp, Homo Sapiens
  misc_feature (67)..(69): n is a, c, g, or t
  misc_feature (71)..(689): n is a, c, g, or t
  misc_feature (1012)..(1027): n is a, c, g, or t
  misc_feature (1334)..(1362): n is a, c, g, or t
  misc_feature (2047)..(2081): n is a, c, g, or t
cagctggagcgacgacctacacgaatgagtacctacagcgtagctatgagaagcgcacgctcccgannngnnnnnnnnnnnnnnnnnnnnnnnnnnnnnnnnnnnnnnnnnnnnnnnnnnnnnnnnnnnnnnnnnnnnnnnnnnnnnnnnnnnnnnnnnnnnnnnnnnnnnnnnnnnnnnnnnnnnnnnnnnnnnnnnnnnnnnnnnnnnnnnnnnnnnnnnnnnnnnnnnnnnnnnnnnnnnnnnnnnnnnnnnnnnnnnnnnnnnnnnnnnnnnnnnnnnnnnnnnnnnnnnnnnnnnnnnnnnnnnnnnnnnnnnnnnnnnnnnnnnnnnnnnnnnnnnnnnnnnnnnnnnnnnnnnnnnnnnnnnnnnnnnnnnnnnnnnnnnnnnnnnnnnnnnnnnnnnnnnnnnnnnnnnnnnnnnnnnnnnnnnnnnnnnnnnnnnnnnnnnnnnnnnnnnnnnnnnnnnnnnnnnnnnnnnnnnnnnnnnnnnnnnnnnnnnnnnnnnnnnnnnnnnnnnnnnnnnnnnnnnnnnnnnnnnnnnnnnnnnnnnnnnnnnnnnnnnnnnnnnnnnnnnnnnnnnnnnnnnnnnnnnnnnnnnnnnnnnnnnnnnnnnnnnnnnnnnnnnnnnnnnnnnnnnnnnnnnnnnnnnnnnnnnnnnnnnnnnnnnnnnnnnnnnnnnnnnnnnnnaagaattcggaacgaggttttttttgaaaactttcagtgttttatttttgactgcagctgtttacagaaatatagttgcgagtatacaaatgttccaatagaagcaaaatatctttttaatatttaacaagttatcacagatagctaaaaacatagatgcaaatgaaattcccccagagaacaaactgaaaatatctggtatcagtgctctgaaatcccaactatgaaagccatatacacaaaaatgtaacccttatatcattgcaggacaatggaagaaggcagttcagtggttgatcagtgtgctcaagcaaataaaattnnnnnnnnnnnnnnnntggcagaatggtagctaaaccacttgagaacaggttaatgaaattattggtactatacttaaaacattaagtaaaagaagtgaatgaaactcatttaaagttgtcaaaaaattagcaactacttggagcttatcaattaaaaggaaacaaggtaagcagacacattcattagatcaaaagaaattagatcaagttccactggaatcagtctggtaactactcaaagtcacaaatgacttcagtgcaggagttttttactggacacagaagtctgattccaagcccactcttcaacagctgagatttnnnnnnnnnnnnnnnnnnnnnnnnnnnnnagacgttgtcctgaggttcatcagctaaaatgatataataagcaatccctacaaatatttcaaaccaggcaaatgacttctggaagagagagaaaggaaggggagagggagggagaatatgagtaagcaagcagggtcatatggttaaacatggaattttttaaaggagttattacaagtgggagtcaaatagaactgtggtagaatgctttgggtacaggaatatgttatgcaataaagtgaggaagagaaaaagggaataagaagggaggaatgtaactagagcagctcccaacagtttgcctatgtatttgccagcaccaaaatttgtagagtaagccacttacatttccactgctagtattaaggaaagacagcagtggtgatttttataaagtgagtatacatttatttttattctgatatgtgaatttttctttcacgagttaattaactggtaatttgtaaacagtgggaagaagattagaacaattatggaggtactgaattacacaaggagattaaaatgaaatgaatcaatctacctatcttgtggttagtttatatttaccatgatgcatacacttgagaaacgagaaatgcccaaattgtataatgcattatcttgtttattcccggccgtaatggccgaattcccgggcatatgtccggtaccgtcgactgnnnnnnnnnnnnnnnnnnnnnnnnnnnnnnnnnnncggccgcttcctcgctcatatgactcgctgcgctcgatccaggttt

SEQ ID NO: 125685 - DNA, 1165 bp, Homo Sapiens
  misc_feature (1021)..(1021): n is a, c, g, or t
  misc_feature (1029)..(1029): n is a, c, g, or t
  misc_feature (1062)..(1062): n is a, c, g, or t
  misc_feature (1074)..(1074): n is a, c, g, or t
  misc_feature (1082)..(1082): n is a, c, g, or t
gaggctgaagaacacaaatagagttgtctgtggattacatgattgtttccccagtgcaaggttcctgaccacaggcagcagatatccaaacacgccatgggagataagctgtttaaccctctggaacctagacaaaacaggaagaatggagaagtgcagaggcatacgtgaaaacagggctcagcacatttccagggtggagaaatatttaataaaatcagagtcgagagaaagtcacttgcacaattcatctcctacattcactgctggccaggccaggggcacctgggttgaaatcaggctgacctccggacagccgtactagcgcactgtgtctcggggggaatctcagggtgacgctgaggccgagtccccaaaagccaaggaagccagccccacaggctggggagccctgaaggccgggggagctgtggctgcactgcctctatcctgctgagtgtgctctgcccaggcctcactccttcaggagcttgtgcttgactgtggtgctctcggagcagagatggatgaagagggtgccggcggcggtgcgggcccgcagctcctgcagctcatagtcatgggcccactcaatgttgccccacttctggatctggtactcctcctccaggcgtgacagcagcacggcctgctccactgtcaggcgcaggtcaatcaggcccaaggttagcaccatggacttgagctgggcagctacaaactcaatcccttgtaaagcccatgtgttgtaagatgccaggtggctgacgagcacctcccgagttttggcagggatgctgggtcccattatgctggtggaggagctgatctccacgccgtatcttttctcagcccattcgatgattggatcccactcattccttttgagttccactaatgtctcgggctcctccaccctgtagcagatggtgtcggtgtcccagaaacttcacggctgcccggatcagctgatccttgtttctctgggttgggtgtccatgatgtgtgcacatgtggtcanggcatgtngtatactgatggatctgctggatccactcatancatgcatggcanggctcctngggacgtagactggctgggagtttcactctgtgtccagtactcaagcactcacctggtgagctaatctgaaactctccttcgg

SEQ ID NO: 125686 - DNA, 1003 bp, Homo Sapiens
  misc_feature (765)..(765): n is a, c, g, or t
  misc_feature (893)..(893): n is a, c, g, or t
  misc_feature (917)..(917): n is a, c, g, or t
  misc_feature (993)..(993): n is a, c, g, or t
ttttagttgtaaaacagatttcattgtgttatacatcacttcataaagtaagcatagttcccattcttccacatgatgctttttgcagcattgtaccacagaataatgactccctaataactcagctgaaaaatatttagatctacttgctctaagaataaggtcaacattaaacattctcagatgaaaagcttgctggatgaaatagtgcaccatcagaataaagcatgcaatatatttacagtcagatgaaacaagtgtgtccataaatcaaccaaaagaccatctcctcctttaggaaatacatgtattgcttagccagtaccaataagttaacgtcgtgtgaataattttgggtattctggccttcctgaatctcatacagccaaaccaaccagaaggcttcccctctgggttgatggtggcttatcatttggcatctggaaacttctcttattttgctggatatggctgtctagtgggtggcttactgacttgcctaagaaaaaataagtcaatcattcagattaatctgggaggctaattctaaaatcggattttatgagaattgctagatttggggctaggttaacctcatttccaaaagaaaaactcttactggagagaaaccatcatgttggctcattctattgtgtttatatatttcacagtaaaatgattcagtcttgccaggttccatattaggaggattagaactacatcactcaatattttctttttgtctgttctaaaaatatttatcanagttaatttatggacttatgggatttttccattcaggacttcatttgcggggagccttcagaaaaacaggtcactgcagtatataaagggctaactgtgatctggagaccgggttctcttgctgtcancagtgtatctttgtgtgtgcgttnacatgattctgctcatgaatgtgatatgctcaattgtgagagtagtactgaatttgtctttcagcaatattcaganatgaatactt

SEQ ID NO: 125687 - DNA, 754 bp, Homo Sapiens
  misc_feature (281)..(295): n is a, c, g, or t
  misc_feature (299)..(306): n is a, c, g, or t
  misc_feature (740)..(740): n is a, c, g, or t
ttcattttttaaaattttattactgtttaccaatggggagatgcagtttatttacaccagcagccataggggaaaggggaatacagttaatcagctatctgtataggatggactacttatgcaaaaataaaaatctccaaaacaaaggacagtggtgagcttcactaccctcccccgatgatcccagcatgcgataatgccaggcagtggtccctgggcatgcgatggtgggaactaatgtatggaagaaaaagccacaaaccacagaaattttaaagaannnnnnnnnnnnnnnatannnnnnnnacacacacatacacacactcagatacataataggattgcagggtgatcaatacacataatcaagggaaaaataggaattctgctattaaaaggaaggtaggtagggaaagggagagttcctaaccactgtcaactatatggtagggagcattctctccccagaaaggagtatgtaccctctgggcacctgttggaccaagcccaccttatacccatccagggcaggaggctactgccctattggtagaggggccagaaacaaaacaaaaggggggtaatatgaacaaagtattactcaaaactactttccgcttcctcctctaaccaggagaaaaggccagaaagaaaacagtaatttcaggatttgagttccctatctgaaggcagagggattggactgtggcctttctccctttacatcatcccacttccangacattgttaggaa

SEQ ID NO: 125688 - DNA, 731 bp, Homo Sapiens
  misc_feature (649)..(649): n is a, c, g, or t
cattgtataaaggcactttattttaaaatcaacacatcctgcttttataaatcagttactcttcatttccaacttccatcacctgagtttgagagcagagtgcatggtatttttctgggcttaaggtataaactgacatggcattcaagaacatgtccagcgggcagagcccatcagggcaacctctcggcacctgctccttcccgtggtaatagagctgcacaaaccactccttagattccaggtgctggtaaagttccatggtcaggtcaacagcaaacggtggccatttgtggtcaaaaatccccagggtcattaagagcggtatgaaggtcacatcatgagccgcatagagatacagctttctgatcttgtcgggggcagtggcagagtccatggctttcagcaggttgctctctaggatgtggaggaatgggcctactgccatctgaagactttccctgtcttccttgggcagtatgtacaaggatgtgtccacagctctctgttcgatcatccgtgcaaatctcttcagcatggggcagcttgggaggttgtgtgcctgctcggcagccacgttgtccaggaggatgaagaagtccactttatcactactgtcaatgcccatcctgtccttcacctttttcanatcctctgagattcctggctgttaagaggcagtctgcctccggcctctggttctctgcctcaggctccagcagctttggtag

SEQ ID NO: 125689 - DNA, 1194 bp, Homo Sapiens
  misc_feature (27)..(27): n is a, c, g, or t
  misc_feature (233)..(251): n is a, c, g, or t
  misc_feature (999)..(1019): n is a, c, g, or t
agcatgtacactatgaacagtggtganaaaagcaggctgggtacggtcggaattcccgggatatcgtcgacccacgcgtcgcttgaactaccaataatttttataaaatatctagtttttactacttttatataaactttactttccagatgaagagctgagcctgattcaaatggtttttctgctttatacttctttttagttcattggtttttatagtagaggttttctannnnnnnnnnnnnnnnnnnactacatttatatgtctgatacatatacggctttggagacaatcaagtaacaactgaaaatgtgaaagtaaccatatctgacaaaattcccttgaatttttatcctttgcttgcaacatttaagactcaaagtcactggtatattggattaagttttttcctgttaatgcaattatagaaatacatcggagacacaacaaatgtggccattacaggtttcataaaattacactgacttggctgttacttgatcttaggaaacagcacagtttaagatattgtgaattctgacttatactttattaaatgctataaatctaaatagatcctgttggatgtgatgggtctagtccagtttatttaagttcatgtttcactgtttgcactttgcattgaacaatgggtttattcgctgatgtaaacggttcgagtgaagaattaatgcagtaagtatgacaacacatacacacttgcctctccccatctccagaagaggggagcagagtccgagcttatctaaatatgaatgtggccacaaagctgtggaaggtgacacagcttaaacacctttgccctggctctgcattgtcacctagagagcaagaggtctatagaaacatcatgtcacatgaaacgattctctgctttttggttctgaacttgaagtcctaaactgcaaatctagagttgggtggtattagatgcttttaaaagttactaggcacaattcaagtatccacttgtgacnnnnnnnnnnnnnnnnnnnnngggggtggtgtgtggactggaaagtggaaaacagtttgaataaatggataaatgttgacgcatgaatcccaaagtatactactcgctctgcaattctgccaggcaatcctaagatcttaatctacagtcaacgttcgtgaattactgcaatcacaaacacgagatatgagctgtc

SEQ ID NO: 125690 - DNA, 471 bp, Homo Sapiens
  misc_feature (334)..(374): n is a, c, g, or t
aaaggggcccggaggggcgggcccgacaatgggaattaaattccccctgggaaagggggtggcctagtataagggaaaaagctacaaacctcaagggttgttttatttaaaccaaataatctgagcaagacatatatacattaaaaacaaatgaacacattaaaatttcactattttacaatctaaattctagcaacatatacaaatactgagtgactacagtacatgccgaggtaagataagtacattctgggagaatatcactgacgctcaaaccatttttatttccaatatgtatttcaatacatgtttgtttccacttttcccagtgccnnnnnnnnnnnnnnnnnnnnnnnnnnnnnnnnnnnnnnnnngtcacaagttggattacattagaattggtgccacagttgactttaaaagcattttaataaccacccaactcttagattttgcagtttagggacttcc

SEQ ID NO: 125691 - DNA, 1216 bp, Homo Sapiens
ttttgaggttcaaggctttatttcactttccctgtggcttcatttgtctcttttagaaaagatgacatcgcatagaagtggggctggaagaacctctggagggacagtttcagaatgaccggacccgctcctgaagctgatgccagacaactgtttttcaatatggggtggtgcactgggggtctagctggctcacaatgttaaaaatatttttgaatcaaattggaagacttaaaatccaggtttctggcattgctggaaaaatcagggcttgttgttgaagggcagcagccggacggaggcgaggatgtgctccccgcagggccctgtggctgcctgccccgctcctccgctccctgtggcctcctgacatacatcaccggccattcacagctgcgtcgggtagggtgcctctcgccagcgtcactcattaaggtatcatccaacccagtgtggagggggcttgcaagagaaagaggggtcactaacaattctcctgggacaagagactaaactgcgtggccccagatatgccaggacatgtgaccacgtcaccaccagccccaacagcgcttggatgggtcaggacagggctaccagacaattcattctgcctgtcagaaatggtcatgatacacagattcagctagaacaaggccctttcccatcccctctggaaaaactgtccaaacaagtgcgtaagtctgtgatgactgcaatgtgagcggcttcccctcggcggaatcctggcaccgtgcgcggcccgcactccgatccctggcagtcctgcacctgttgcgggaaaagttctctgcaccacagctccgtctatccatgtgggcaatgaaggacagccccgaggcctcaggaggcccatgtccagctgctcccctcattcctctcccctgcttggcctcaggtgcttcactgggaatcttggttttacactgggaggttgactgttttcccccaactgctacaacttgtaaacatattgacggtgagcattgatgacggaattcaagttggtggtggtggtgccctgcgttggcctccgccgcagggggccagtgtggtccggagccttgggccgcacctggggagtcccttgctgtacgtggggtgggaagctgagcccttccctcaccaaccttcttgctctggggcccgactgccgtctgtccaaaaggcctccccaccactgtgtggagactcc

SEQ ID NO: 125692 - DNA, 1048 bp, Homo Sapiens
  misc_feature (34)..(34): n is a, c, g, or t
  misc_feature (39)..(39): n is a, c, g, or t
  misc_feature (55)..(116): n is a, c, g, or t
  misc_feature (123)..(123): n is a, c, g, or t
  misc_feature (190)..(190): n is a, c, g, or t
ccatagcaccccagcttacattatgcttccgctngtatntgtttgaatgtgagcnnnnnnnnnnnnnnnnnnnnnnnnnnnnnnnnnnnnnnnnnnnnnnnnnnnnnnnnnnnnnnttgcccntcgagcccagaattcggcacgagcagccccttggctgcagcccatgcgcagtgggggtgctcggttnggcgctgtagtgtgaaaacaggagcccctggaagaggacagcccctcgtcctcgtcggcggggctggacaaggcccagcgctctgtcatcaagcccatcagcattgctgggggcttctacggtgaggagcccctgcacacccccatcgtggtgacctccacacctgctgtcactccgggcacctcgaacctcgtcttcacctatcctagcgtcctggagcaggagtcacccgcatctccctccgaatcctgctccaaggctcaccgcagaagcagtagcagcggggaccaatcatcagactccttgaactcccccactctgctggctctgtaacccagtgcacctccctccccagctccggagggggtcctcctcgctcctccttcccagggaccagcaccttcaagcgctccagggccgtgagggcaagagggggacctgccaccagggagcttcctggctctgggggacccaggtgggacttagcagtgagtattggaagacttgggttgatctcttagaagccatgggacctcctccctcattcatcttgcaagcaaatcccatttcttgaaaagccttggagaactcggtttggtagacttggacatctctctggcttctgaagagcctgaagctggcctggaccattcctgtccctttgttaccatactgtctctggagtgatggtgtccttccctgccccaccacgcatgctcagtgccttttggtttcaccttccctcgacttgaccctttcctcccccagcgtcagtttcactccctcttggtttttatcaaatttgccatgacatttcatctgggtggtctgaatattaaagctcttcatttctggaaa

SEQ ID NO: 125693 - DNA, 1038 bp, Homo Sapiens
  misc_feature (43)..(68): n is a, c, g, or t
  misc_feature (894)..(894): n is a, c, g, or t
  misc_feature (950)..(950): n is a, c, g, or t
  misc_feature (996)..(996): n is a, c, g, or t
taccctcactaaagggaataagcttgcggccgcctgctcaggnnnnnnnnnnnnnnnnnnnnnnnnnncttaaatatagatgtatttttttcatctcatctccggacacactccaatcacacccctcctgccctcccctctcaactgcaaaccaagcggtgcagacacagcacagcacacatgaggggccctccctttcaccaaagctgaaggcagggcacagtttggggatggaagagcctcgaggtaaatgtgggggttctagaacccagtgacctcagttctggatcatgggaaagggatcagtatgcagtaacgtggtaaggttccagatctagaagccaggacctagaacctagtggtttcacagtgggcagagcagttgggaataagccaggttaggggtgggggaagacagccagctctgtcctctgcaggcggattccctggagggagatctcagatttagaaaggaagagtaggatctggtccagaaagggccagaaagacaggaaggcatctggactgagactgtgtgtcctccagaaggaatgagcagccaagtggttctaccacctcttgcttggccaaagtgtaggggatgacaggagccggatggagggatcctccaggcagagcctggctctgacatgccagggagggctagaacatccctcccagagccccacttctggagttgaaatggaggaccatctgctctcagttaccttcaaactctgaaagtgccccggctctggacttgatcgccccattcgcagggacacacgtggtttccagaattggtggccgcatgcgggctgagcgtggctgctctgtagctgtaaattgtagcacagggggtctaaagccagactgaagcacatgcagttctanactctggacacgcaagtatggagatctggctcgggagcggtcagcagggactcagngctatagcaatctgagcaagaagacgctgtgatctgatgagactgnactgactgagggtgatgttgcgctggtgggacgcggcaccaa

SEQ ID NO: 125694 - DNA, 730 bp, Homo Sapiens
  misc_feature (61)..(74): n is a, c, g, or t
  misc_feature (144)..(155): n is a, c, g, or t
caggtttaaaaatccatcctctgtcaaaggttttactgacaactttccatacagttggtcnnnnnnnnnnnnnntacagaaccacagcagacagtatcttgtacactagaaatcaacataaccggattcccttctcatcgtttnnnnnnnnnnnntcccccaaaatctaagaacttagttttggtggtggacaggactttgatccccacccaaatgaaccaaaataacccaggagataattcaaaccaaagtggtagggtagagaggggatcagattttaaaataactgcttttgtgacacaaacatgacgctgggaaagacaggcttgggctaggcagtgtctctgacgatgactatcaccatgtgttcttcttctagcttgcccaatgtccttagtgctgactggaggtactgctgggaaaagtcgcagggtgggaaggcgtagagcatgcctgtgccgtctctgcccttggacccccccactggcaagctgatcacccctgcggcctgcttctgtttcaagtaggagaccaggttcctgagaagccgcctctgcagaccgggctctactgtgggcatcccctcagtgccaagcccactgggggttgcctgggtggctaagaggaccgcatagccgttggggctccctgcttgatgcgtcgtgtgacctcgtcaagcttgggctggtccagtcgaaggcgctgggcgatcttcagctgggtcagcttg

SEQ ID NO: 125695 - DNA, 1213 bp, Homo Sapiens
acaggtccaaccagctgtacatttggaaaaataaaactttattaaatcaaatgaatgagtatgtctgtttcctaagaaagacaatgataaagaatttggtggaaggtataataggggtttgttgactttgcttttagcctcatggtagttggtagagagcatgattagcttttttctgtatgtgactgcttcttcattgctgcagcttcagttttgaattgatgtctggactgccagcggcgtccattattccagacgcggccaaaagagggcagccagcctgcactggtcctggagctgtgatcaaagttggccccaactcggtctggggggagttttttcaacttctgtttttccttttctttaagaaattcttcataggatggtcctatttcttggttcccagcaatgtattcttcatcttggatcatccagggaggtgtggcacctgagtggatgttaccaactcctggtatatcctgatggccaatgaatgtcagagatggtcctgtctccatccagtcaagctctggagctggtggcaggtccaaatttgagggctgctgtaagctggaagctacttggctgttcatccctttccagcttctaggtgctgaagaccctcttctgggtctggcactgcctgaggtggtctggatcctccgagggaaacccacctctaagacagaccgaaccacctcctgtcggctctgctccacctcacggatctgagctgccatctccttgatcactttatcctcctgtgttcttcataggaatccaaacctgttcaccatggatttcttgaatcgcgcataatcctggggagtgaccagaaacttctctttcatctggacctcagctttgttctcccaccagaatttgttggttgctttcttgtgctctgggctggccagatgctccagcagccccccgtacagcaccgtcaggtttccatggctcaggtgttcccgcacctcacagccgcagcacaggcaccagcagcatcgctcgtgttcgggcacatagcgctccacctgagcggcgcggatggccttgcgggccgcctccacctggggcaggagcctctccaaagcctccttcagctgccgctggtgcttgcggctgtaaacgtgcccgcgaccacagaagaaggtctggcggcacagagggcagcgctgcgccggcgccatagcccgggacccggtatcac

SEQ ID NO: 125696 - DNA, 986 bp, Homo Sapiens
agccttttccccgctcattaaatgatttcggccccacgcccattttccaacgcgccaaaagaggcacccacctgcacggtcccggacctgtgatcaagtggcccccactcggtctgggggattttttcaccttcgttttcccttttctttaagaaattcttcatagatggtcctaatttcttggttcccagcaatgtattcttcatcttggatcatccagggaggtgtggcacctgagtggatgttaccaactcctggtatatcctgatggccaatgaatgtcagagatggtcctgtctccatccagtcaagctctggagctggtggcaggtcctaatttgagggctgctgtaagctggaagctacttggctgttcatccctttccagcttctaggtgctgaagagccctcttctgggtctggcactgcctgaggctctaagacagaccgaaccacctcctgtcggctctgctccacctcacggatctgagctgccatctccttgatcactttatcctccttttcttcataggaatccaaacctttcaccatggatttcttgaatcgcgcataatcctggggagtgaccagaaacttctctttcatctggacctcagctttgttctcccaccagaatttgttggttgctttcttgtgctctgggctggccagatgctccagcagccccccgtacagcaccgtcaggtttccatggctcaggtgttcccgcacctcacagccgcagcacaggcaccagcagcatcgctcgtgttcgggcacatagcgctccacctgagcggcgcggatggccttgcgggccgcctccacctggggcaggagcctctccaaagcctccttcagctgccgctggtgcttgcggctgtaaacgtgcccgcgaccacagaagaaggtctggcggcacagagggcagcgctgcgccggcgccatagcccgggtacccggtatcaccaccaccagcggccgca

SEQ ID NO: 125697 - DNA, 471 bp, Homo Sapiens
tgtctgtttcctaagaaagacaatgataaagaatttggtggaaggtataataggggtttgttgactttgcttttagcctcatggtagttggtagagagcatgattagcttttttctgtatgtgactgcttcttcattgctgcagcttcagttttgaattgatgtctggactgccagcggcgtccattattccagacgcggccaaaagagggcagccagcctgcactggtcctggagctgtgatcaaagttggccccaactcggtctggggggagttttttcaacttctgtttttccttttctttaagaaattcttcataggatggtcctatttcttggttcccagcaatgtattcttcatcttggatcatccagggaggtgtggcacctgagtggatgttaccaactcctggtatatcctgtagttggaaatgggaaaaaaagtgctagttaaagtctaggcatgattaaa

SEQ ID NO: 125698 - DNA, 651 bp, Homo Sapiens
ccctgtttttcctcttggccccagccctgagtgggaaatcattcaaccacccatcttttggtccatctgtccatccactatgtcagcaggtccagcccccagcgcctggtcacatgactgtctcccactcttcctgtagcagggcaggtggccgctcaggcccagaggcctcctcgtccaggcctgagcaggagccgttgaggaacccatcgtccttggcatggccaggcagctgagggtggccgttggtggtggcagtgggcagtaggcgggggctgaggggcaggccgagtcccacacgggggccgacattggtcacacttgtgtgggacaccatggggccgtagctatagctgctgctcccgctgcgtgcctttcgcttgaagtccagtgccagtgtccagcggctccaagatttcttgatctcagcttgtacctcgccgttgcagaaacagtatatgattgcgacaaaaaatccctggaaggagttgaagagcatctcatagtgcatctggacttgccagagcgtccctgagacctcggtgtatggtgtggccatgaagacaatgtagtggacgccaaagaggggcatgagcaccagcgtggatttgagcagcttcctgggccagcggggcaggtaggtcagggcca

SEQ ID NO: 125699 - DNA, 1037 bp, Homo Sapiens
  misc_feature (42)..(42): n is a, c, g, or t
caagcccccaggggctgggtccacaggatggttttccccatntttcctttagcaggggcagtgggccgttcaaggcccagaaggcttcttggtccaggccttgagcaggagccgttgaaggaaccccatggtccttggggagcagccatggcaggtggtgtggtctcacgaggttctccaggggctggggtccctggccttggcatggccaggcagctgagggtggccgttggtggtggcagtgggcagtaggcgggggttgaggggcaggccgagtcccacacgggggccgacattggtcacacttgtgtgggacaccatggggccgtagctatagctgctgctcccgctgcgtgcctttcgcttgaagtccagtgccagtgtccagcggctccaagatttcttgatctcagcttgtacctcgccattgcagaaacagtatatgattgcgacaaaaaatccctggaaggagttgaagagcatctcatagtgcatctggacttgccagagcgtccctgagacctcggtgtatggtgtggccatgaagacaatgtagtggacgccaaagaggggcatgagcaccagcgtggatttgagcagcttccggtactgctgccgtgtgtcacaccggccggcgttggtctcccgcagcttggtggcgagcacccggacgatattgatgaagaggatgaagttgagcacaatggaggccaggatgggcacctggatgatccactttttgttcccggagctcaagtcccagcacccggtgttggccagggtagctctgacactgacccacacagccacgaagacagcgggcagaccccagccgaagactgtgaagccccacaggtacttcttctctgagaagaaggccatgaagatgaggctgtgcaggtacagcccctccaccagaatccagtagtagttggtggccaggaagtaaaggaagaaggtcacagccaccctgcagcccgcgtagccggcagcggcggtggcaggcggcgggggcgcatccagggaattccggactg

SEQ ID NO: 125700 - DNA, 711 bp, Homo Sapiens
  misc_feature (588)..(588): n is a, c, g, or t
  misc_feature (648)..(648): n is a, c, g, or t
  misc_feature (685)..(685): n is a, c, g, or t
  misc_feature (694)..(694): n is a, c, g, or t
tttgaggtttgcaattttattaagaaaacaaaaattcaacctatacaaaaaggaaaatgcttccgttccaggaggcggtactgcggtgggagcagcagccaagtccgcgggaaaccgagctgctcgggcctgccctgcaccccccgcgcccccggccaggctaggcgtcctgctgctggatgaaggggttggggatggcctccatgccgtcctgcgggcagattagcaccacggacgtgccccggcacaccacgaggcccagctgccgggtgtcctccgtgagcttgtgctggtcgtcagggtctcgcatgtactcaatggtgccgtccagcacaaggttgaggagtgggtcgaagcccttcaggattccactggcttggagaaatcaccgggggagagaaaagagaaggcatgagatccgtcctgggcgcagggcccgccccagcatggcccaggtatggggctaactgctccagggatggaggactgagggtaggagagggctcccgggagtggccgatgacagccgcctccagagtgatctccaccacaggcagcagaccgcgtctgcggggggccagatggcanacacttctggccgtgtgggccacagggtgccggtcacagctgctggctcaagctgcctgngtggaggcagcttccggtatgagtccatgtgtggctngactgcggncggtcagctctactcac

SEQ ID NO: 125701 - DNA, 978 bp, Homo Sapiens
aaaagggggtgggaaggttttaagcaagcattccttgccaggaggtggagatttttcaaaggggggatcaatgatccttagagtcccatgtggttcgccccaggggggacctgtatagttaggccattttccatccccacccctcttattccttccaggcaggggttttcgagtctcctccccgaggcctgcaggttttttatagggcccaggagatggtgcccccacgtagagctcttcctatctgtgaggaagaagccggcccccctgcgttcctgtttttcgtgccgggtacttgatgggcccgagccccagttgttcccccactcgatcatggttcctggcttgagcttgtatgtcctcagctcatagatgttgggacccattctgggctgtggctcattccagaagctgaactcgaggagcagctggtttctcctggacagcagcatctggctccgctcccttcggaactccaggtactccttattgtttttgagcttgttcatgcagtccatgagggctgggtagccacctgagaatcgccacaggtgcactgcctggtcctgctccccataccacgtgttccagttgcccacgagtgagcatgggtagtcctcatccaggtgaagcttgggcagcacagcctccgtgaggctgttgtaggcatccaggtattcaggctttacattgtgaaactggatcttatagaggttgctggtttccttcttggacagcagggtggagtgggcatccttccggggatccactttgtgaacaaagagggagcggaaccagctgccttcattgtccttggaatagaaacgcgccgcagttgcagacgcaacgtccccagcgcgaggccccgggccccccagcagccgccgcgccgtcacagagatgctgcacagccgcggagccaatttggagggaaaaggtgcaggaaggcccattctcgaattccggaccggttaccag

SEQ ID NO: 125702 - DNA, 823 bp, Homo Sapiens
ggcagttccaggcttttctccagcaggagggacttggctcagactgtccagcaagtgggtggcccagtggaaaccagggaattcctgagggcctggcctggcctcctctcttcccaccccacctctagccactggacatactaccttttgtgcaactaagctaaacagaggatttccaagggtgataactggggactggtggccttgagatgaggaattttagaagatatatgaaggcctaaaagatcactatctttcattcagggaaatcagaaactacttctagcagggggagggaggcaggcagggaaagtagaaagggcctgggcagagctgtaatcctcagaacttgtcagccttcagttcccccttgtctgaactgagcactgcccctcagagtcctcccagagccaagacaaaaccaagacagcaggaccacgtgttccagttgcccacgagtgagcatgggtagtcctcatccaggtgaagcttgggcagcacagcctccgtgaggctgttgtaggcatccaggtattcaggctttacattgtgaaactggatcttatagaggttgctggtttccttcttggacagcagggtggagtgggcatccttccggggatccactttgtgaacaaagagggagcggaaccagctgccttcattgtcccttggaatagaaacgcgccgcagctgcagacgcaacggtccccagcgcgaggccccgggccccccagcagccgccgcgccgtcacagagatgctgcacagaccgcggagccatgcctcgtgccgaattaacaccaggcctcgtactagcctaa

SEQ ID NO: 125703 - DNA, 1198 bp, Homo Sapiens
  misc_feature (236)..(236): n is a, c, g, or t
  misc_feature (345)..(374): n is a, c, g, or t
  misc_feature (493)..(604): n is a, c, g, or t
ataccataaagagggccccgccacagggggcggggcgcgcgctatattttccctcattgtgggggaagagtgttccaacgggttttggcggacacccacccccggtttttttggggaaatagaggcctttatccaaggtttgcgtcgacgggaaaaacgcctctaaagggggaattttgggaacaaaaaaacacctccctggtttgcagcccgccccgcgggcgcggggttttttntttgattttggggaaaataaaaaaccaccccccttttggagctccccgcgggggggtttgttttccaggaaaaaagacctttcggaacctgcccctttgggtttttttnnnnnnnnnnnnnnnnnnnnnnnnnnnnnnttataaaattttttaggaggcaaagccctgcgccaaaccaggattttcctatgaaggcaactatgggccattttcccgtgcgttttgtggttcgtggggcaaaggaattgttttgatannnnnnnnnnnnnnnnnnnnnnnnnnnnnnnnnnnnnnnnnnnnnnnnnnnnnnnnnnnnnnnnnnnnnnnnnnnnnnnnnnnnnnnnnnnnnnnnnnnnnnnnnnnnnnnnatagtaaatatttaattgtttccatcagcaattccagcacaagttttcctggatggtaggcagaatcaagctacccaagggttcatgatgaggtatgggggtcactgaggagacccccagagtcactgacccctcccgccacctccacacaccaggtggccctgcagaatgagggttgggctgatagaatgtcaattaggggagacaggatacagggtgagggaacagggtctagcttgtatatttgcctgcaggaaggagggagggcaggagagactctgcatagaaggactggaactacacatttaagttttcaaccccaatatgcagggggaaacagccaagccactctccatctgtctagtattaggaacctctcttcaagtggtcttttgtcatctctgttcttcttcccaattctgtattccagattccaaattctacaattgaaacccaagttctgaattctaagttctaccttccgagttcctgttacgtgtctgtctcctgcccctaaatctttcctggctcccatccctttccccagcccctctgggcagaatgtctgaacctcctcctgaccgtggtgacgag

SEQ ID NO: 125704 - DNA, 841 bp, Homo Sapiens
cggattcgccgatgagagacccttcagaaactgctatttgggattttgtacgaaaaaccgctcgggtatcccccgcggggggtgtttttatatttgggggaggaaccccacgccctagattcactgagcccagatttttccttggggaaccaggtttggcctccggtcgctctttccctatgggggcccgccgcgcccaaaggaatggttttaaaaaacttttttagggcccgaggccgcccaccaaagataacgctagcatgccgcggcaccataccgggagtcggcagtcggcggcacgccgccctgaatcttctctccttttttgaggtttgcaattttattaagaaaacaaaaattcaacctatacaaaaaggaaaatgcttccgttccaggaggcggtactgcggtgggagcagcagccaagtccgcgggaaaccgagctgctcgggcctgccctgcaccccccgcgcccccggccaggctaggcgtcctgctgctggatgaaggggttggggatggcctccatgccgtcctgcgggcagattagcaccacggacgtgccccggcacaccacgaggcccagctgccgggtgtcctccgtgagcttgtactggtcgtcagggtctcgcatgtactcaatggtgccgtccagcacaaggttgaggagtgggtcgaagcccttcaggattccactggcttcgcggcctccctggaactttacccggatcgtcttgtcgatgtacttggacaagtccaagatgctctcctttttcttcttctccttatccgccatcttgtcgcgccgtgtggctcttcgcaggcaccgccccgcgccccc

SEQ ID NO: 125705 - DNA, 925 bp, Homo Sapiens
aaatattggcaaaggtctctcgcgggggcaactcccgcggtgtcggaaaaggattcccccgtttgaacagcccccgttcgaacacgctccccattctggggagttttggtctcaaagaaacccccttacgggttttccccgccccgggggcgttttttctattttggggggcaagaataccccaaaagcccctttggtgccaatgggccccgagggattttccccttggggaaacccaccgttattgggcccaaagtttccaacttgtgccctacagtgggggccgcgggggcggcccaaaaagggaaatagtgtccttggaaaaaagcttttttcgagagggagcccgaagggccggccccggaacaatggctttccttatttgagccgcggcgtagcaccgttcgttttaggaggtttggcaatttttcttaaggaaaccaaaaaattccaccctattccaaaaagggaaattgcttccgttccaggaggcggtactgcggtgggagcagcagcccaagtccgcgggaacccgagctgctcgggcctgccctgcaccccccgcgcccccggccaggttaggcgtcctgctgctggatgaaggggttggggatggcctccatgccgtcctgcgggcagattagcaccacggacgtgccccggcacaccacgaggcccagctgccgggtgtcctccgtgagcttgtactggtcgtcagggtctcgcatgtactcaatggtgccgtccagcacaaggttgaggagtgggtcgaagcccttcaggattccactggcttcgcggcctccctggaactttacccggatcgtcttgtcgatgtacttggacaagtccaagatgctctcctttttcttcttctccttatccgccatcttgtcgcgccgtgtggctcttcgcaggcaccccc

SEQ ID NO: 125706 - DNA, 1211 bp, Homo Sapiens
  misc_feature (29)..(29): n is a, c, g, or t
gatgagggaatttttagaaggatatatgnaaggcctaaaaagatcactatcttttcattcagggaaatcagaaactacttctagcaggggggagggaggcaggcagggaaagtagaaagggcctgggcagagctgtaatcctcagaacttgtcagccttcagttcccccttgtctgaactgagcactgccccctcagagttctccccagagccaagaccaaacccagccaggccagggccaggagtgccactgtctgtcggggttgcctgagggagaaggggaaggaggtggaggtgtaggccagcatcactgcagaggcgagatcttcaaggggatcatgatcctagactccatgtgtcgcaccagggggactgtatagtagacattttcatcccagcctctcttcctccaggcagcgtttcgagtctcctcccgagactgcaggtctttataggcccagagatggtgcaccacgtagagctctcctatctgtgagaagaagccgcccactgcctcctggttctcctgccggtacttgatggcccgagcccagttgttcccccactcgatcatggttcctggcttgagcttgtatgtcctcagctcatagatgttgggacccattctgggctgtggctcattccagaagctgaactcgaggagcagctggtttctcctggacagcagcatctggctccgctcccttcggaactccaggtactccttattgtttttgagcttgttcatgcagtccatgagggctgggtagccacctgagaatcgccacaggtgcactgcctggtcctgctccccataccacgtgttccagttgcccacgagtgagcatgggtagtcctcatccaggtgaagcttgggcagcacagcctccgtgaggctgttgtaggcatccaggtattcaggctttacattgtgaaactggatcttatagaggttgctggtttccttcttggacagcagggtggagtgggcatccttccggggatccactttgtgaacaaagagggagcggaaccagctgccttcattgtccttggaatagaaacgcgccgcagctgcagacgcaacgtccccagcgcgaggccccgggccccccagcagccgccgcgccgtcacagagatgctgcacagccgcggagccatgttggagccgcaaaggtgcaggaaggcccatcccgagaattccggaccg

SEQ ID NO: 125707 - DNA, 661 bp, Homo Sapiens
tttggacactttctccaggagggattgaggcggggtggcctcaatgggagacgggggctcctccttctcccggtccccgtcacacacctcatctgacgaggcgacagtattcacttccggtcggacggctttggaggcattctcactgagccggatctctttggccaggtctttgattagctgtgaaggtttgaagtgctccgggagctcgtcctcatgctctgccaaagcctgcttcttcgtccacgatcggaaagcaccattgagaattttagctccttggactagatgagggggcagctgcttcccagatttgtgagagcctttgaatgcctccagcaggtgcttccccatgtaccagcacgcagtttcaaagttgggaaactgagtcaggctgcccagtttcaacctcctttccacttcatatgctctcatctgcatctccacactcaggctgtggaggaaatgtcccgcgaaggccaggcagtccacaggggtgagtgtggcgtagatccagcctgaggggatgaagagggtctggccctgcttgacgatgcacttgtagcatttgtcgacctggtcagcagagaacatctcgctgtggttagaggcagaccgccagcgctcatacagggagatgttggccgaggccggcctgatg

SEQ ID NO: 125708 - DNA, 1251 bp, Homo Sapiens
  misc_feature (679)..(820): n is a, c, g, or t
  misc_feature (884)..(935): n is a, c, g, or t
  misc_feature (956)..(970): n is a, c, g, or t
tattctggagaattccaggaaggggaatttccccgggagggcggattatgggttttttggccccccgttttggggctgatattaccccccgcaaaccccacaagggttgggtgtacccccccacaggcgggacttgggaagaccatgtattccgttcggaattaaagttgttgggggatcccttgcccccttctgtggagatcacaaagttgccatgtttgactttaggaaacgtgaaagctcttggagcaatttgtctgcgccccacacgggtatcatcttctatgctccatacacaggagtctgtgtgaagcagcacaagcgggttgacccaggccatccagaaagccagggatcatggtctcctcatttaccacatcccccaggttgaaccacgggaccttgacttcagtacctctcatggggctgtgagtgctactccgccagcccccaccctggtctcaggtgacccctggtacccatggtacaactggaaacagccaccggagagagaactgtctcgccttcgccggctttaccagggtcatctccaagaagagagtggccccccacctgagtcaatgcccaagatgccccctagaacaccagcggaagcctcctccactgggcagacaggccctcagagtgctctgtaggagctgtagactgggaagagagnnnnnnnnnnnnnnnnnnnnnnnnnnnnnnnnnnnnnnnnnnnnnnnnnnnnnnnnnnnnnnnnnnnnnnnnnnnnnnnnnnnnnnnnnnnnnnnnnnnnnnnnnnnnnnnnnnnnnnnnnnnnnnnnnnnnnnnnnnnnnntgtggtggtgcacacctgtagtctcaactattggggaggctaaggtaggatcacttgatcccannnnnnnnnnnnnnnnnnnnnnnnnnnnnnnnnnnnnnnnnnnnnnnnnnnntgacagctagaccctgtctcnnnnnnnnnnnnnnngactgggaagagagctagagggactaggagataatgtgtatgtaggtttatgtgatgggatatcaccctgaagagttgtgtcttttgtggccagtgacaaatccaggaaatgaatgttgctgatagggataaatcttgaggctgagggcgggtggtacagatgtgtatgggaaaccccaacccctatatattgtaaatagatgggctgggctaaacattgttgccgtttcatacttctaccaactcagcttttacacaataaagctttactgtctctggtt

SEQ ID NO: 125709 - DNA, 924 bp, Homo Sapiens
  misc_feature (65)..(66): n is a, c, g, or t
ccacttggggtttccccaaagtgctgggattcccaggaggtgaggccccccagcctggccctctnnttccccagtttacagctccctacagagccactctgagggccctgtctgccccagtggaggaggcttccgctggtgttctagggggcatcttgggcattgactcaggtggggggccactctcttcttggagatgaccctggtaaagccggcgaaggcgagacagttctctctccggtggctgtttccagttgtaccatgggtaccaggggtcacctgagaccagggtgggggctggcggagtagcactcacagccccatgagaggtactgaagtcaaggtcccgtggttcaacctgggggatgtggtaaatgaggagaccatgatccctggctttctggatggcctgggtcaaccgcttgtgctgcttcacacagactcctgtgtatggagcatagaagatgatacccgtgtgggcgcagacaaattgctccaagagcttcacgttcctaaagtcaacatgcaacttgtgatctcgacagatggggcagggattcccaacaactttattccgacgaatacatgtcttccgagtccgctgtgggggtacaccacccttgtggttgcggcggtagtcagcccagacggggcgagaaccatatcgctcctggtattcttctgattccagatatttccagggctcatccttataaggagaaatgggaactgaggacaaagaatcttcctcagagggagctttggtgcaaagagtctggaggggaacctgaactctgtgagaacctcggaagagagatagcataggaagccgcctcagcacggtgtttaatacagacgccgccatcttgacgtccccggccgtaatggccgaattcccgggcatatgtccggtaccgtcgactg

SEQ ID NO: 125710 - DNA, 1321 bp, Homo Sapiens
  misc_feature (283)..(297): n is a, c, g, or t
  misc_feature (318)..(369): n is a, c, g, or t
  misc_feature (433)..(554): n is a, c, g, or t
  misc_feature (557)..(557): n is a, c, g, or t
aaaccagagacagtagagctttattgtgtaaaagctgagttggtagaagtatgaaacggcaacaatgtttagcccagcccatctatttacaatatataggggttggggtttcccatacacatctgtaccacccgccctcagcctcaagatttatccctatcagcaacattcatttcctggatttgtcactggccacaaaagacacaactcttcagggtgatatcccatcacataaacctacatacacattatctcctagtccctctagctctcttcccagtcnnnnnnnnnnnnnnngagacagggtctagctgtcannnnnnnnnnnnnnnnnnnnnnnnnnnnnnnnnnnnnnnnnnnnnnnnnnnntgggatcaagtgatcctaccttagcctccccaatagttgagactacaggtgtgcaccaccacannnnnnnnnnnnnnnnnnnnnnnnnnnnnnnnnnnnnnnnnnnnnnnnnnnnnnnnnnnnnnnnnnnnnnnnnnnnnnnnnnnnnnnnnnnnnnnnnnnnnnnnnnnnnnnnnnnnnnnnnngantgagccaccacgcctgggcctctcttcccaagtctacagcctcctacagagcactctgagggcctgtcttgcccagtggaggaggcttccgctggtgttctagggggcatcttggggcattgactcaggttgggggggccactctcttctttggagatgaaccctggtaaagccggcgaaggggaagacagttctctctccggtggctgtttccagttgtaccatgggtaccaggggtcacctgagaccagggtgggggctggcggagtagcactcacagccccatgagaggtactgaagtcaaggtcccgtggttcaacctgggggatgtggtaaatgaggagaccatgatcctggctttctggatggcctgggtcaaccgcttgtgctgcttcacacagactccctaaagtcaacatgcaacttgtgatctcgacagatggggcagggattcccaacaactttattccgacgaatacatgtcttccgagtccgctgtgggggtacaccacccttgtggttagcggccggtagtcagcccagacggggcgagaaccatatcgctcctggtattcttctgattccagatatttccagggctcatccttataaggagaaatgggaactgaggacaaagaatcttcctcagagggagctttggtgcaaagagtctggaggggaacctgaactctgtgagaacctcggaagagagatagcataggaagccgcctcagcacggtgtttaatacagacgccgccatctt

SEQ ID NO: 125711 - DNA, 1986 bp, Homo Sapiens
  misc_feature (46)..(46): n is a, c, g, or t
  misc_feature (144)..(144): n is a, c, g, or t
  misc_feature (767)..(775): n is a, c, g, or t
gggcgggtagtcgggttgggtgcgagaaaaggactcgttgggggcnttgatggaggcgtcttgcgcgaatttgtagggggtgtggtatgctgagtgtagtgtggggtatgcgcccaatcggtcgcgtatacgagaggctgtaanccggtgaaggacagcctatggatctcagccgtggcggcactgtgtgcgacgcagttgtgcacgccgggcgaggggagaaagtctggccgcgggggttaaggaagggtagtcgtagcgctgttggtgtaggttgttcgtgaaacataagataaaaccaagtgtagctcgacacgcaaacccctccaaacgctcccacggctcgtcacaggcgaccctataccaccgcgggggaactgcctcccagcctggagaggtgtatcaatgtgaaaggctggagtggaagacaagtggcgccccctttttgcacgccccgcacatgaagagcgtgacccgcagaacatccgtaggggggtgtgcatttcaaccgcggggagtgagtccttggacccccgccaacgcgcccgtgggcccttctttgtttgccccaaggtcttaaccaggcttcccttaccaggaggccgctatggaaggggcccttgtccgcccccacgtggagggagggctttccgctgggtgtttttagggggggcatcttggggcattgactcaggtgggggggccactctcttcttgggaggatgaccctgggtaaagccggcgaaggcgagacagttctctctccnnnnnnnnngagatgggaaggttttattagactaggagatttgtgggaggtatgagcgctgggccaaggtggcacgggccatgctcaaggcaccctctcgggtgcggtgaccgccaatgaagccgcttgcatggacgaagatgcagccagggatcccactgacctggtccagggcctcgtcccgaagaccccgccatggctctggcaggggcagccggctttggaatgagtggggctccttgggcacacactgtattcgccactgtccagcctggtcagtgtagataacaaagaagatggccactggaggggacagcccagattccaggtggtagagatgctccttccagggacatgcacctttcgccagttccacaatctctccacttgggtccacctggaatcgctgggcaagggcctcttccaccaaggcccgggctggcagccagctgtgttggtagaaatctaatctctgcagaaactcctcttgaaccagatccattgcacgcttgaaccctgcctcagtgtcttggtcggggtggttccaggtaggattaagtcgagcaactcgtgcactcagggtagtggtcagtgcatatcgaggctccccctctgcccactgggagatcccattgtccacagcatccacctcctccacaaagttctcatacatcttgtcatagagggtgcccaccatgctgtcctcttcactagtgcccagcaactgggccagcagcttgtgcccgaagtgcagatagatgagtcccgcactgctcagcttggtctgccacggcttcccaggggacagggagctcatggtctctgtgaaagacctctggtgatggtcatatcggtgtctccgagggtcgtactcgccccccacgtccaccacgatgtcacaggaagcgagtttttcgggatcccgggtccgcacaatctctgcatcccggtactccggcaggaggcgaagcagtgcgcatgccagtgcctcgtcgcagtggaaggtgccattgtgcgtcccgattcggggcggtgccatgagtttgctgcgggatcgttttgggggcgggacggactctggaccgagcatgcggtgccgggtatacaggggtggcggcggcagcagcagcgttaagaggccgcgcaggaagcggtgtcccataagcagctccctgcagggaggcctcgtgccgaaatcgccacccaggcctcgcttcctt

SEQ ID NO: 125712 - DNA, 882 bp, Homo Sapiens
ccgacgggtctattttttgccccggtttcacagtttcctacaagaagcacttttggaggggccctgtcttgccccaggggaaggagggttttccgcttggtgttttaggggagccttcttgggcccttggaactcaaggtgggggggcccactcttcttctttgggagatggcccttggtaaaagcccggcgaaaggccgaggccagttcttttctcccgggtggctgttttccagttgttcccatgggtacccgggggtcacctggagacccagggtgggggttggcggagtagcattcacagcccccatgagaggtactgaagtcaaggtccccgtggttcaacctgggggatgtggtaaatgaggagaccatgatccctggcctttctggatggcctgggtcaaccgcttgtgctgcttcacacagactcctgtgtatggagcatagaagatgatacccgtgtgggcgcagacaaattgctccaagagcttcacgttcctaaagtcaacatgcaacttgtgatctcgacagatggggcagggattcccaacaactttattccgacgaatacatgtcttccgagtccgctgtgggggtacaccacccttgtggttgcggcggtagtcagcccagacggggcgagaaccatatcgctcctggtattcttctgattccagatatttccagggctcatccttataaggagaaatgggaactgaggacaaagaatcttcctcagagggagctttggtgcaaagagtctggaggggaacctgaactctgtgagaacctcggaagagagatagcataggaagccgcctcagcacggtgtttaatacagacgccgccatcttgacgtacgcccaggacaggaatccc

SEQ ID NO: 125713 - DNA, 1245 bp, Homo Sapiens
  misc_feature (1207)..(1207): n is a, c, g, or t
  misc_feature (1233)..(1233): n is a, c, g, or t
gacttgtatgccaaaaacttttattaataaaagctaaaattttctatattaaatacattaaatccagacttttaattcatactacaattctgtagggcaagcacaatcattttccccattttataataaagttgggagccaggaggagggagctcagagagagtaagcatctcacacaatgtcagttagacagcgggacagctggatgtacccaggctggacaccaaagcctgtgctctgaaaccctgccccacacttgctccctgggaaggagggtttaggaatgagactccaagtgacaggagagctttctttcccccaggccatgttaacacggcctcaaggtacacaaatggcccctaggacaccaggcctatcacccctgtccccgtctgacactggcccagaaccaaagagaaagcaggtctataacatcacagtccatttgaaactcatgtagcctaatttttttcaaagtacatattttatttatatagattagtgcaagctgaacaagaatatggtttgtaatccaatttatacagcatcacgtagtggctgactgtcctgaccatgggtggaagcagggatgactggccttggtaaaggaaatgacacacattcccccaatttggaagcaatcttaattagccagggagtgatttttttccttcagcaatgtagtccccaaagtacagacagcttctctcttccttataggccgagtcgtaggagtagcaagcttctaaattttggctgtgcctctgagcttttggcctaagtcccaccagccccgaagtttccatgacaacaaaacaaggatcaacgtgcctctgacactcccttcagccccaaattgttctcttactcccattttcttcctacctcccaagtatcactgggatacaagcagaacagggctggggtgctgaactcacccttggggaggactcattatagcatccctgctttttctccattatcgtccaactgcctaggcccaatttaataacatgctgcttgtctccctggaaccgcctgcccactctatacatggttagcacttccctccctcctttggtcaatgtgcagcttccaggcacgtgaggtttaaacacacacccgccaccccattagcctgtcttcagcttgtggtgaccacgtcaccagcccccaggtgagagacgaactcttagggcccttctcnacattctccttcctttctgggagtcnctgattgatccc

SEQ ID NO: 125714 - DNA, 1379 bp, Homo Sapiens
  misc_feature (1368)..(1368): n is a, c, g, or t
tttttttagacaaggaacttgctgaaagaattttatttgtgagtaaaacatgttacactggagaaaggacattcaggacctgtcctcccaagtcggtgtccatatatgcaactatatttcatgttgtaatacaaaggattaaactacaaaagtgaaaattaaaagtcattgcatatgtggggtaaaggaggggataaaggaagagtccacggttaaggacttttcattctgccttggcaacaaaacgacacagaagagaggcagcacgcttgcccgcgtagcaggccctgcggctcagaggaagctggaagcggcggtcagtgccatgcagcagcctggttctcgctcggctggccaatcagtgggatccgaggtggctcggcccatcatgcccaggatctgagcccacatctggcaccagctctaccaagggcctgttgggcccacacaagcttgcctgtacctagtcaggctggtaccggcacctcctgaaatgggtcaccctccggttcctgctcagcagctctgagcccttttccagcctcttggagggaagtaacaacaacagcatctgccgaggagcacacggttcaggctccatcaatgacggtgatgtcgaggggccccagggctaccctccacctcgagttacctttgatcacaactagggcatctttctggctgagttaaggtgagaacagtcccctgaagcctcccccaaataagtgaaaagtgctctactgtggggtctggaaagaagaaagcaaaaagcagcctattcacgttcacagtcgaaaaatgtaagctaaattgtaaacctgctcaaagaaaattctagaaaggcctcttcccctcctgatataccttccctatgacaggaatccagagacccaagtgaaaaagaaactgagctcctgaatctgattctggtcgagggatcgtcggtcagacatgcatagcatcacgttgggtgcacacaggcccatctgccgctggggtttcctgcccagcatctggcccagacctgcctcttcaaggccgctggtgggcacacgagtgttttcacgggaccaaggctttgtatatagatttaagtgagatcactgagcagagagaatgccacatgaagccaggagtctgagtccgtcacctgagactttagggtggaggggaagccaagcagagacagaatgtggttatttcacaacaggagggacggcaggaaaggttaggctcaagagggtgacgtgcagccaaagctgcggaagccttcagtaccttccagccaggaccatgacttagttcctcccccctgtgtggagagcatgtctcccccagaagctgaggctctgagaggacaaggggcanggtggggtggg

SEQ ID NO: 125715 - DNA, 824 bp, Homo Sapiens
ctcacagaatcaaagattcacggaggcttagaatctggatgtttatccccagagactaaggtccatgcacaggcttactgaagcacagtactgattaagagcttaaatgtttatttaaaacagaaatgccaaaccactccactctcaacctttcaagcaacctggctaacaataaactagttcttctgcaacaatgttagagcagaggagtaactcaggttatactgtaactcaaaagcaatactactagaaaacttaaaacacctagcactgcataaagaaaaaaagcaggacaaaatttaaagagaattagctacagaaaaccattcaaaggcatttctactgcctcatcttttactccatccccctttgaactggtttctgtttgcatacttgtttggtgggaaaaaaaatcatatggctgtcccaggcacaatatgggaaagtgcaaactgtctctaaggcacagaacttagattctcagccagattaatagcaaatctagacttcccaagggaatatgctagagaaaatgaccacagcgttccactgctagggaaaggctcccctatgaacaagaccagggcactcacccacccccggcactcactttcaccccaccttctcagcaacctgcccatgtccatcagctccatggcagaagcaatcctcatgatgaacacccaaactgacccagcctctcaggcctgctgagatgatgagcatgaggatacagggacatgacaggtcaatcggtcctcaagaaaatcaaagttgcatttacatgctgaacccaaaccactgttacagtttatgacaccccc

SEQ ID NO: 125716 - DNA, 790 bp, Homo Sapiens
  misc_feature (42)..(42): n is a, c, g, or t
cgtacattatcaatatggagacatgatcacctactcatgtancagtggatacatgttggagggtttcctgaggagtgtttgtttagaaaatggaacatggacatcacctcctatttgcagagctgtctgtcgatttccatgtcagaatgggggcatctgccaacgcccaaatgcttgttcctgtccagagggctggatggggcgcctctgtgaagaaccaatctgcattcttccctgtctgaacggaggtcgctgtgtggccccttaccagtgtgactgcccgcctggctggacggggtctcgctgtcatacagctgtttgccagtctccctgcttaaatggtggaaaatgtgtaagaccaaaccgatgtcactgtctttcttcttggacgggacataactgttccaggaaaaggaggactgggttttaaccactgcacgaccatctggctctcccaaaagcaggatcatctctcctcggtagtgcctgggcatcctggaacttatgcaaagaaagtccaacatggtgctgggtcttgtttagtaaacttgttacttggggttactttttttattttgtgatatattttgttattccttgtgacatactttcttacatgtttccatttttaaatatgcctgtattttctatataaaaattatattaaatagatgctgctctaccctcacaaaatgtacatattctgctgtctattgggaaagttcctggtacacatttttattcagttacttaaaatgatttttccattaaagtatattttgctactaaa

SEQ ID NO: 125717 - DNA, 443 bp, Homo Sapiens
cagcaaccccatcccagaatcctattttcctgggaagtccttaaagcccctaaccatcccacactcttcactttcctttccaccttattcattctctgtacttaccacagtattttgcacttgattacatatccttcactctcttctcttcatcccatcaccccctaaataggtcaggtgagggaggctgggaagaggtgggaggaggggcagaagtgaaggaagaataggaaggatattacctcttctgttatttttttaagaaacattgtttggtggcagcaatctccctgtccctatcactgttagaggcctaattttatatctataaatatattaaaaagcaagtcaaacttggatgtatcaaggtaaaattattgtcaaagtttaaatacctatatattctctgaatgcaataaagggacttaagagtgaacaagaaa

SEQ ID NO: 125718 - DNA, 1624 bp, Homo Sapiens
tgccaattcagttctttactggagtggaagggctggggacacaactcctttatgaaaggaaaccgagggccacatctcgggccccaatctggggcgttcaatccagccgctgctccggtgcggtttgggctcaggccactctcttccctgggcggccccggccccggcctcgcccaccatcccgggaagcccctctgggcccccgcctggcctgggctccctgggacttgtccttggtcttgggaaacttctggtcacaaaggcgacccctgcctcgatccatttcccaccgcttccgcttccgccctggagacttggcaagccgtttctgcttggcctcggggaacaggtcctcactgggcgcctcgcccaccgcctggcaaaaatactcgatgtcatcatcttcctgttcatcatcgtcctcacccaactccaggctcgccgtccttgaagggatcccagaggcctcttcatcactacccccgacccgtgccttcttcatgccctccaggctcttctttctgtgggcctcccgctgctcctgcttgcgctgcacattctgggcctgctgggcctgcctctgcgccttcagccgcagcttcttctccttggcttccaggatggcctgcagctcctcctccgtcttgctcacaaaactgtggaacatcactttgccctccccgacgccctcctggaccttgatgagctgcggtgtcatccgcgggccgatctcggtgagccgcactgcactctgctgggcccgcatgttgccccgggccagcgacagcctgaggcagctctgtgatgttgttgtcgccgtcaggctctgcctcgctctccgacagccccgcgcccgtggccagcagctcgctgatgtcctgcaggcggctcatgttggggaacttctcctggagcagcttcttcatcccgcgactcgcgcccacaggaacaactttgatgctatagtggcggaagtccagctcctgggagtcggggttgtagtcgatgaggaggcagcgcttgatggtgttcaggttcaccttgtgcacgttgatggaggggaacaggttctggaacatggtggccatgagcttcacatgcataccatgggggccaaagctgttgagtaccaggaggggtgggtgggcaaactgctgctcgtgcatgcggtgccggcgcagtgaggagaccacatcacgcaccagcgagtacttcttgacctggaaggtcaaggtggggcctcctgggaggcgcatcagcttaaagtagacattggtctctgttttgctcaggatcagaaagtgtgtgaccccgaggggcccagccactgccacgcagtccttcagcgagttcttcttacgaacctgcagacggctggcagtgagcggctccatgacccgccgcacgtccaggctgagctgccggatgttgcgacccgtgcagcctcgcgtgaacacgaacgagtgcgggttcgcggcataggcctcgaggttgcggagctgcgcctgggcgcgggcgcgcttctggtgccgggacctccctgactgtcccatgctgctgtgtcctccacgaggcctccagccctcgtgccgaattcacacacccagcctcgctacctagccca

SEQ ID NO: 125719 - DNA, 510 bp, Homo Sapiens
gtaaaaagtacacacagcatggcagttcccagcctcagagattctgatttaagggtctagccgggagcctgggcatgtgcttgaggcccccaggtgagtccagagtacagcggggctgagagtcgctgttgacattggctgcagggtggacagggcgagatgggccctgcccgggcagacctgtgtattgctaggtccttccggctctgatgctctgtgataattggccactttctctgccattttcctcccagagagcaaacacaggtctagactcaatatcgtgtggagctatcgatgaccacgggtcacttccatctccagcactgcaggctgtgcgggctggtccaactggggtacggttgagggtcctggctcagaccaggcctgactcctgggccagtctgtaaaacaggcccttctgggccagcagctgggccgggctgccgctctctgccacctgccccttgtccatgaccaggacccgggcacagtccatcacggagcgca

SEQ ID NO: 125720 - DNA, 618 bp, Homo Sapiens
  misc_feature (57)..(68): n is a, c, g, or t
ctactttaaaattacattttatttctctttatgaatatttgctttttgttttttgtnnnnnnnnnnnnggttcattttacatcttcttcaagagtcttgtgcctcctggtaagtgcattggtttgtttcacagtactctccacgaccaaggacggttcttattgctggaaggagtgagtggatgtccacgccagggcggggctggaggacataagaagaatcggggccctggcaggaagcctggggcctgtgctccaacaagagcaaggaggctgaaggagcagaccggggctcagctgagcgtccgtggccggacctgcagcctctccagggtgttcctagcccttcttcggtgaggaagggcagaaagaaggggcacgggtgaaggtgggtcagggggcaaggtgggctgggggccgggcatgcagtgggaggggtgctggctcctgcctcgagtgtttgctctcactcaagaaatgcgggttcgggggtccttcaccccctagcagctcaggaagcccctttccattctggtctccagccccacctccaggaataaaccagcggcctgagacccgcttcctgaacccccagggtcctgtccctgctttagtgcaa

SEQ ID NO: 125721 - DNA, 1118 bp, Homo Sapiens
tttgacagtttcattaattaatatattttctgcattatagttaacatatgtactttcttcgtgtcaccttattttccgttaagtattgatattttgttatattcaaacatgagtacatttcaacagtcttttgcaataaataccataaaataatagagattcgcataataaatattctttacaataaaaaagtttaacagacttttgtcttaaaaatagtcagaattcaactttgtgatttatacataaaatatacaaaaagcaccacaatttgtggttaaggcaaggaaaacacagaagagattagaattactcagctgttaactatccaaggggccaaaaggaccattaaggagccaagatcactttaggcagcatagttctgtgacacatatagattgatcagctataaatatcaacttgagttatccaagtgccctcaatgacaacaaaaatttggtgagaagcatggggtgaagaaggaaggtggctgagtccttcacaaatacgaaggctagagtgaagatgggcaaggtccaaccaatattatctccaatgtgaagatttacattgtaaggcgaatctaaaattacatagaaagaaaaaatacacttggcatctccagagtaagacaacaacaaaactgagggggaaagaaccttgaaggagaaagaaggagagggcagtggttaaaggaaaatttttacgttatagcaaaaaatatatcccccatgctacttaaggggcctatgctaggaagatagccctaactggagacagatttaatacatagcttatttaagcaattaaacagttgctttttaaaaaaccaatttccctgctcccacggtacccaatcaaaacaactctaaatcactgtagtctggatgtgggtgtatgttcatgtacacaactttagaaagttgcttgcagaacaaaaaggctacacaaaagcccactggctctcaataccctcaagtggatggcagaggctcttgttgaaggtgggagccaggtgcagcttcccagtccactcttgctgaagatcatccatgaggaaagagaaaaatccatgagttagaccttggcaacaggggaagagaaggttggaaacaggg

SEQ ID NO: 125722 - DNA, 983 bp, Homo Sapiens
  misc_feature (81)..(81): n is a, c, g, or t
  misc_feature (83)..(83): n is a, c, g, or t
  misc_feature (183)..(183): n is a, c, g, or t
  misc_feature (312)..(312): n is a, c, g, or t
ttccttacccaaccccaaaaggatgtttgggttagagctgggagtggaatctttacttcctttctcctaaccctttgttcncntatcccgcaaacgacccaaccaacatgggtgagttgatcccggtgtaaacgtgtgggagatgtgaacacagattggacacggctgccagagcgtttcgtnagtgacgcggagtatacccgagggcgctggagcctgtttgtttacgacatcacagccgggagacatacaactcactgctgctggctgacggatcccgcaccctgccagcccaaaaatcgtgtcatcctntgtgcaacaagaaggacctggaccctgagcgggaggtcactttcctggaggcctcccgctttgcccaggagaatgagctgatgttcctggagaccagcgctctcacaggcgagaacgtggaggaggcgttcctcaagtgtgcccgcactatcctcaacaagattgactcaggcgagctagacccggagaggatgggctctggcattcagtacggggatgcgtccctccgccagcttcggcagcctcggagtgcccaggccgtggcccctcagccgtgtggctgctgagctctgtggagccagctcacctgttctccaggaccagccctgctggggcccaggcccaggctttgagaggccgtgtcctaacctgccctggccccggagaagctacgttgccacctgtcccccttccctggcctggtggggcctggctttggggcaagactgagccacgggggaagggggaatcccgtacctgctgctgcttcctctgtcttggctaacgtctgtccccctgaacccctaaccataccccaagagctcccaaagcctgagatcagggtcatttgtccccaactccccatctggccctgctgttgctagtacctgttatttattacctggaggcctgtccagcacccaccctaccccgcataaagcattgtttac

SEQ ID NO: 125723 - DNA, 1039 bp, Homo Sapiens
ttttccaagggtgtaaacaaatgcctttatggggggtagggttgggtgtctggacaggccttccagggtaataaattaacaggtactagcaacaggcagggcccagatggggagttgggggcaaaatgacccctggtctcaggcttttgggagctcttgggatatgttaggggttcagggggacagacgttagccaagacagaggaagcagcagcaggtacggatttcccccttcccccgtggctcagtcttgccccaaagccaggccccaccaggccagggaagggggacaggtggcaacgtagcttctccggggccagggcaggttaggacacggcctctcagagcctgggcctgggccccagcagggctggtcctggagaacaggtgagctggctccacagagctcagcagccacacggctgaggggccacggcctgggcactccgaggctgccgaagctggcggagggacgcatccccactgaatgccagagcccatcctctccgggtctagctcgcctgagtcaatcttgttgaggatagtgcgggcacacttgaggaacgcctcctccacgttctcgcctgtgagagcgctggtctccaggaacatcagctcattctcctgggcaaagcgggaggcctccaggaaagtgacctcccgctcagggtccaggtccttcttgttgccacagaggatgaccacgatgttggggctggccagggtgcgggcatccgtcagccaggcagccagtgagttgtatgtctcccggctggtgatgtcgtacaccagcagggctccagccgcccctcggtaataactccgcgtcactgaccgaaaccgctcctggccagccgtgtcccaaatctgtagcttcacagtcttcccacccacgttgaccacccgggatccaaactccacgccgattgtgtggttggagtcctgtttgaacttattctcaatgaactgatgaaggagacatgatttgccagttcctgcactgccaatcaccaggaatttgaagaggaagtcgtaggtc

SEQ ID NO: 125724 - DNA, 901 bp, Homo Sapiens
  misc_feature (653)..(703): n is a, c, g, or t
cttatttaccagggtttgatttgggatttttaaaaattgatacctttaccattgcagaaaagaacttgtgctttcccaggggcgtatgtgtattgtttcaactgtattattataattatattttgcattgcaagattcttgatgttaaaccaatccttgtaaagggtaaaaaggaaccctcctatcggggaatgaaagattaagtatattaacacttttcagaatgatagtttctgtatttgatgttgctcagaaatgtctgagtatttgagtaagttttacatgacagtgggtactgaaattaagtcattttgttcagcactttaacgctttcttatagaattgtcttaaaacttctggatccttgagcaaatgattatagtctcctgactttcatgaggcttccattaggaacagaatggttgcatgttgtccccagaacactgccaccttgctatgcgaatgatgttctcagcagcacttctaagaaacactcttaaaagttatttattgaaaatttttcgtatgcttttaatattttaaagaattgacctaaggaaagcttatgattggacttattttccaaccagataacatttactctaagtacccagtttttataatttatatgaaatcagatttcaacacttacnnnnnnnnnnnnnnnnnnnnnnnnnnnnnnnnnnnnnnnnnnnnnnnnnnnacacctaagctgtgtttttgatactgatattttcctatgctgaatagttttcttactttcagggaaggtaagaaaatactttttttatatttgttacttatgtaacattcatatttttctcattttgatatttgtaacatactgtatgctttctacttgtaaatgtcaacaatagaattaaaatatttatttaaaata

SEQ ID NO: 125725 - DNA, 847 bp, Homo Sapiens
ttttttaggcaaaaagaaattttattctttcacagaagtctgaggcaggcaggtccagagttcatgcaggagctcaataacatcagagattgggctctttttgttcttcttagcatatcgatgttttacgtgatgctgggcacctcggggacctaagatggctgttgtagctccatgcatcatgattaaaccagagacaggaagtgtacgatggaagaggccagaggtgatggcctcctcctctccttttgtcttattcctggagtgactccctcctcttatcagcagggatacaagcagtgcctggcagccttccctctctcctgtatgagccaaaagcaagactcatggcacccctccctgcaggaaaggggtggaatggagcccctggcaaagggggctggacttgcagtgacagtgctgctctgaacaggactaggcttctgttggagaggtggtcagcggctgctaggcaggtcacaagctgcctcacccatggctctccagctctgcacctaccctctccttctaataaatctgtttcaataaccaccacgaggtttaaagaggagcagtaacttgcccacggttgcgccaggcacccctagaagagcaagaattccttacaaagttattaaaacaggcaaatcccatataggtgacatttctatccaacaatgctgacatctcttttagttttgagccttagtaatccaattttctgcctcaggaagaggcagcagcttctgggaaaaatctgctcctgctaaggtggctcattcattgttttacctgaatagagtggtggatggtgaaggttcaaattctcactttccatattaaattt

SEQ ID NO: 125726 - DNA, 1337 bp, Homo Sapiens
gtcaggtatagttaatgcaaactttatttataaaagactcttaaattagttgtatcatgccatgcattcatacagaatacagtgacccttcagggcgacagagaagagctcacaaactgaaaggaaaactattaaagagtttctaatattaactattaaaaagctaggaaagattaggacaattttacaaatgagcaattaaaaagaaaaggatctgggaactagactgagcagagagggggcagctgtttacaagtctgtacactaaactcatccacggacagtcttctagagcagcaggacgctgacagagagaagcagagtatgtacaaatacttgtgccacaatgactcctccccctagctccacggcatgatacatacaaccagtttgtatacactaggcctgctgaggccattttaaactatgaggacttctagtttagtaaactaaagctgcagggtgccgggggagtggggcagcttcatttgcgactgctctttattctctccagtctttttttcaagtcgtctatgttacctttggaaggaggaggaggtcacagttccctgaagagtgagtctggttagaatccaggtctgaatgctggtgctgctcccgtgactcccggggctgagagagtttgctgtggggcatgtctgtggaagaggcgacagtaggaactgctggtttggagagcaaagaggtcaaaggaggtcggtcatctggcttggtgttgtccagacccacatcgctgtcgaaggatctttagcctttccaagtagacagatggccccacttcttcccccatttgtgttacctatggaggacactgtgcttgtgggcgtgggcacacatgtgacttccatctgaggggagatgcctgttgaagtggaaatacgacctttgccctccctctccatctcaatcacccgaaggcctctttcgacatagctctggaagaactgtgaggaatttttcagaaatggttcaatgtcagcatctgagtatttcttcttatattcatataactctgctagtccctctttagtgttttctttagagccaatcttcttaaaaatctcagctaagaaatcattcactttggcctttgatgatttttcatctattcgagatgctcccttttctgtttccttatcagacttgctcccagtctggtccatactgtgcttcatcatccggcagagatgggcctccagctcagactcgtttttgttgtcgatcatcgttaggtggtccaggatcttgggcccttttaatttgcataaggtgtgtagcagggtctttagggtccttatgggaaattcacttttgcc

SEQ ID NO: 125727 - DNA, 2329 bp, Homo Sapiens
  misc_feature (62)..(123): n is a, c, g, or t
  misc_feature (145)..(153): n is a, c, g, or t
gtgcctacgccaaaattaaccctcaactaaagggaataagcttgcggccgcatacgctgtcnnnnnnnnnnnnnnnnnnnnnnnnnnnnnnnnnnnnnnnnnnnnnnnnnnnnnnnnnnnnnngccattggaaaagttttattgnnnnnnnnntgtacaaataagttcttggattgatagcaacaaaggctcatgttcccccttccctccctatctttgaagaactaaaaaaggaagaaacaaaacaaaaagttcatccccacaacgccagacacgatgcttcttgaccagagtctgcccagaagcccctcctgggagctccttctcaatccgcctcactgcggccaggtcattctgggggtgcctggtcccaggggctgcagcacctagttttatagttgggagaggttgggatagagctggggaggcagctgaggtgttttagtgtcagaagagggctggctgacccccctagctcaatttggtctcacaggtgagaaggtacctggctataaatatgaatactgattgaggcaggcttgatctgggactttcagggcaggcagaatgactatggcccaggtcccacaggatgtggagtttccgggctcagcatcatggtatctggggcccatgtccaagtggagtgaattctagctgggaaggtccgctcaggcacacgggaaccccggtctgtttttccacccccaccccatggagtatccaaggctggtacctcacctcccccccaaccccaatagcacccatgtgtctcaggagcctttggatgcctcctgccatcctgtgtgcaccctgaggccctataactcgtctcgcatcttgtcacccttaggccggaccaggcgcccaatgaatagcagggagccgctttgggtgtcccgcactaggaagatgaaggggtggtcggcgtagaacagcttggggctgcgcagctcctcgcgcccgtagatgtcctggtcaaaggggttgccatctgtgtccaactcaaaggcggtggcgtggaacacgctggccaggtacaggtccttcttgcctgacatgcgtgacaagtcggccttgttcttgtcaatggcctcagtcaggcccagcccagccaggtgtttctgcaggtcatgggtcacctccaccacacccttgggcaaggagatggcaacagccttcttctgcatcttccccatccagatcttcagctgctctttggttagcagcttttcaaggcgctcgagaggctccacgtgatggggcatgaggatgatgaggctggagagcttgtgggccaggggcatctccacgatttgcagcttttccttctcgtcgtcgtagtagttgtagaggcctgtccggtgcatcatcatgacacccacggtataggaccgagtcaccatgaagccacggttgtccaccatcttgtggtggaatttctcatcccagtgtggcttgaagaacatggcgttgactaacagggcgccgtccgtgcgctccacgtccttggtgacctcgggcagcttgccgtcggtggtctgcgcggcccactcgttgatggactgcagcgcgctgcgcttgtcgcggaagttgatcttggagtgctcgcagttgtagtgctgcttgctgctgcgcacgaagtcatcagcgaagctcactgagctgggtccgtacagtcggctgcccagcttccaggtcacgttgcgcgccgtggagttgctgagtgagcgcagcagctcgcccaggccggcgtgcacctcctcgtcgcgcagctgctcggcgctcagcactgccttggcctgcgacgccgtggtcgccttgccgcccagcgacacgagccccagcgacgaggccaccaccacgggtgacaccaggatgttctccactgcctggtccttggccatggcctggtacaagctgaaggccaggccggcgctgcgctcggcaagcgtggccgccttggggctcaacttctccgcagtgccaggagctgctgcggctgcaggtttcttcacctcggcggccagggccgcctccaggaggcagaaggcgctgagaagcaggagggagcgcatggccaggaagtggtttgcgtgcaccacggtgggcctgggtcgggctgggctagcgccgggacgtgactctcgctctcgagccgcgacacgattctactcttagcccgctcccctgctcccgggatctatatatggcagtccccaccccctcctgcccgtcccgagaaacttctggaaagttggaaacgcttccggagggcgccccagccggacgcgtggtcgacgatatcccgggaatccggaccggtcca

SEQ ID NO: 125728 - DNA, 458 bp, Homo Sapiens
ctgactctatgtgaaaattcttttcaaagtaggtaaaagccatcactatatttcacagaggtcacagtgacatcatatacaaaaggaaccagattgaaaaagatattgctgacatagccagtagtgaaattactaaagaataaacagaaatgccttggaaattatttttacaccggcttgaattgaaacattaaagcaaaatgaaagctgtaaggtgttcactagttttccaaatgcgttgtcaagtttattggtaagaaatagactcctaaatagatgcagaaagcacttaagtgttctgctcaattcaactatgtgatttttgtctctcagttaaaaatttgtccacctatgtttcaggatatgactacagacgaaaacgatttgtgctttgctgttatggatgtccgtggtcaggatgcctcccacagtgaattaaaatgcttgatttcattaag

SEQ ID NO: 125729 - DNA, 1161 bp, Homo Sapiens
  misc_feature (126)..(126): n is a, c, g, or t
  misc_feature (133)..(133): n is a, c, g, or t
  misc_feature (151)..(151): n is a, c, g, or t
  misc_feature (164)..(164): n is a, c, g, or t
gaacaaagcacaggaatgcaagagtgcagaaagtatttaaaatgcctttcgaggaaccttgctcaacttcgtgattagatgtacactgaaactggccattataccattaaagtgatggtgatgatnttaatancatcattgcatttttccntggacagcagccntgcctttaccagtgttatttacttgtctactacacgggctggcggaatgtcaaatcttttttgacttttggcttaatctgtctatgcaacatgtatctctatgaactgcgcaacctctggcagcttttctttcatgtgactgtgggagcatttgttacactacagatctggctaaggcaagcccagggcaaggctcccgattatgatgtctgacaccatccttcagatctattgccttggcttcagggggataaggagggaacatatcataactgcactgtgatgaagaagctgttccccacagaggagaagctctgctttctttctctccaactttccttttttaaaatcagcatgatgtgcctgtgagcatggaagagtcctctcagaagaatgttggccatgagactatcattcagaggaggaggggatttctctcttcaaggccataacagtggaagaacagtcatatgccattggaagtcttggccagcagtcctgaatccttcctgaagagttcagaaaatagatgtggtattgctctgaggaccaggcaggaggaactctacaacctgagtttgcctttgtgaggcattagtatagaccaaataaaaagctgcagaaattggaaagtttatgttttaaataaatgactgtgataaatatcagattatttgcacatttatggtactacgagtttataaagtccaagatggtgtgaaattggttctttttacttttatatttttgcttgaatcttaactctggaaatcacctgatgtagaagaagactgtgatgagctcatctgtggaacatcacaagtatcgaaaatacagtaatggatgtttcctttctaatccacatttagtgtttctttcgaaatcacgtctaaaaaatatgactcagactataaccgttgtttcccaaacttcagtctctttagtactacttgtattattttcttaatatttatctcttaaattgtaaagttttttt

SEQ ID NO: 125730 - DNA, 767 bp, Homo Sapiens
  misc_feature (203)..(271): n is a, c, g, or t
  misc_feature (376)..(424): n is a, c, g, or t
  misc_feature (721)..(721): n is a, c, g, or t
tttgaagcttacactgagaatttattggagggctttgagacagctcatgtaatggaaagctcttaagaactaggtttagaaggtgcagagaccagggcaacttcagggatccaggtagcaggaaggaatcggtagcctctttggtatggccactgtggtggtagacactgtctaccttgtttgctgagtcttctggctttctnnnnnnnnnnnnnnnnnnnnnnnnnnnnnnnnnnnnnnnnnnnnnnnnnnnnnnnnnnnnnnnnnnnnntgggttggttgccaggggctcttgggcctttggccacagactgaaggctggctgcactgtcagcttccccagttttgaggtttttgaactcaggctgagccactnnnnnnnnnnnnnnnnnnnnnnnnnnnnnnnnnnnnnnnnnnnnnnnnnccttctaactgtggtcatttatcttatcccagaataacaggagtgtgtataaacaggaagctttagtttagataaataagattatccattacaaaaattttatattgaataacctgtaagtaatttgaaaaagagacttctggctagttttcacttatgtccaagtcagtgggggtaaatgcattgtgattcactgtaggttttagactcttacagccttaacaaccttgtaaatccataactagcatcttcctatctggcagaccctttacaaatgcattatctcaagcctcacancaattctttgaggtagacatagaaagtgaaagttcagaaagggttt

SEQ ID NO: 125731 - DNA, 689 bp, Homo Sapiens
  misc_feature (246)..(259): n is a, c, g, or t
tttcctgttttaataagcttctttatttactccagatagtgaacagaatagtgttcaatagtgaagtaagcagattttacactcactatcactgcatggatagaaagagccatatacatttttgtttttataagtcatctcagatcactgcaacatggcacattagaacagagattcagagacacaaagttaataaatacatttaacattgccaagcatttaaaagataaatgcactcatgtagcnnnnnnnnnnnnnntcagtttgtaactttgacctttctcagggatgtgaagaatcatttcaggtgtcagaaatctctgtagcaaagattctcttctaatgatcgatctaggcctcggtcaggagatcgatggtgagcacgttctggtgaatgacattttgtatttggcttcattgtagaactcatatgataagcattacttgaataattttggcggcgaagttcttgtacggccctctccctttcaaagcgctctgttcctagttgtcttttggtaatgtctaaatcagcttccaattgtgtgacaacatttctgaactgggccacatctctactctggatggccattttattttctgccaaacaaaggtgttctttaagaagctgaatttcagattctttttcttgaagtgctatctgagactgatattctttgtctcgattg

SEQ ID NO: 125732 - DNA, 602 bp, Homo Sapiens
agaattcggcacgagggttttagaagcacactgaaaaatctcgttgtttaaagtacaatttgtaaatatttcaaaggtctaggagtcataacttttgttttcatactgaaaatgatgttgatcagagaaaccaactgttttgcttttcattgctctgtgagaaatttgaggattctgttttgctgttaggtaagctaaactcagaaattgaaaaggaaaagactggataaacacaggattttcagtaagaaaacaaccccagtcttgtcttagaagccacttgttgaggagtctgttgggggaaaaaagaggatatgcttttaaaggtagaacaaaccttcttctgtgttaaatcaaaaggatgttcaaaatccaccaggacagatgctacttgggtttaaatggagccatagatgatacaaagtcctcttggggctgaaaatcacttcctatttgcatggctttactaactggtttctgttttccattatctttttcacagaaagtcttggtcagtatttttccagcatttaaattgaaacggtcagtattagaccactgctaggttatgtagtcaagaaataaaaatagaattacatgct

SEQ ID NO: 125733 - DNA, 944 bp, Homo Sapiens
  misc_feature (645)..(645): n is a, c, g, or t
  misc_feature (675)..(676): n is a, c, g, or t
  misc_feature (685)..(685): n is a, c, g, or t
  misc_feature (758)..(758): n is a, c, g, or t
  misc_feature (773)..(774): n is a, c, g, or t
  misc_feature (793)..(793): n is a, c, g, or t
  misc_feature (798)..(798): n is a, c, g, or t
  misc_feature (805)..(805): n is a, c, g, or t
  misc_feature (807)..(807): n is a, c, g, or t
  misc_feature (829)..(829): n is a, c, g, or t
  misc_feature (864)..(864): n is a, c, g, or t
  misc_feature (898)..(898): n is a, c, g, or t
cccacctcccaacgcctttactttcacagcctctgcagcaaactgcggtcactataatcgctcctgtggcacagaggcatacccaggggaatctgcccagggggccactctgtgcccacgtgggaacccacacctgcttgtaaagcctcccctccctctgaccagcaaccaggacagtttgttgttccaagcagtgggctcatgtctgttttggctcagaacagggtggggagagcgggccagggacccgcaggaaggcttatccttgagattgcgtgggagacacaacaaggggtgggggcccgcaggcggggcggggcgaagcaggtgatatcaagcccagagccccagcctctccccacagtctcaccatggcccgcaccgtggtgctcatcaccggctgttcctcgggcatcggcctgcacttggccgtacgtctggcttcagatccatcccagagcttcaaaggtatagataggtagggacagggagggagagaagggaggagcccttggaggctagaagggaagtcagatcttcctcctctcccaaaacctccagtgtatgccacgttgagggacctgacaacacagggccggctgtgggaggcggcccgggccctggcatgccctccgggactcctgnagacgttgcagctggacgtaagggactcannatccgtggncgctgcccggggacgcgtgactgagggccgcgtggacgtgctgggtgagctcctggaagctatgggctcctangagcttctccgcctnngcgtgaacacatgtcccangccanggacacnanggacagcgtgctaggtgatctnagcggctgtcgggctctgtctcgcatgtgtacccngctgggctgctgggccgctgagcctggggaaganccgtggtctgtgctgactgatgtataggatgtgcgtgcgcagctcc

SEQ ID NO: 125734 - DNA, 845 bp, Homo Sapiens
cttcgtctctcgggtccttttacttcaaaaggtaaatttttcacgttccatacctctagaaagaggccatctcccttgaataggatattatgctctcttgagttagacccggaggagtcttgcaccaacattaacccacgcctttataatcaaccttgaatactggtgtaagctgggaactctgttactcccctttaaaaaatatgtttcctttggttcaagtttaggatgcctcactgccaaccaaaaaaagcccgcccgaatttatgaataagtttgtttttttattaaaaccataatttgttaatttcttataaggccctgtgctgtacttactggtataaatctaactgaatattggggtaggctttcatttcttccattaattacatgtgtaaaattaaaacactactgtaatgttaatttcctggttttgaaaatcatattatggttatgtacattgttaacattaaggaaagctggcagaagggtgtgcataaattctatactctttttgaaacttttctataattctaaaattattttttaaagttaaacagtatattaagattaccttcactattcctcactcaagattaagacattttttgaaaagcagtagagtttgcttaaaatacaaattaattattcttgactataaccttgtaaaggtaaatctaatgtataaatttttgaaaaattttgcaccactggtcatagcatctatctcctttgccttaatttactgaaatacatcattttattcggttcaattgaaataaagctatgtctttactatgtattggccctaccaaaatcatatattaaaattttctaacataatg

SEQ ID NO: 125735 - DNA, 1140 bp, Homo Sapiens
  misc_feature (644)..(668): n is a, c, g, or t
ggattttcaggaggaaacggtgaaggactatgaagctggccaactgtatgggctggagaagttctgggccttcttgaaatattccaaagccaaaaatttggacattgaccccaaactgcaagaatacctcggcaaattccgacgtcttgaagacttccgagtagatccccccatgggtgaggagggcaaccacaagcgacactcagtggtagcaggaggtggcggcggtgagggcaggaagcggtgcccctcccagtcttccagcaggcctgctgccatgatcagccaaccccctacaccacccaccggccagcctgtccgggaagatgccaaatggacaagccagcactcgaacacacagactttgggaaagtgaaaagctccttagccctggggcttgaggggggaaaggggtagggtgggtaagagtccatgggggtgcccagtcccaggagaggggacaatgaagggacaggcctggagttactaggacaggcctttgtgctgagtagcaatgtatacaccatttgggctatcagaggtacccctgggcaggagcctctacatccccttccccctcctctctccatgactcttgacatcctagcttcttctaaggggggagggaaaggggggagattttnnnnnnnnnnnnnnnnnnnnnnnnncaagttttaaattattgatagttcatctggattaccaaaatcactctgcagccctgcccgaggctagtaggctgcaaccctggtccccacccctaacctcctgctccccctcaagccaactatgcagcccacaagaaggccctgcgggcccccccattgcccagcactgtctcatagaaggctctggtggtacctctgggccccaggagcatcagccccttgatcatctggggtttgtcatcaccatattttctccctgctgttcccaccatgcccttctgccatcttctgggagaaggaaaccaaaggatctaaaactggggtttgggggaaggtttcagcctctccccactccccttgccccacaccctttactccccagcccagagagacgctgcttttaccaggaaagactattgaaagatgttttattttatttttctctgacctttccatccttgaaaaaatgggg

SEQ ID NO: 125736 - DNA, 1061 bp, Homo Sapiens
  misc_feature (919)..(984): n is a, c, g, or t
gtgagaggcaggaatgggggtcagaagaagtgggagcagcttcttgggctgagtgcagccaaaggggagccagaaatgggcagttctcccagggagtgagcagctactgtaactttttttaaattaagacaaaaagccttgaagaaaatgactttatttttctaagtgtaacctcagtatttatgtaatttgtacaggggccatgcccacccccctcctccccctttggggtagaccttgagggtgggccagcataggggggagggtcttttaccctgtgtcagagcctaccttcaccacctatatccagaaggggagctttttcagaaacagggcagcagtggggtgaaattttcttaacccctaagactgccttcagtaggaacaagctggcttctgtgattaggtgaagggatgggggaagattttatgcacagcctagttatcaaggggatgatttgccgacatgtttgagaaccccctaacctctaaccctcattgctgtcttgccccagtttggggtgccaagatggaagtcacctttctgggctttctcctggagatagctggggcttatgggtggctttcaaggctggggcatggcaaatcaggggccagagagcaggggagcttgggactcaggtctgtaactgcccagccccttttctctgctcttgtttcactccaccatcactcactcactccccactcccccacccatggggaggagacctttgatgaattcttcctctccttcccacaaaagacagacccagtgagtgaatcaggcaaagtgcttataatgtgtgttgtgtgagcgtggccttgggaggacatgcgtgtgtcagggatgagttgaggtgatatttttatgtgcagcgacccttggtgtttcccttcctcggtggctctggggtannnnnnnnnnnnnnnnnnnnnnnnnnnnnnnnnnnnnnnnnnnnnnnnnnnnnnnnnnnnnnnnnnttctacttcccctgggatgctgacccaggaatagtggacatggtcacagtcctatgtacagagctttcttttgtatt

SEQ ID NO: 125737 - DNA, 818 bp, Homo Sapiens
tttttttcccattgggtgacagcgtttattgaaaggaaatcttgctttatccaggaattcactcacatggaggtagctgcaaggagaatgtctctttctcatgacaaccaaagcgaccaaaccataccctaaagcagagacgcaatggaataagtcaacgggcattgtagaacgacactcagaagcaggaaaaaccataaaagatacaggatgattgtctcttcagtattgcatttggccatgtatgtgtttttacataaaatatatgttttctttttaagctagctaaagaaaatactcttgatcggggttagttcttaaagcaaaaaacagaagaaaagtatgtatatataataaaattaaagaacgatagcatgttatacctggaaaggaccgtgggcactaatctgcactttgttccaggtaatccatggctctgagagtgagcacactgtcaaagtcactggggtgagatgagccgggacttgaaaacccttctcttaactttcagtctcaactcttcccactccactataccgcatgcgttgccaactccctcagagtgtaggatagcgcaattgtcaaaacgcataacagcctatttttagggtaatgatgcaagtgttttgaaaagtgacctgtgttctctttgcatgggcagttttgcttcttgtagccagccccatggctactggaaagaactggccagaatgaggggcagctactttctcacaaaccaaaacagacacacactcccaaagttcttgggtgtgctgaccttccccagcagcgtctctaggtatgatgttgcttgaggc

SEQ ID NO: 125738 - DNA, 1925 bp, Homo Sapiens
  misc_feature (49)..(107): n is a, c, g, or t
cctggctaggctaggtttattatttttttcccccagaaaagagactgannnnnnnnnnnnnnnnnnnnnnnnnnnnnnnnnnnnnnnnnnnnnnnnnnnnnnnnnnnagggatacttaacctgtaccaagttccaattcatggagaggggccatgattctgctgtgcttgagcagagagatctccttgccagagcctcacccaagagaaagaggtgggtacctgcatgcccccaggtgcctaccctgggaggtgggcacctgcatgcccccaggtgcctaccctgggaggtgggctcagaagttagagagcaagggcacagagtcaccaaaacttgtcccaacaatccccagacaatatgcttcctgctgagtccattttaaatcacacaacactagccgtggcacaggcccggctgcgaggcccatgatgcttgggagctgttgtggagaactcaacctcatccagaggccagagggctgacaagagcagctgggcaggagggcctgctgtgggcagggtgggaaagccgccacatctctacttcccaagaaaggccactaggtgcaggaaaagggggcgaagggtctcaggactagtgaaagtctgcattgaaggctctgccgatgaccagccgcctcacctcgctggtcccagcccctatctcatacagcttggcatctcgaagaaagcggcccatgggaaagtcattgatgtagccattgccaccaaaacactgaatgccgtccagggctacctgtgtggcacactcagctgagtaaagaatcacacctgcacagtccttagcagtgcaatggccctcatcgcaggccttggcgacattgtagacatactgccgacacgccatgaggcgggtgtacatgtcagccatcttcccctgcatcaactggaagtggccgatcttctggccaaaggcttccctcacgtgcaggtagggaatggtgtggtccaggaccgcttgcatgagcccaagaggccccccggccagcaccagccgctccaggtccagcccactcatcagcacgtagacacccttattctcatggcccaggatgttggcagcaggaatcttgcagtcttcaaagattagctcacaggtgttagagcccctcatccccagcttgtccagcttcttagaggtgctaaagccaggcatacccttctccacaatgaaggctgtgatgccccgagaagctggcacagcagccagatctgtcttggcatagacaatcaggacgtcagcatcagggccattagtgatccagaacttgttgccattcaggatgtagtgatttcctttcttttccgctttgagcttcatagagacaacatcagagcctgcattgggctcactcatggccagggctccgatgtactcaccactgatcagcttcgggagatacttctctttctgggcctcattcccattgcgtacaagctggttgatgcagaggttggagtgggcaccgtaactgagccccactgctccggaagctcgggatatctcctccatcaccagcacatgctccaggtagcccaggccggagccgccatactgaacaggggctgtgatgcccaatacgcccaggttccccagctgcttccaaaattctcgcaggttcttgaactcattgctgcgatcgatctcctgggccttgggggccaggtgctcctgaaggaacttagccatggtctgacgaagctgcctctgctcctcgcttagcccattgattgcatcgtccacgggcaaaagcgagtgggcccgctgggaaacgaagccggcaagcggcggccgcagcctccagctcgccacacgccaccccagcagccgagtcgcagtcgccatctctgccatgcacgaagcctcggccgattcgcacacccagcctcgcacctagccgtaac

SEQ ID NO: 125739 - DNA, 968 bp, Homo Sapiens
  misc_feature (61)..(79): n is a, c, g, or t
  misc_feature (894)..(928): n is a, c, g, or t
tgccaagctgaaaattaaccctcactgaaagggaataagcttgcggccgcatacgcggtcnnnnnnnnnnnnnnnnnnngacaaattaatatattttattgcataattctgatgggaaaaacatagctaaaatagtgcctttggtatcttatttacagtcttctagtccgtcatctccctccttcattttatatcaagtttcaaaattggtttcatggtaataaaatcaaagttgtagacctctggcatgccctgatgtagagttttgttgaaacggtcccagcgaaaaacagggaggccaccttgtactgtgggaccacttatggcataggatgtgtactgagatgctaggtagatatctgccacctttgtgtcataacaacctccaggacttgggttaggtgagttcaggtcctcacggcagcagatggtattacaggggtcacctctactgtaaggatccttcttataattgttgtatcgcatgatatatttcatggatgccgtatcagtcactttcccttggtcacgccggaaaattttggctcgtggagctaaatcataagagtagtccaagcccagcttctgaactaacagtggatagccactccagttgtagattttttcatggaaaggaacattgtaggagggccaatatcctttccgtagaacatcagtttgttcagaatattctacatatgtaggaatttgctccacaatgtacagagtgcctttgtcaagactgtggttcaagctttactttcttcaggtccagaaccatgtattgattgttataggtgccagagttgtattttgaaaagatgtctgcccacctcttgccaccccggccgtaatggccgaattcccgggcatatgtccggtaccgtcgactgnnnnnnnnnnnnnnnnnnnnnnnnnnnnnnnnnnncggccgcttcctcgctcatctgactcgctgcgctcgtcgt

SEQ ID NO: 125740 - DNA, 1597 bp, Homo Sapiens
tttttgcggggatagcaccgtttattaagaaaaatcaagacaaagaccacaggagggtcccttctaggacacagaggccaggcgtcccaaccccacagtctgggggccactggcaggatggcacttgagctggatcttcaggctcctgcagatggggcagggtggtcatatccccctcctctctctctcagtcgtgagtcctgccttcccccacctaaggcactagctcttcctgagcaccagcggcatccgtccgtccgttgtctgttggaggagtccctgggccttcacttccagatgggtggggatgtggcctggggtgggcggggcccggtgggcggggccctatcagtgctgggctctgcctgtagcagctcctggtaagagttggggtgggccttcccttacagcccctgagggagggaccccaggctgtgtgctggcaggagggggtgggaatgcaggccaggaggacgtggtaggagggggagtctgccagaggaggtgccaggggctgggtggaggtgggtgggggtgctgaaaaacgagctggtggggatggggaccgcctgcccaggggtgagctgccttttgctccacagccggcactaaagacaattcccaatcctgagtgggtggcagagactcctgcgatgcccgtctcaggtagctgtggggcaccagcccacaagccgaggttggctctcctaggagtgagaactgcccaagggctgcagaaacaggccacccagctctatctgggggctccatcggtgggtagggggacagtgggggcagttctgggcccacccagccactgttcctgaccccaagtcctggtgactttctgaggtgcccactcccatccaacctgccttgctggccagccttgtggctttgcccagctgtgtgtgtgagggtggcatgcccacctccagtccagcccagggcggtagcagcaaagcgtggcatcgcctcggtttcttacgaaaagttcataagtaatattaataataatatactcgacattgtcgggctggggcgtggcccgggagtccgtgtggggcaggcaggtgcctacgaggggcaggggcgtgtgttggccccggcctgggcgcggtgctgcaggtccaggggctgtgggggcggggcgccgggtcgggccgagtgcagcaccaggttcttgacacagcctgtgatgcccgaggagaatctgcccccggtcagcgtggccacgtcaggggctccgccgatgtagacgctgcccttggcgttgactgccacgttgggacctggggaccggccgctgaccagctcctcaccgtcgacttggatggaacctctgcggccctcccgcagtgctgtcacccggtgccactcgccgtcattgatggggtcctcagagaccaggcgggcctccccactacccagctggtacctgaagacaaggtgcccgtcttgaagcccgaggctgatgaagtccttgccttggccggcctctcccacctccacaccctgccagagcaggaggccactggctgtgctggtccgaacctccagctcgatggtctcgggcacctcgggcaggctcctggag

SEQ ID NO: 125741 - DNA, 1006 bp, Homo Sapiens
  misc_feature (735)..(735): n is a, c, g, or t
  misc_feature (853)..(853): n is a, c, g, or t
  misc_feature (968)..(968): n is a, c, g, or t
atgaggctgaaattgaagctttttattttggatatacataccactattactgttttaaagacatttttatgtagtgatactttgtattatggactctataaagttctatactgtaatcaagacatttatataaagtgacactttgggattatttggcctcataagctagatgccagtgaaattggcatacacatcaatagacatgtttacacttccagtgttagggtttttgtttattccagttgtacttcctttggcagacggctattatgttttactttagtgccgtattgtggatgccagagaacttgcatttgccagggaataatctcctgagatgctatattatgaagtagaatggtgtagtctaattcaataaagtcatcatttctttgcacttgcttgacagtttgaatttttaccattttataccatgtgtcttcagtagaattttgccatattatataaccacaggcaacccaggctaaatgtagaacgagcgtcatttctggagatacatttccaaaattgtctggaatattttgtgcttctagcggttccttcatggacttaagtctttgataaaatgtgttgtcttcttcatctggattctttccagtttctccttcaaatgtgaagttgacttctggtgcagtttctttgtcccgttgaagggtaaagtattcagctgtgcagttcaccttaacttgtttttgtatatttcttcaacagcanatttaaggtgatattatgtctcttcctggatatctccatgctggctgtttgacttctgcactcaacacctgtgcgggtccctgctggtattgatgtattctgtgcaccaggcgcctgnagctggtattggtcggcggattccatcggatgacatgactcaggcttggctctctgctacggacatacaacgcgcgtctgctgtgcctctgcgatctggctcaggcaatcctaangagcgataatcgatcagtcaacgtctggtgatgtacgc

SEQ ID NO: 125742 - DNA, 1169 bp, Homo Sapiens
  misc_feature (1068)..(1102): n is a, c, g, or t
ttttaagacattttgtttagatgatactttgtattatggactctataaagttctatactgtaatcaagacatttatataaagtgacactttgggattatttggcctcataagctagatgccagtgaaattggcatacacatcaatagacatgtttacacttccagtgttagggtttttgtttattccagttgtacttcctttggcagacggctattatgttttactttagtgccgtattgtggatgcccggagaacttgcatttgccagggaatattctcctgagatgctatattatgaagtagaatggtgtagtctaattcaataaagtcatcatttctttgcacttgcttgacagtttgaatttttaccattttataccatgtgtcttcagtagaattttgccatattatataaccacaggcaacccaggctaaatgtagaacgagcgtcatttctggagatacatttccaaaattgtctggaatattttgtgcttctagcggttccttcatggacttaagtctttgataaaatgtgttgtcttcttcatctggattctttccagtttctccttcaaatgtgaagttgacttctggtgcagtttcttgtcccgttgaagggtaaagtacttcagctgtgcagttcaccttaacttgtttttgtataatttcttcaacagcaaatttaaggtgatacttatgtcctcttcctggaatatcctccatgctggcttgtttgaccttctgcacctcaaacaccctgtgcggggtcccctgctggtagttgatgtagttctgtgccaccaaggccgccctggaggctgggtagttggtcggcgggatttccattccggatgagcagtgacttcagggcttgggctactctggcttaacgggaccagtagcagagcgccgcccgtcctgcttgctgctgggtccggttgccgaggcggaaaagtcgcaagctccttcagtcagtcttcttcctcagctccttccgactccggaagctgctccccggccgtaatggccgaattcccgggcatatgtccggtaccgtcgactgnnnnnnnnnnnnnnnnnnnnnnnnnnnnnnnnnnncgccgcttcctcgctaatactcgctgcgctcgtcgttcgaaaacggacccgtatatatctatacatt

SEQ ID NO: 125743 - DNA, 2745 bp, Homo Sapiens
  misc_feature (2459)..(2490): n is a, c, g, or t
caagacttacaaactgtcctttattcagagtgagactgcggaacattaataatttatcacgcggggagtccccagaagccctgtgcccacgaacccctgtgggcggaggagagaggcggggactccgggagcttcctgagagggccgtgtcttgggagcaaggtgacatattcagttcaggcacgcggaacatgaactcaggaagtggggagacagagagacccatcccccaactcccaggacgggggccaggccccctaaaaaggcacaatggcagggcaggtttggcagagtggttgagtgtcaggggtcgacaaaggacaccatgatgtagcgtgtgccccaggtcgttggcagcccctcgtggtagtgggtgaggcggccggggtgcaggagtgcccagcccttcctcggggaggagatcacacagtcgtagcgcaggaagcggcagccacctccctcatagtccaggcccttgtggttgagggcaacgttgagggtgaaggtggatgagtcgtggtgtggccgcagagacggctgctcgtctggccggtagcgaaccacaaagttcatcaccgcccgcgccttggtgtggtaaccgggaaacaggctctcggtcatggggcccacatacgtccgcagcagctgcagccactggtcctcgtaccccacctgcttcatgtggatgtccacggtgggcacattctcgtagcctccagccagccttgaatcctcatgccggccgcctgaccactggccgtagtgctccatctctgccaccagctcatcacacatttgttctgacagcagtgggaaccagtacacgtccgggcatggctgctccacgattccttccccttccagggcccggctgtagttctcgtggatgtactgctccttccagtcgacggggttgtcgaagatctgccagaggtcggggtgcaggtgctccgtgtcgtatctggaagtggccaggagccggccaaattcatgctgattgctcagatggaggaagatgcccttgtctcgaaagctcttacagaaggccatgtccgggtctgtgtcactgcccgagaacacatccctctggggcagctccatccgcagggtatcaccccggatcacataggcctgggagatgtatggtacattccacacacccactcgcttccgctgcaccagctccacgtagtcctcggagcgggcgtagtactcatcggggctcagggcgccccagaagttggaccacagcttgccgtggcgggacagcatgggggcgatcaccttcctgttctcctcaatgaggatacgcagggtctgcaggttggtgaggacagcgtcggcgtccaggctgaagtagaactcacactcggggtcctgccgacacaggtccatggccatgtccctggcctcgcctgggctcagagcctcctccggccccacgagcttcacagctgagaagtggtcctggagctgcggccaggagtcagcgatgtggggttcatggaagacctcgttgttgtgcaggaaaagggtgaccctgtcggggggatagtccaggagtagcagccgctgcaggaagcggggcagaaacggagtaggctgttccacaaacacggccagaaacacccggggggaggctgcccccccgggagtgtcctccggtcctggttgcagaagccacagcctccctcaggagtccagccattggggacgtagtttcccaggtagttgagctgcagcttagtgggaccgtttccatggaccacaatggggagcgtgtcgtaggccacgttccggatacgcacacggttccgatcaaactttaaaaccacttcatctaaagccccgttgaggttctgaaagatccgagacttatgatccagattaaggctgagtttctccctcagtcctgggtccaggtagagccgtgtgtagaacagctggtcgtcgtcatcatccttgtacttccactggcgcacgatttggtggatggtggtggcaaaaccgatgaagtccaccagaattgaggaagcgcttccccgtgcccacctcagggtactgctccgccagcccccactcgggccagcagaagctctctgcagagaagagcaggcggctgccactctggacgaacttcttcagcagctctgtggggctgccggccagaatcacgtcgtagctatccacaaacatgatgatcatatcctcccggtcagcgtatttctccatttccttctttaaccaccggaccttctgtcctccaccaactgttcgagccacatcaccccctcgccactcctctcccaggcccagggtccgcacagtgtagttgaagaactccgcagagcgcaggaaacgcaggtacccctcggtttcagctgtggccacagtgatcaccagcagcttctctgggttgaccgggtctcggccccggggccggtcggaggctgaggccnnnnnnnnnnnnnnnnnnnnnnnnnnnnnnnngaaccggggtccaggccccgaggaggtcatggtggggagcgggcccagacagcacccaggatcctgggatctccgctacgcgcctggatcccagctccggaggggagctctggaaagggggcgctcgggctgctgtgcggccgccgcggggagcagcttggctggggctacgccctgaaaaaaaggcgtatccggaggctacagaaagctccagatgccggcgccacagacaaggcgaggattgtcccgggcgca

SEQ ID NO: 125744 - DNA, 1372 bp, Homo Sapiens
gtaaaaatcggcatgctcctttatttgttcagaagagcagccagcatcaccctcgccactcaaacctggcacatacgcttcggagacaatggcctcgggaccctcatgctgctgggcccaggagagacagttctgaggcagaaactcggcgtccaaggggggccgcgggtcaggcactgtggtgaagggaacgccggggagtccggccccaccttgcagctggggacacgggggcgcaaacagagggggcaggctagtgtcccgctgccccaggaacagacctcagggccccaggagggtctgcaggcagctaggagcctgccaagtgctggtggaagtagaggccgaaaaggctggcgagcagctggcaggcagccgtccaccagatgaggtaggccaggacgccacggaggaagaggggagtaagcaggccacccagggccccggcaatccgcgctgcagtctgctggacttcgtcctccccagagccgatgggggcagcgctggctgaggatgggtcgggggatagtagaggagctgggcccaggccccaggaatagcctcccagcgtcttgagcagaagtgtgcagttgagggtgaggatgagcggcgtcaggtactgcaagctcaccacggtcacatagcagtagactcggaccaccctctgctggatttcacgggcttcgatgcggccagcctcccttcgcagctgctccacccgggccttggccaggcacaggtaggcctgcaggtggggccgggtcaccgccagccgcagcaggcacagcaccaccagcaaccagaggcgcccagagtcgaaggcagaatcggacagcagggagaaacgcgtctccccaaacggcggctggtgcaggaagtcccgtgcaatgggctttgtccagagccacaggatgaacaggggagacaggaagctggtgtgcaggaggaactgcagcatgggtctgtcctccgacatggtcagtgcgtcccggtgggtctgggccagccgcaggcctgggaaggtgaggaaggcacccagcacagagcccaccactgccagtcccacgcggatagccagcttggccacaggaagcgcccagtcccagccctgcttcttcagaagtggctctaagttctgggtcatgctggccagaccaggctccaggcccagctcgagggtctcctcccgcaccacttgcaccagcatggccagcagcaggaagaggaaggcaaaggtgaggcagacagagcgctcacccccctcctcggcgctgaagtacagccgtgtcactgtcaggaacatcttgatggagaaggtcaccgtgagcaggcaccagaacacagcaatgttagtctccttggctggtcccag

SEQ ID NO: 125745 - DNA, 980 bp, Homo Sapiens
taccgcccagccccggcaggcagggcaacaagcacccacccaggcaaacccagagggcgccccaggagtcgaaggggcagaaatcgggacagcaggggaggaaacgcgttctcccccaaaacggcgggctggtgcaggaagtcccgtgcaatgggctttgtccagaggccacagggatgaacaggggagacaggaagctggtgtgcagggaggaactgcagcatgggtctggtcctccgacattggtcagtgcgtcccggtgggtctgggccagccgcaggcctgggaaggtgaggaaggcacccagcacagagcccaccactgccagtcccacgcggatagccagcttggccacaggaagcgcccagtcccagccctgcttcttcagaagtggctctaagttctgggtcatgctggccagaccaggctccaggcccagctcgagggtctcctcccgcaccacttgcaccagcatggccagcagcaggaagaggaaggcaaaggtgaggcagacagagcgctcacccccctcctcggcgctgaagtacagccgtgtcactgtcaggaacatcttgatggagaaggtcaccgtgagcaggcaccagaacacagcaatgttagtctccttggctggtcccagcatgtagtagtaggcctccagggcatccacggtcgtgagggggcaggtctccagctggaacggggcatctcggggcacagacagtggcttctcctcactaaggccattggcccaccgctctttcctgcctctgggcctcggcttccccgccagggcccgaagctcctcctcagacgggtgcttgtatcggaacaaactgccgttacagagcagccagcgcgcgaaggagcagtgtggcgccagcctgtgcatgagggtggcagtgagcagggtcaccaccagctgtactccgaggaccgccatgacgcgtgcgagaacgcggtgcactcacccaccggcc

SEQ ID NO: 125746 - DNA, 1094 bp, Homo Sapiens
  misc_feature (150)..(152): n is a, c, g, or t
  misc_feature (158)..(158): n is a, c, g, or t
ttgcgccaggccccaggtagccctccagggggggccgggtttcaccggccaggcggcaggcaggccacaggcccccccagggaaacccagggggcgcccagattgaagggcagattcggaacagcaggggagaaaccggttctcccccannncggggnttggtgcaggaagtccccgtgcaatgggctttgtccagagccccagggatgaaccggggaggacaggaaggttggtgtgcaggagggaactgcagcaagggtctgtcctccgacatggtcagtgcgtcccggtgggtctgggccagccgcaggcctgggaaggtgaggaaggcacccagcacagagcccaccactgccagtcccacgcggatagccagcttggccacaggaagcgcccagtcccagccctgcttcttcagaagtggctctaagttctgggtcatgctggccagaccaggctccaggcccagctcgagggtctcctcccgcaccacttgcaccagcatggccagcagcaggaagaggaaggcaaaggtgaggcagacagagcgctcacccccctcctcggcgctgaagtacagccgtgtcactgtcaggaacatcttgatggagaaggtcaccgtgagcaggcaccagaacacagcaatgttagtctccttggctggtcccagcatgtagtagtaggcctctgtgaagaggtacacgccgcccgagtacacagcaaagtccacaaaccactggtactccaggaagaagcgcaggaccagggcatccacggtcgtgagggggcaggtctccagctggaacggggcatctcggggcacagacagtggcttctcctcactaaggccattggcccaccgctctttcctgcctctgggcctcggcttccccgccagggcccgaagctcctcctcagacgggtgcttgtatcggaacaaactgccgttacagagcagccagcgcgcgaaggagcagtgtggcgccagcctgtgcatgagggtggcagtgagcagggtcaccaccagctgtactccgaggaccgccatgacgcgtgcgagaacgcggtgcactcacccaccggcctagggctcc

SEQ ID NO: 125747 - DNA, 891 bp, Homo Sapiens
cacccggcaaggccggcaagccagggcccagcacccaccaggcaaaccagagggcgccccagagtcgaaggcagaaatcggacagcagggagaaaacgcggtctcccccaaacggcggctggtgcaggaagtcccgtgcaatgggctttgtccagagccacaggatgaacaggggagacaggaagctggtgtgcaggaggaactgcagcatgggtctgtcctccgacatggtcagtgcgtcccggtgggtctgggccagccgcaggcctgggaaggtgaggaaggcacccagcacagagcccaccactgcccagtcccacgcggatagccagcttggccacaggaagcgcccagtcccagccctgcttcttcagaagtggctctaagttctgggtcatgctggccagaccaggctccaggcccagctcgagggtctcctcccgcaccacttgcaccagcatggccagcagcaggaagaggaaggcaaaggtgaggcagacagagcgctcacccccctccctcggcgctgaagtacagccgtgtcactgtcaggaacatcttgatggagaaggtcaccgtgagcaggcaccagaacacagcaatgttagtctccttggctggtcccagcatgtagtagtaggcctctgtgaagaggtacacgccgcccgagtacacagcaaagtccacaaaccactggtactccaggaagaagcgcaggaccagggcatccacggtcgtgagggggcaggtctccagctggaacggggcatctcggggcacagacagtggcttctcctcactaaggccattggcccaccgctctttcctgcctctgggcctcggcttccccgccagggcccgaagctcctcctcagacgggtgcttgtatcg

SEQ ID NO: 125748 - DNA, 1118 bp, Homo Sapiens
  misc_feature (825)..(825): n is a, c, g, or t
aagttttactacttttattattagtctatagcttggggaatgaaagtttaagaagggcacattgtttttaaaatatggatatattaacactgagaaggatggagtcccacagtgggcctatcggcttggcctaatttctggatataggatatatattaagtaacaataaataaatttacatgattaaaatattttcagattttaaaattatgaagaacgatttgatattcttacagtttcatcaaaatccataaaattggacacaactttgacattgggatgataaacaccagcttgacgaataacttcctctagtacatcgccgattccagccgaaaatatgaacacggggatgctatgttgttggagcttatcaaagaaattctcatatccttctttgagcataacgtcagattctgccacaatttctttaagtttagcttttggtaaagcttgctgaacaagcaaaccatgtgatttagtataccattccaccatataagggtacttctcttctacagtaagaacaggatcaacttcaatagcgtagtatttttcctttagttgcaataacttttttctacattcatctgtaaccagcttacagttgtcaatgatattatgacatgttgggcatcttttccctttatatgaaaatctactgagtgtcatatcaaagtccgttattatctgaagtttggcagctcctcctttgatacgaccacagataagttcttctactcttgtagggttcttgattcgaactgaacttttctggaattctggcatcattttcacatgtacggcagactcttgatgagtcanttcttggggtatcaatcgtcatctcgatgatcttggtcttccgccccgtcttcgtctttcaggttgatatgtatggagccagaccactccggcaccagggggaacgtggggctcgctacgcgccaccttgcacgcctgtcggcatggatggggctcatgcgtgcatgaggaaaataattgaaaaaactttgggaatttgggcctaggcatttcctaagagtgttgcactcttcacgttgatgctccggtgatttactcgccaatcaacaatgcaggggagcaaagtagctggg

SEQ ID NO: 125749 - DNA, 931 bp, Homo Sapiens
cttggagtctccccgaagaatatgttactatgtctttagtgatgatatattccggtattcctcaaggcaccatcatgtttgttaaaatacatgaaattagttctcctttgtaatcctgttgagcaccccagtttcatcaaatccataaaagttggacaacaaacttttgacattggggatgataaacaccagcttgacgaataacttcctctagtacatcgccgattccagccgaaaatatgaacacggggatgctatgttgttggagcttatcaaagaaattctcatatccttctttgagcataacgtcagattctgccacaatttctttaagtttagcttttggtaaagcttgctgaacaagcaaaccatgtgatttagtataccattccaccatataagggtacttctcttctacagtaagaacaggatcaacttcaatagcgtagtatttttcctttagttgcaataacttttttctacattcatctgtaaccagcttacagttgtcaatgatattatgacatgttgggcatcttttccctttatatgaaaatctactgagtgtcatatcaaagtccgttattatctgaagtttggcagctcctcctttgataagaccacagataatttcttctactcttgtagggttcttgattcgaactgaacttttctggaattctggcatcattttcacatgtacggcagactcttgattagtcatttcttggttatccaatcttcatctcgatgatcttggtcttccgccccgtcttcctcttcaaggtgaatatgtactgagccagcaccacccccgccaccagggcgcacacgctggcgctcgctaccgcgcccaccctcgccacggccgcgcggtccatggacggggccctcatgcgcgtccaagcaggaaaaaaacagcagctcgcgt

SEQ ID NO: 125750 - DNA, 1085 bp, Homo Sapiens
gtactttttctaaaaaggctccatcccccttctatccatttagaatatcccaatttttcagaaagtgctcaaacattggcccacttccatctggcattcttaaagtctccttgggagtctcccagaaggaattatgttactattgtcttttagttgattgaaatattctgtatccctcaaggcaccatcatgtttgttaaatacatgaattagttctcctttaaatcctttgagcaccccagtttcatcaaaatccataaaattggacacaactttgacattgggatgataaacaccagcttgacgaataacttcctctagtacatcgccgattccagccgaaaatatgaacacggggatgctatgttgttggagcttatcaaagaaattctcatatccttctttgagcataacgtcagattctgccacaatttctttaagtttagcttttggtaaagcttgctgaacaagcaaaccatgtgatttagtataccattccaccatataagggtacttctcttctacagtaagaacaggatcaacttcaatagcgtaatatttttcctttagttgcaataacttttttctacattcatctgtaaccagcttacagttgtcaatgatattatgacatgttgggcatcttttccctttatatgaaaatctactgagtgtcatatcaaagtccgttattatctgaagtttggcagctcctcctttgataagaccacagataatttcttctactcttgtagggttcttgattcgaactgaacttttctggaattctggcatcatctcgatggatcttggtcttccgccccgtcttcctcttccaaggtgaatatgtactgagccagcaccacccccgccaccagggcgcacacgctggcgctcgctaccgcgcccaccctcgccacggccgcgcggtccatggacggggccctcatgcgcgtccaagcaggaaaaaaacaggcagctcgcgtagactgcgagtctcggaagcgcgcgacgcgtggtcgacgatatcccgggaattccggaccgtaccagcctgcttttttaccactgtttatattcacatt

SEQ ID NO: 125751 - DNA, 1333 bp, Homo Sapiens
  misc_feature (102)..(114): n is a, c, g, or t
  misc_feature (203)..(217): n is a, c, g, or t
  misc_feature (792)..(823): n is a, c, g, or t
  misc_feature (909)..(953): n is a, c, g, or t
  misc_feature (1221)..(1269): n is a, c, g, or t
cacattaactggaactttatttgcttaaaacctaaacattgtcagtttgaaaagaaatccactgtgacctgtagactgatcttgttgattaaattctagggnnnnnnnnnnnnnggattcttggtaaaattttatccaaaaaacaggatacatatatatttagagaaggaaatatgaaatcaagagttttggcagcccctgcnnnnnnnnnnnnnnnagctccctaaagactgtagcaggataaaaggatcactggctccgagtctctttgagataacaagtgatgaaataaaaaagaaagcccataccctcaaataaggtcaggtaaccccattgcccaccctccctacaaggtaaaaaatgagtacttttagtaacagttcagaattcatctttatctcctacctgcctcatcggtggaagtttaaagtcatgattttttttagacattgatacttgtgtctatagacaaataaactcatattagatgacaattgattttttaaaagtccaggtagagaaaggagcaatcattttgaactaaaatctttctatgttttttgattactattcaacttgctattttttagcaaaaagcgaagtttcaatagtgttcatctcaaatcttattgctttacaaccgtggtacacctttcattaaaaataaaaagatgaagcagtcaatccagtgattaatttgacatggctttcattgggaaaggggagggctggcaaagagaccaatagacaaaaaggtaacttaaacacttacacatacaatggtttgctttnnnnnnnnnnnnnnnnnnnnnnnnnnnnnnnnaatgttactatcaacaaatggaaaaaagcactgaaagcccatgagtcaagccatagccaaaaccatgttctatcttaagtaggttnnnnnnnnnnnnnnnnnnnnnnnnnnnnnnnnnnnnnnnnnnnnnaaaaaaatctctccccagaccatcatcacttttaatcctccccagaaggggcttcatcttcagacccttcatccccagatttctcgggtggggggcttgtagatgttttcttttctggcgggctttccggttcctcatcttcttctttgggagaaggagtcttttcctttgatgcctttgaagctgtggggcgacccactttccctttgcctttcactggacttggcgtcactgtagcctttagtctgggtttgggcattttcttttnnnnnnnnnnnnnnnnnnnnnnnnnnnnnnnnnnnnnnnnnnnnnnnnncgaactgccatagtcactatcgtcatcatcttccattaggaaatcttcatcgctgccggaatct

SEQ ID NO: 125752 - DNA, 1260 bp, Homo Sapiens
  misc_feature (1147)..(1181): n is a, c, g, or t
ttttttttgggagttgagattttaatatcataaatcggtgtggggccacacctctcactgccaggcccgtgggcctcctatcttcatattgcctggaaggctgcctgcagccagggcttcccccatcccctaggaaggatccagcaccagcctgagaagggaggcaacagcagctaaaggggtgggaggaggaggagacagaagcatgtgctgcaggcgcatgtgtgtatgtacttacatgtgtgaacacatataaagtgtcaggtttacagaccctggctcaaggacagtctaggatgggaaaggaggtagggcgagaagaagcacatattttctccctggtgcttcagcctcaccctatccaagggacagacatatggggtgtgagaaacccatccccaggtcccagccttcaggactggagtccttttgagtctggtggagtcacagatccagtctttgggggacactgggtctgtctccttttgaaagccctggaaaggtgggaggtaagaagtaaagggagacaggtccctgctagaagaacttgacgcctcggccatcgctgacagtgatgatctcggccttgtgctcctgctgtagggcctgcagagcccgcagtagagtggcttcatccagcccgtggaactcctcatcctctgtgtcttccccattagtcagttcatacagggtaaagacggagttgttctggccactcctggaaacccactgatagatgagtttcccccattcttctggcctccgccacatgatcaggaagctggacttgctcttatccaaccactcgaggttccctttcttcctcagttcctctaatacaatctggatcgactccacaggaagctttcgctgtagcttgacgttgttgaagagcgggctctcctgagcttccatcaccgtcatgctggactgtttgtgcaggcggcagaaggacaggaccagcgagcaccaggcggccagctgcttctgccgagtgtccacattcggttgtaacgtaaagaagggtgggaagcgatactgccacggccactcgaaactcatcgccatcgtagtagcccaggaaacccggaagctccccggccgtaatggccgaattcccgggcatatgtccggtaccgtcgactgnnnnnnnnnnnnnnnnnnnnnnnnnnnnnnnnnnncggccgcttcctcgctcaatgactcgctgcgctcgtcgttcggctaaaacgagctagcgccctatagtgattatcagtt

SEQ ID NO: 125753 - DNA, 824 bp, Homo Sapiens
gaatggggaaaagggaagggtaggggccgaagaaagaaagccccattaatttttctccccctggttgtttcaagccttcccccctattccaagggggccagaccatatgggggggtggagaaaccccatcccccaggttcccagcccttcagggactgggagtcctttttgagtctgggtggagtcacagatccagtctttgggggacactgggttctgtctccttttgaaagccctggaaaagtggggaggtaagaagtaaagggagacaggtccctgctagaagaacttgacgcctcggccatcgctgacagtgatgatctcggccttgtgctcctgctgtagggcctgcagagcccgcagtagagtggcttcatccagcccgtggaactcctcatcctctgtgtcttccccattagtcagttcatacagggtaaagacggagttgttctggccactcctggaaacccactgatagatgagtttcccccattcttctggcctccgccacatgatcaggaagctggacttgctcttatccaaccactcgaggttccctttcttcctcagttcctctaatacaatctggatcgactccacaggaagctttcgctgtagcttgacgttgttgaagagcgggctctcctgagcttccatcaccgtcatgctggactgtttgtgcaggcggcagaaggacaggaccagcgagcaccaggcggccagctgcttctgccgagtgtccacattcggttgtaacgtaaagaagggtgggaagcgatactgccacggccactcgaaactcatcgccatcgtagtagcccccc

SEQ ID NO: 125754 - DNA, 607 bp, Homo Sapiens
  misc_feature (532)..(532): n is a, c, g, or t
tcacagtagatactcagaatttactccaatgaatgcatgttaaaaggatttgtacagacacaacactcttactttcaaagagcagaggaacattttatatagtgaacacatacacactggtggcaatgtaaaactacttaaggaaggaaaaatatccccctccccagccaggtactgagacctggggctaaaattttttgtcagtcagcccccatccccatcccttatcttcgagtgaccttaccaggaaacctggctttggtggaaaggagagctgtggggcttggggagcctgatgccttttcttttgggaggaaaggcacctgcacaatccgcaggacaggagtggccagcagctatcctgagctgaggctccagaagagttcagatccaagagagcaagggatgaatggaaggaaagtcccacccaccttcatgtgtaaagtgattggcatttactcaaatctaaatctactcctctcctccctgcaatataccattgagcatgtgccagagtaatggttctgaacanaagcaacacagatgtcagcctgggggcactctcagcctaaggaagccctacagccgagccctcagccctaatgac

SEQ ID NO: 125755 - DNA, 750 bp, Homo Sapiens
  misc_feature (44)..(52): n is a, c, g, or t
  misc_feature (694)..(695): n is a, c, g, or t
cagtggcttaaaccagagaggggtgcatttattttctcacattnnnnnnnnngctgaatttaagtagtctggggctggtatgtcagcaaaggcccagggtccttcccgcgttctgcgtcagcaaaggcccagggtccttcctgtgttctgctccactgtccttagggtgtgaccctttcctcacgctctcaggacagctgtcccagcaccagccatcacatccatgttccaggcaggaagaaggcaaaggggaagggtcctgcatgtggcagctgagtccccttcacaggagcttccctgcaagtctctcccagcaccacccacctccacgccacagttgcacaccccgggctgcaagggagcccaggacatggctctcgtctgcccgctattggaactgggcagaggcaccggggttctgttagtacggaggaaagagaatggacgctgggttagcaacttgcagagtccccaccacagccaggactcgggcaggagtgatccccactaaaaggcaaagatttcatgccaggctgcaatggggaagtgcttgggctggggtcccaccttctcctaacaaacatgaggctcttgttaaagatttaaccttgtgagagtggtctgtggcccacatgcacccagatcagctgcctggtgtgcctcggcccattccagggcttccaattcaccctgnnggcgggggagggctggggcatgcagttttcccacactccttgctgattttttctt

SEQ ID NO: 125756 - DNA, 1012 bp, Homo Sapiens
  misc_feature (892)..(926): n is a, c, g, or t
  misc_feature (930)..(972): n is a, c, g, or t
ttcattttaaaacatgtctctgcattttattttaagaaaacacaaacctggtcacaaaacatcttcagagaacaggataagtgaagaaacaaacaaaatgcatgggaatagcaaatttggggccacggtcatgttcaaggggcggagctgacatgacatcattttgttcccggaaaagcaaggttaactcaagctgtgaagcccagatggccaatagatttacagccatctaaagaagagcagaatgctctcaagagctgaattatgatgacttgtaggtattgattagatgagaacaccaaccccatattcagcagagagttagggaatgagaagtagaggggagatggtggtggagatcgtctttatgtagttttcaaagtcacttccgaaaaagaagatgaggtaatagttgaatatgccagcaacggacatgaggaacaggaagagtatgatgcgtttcccaaatatgtagccaggggtgctctgcgttctctctcctaggtaaccgacaaagtacttttgcctcacaaacaagtacatcagtccagcaaacgcagcaggaacttggctgcaaagtagccccgcagaccagagcacagcgaggaaagtggggtacgcatctacacagttctggttggcagtgtagacccgctcaaaggcaagtgttccggtcctctggaagctcctcccattctgggtcctgctttcgtgctccactttatgggcaaagaatccattctggaccacgctgatgagggtgacgatggccaacaggacaacattgcctacagtttcttgatccatgtttgcttcaggctccccagagaggactgctctccccggccgtaatggccgaattcccgggcatatgtccggtaccgtcgactgnnnnnnnnnnnnnnnnnnnnnnnnnnnnnnnnnnncggnnnnnnnnnnnnnnnnnnnnnnnnnnnnnnnnnnnnnnnnnnnctaacgaggctagcgcccatagtaagtcgatacagttctt

SEQ ID NO: 125757 - DNA, 1018 bp, Homo Sapiens
  misc_feature (910)..(944): n is a, c, g, or t
  misc_feature (948)..(977): n is a, c, g, or t
ggttcacaaaacatcttcagggaccgggataagggaagaaacaaacaaaatgcatgggaatagcaaatttggggccacggtcatgttcaaggggcggagctgacatgacatcattttgttcccggaaaggcaaggttaactcaagctgtgaagcccagatggccaatagatttacagccatctaaagaagagcagaatgctctcaagagctgaattatgatgacttgtaggtattgattagatgagaacaccaaccccatattcagcagagagttagggaatgagaagtagaggggagatggtggtggagatcgtctttatgtagttttcaaagtcacttccgaaaaagaagatgaggtaatagttgaatatgccagcaacggacatgaggaacaggaagagtatgatgcgtttcccaaatatgtagccaggggtgctctgcgttctctctcctaggtaaccgacaaagtacttttgcctcacaaacaagtacatcagtccagcaaacgcagcaggaacttggctgcaaagtagccccgcagaccagagcacagcgaggaaagtggggtacgcatctacacagttctggttggcagtgtagacccgctcaaaggcaagtgttccggtcctctggaagctcctcccattctgggtcctgctttcgtgctccactttatgggcaaagaatccattctggaccacgctgatgagggtgacgatggccaacaggacaacattgcctacagtttcttgatccatgtttgcttcaggctccccagagaggactgctctgcctccagctgcacaacctgccctgtacaggaaggggaagtgagagcttgcactctttcatcattcccccggccgtaatggccgaattcccgggcatatgtccggtaccgtcgactgnnnnnnnnnnnnnnnnnnnnnnnnnnnnnnnnnnncggnnnnnnnnnnnnnnnnnnnnnnnnnnnnnntacgggttctgtttttccgggtctaataaaaaaactagcct

SEQ ID NO: 125758 - DNA, 782 bp, Homo Sapiens
  misc_feature (170)..(184): n is a, c, g, or t
  misc_feature (329)..(329): n is a, c, g, or t
tctccaaaaaagcgtggggaaaaaacccccacgagaggggggcccaaaaagagtatttttaccagccccctttctaaaaaagaaggggggcccgaaatttcttcttccaaaaagggggaaaatttttgggaggggccttggtaggggttttgggattttggatggggaannnnnnnnnnnnnnnattatttaagccagaagaggttaggggaattggaaaagttagaggggggagaatgggtggtggaagatcgttcttttatgtagtttttcaaaagtccatttcccgaaaaaaggaaggatgaggttaatagttgaaatatgcccangcaacggacatgaggaaccaggaaagagttatgatgcgtttccccaaatatgttagcccaggggtgctctgcgttctctctcctaggtaaccgacaaagtacttttgcctcacaaacaagtacatcagtccagcaaacgcagcaggaacttggctgcaaagtagccccgcagaccagagcacagcgaggaaagtggggtacgcatctacacagttctggttggcagtgtagacccgctcaaaggcaagtgttccggtcctctggaagctcctcccattctgggtcctgctttcgtgctccactttatgggcaaagaatccattctggaccacgctgatgagggtgacaatggccaacaggacaacattgcctacagtttcttgatccatgtttgcttcaggctccccagagaggactgctctgcctccggctgcacaacctgccctgtacccc

SEQ ID NO: 125759 - DNA, 999 bp, Homo Sapiens
tcggtctcgtaagcttgtcgtcctcctgccttcggcgtacgtatctttctcttgccgtaacttacagtaccggccttctgattatcccctccttggagccccatctccaccttgtcaacaaacttggtccagtaccctttgcccgtgccttcaaaaccccgtgtctccgccccggaataagtgcccgagttctgtttctcttctttcctgactggttcttgctaatgcaaaggagctgggagagagcatgacggatgtttgaggttccagagctggaaggctctgcaaaagtaggattttgtacctaagaccctggttaaagtgcagtgatggtctggagagagacaggatgccccctctcccctccttagcacctggtcttgcccttccagtctctgctctcatgggcacagagtatagcctcagagcatagtccttcatgcttccgggaggttacaggtgccacagttgactggggaaggggatgggggcaccctaaggctctgataccccagaagggactagtccttatgaacgtgtcaccgaatacacagcagacacagaagaggtgggaggcggtaggtctaacacggaagggctcaataaccagaatcagttcaggaaaagcccagatattaatctcagctctgctcgacattctacaaaaggagctagcaccccagggtgccgttgaggattcttccttttctctagagactactctgctctgagctaacctccccattttctgcccttggcagcatctatttattgctacattgtcaaggaggaacattgccccacaatgcttctccctgccaatctggttctcttggggaaacctcagagtgggggagaaaaaggaggacaaagaggagaaagtttctttagggtctcccttcccataagaaggcaaggtagactcctctcagagcccttaaggccccctcgtgccattcggcacgagcctcgtgccgattaacacgcggcctatctgcc

SEQ ID NO: 125760 - DNA, 617 bp, Homo Sapiens
  misc_feature (378)..(440): n is a, c, g, or t
ggtttcttggcggaggcttggccggctcctctctcccggctccgcggcggctgcgaaggcggcggctcctgccctctcgctttccctctcgcgtctctggctgcagaaagaagcttccggttctgaggtcctggaggtgccatttccctctctgttgaagcaaaggccggggcagacctcctagtgaaaggaaagcaagccaggatggatatttacgacactcaaaccttgggggttgtggtctttggaggattcatggttgtttctgccattggcatcttcctggtgtcgactttctccatgaaggaaacgtcatatgaagaagccctagccaaccagcgcaaggagatggcgaaaactcaccaccagaaagtcgannnnnnnnnnnnnnnnnnnnnnnnnnnnnnnnnnnnnnnnnnnnnnnnnnnnnnnnnnnnnnntaatgggaagatacctgatcatgatccagcccccaatgtgactgtcctccttcgagaaccagtgcgggctcctgctgtggctgtggctccaaccccagtgcagccccccattatcgttgctcctgtcgccacagttccagccatgccccaggagaagctgcctcctcccccaaggac

SEQ ID NO: 125761 - DNA, 341 bp, Homo Sapiens
tgggcgagttgggctggcagtcagatttctgggggctctgtggactaaccagacccttccggttcaggggtgcattggggggctcgaaatgcagggcaatctcatcttccgaggagggtctctcttcttctttgctggccttgtcacaagggaagtagggggcatttcgggctgagggggcagcaggtttgaggccctcagccacactgtagtgcatatcacttcgtgcctcttctgcggattgtttccttgggtgaatagatattgctgtggctcacattgggggtcacctccaaagtcgtacggctgtgctcaccagtgtcctgcctcataggatcgtt

SEQ ID NO: 125762 - DNA, 1051 bp, Homo Sapiens
  misc_feature (728)..(728): n is a, c, g, or t
  misc_feature (764)..(764): n is a, c, g, or t
  misc_feature (777)..(777): n is a, c, g, or t
  misc_feature (791)..(791): n is a, c, g, or t
  misc_feature (833)..(833): n is a, c, g, or t
  misc_feature (839)..(839): n is a, c, g, or t
  misc_feature (847)..(847): n is a, c, g, or t
  misc_feature (857)..(857): n is a, c, g, or t
  misc_feature (864)..(864): n is a, c, g, or t
  misc_feature (976)..(977): n is a, c, g, or t
  misc_feature (984)..(984): n is a, c, g, or t
tttaacaaacaaaactttattttcctttaatacaaaattaaatagcaaggggttttctttgtacagtgataaattagaaatttacagtacagacatcgatgcagacatacttttgtacatccttaaaagcagggtccatttcctttgaaatttagcaattcattcagggcatgtgtagcaggaagtttgcctggtacctctttgtcaaacatctgaaagtcccccagattggcttcaaggttcctggagctgtggggtggcatgaggacccaagaaaggccacagagcatccagcccgactgctgcacagagcaggggaagtcacattttatctttttttcagattacatccgatatttcatctacctttcttacaaagagctcaaggggccatcattttttgaccttttcaagcctcacaacatccctgtgaggtagacaaaattcagaaacacctccatgcctcactgggagagatctagaaagcagcttacccctcccaaagcccacagccaagtcagggccccagcctattagtacaatttgaaaactttcacaacctcggagagaagatggacccaacctttgtggcgcagagtggctcttgcccctcttttcagaagccttctaggatgacagtggtcatgtactgaatattgtaggagagcaaggaggtttaaaagctttgaggacatggctcatataggacccaaaaaggtcctctacanattgcctggggaaattctgggaattggctgatgcanagaagaagagaanaaggtacatcaganacagaaacatgctactatcagggcaactgagcttgccaaggngaagangcatgtcnggggatctgntagtcanttgtctcctggtactgtcaaagtgtgtatcaccgcacaagtgcatggcaagagacagcaacagaagctctatgtaggctagagtgacctcgtgccgaattctggctcgaggnncaatccntaagtgagtcgtataaatcgtatcagtcatactgtcctgtgtgaatgtacggctcaatccaacacaa

SEQ ID NO: 125763 - DNA, 794 bp, Homo Sapiens
  misc_feature (52)..(52): n is a, c, g, or t
  misc_feature (709)..(734): n is a, c, g, or t
gctgctatgacaaggtgaagatgtggttcgatgacaataagcacgtgctggncacggtgggatgtgcatcctcatcatgcagatcctgggcatgccttctccatgaccctcttccagcacatccaccggactggtaagaagtacgacgcatgagcgggctggccgggagtgcccaccccgccctgctgccctgtggagggaagaggattgagctttgtgtcgcctgcctgcgctctccagatatgacccctgcacccaccccccacagcttgccctaccccacttaccctgcctcagcctcggatttttcagtgggtggagtgccagggaggaggaggcacacggagacctggggctcggggcccctggattcctgcatctgcatatgcgtatttgccaaagacgacagggtgggttggggtgcgctctggaggtacccccggcactgatgggcttttgcccctgcccttcctcacactgacactttgtccccacatggggtggggagcagagtgcccgccccgtggagataccgccccagcgggggttgggacatccatggcccccatggggcacctggcggggcgggggttttccggcctttgggcaaggcccctggagcatttcgcccaggctttttataccttacaatgtaacttttttattttattttactctatgattattcaggaatattatctctcagatnnnnnnnnnnnnnnnnnnnnnnnnnngaccgcgtatgcggccgcaagcttattcccttgtagtgagggttaattttagctaggcac

SEQ ID NO: 125764 - DNA, 740 bp, Homo Sapiens
aagaatggggctgaaatcagaatgcctgtttgtggtttcatatgcaataatatatttttttaaaaatgtggacttcataggaaggcgtgagtacaattagtataatgcataactcattgttgtcctagatattttgatatttacctttatgttgaatgctattaaatgttttcctgtgtcaaagtaaaatattgttaataaacctaacaatgaccctgatagtacaggttaagtgagagaactatatgaattctaacaagtcataggttaatatttaagacactgaaaaatctaagtgatataaatcagattcttctctctcaattttatccctcacctgtagcagccagtcccgtttcatttagtcatgtgaccactctgtcttgtgtttccacagcctgcaagtcagtccaggatgctaacatctaaaaatagacttaaatctcattgcttacaagcctaagaatctttagagaagtatacataagtttaggataaaataatgggattttcttttcttttctctggtaatattgacttgtatattttaagaaataacagaaagcctgggtgacatttgggagacatgtgacatttatatattgaattaatatccctacatgtattgcacattgtaaaaagttttagttttgatgagttgtgagtttaccttgtatactgtaggcacactttgcactgatatatcatgagtgaataaatgtcttgcctactcacgtctc

SEQ ID NO: 125765 - DNA, 1173 bp, Homo Sapiens
  misc_feature (85)..(94): n is a, c, g, or t
  misc_feature (183)..(301): n is a, c, g, or t
  misc_feature (331)..(395): n is a, c, g, or t
  misc_feature (397)..(397): n is a, c, g, or t
cccccccttttccgccttaaaaaatttttattttcccccagggggggttaaaattccgggaggggaagtgttccccaaaaattgnnnnnnnnnnaaaaaaaaggtgttcttcccaaaagtccccaaaggggggcgttttcccccggccgggggtttgaaaaagcggcccccgccccaggtttnnnnnnnnnnnnnnnnnnnnnnnnnnnnnnnnnnnnnnnnnnnnnnnnnnnnnnnnnnnnnnnnnnnnnnnnnnnnnnnnnnnnnnnnnnnnnnnnnnnnnnnnnnnnnnnnnnnnnnntggggattttggctggggtgttgtgtgtgnnnnnnnnnnnnnnnnnnnnnnnnnnnnnnnnnnnnnnnnnnnnnnnnnnnnnnnnnnnnnnnnngntagtcttagcatttactttccccaccccacattcttggaacagcctttagttctacaggaaatggcactgatggacagaagactagcattaccttcatgaaagggctgttagagctgcctgggaagaaggcgtgccttggggaactgggaagatgccgtcagtgtgggtgggcaggaggacagccagtcgtcctgctgccagcccaatagcttccagcggcaggtgcccaggtgctaccggagcccctcataggggtaggggcagggactgcacctcctccaggcactcatcgtaagcctcctggtactcctcatggggcttgaccattatcacacaggtggggcgcttggagcctgcggctgcacccaggtccgtcttagaggggatatagacatagggcaaatttcggtcctcacacatgactgggagatggcagtatacctcaatgggcagtgtgtctcctgccaaaaccatgatccctttttctcctttgttgacaaatttctgaacctctttcaccccgcgccgaatctgcttctgcttcaccgctttcttgatgcatttgtagagcttccgcgtgaggcggcgagaagccaggggctgcgcgatggggttctggttgaccagcagctcctggtaggtgcgctccccggtacacgcctccgcctgagcctcgggcccgtcgggatctgcctttattttggtcatcgcagcggccgctgaaacctagtcgccagtgcctcgtgccgatttcaacccagcctgctacctagcc

SEQ ID NO: 125766 - DNA, 951 bp, Homo Sapiens
  misc_feature (49)..(79): n is a, c, g, or t
  misc_feature (82)..(82): n is a, c, g, or t
atggttctaggaaagccttcttgaggggccgagggcggcccgaccaagnnnnnnnnnnnnnnnnnnnnnnnnnnnnnnnggncctaggcatttactttccccaccccacattcttggaacagcctttagttctacaggaaatggcactgatggacagaagactagcattaccttcatgaaagggctgttagagctgcctgggaagaaggcgtgccttggggaactgggaagatgccgtcagtgtgggtgggcaggaggacagccagtcgtcctgctgccagcccaatagcttccagcggcaggtgcccaggtgctaccggagcccctcataggggtaggggcagggactgcacctcctccaggcactcatcgtaagcctcctggtactcctcatggggcttgaccattatcacacaggtggggcgcttggagcctgcggctgcacccaggtccgtcttagaggggatatagacatagggcaaatttcggtcctcacacatgactgggagatggcagtatacctcaatgggcagtgtgtctcctgccaaaaccatgatccctttttctcctttgttgacaaatttctgaacctctttcaccccgcgccgaatctgcttctgcttcaccgctttcttgatgcatttgtagagcttccgcgtgaggcggcgagaagccaggggctgcgcgatggggttctggttgaccagcagctcctggtaggtgcgctccccggaacacgcctccgcctgagcctcgggcccgtcgggatctgcctttattttggtcatcgcagcggccgctgaaacctagtcccagggaggcgagcccacgcggtccacagctttaggcatcacttccaggtcatcagctgcgcgagaagccgccgtacaacacggccaatcaggaaaggaagtctccgactcaagcccaatcgtgaccctcgtgccgata

SEQ ID NO: 125767 - DNA, 655 bp, Homo Sapiens
  misc_feature (280)..(280): n is a, c, g, or t
gagcgcacttacagaaagctgttggtcaacagaaccccattggggcagcccttggtttttcgccgcttcaggcggaggctctacaaatgcatcaagaaagcggtgaagcagaagcagattcggcgcggggtgaaagaggttcagaaatttgtcaccaaaggagaaaaagggatcatggttttggcaggagacacactgcccattgaggtatactgccatctcccagtcatgtgtgaggaccgaaatttgccctatgtttatatcccctttaagacggacntgggtgcagccgcaggctccaagcgccccacctgtgtgataatggtcaagccccatgaggagtaccaggaggcttacgatgagtgcctggaggaggtgcagtccctgcccctaccccaatgaggggctccggtagcacctgggcacctgccgctggaagctattgggctggcagcaggacgactggctgtcctcctgcccacccacactgacggcatcttcccagttccccaaggcacgccttcttcccaggcagctctaacagccctttcatgaaggtaatgctagttttctgtccatcagtgccatttcctgtagaactaaaggctgttccaagaatgtggggtggggaaagtaaatgctaagactaaaaaaa

SEQ ID NO: 125768 - DNA, 901 bp, Homo Sapiens
ttttttttctgggcccaaacaactgtacattgtttattgagaacacccgtagatgggaaggagggatgccctgtaccgcatcgtggccaccactgactgggagccaggcccagagagcactggcagagctgggggtgggcttcccatgacacactgaccatctcggagggtgggaggaatgagaggactaggcctaagaccctggtgccatgctacaaatggggactgattggcctttgcctttcaaaaacagagggtatgggtatgcggactaccagcaaaaaatagaaacttgatttttttaaaaggtcctcctgtacataacaagacagcatctgctctccagggcccgggactggcagcggggacctcaggcaggcaggcaggccgaaggcctccagggaagatcagtggtttggctgagacagtcagctgcacaaaactggccagtcacgagcacccagcgaaacttcatccatgctctggcaggacaggaaagcacccggccccttgggaatatacaaatatttgccatattctctttgcttgttacaaaaaacagttaagaaagcttacagcagattatttacaaacagtatcctgggatatgatgaaggcagaggtgggctggcttggaggataggatctgtgggggcagaggagccacagcagcccagagggtcccaggctgggccttctccccaggcttcaggctctgcaaggcactggactctgctactgagaaggaggcttaattcttcttgtggagaaacttcattttgttgcctgatgtatgtgggaacctgggattcctctttgtaatgcaatatggtaaatacagcctgtcctccatatccatgagttctgcgtccatggttcatgtttatagattccctcggcc

SEQ ID NO: 125769 - DNA, 715 bp, Homo Sapiens
  misc_feature (632)..(632): n is a, c, g, or t
tttaactctgaattcttttaattctgaaaccagagacatgtacaacacttacagcattcacacaacactattttcaaaataggtttttgacccctaaaaatgaaaattcttagtgacaagctttagatatgaaacttagcccagtgggtattcactttgtcacaaaaagcaactacagacaaatagtttttccctctccccgacacaaaaactgaaattacagacttttaaagcagaaaaaattttctccaaaatgcaaatgattaaggtccaaggaacaaatgaacagaagatctcaattattcaattgagcgagtgatttagtttgcatattaactccttttcttactacttcctgatatctgattctggcaatatttatcttgtatctactgggcaagacactgggaacacaaagaaattttagacaaggtccagtggtatgctggtaaaggtttaacaactagctcttaagggaaaggtaggtcttcacttatagcatttctatggtgtaaatactccaattgccgcagatttcaagctagcaacaatttgacaactgtctcacaaaattcctcaaactaacgattgtcactcataagacattacaagccagctccaacacaccaccngtacagtctccaccttcaggtagttcataatctcttcatgggtaccttgtatcagatcttgggcaactggcggctggggtgac

SEQ ID NO: 125770 - DNA, 560 bp, Homo Sapiens
  misc_feature (432)..(442): n is a, c, g, or t
tgattctggcaatatttatcttgtatctactgggcaagacactgggaacacaaagaaattttagacaaggtccagtggtatgctggtaaaggtttaacaagtagctcttaagggaaaggtaggtcttcacttatagcatttctatggtgtaaatactccaattgccgcagatttcaaggtagcaacaatttgacaactgtctcacaaaattcctcaaactaacgattgtcactcataagacattacaagccagctccaacacaccaccgtacagtctcctccttcaagtagttcataatctcttcatgggtacctatttaaggggatataaaagaatggggaatattgagatataatttaaatcaattatattttttaggtagttttaaaagttagaaggaacataaatttccatgggattttcctacttcnnnnnnnnnnngtcatggcaaataacctcatattttattcaaaaacaataccccctccccagtcatgcatttataattaaaatatcctattttaatacattctccttatctctaccttagtgaattaaa

SEQ ID NO: 125771 - DNA, 633 bp, Homo Sapiens
  misc_feature (54)..(54): n is a, c, g, or t
aggctttcatgcacaatttccagcttcagaaacatcacagaattcatactgggnagaagccattcaaatgtgaaatatgtggtaagagcttctgtcttaggtcaagtcttaataggcattgcatggtccacacagcagagaaactgtacaaatctgaaaagtatggaagaggtttcattgataggctagatttgcataagcatcagatgattcatatgggacagaaaccatataattgtaaagaatgtgggaagagcttcagatggtcctcatatcttttgatccatcaagcgaatccacagtggagaaaaaccatacaagatgtgaggagtgtgggaagggctacattagtaagtcaggtcttgacttgcaccatagggtccatactggagagagatcttataattgtgatgactgtgggaagagctttagccgggcttcaagtattttgaatcataagaaactccactgccgaaaaaacccttcaaatgtgaggattgtggaaagaggcttgtacaccggtctttctgtaaagaccaacaaggagaccacaatggagaaaactcatccaaatgtgaggactgtgggaagcgctacaagaggcgcttgaatctggatataattttatcatta

SEQ ID NO: 125772 - DNA, 925 bp, Homo Sapiens
tttttatatcattctctgaagagcatattttattaatcttcaagttcctcagcatattaataataaaaacttgatatatattatcaacaagtctgactgttatgcccaaagaaaatccagattattttaaggtgagtttgcttctttttcatctgattcatcatccataacctgttctacgccttctacctccggaatataaaactgcagcatgttctgaattccatttttcagagtaatgattgaactagggcagctggtacaagaaccctggagtttcagctgtacaatgccatcttcaaagcctttgtagattacatcccctccatcttcctgcacagttggccgtattctagtatctaacaattccttaatcattgccacaacttcatcatcttcttcagatcctgcttctcctgaaggtgtttcctcagtaaccaggggtaagccagatgcaaagaagtccatgattgttgcataaatatctggtttcagtaaattccagtctaattcttcattttcctttgtgacagtgatgaaatctggtccaaagaagacactttttactccttcaatcctaaataactgcctagccagaggggagcgaaatgctgcagctggggtgggaaaatccatggtccttgtctcaagaactggttttcctggtataaactttaagctgtttggatttggggtatcttgtgtttgaataaacatgtatctcactgggtgataaaaggctgcaggtagtgggaaaagtggtctttgtacaaactgatgcagaggctgtttcttaatggtgtatggattcttcaacatatgacagaaccgcctgcgcagcccggcggcaacagccgcagctccccagccccgcctggccgtcgccgccatcttcctcgtgccgattcaccacccagcctcgacc

SEQ ID NO: 125773 - DNA, 1677 bp, Homo Sapiens
gaaactgcgcatgcgcacaaccaacagcgctcccgcccctttttatttgaattcggagaaccagaggcgcctgcagattctggaggggtctcgcctgcccatcgctggcagcccgagatcctggggaggggatgccatactgctagagatgagggaagagagccccaagcaggaaaacattgatttgctgtacactcaaagggcatctcatgccttcagtccaccgcctcctcgggccacagcccgtgccctcgcgccggctcagactagctctggccctgctgctgtcgctgcaggttgtcgtcttcttcctggtggtcctcgggcaggggcggctcctccagccctgcagaggatgtctggagctcccgggtggacccggcgaggcggaagaccacggggatctgggccagggttgggttggtctcctgcaggccctggatccacttagccatcgtcgcctggtcatgagcacccgccatgcacatggcgaagacagggccttcctccacttcattgatgtcaaactcgtagttgtcccagccactcctcacatactccaggtccagctgcatcgggtagtagaggttccactcctccggcgtctcttccacttccctctcctccgggggcagcaagtcagctctgaggatgtggtaatacacacacttgttgcggagccacagggagaaggggccctcaacaaagacaggccgggctggattgtggcgggccagggcggcctgctgatcgggactctggattcctacgatgtggggctgggggggatctgctgcacctgttgagtctttgggcaaaggaacctggtagatggtgaccctggcactaaggtcaggctccatgtgccgcaggccaaacatggccagctccacagggtcctggggcaggtcccggggcactgggaaggggttgacgttcatgaatcgagggaaccacagcttcaggcgcaccaacttgagcatggggtagcttttgcgtccaaagatctgaatcagcaggaactccgtctccttgttgggcatcacaccgtggttctccatctgctccaggacagcaatcccacactcctgctgccgagggtagtggacgaagatgcgctggatgatgttgcgaggccggaagacctccttggggaagatgttgagcagctggttgtacacagccaggtcccgctcgacaccatactcccgcatcttgcgcagggccaggtagatgaagtcaatgtggccccgcttacgcacgctgtgctccgcaaatttctgcaccgtctgcaggaagctcgccttgtcccgttccccaccaggcgcctgcccaaacaggtcctcaaagggcaccagagccttggtgggcctctgccggggttccggtgggctgggaaccagggactgttcagagctatgggcagctgcgctgcagtggaggccccgagggagccggcgagggacctgagagatggaggttcctgtgagggcggccccgcaggtgcctccccaggccctacagaggcctcgggccagtagggtggcctggacccagctcatgcctctgcttgtcagacaatcacctactcacgcggccagccgcggactccaggccagctctgtcttgttgctgggcgctgccatattggcccagagagcgtccgggtcagggagc

SEQ ID NO: 125774 - DNA, 1052 bp, Homo Sapiens
taaccattgaaacagtaatttattcctgagctatttgactgccatcaatccatttgttataaaactgaagggaaaacacacatttgaatcacttcttctaaagctttagtaagtgatctgttcaaataagcaattacatgaaagaataaaaccaaatttccaacctaaaattctgacaggagagtcaacatgatggttaaggcctatttcatattcaaacttcagtctatgaaagagtagagagagaagggtctcctctttcaaattaaatattataaaaacaattaaaaaaaggtatcaatagtcctaaaatgcagcaactccatctcaaacaagcatgacacacttctgatcagatgaagtatttacaaaggtagcttgtgttttaagcatgtaacactttgggtgacgacagaagtttctcctctttgggtgaaacctgcctaaggctgtagagatgaccaacactctgcaggtgttagttctgaataactactgtgggcttttcatgatcttccctccagtaggagaccacaattgagtctaaagtcagatccaccgttgtctatgggtaggcagggttgattcaaacttaatccttgtttgtattcttttggattactgcaaaaacatctagggaccagagtgaatgtctggtgaggcataactgcagaggtgaaagatgtcaaacattttcaatttggcagtttcttcaaggtgtgtgaaaattcacatacagaaggtctggcagtgtcttctgtaagttttcgtgttgccgtatttctgaaggagctcttgggcctgctgctgcatttcctgggccagacagccaggaaagtgggacctgatgagaagcaggacgaggcagcactccagcacatctgggaagggccaggccttaatgctctcaggaaattttgccattctctgatttgcctcggtaagccttttggttaactcaggcagagaaagtggctcatttttttcttctttacactggctctgagaactgcagaggggctgctctgcttctacttccggttcattcttcc

SEQ ID NO: 125775 - DNA, 1013 bp, Homo Sapiens
  misc_feature (692)..(693): n is a, c, g, or t
  misc_feature (707)..(707): n is a, c, g, or t
  misc_feature (717)..(717): n is a, c, g, or t
  misc_feature (746)..(746): n is a, c, g, or t
  misc_feature (760)..(760): n is a, c, g, or t
  misc_feature (763)..(763): n is a, c, g, or t
  misc_feature (837)..(837): n is a, c, g, or t
  misc_feature (926)..(926): n is a, c, g, or t
  misc_feature (936)..(936): n is a, c, g, or t
ttgttttccaagttcctttttattcaaatgaatcagaactgcaatctgcacatgaaaagacctggggggaatgcctacatctggaattccattacatcaacgttaaattttgtccgaccagttcttcattgctgatcacttttgataatgacagatccaacatgaaactcctgaagcaaatgaatatttaccttgtgctttcatgcaaatttagggaccaaactcaaaggtttcatccatgctggacaccagatctaagaattgtgacaggatcttctcatatttcattttagaacacttgatactagtctgatgatactcatgttagctgcactccaattaatgtttatcctaatgcaacagaaaactctgttaaactgtacaccgtaattggcatctgttaaaacaactccacttttgaacgaacagcatttctctcccaagatctctctctctcttttgaatttgtcagatggagttacgcaggtttctctatgatggcttttgcatgccatttccaagtggaacatggccaatctttgataaagtataatagatgaaaatctctgcgtgaagaatatgctgtaggtttcacacacttttagtgaaaatggattattttcaacagcaccaagaagtcaatggtgacttatttagctcatttagaagaaagtcctataatactcatttgnntttacaaaactctngtggtaacanaaggtatatacaccgtttactgtacacanaatgcatctttccntgntaactggtgtgtgttcagcacactccacacatggcaatatgttagaatcctagcatcacatttgatagagtttntgatagaatgcatccaatgggaacaacacccatatgttgtagtgtctaatagaactcagtgtaaaaagtaaaacaaatagcaggagganggatcatccntgatatgtgacatggcatactgatgtgtcatcctaagcacaccaaacatgtgcgtgcctgtgcgctgatcatactcc

SEQ ID NO: 125776 - DNA, 512 bp, Homo Sapiens
  misc_feature (79)..(103): n is a, c, g, or t
cacctgcacagaaactctgttaactgtacaccgtattggcatctgttaaaacaactccacttttgaacgaacagcattnnnnnnnnnnnnnnnnnnnnnnnnntttgaatttgtcagatggagttacgcgggtttctctatgattgcttttgcatgccatttccaagtggaacatggccaatctttgataaagtataatagatgaaaatctctgcgtgaagaatatgctgtaggtttcacacacttttagtgaaaatggattattttcaacagcaccaagaagtcaatggtgacttatttagctcatttagaagaaagtcctataatactcatttgtttaaaaaactctgtggtaacaaaaggtatatacaccgtttactgtacacaaaatgcatctttcctgtgaactggtgtgtgttcagcacactccacacatggcaatatgttagaatctagccatcacatttgatagagttttgatagaaatgcatccaatgggaacaaacacccca

SEQ ID NO: 125777 - DNA, 693 bp, Homo Sapiens
caatcaggaaatatatccaggccgcggcagcctttccaaactcccgggcttcccacagaatgcgctcgaatgacactggaaagatttcaaaaatccaggcctccccctgttttaattcctttcttcccccaacagatgttgcaggcctggtgaggaagcccatcgtgtgtgactctcacgccactgacggggtttcgtggtgcggccaaattcctctatggccatccccagcatcagtccttccagattgaggaagccccttccaggaatgagctccatatttaaaggagtggaggagatgaacacctctccaccttggagccaagaggttaagctttcaggaggccccagggctgggcaggaaggattgaagctgtccctctgcccatccctcagagctgtttctctggactttaattgaaggtcgtgatcctcaaaccttcattttaatgactagttgcaacctcttctcttcttcagaccttgacccagcttctcaaccagccagagccactggtttggatttcatcttctatataatttagggatgcctagaccaagggaccttggcaagtggtaacacttctctggcctttggcttcctgatctataagctgatgggaacacgagcaacgactgccaagggctcctccagttttaatgtcctgggggagcagtcacataacctctttg

SEQ ID NO: 125778 - DNA, 658 bp, Homo Sapiens
  misc_feature (29)..(29): n is a, c, g, or t
  misc_feature (48)..(48): n is a, c, g, or t
tttcttgtgtttaatatttgtgacagatntgcaactttaaaaagtgtntgaatgaatagtgcataaaataatagatgttttcagaaaaatccattattaagagtagaggaatgaggagaaatattcgttctaaagagaatcaaaaccacaatgagagattgtcttacccccgttagaatgacagttaccaaaagacagtaacaaatgctgacgagaatgcagaggcaaaggaacgtttaaacactgttagtgggaatgtagacttgtacaaccgttatggagaagagtatggaggttcctgaacaaactaaaaatagaactaccatatgattcagcagtcccactactgggtatatatccaaaagaaaatccatatatggagacatctgcacctgccatgctcgttccagcactattcacagtacccaagattggaatcaacctgtgtctatcagcaaatgaacagataaaatgtggtatatataccccgtggaatactatttggccattaaaaaaacaaaattctgttattctcagcaacatgtatgatcttagaagacattatgttaagtaagccaggcacagaaagataaatactccatgtactgtacttatgtggaaggtaaaaaagatctcatagaagtagagagtggctcat

SEQ ID NO: 125779 - DNA, 690 bp, Homo Sapiens
  misc_feature (653)..(653): n is a, c, g, or t
tttgccggctgtacaatttattcagtgcacattatttacagaaataaatgtatgggggtggacacggaacccccgcagccccaccccttagctggctctccggttctgcagggggcagaagctgccggacccgcacttggtgccagtgcacaagaaaccactcgcagaggccagcagaatccttccccctcaagtgccttggggatcctgggtggcagactccactcgctcagggccatggggaagtagagccagctgtacagtaccatttcccacagcagccacggcctcttgcttgctttgggaaggaaaagaggaaggaggcatctgtcctcagggctgagcacaggagggcagcctcttaggccacaatgggctccttcgtggggttcacagtctgatgcgcggctggcctatccccaccagtgtctctcctcccaggaccctgggggcacagggagctggaggggaggaacccctcatgcccagtgcctgacactgtgggcacccattcacggccatccactgcccaggcctaggcacccaccagccccctctctctggggctcaggacactggcagctgaagccgaaaggagctggagctcagacccctgaggctagtggtgtgagtcggagagggagggaggaggnacagggaaggaacagagggttctagctcagggagcat

SEQ ID NO: 125780 - DNA, 2064 bp, Homo Sapiens
  misc_feature (186)..(211): n is a, c, g, or t
  misc_feature (1957)..(1987): n is a, c, g, or t
ttttttttcttctgaaaaactattctgtttaatagtgcacttcatttatgctacaggatgagcagggttgggaaaacacaatggaaggtcatcccgtcggttgggaaaactcggggagtgccatcctcacccagcaacgagctctgctaccaggctcaggcacagcctgccttctctgggcttcgnnnnnnnnnnnnnnnnnnnnnnnnnnctcccttttgggctttgctctttctctgcattaatcttcagctgctgaagagtcagaggtggaggcaggagtggtctggctcctggggctgggtgtcagaggtgagagggcagggcaagcaggccaagtgagctccttgaaagcatccttacccaggcatttagagaaaatcattttcatcattggagtgggaagaggacaagagaggacagcaatcagaggccaacgctaagtgcttctgaccctctccctcacagccggttactagctgtttggacagatttgcccattcagccccaggacaactgggggggatggcagggggtctgctggcaatatcaccaggtttctcttggaaacatggtctggctgctccaagagccctaaaggacaccatcatcacagatgatgattctggaatctcttctaccctcaataaaataatccctcaatgccaaatttccataattaacgaaatcatgaaacaaaacagcatgtttcttaccgaaacttaaagctggactaggaacagtagctttgaaatagtctccctttaccctccctagcaaataacaggacccagagcgtcctttccactgctgtctgtgctgactacgcggactccaactaaaggaatccatcgaattctgtcccgactgtgcttccatccccaccttggaaaggttcctctgctgtgagaaaaacagtttagtgcaaactcctttcctaaatggggtaactggtcccagagctgctttctattcccagcacgccatccacttgccttgacgctttctaatggctggtgtgatttctgggaaaattcaacggatttgccccatctgccccattctctaaaatgaaaagtctgagttgaaagggacacatcctaagctgttgagatttatagggtaaggcaagagctcttgagactcagggaaagtgaggaaaatgggtgtgtggctctttcacgtggactctctgatatttaactcggtcgtaactctgagggagcttttgctcatgccgatcccattcaaaggcttctctccagtgtgaattctctgatggcgaacaagagccgagctgtacctgaaggctttcccacactcactacattcataggggttctccccggtgctgattctttgatgctgaataaggcctgaactgtaggtaaactttcctccacattccaatacattcgttagggcttctctccagtgtggattctctggtgctgatagaggtgtgagctctggctgaaggctttcccacattcattacattcatagggtttttctccagtgtggattctctgatggtgaataagggttgagctcctgctgaaggccttcccacattcattgcaggcgtagggtttctcaccagtgtggattctctgatggtgggtgagggtggagctccagctgaaggtcttcccacactcattacattcatagggtttctcccccgtgtggatcctccgatgcagaatgagggcagagctacagctgaaggttttcccacaatcactacattcataaggtttttccccagtgtggattctctgatgctgaataaggtgtgagctctggctgaaggccttcccacactcattacattcatagggcttttccccagtgtggattctctgatgttgaataaggtctgaagttcgattaaagctcttgccccggccgtaatggccgaattcccgggcatatgtccggtaccgtcgactgnnnnnnnnnnnnnnnnnnnnnnnnnnnnnnnaatgcgccgcttcctcgctcaatactcgctgcgctcgtcgttcggctacacagagctagcgccctatagtgatatca

SEQ ID NO: 125781 - DNA, 672 bp, Homo Sapiens
aatctgtatgaaatattagttttaataaaacagaaccagtccatgtatggaggcatgggcataaggtcaacttgcactaaatgtaactcgtacgttttttctaaaataatttcttgagcattgtggtggccttatgtactaacccgaagctgaacttcctgggaagctgatccaatggagcacttggaattcaggggtggagtcttcttcctgggtcagagctggttcagggtcacatgctcttgaggtccctaaaggccacatgtgctgcatttcgcccagcagctcccatcacacctcctccaggatgagccccacttccacagagatacaggccctggagagggcagcggtagccagaatgcaggggcacggggcgggcgaagtagagctggtccagggacatggcgcagtggaatatgttccctccaggaagcccgaagattctctccaaatctggtggtgtgaggatgtctctgccaaccacagagtccttgaagccaggggcatagacctcgatgcaatcaaacactgtgggaaggcaggccatccatggcatcttcaaaggcctgatgaaggaggagggtgtcttcacagttcaggtggatggagcattggtgatggggcagcggctggcccctgggagcattgggggccgccaggaagctgggc

SEQ ID NO: 125782 - DNA, 467 bp, Homo Sapiens
ttttcaacttttttattacacagtaaagaatacaacaatacctgaatcatactttaaagattcacaggttgacagaccatacattacagtccaactaaggaaaaaaggataaacaagaaaccacagttcagacatagtagacttaaaagctcaagagtatgctgacaaaagcatgatgcctagaccccaccccccagtgttagtctaccattaacttgtggtacatgtctgaattaagtattgcacaacaactttaatttttcacaatgtcgcagaacccaaaataatattttaaaaaaattacttcaaatctgcatttcaacagtctccaattttttttctgtcccttgaggaattcggacaacatggagtcgctttctttccctaagtattccagacgtaggcatgctttgcataagtaaaccagccttgaaatttttaaatccccaagacatgcacctacacat

SEQ ID NO: 125783 - DNA, 652 bp, Homo Sapiens
gcaaacaaacctccaaaccagttttatttaaaactatcaatatagtataaaagtagctttaattacatagaatatagaaacacaactgcaaaattaaattatttcatacagttttggtgcataaagtttcaataacatttaacaatttaaaaatatccaaagtataaattcttgttctgaaaactgtttattgataaatgatttttctcagcttttcccctacattttgtacagtagcaggtatgatttagctgactacttggtttttcaaccaatggatatttaataatgataataataaatggtagcagtagtagctaacacttttatagcatgtaatatgtgccaggcactgtttagagagaattaacacgtacaattatgtccaaagcagaaaaacctagtaaattggtttcacagctttgcccatttgtattagaaatataaaaaagcaggtattacaaaatgctatcttgccattatacagcatcatcaatagtcccttggcacaaataagaaacattcccttactaggtacacttctttggcaagacacaaacaagagctaaagaaaggggagagggagagaaagtaagagtctaaaatgtaattttgggggggctaaacatatgataatgagacagtatttgat

SEQ ID NO: 125784 - DNA, 591 bp, Homo Sapiens
tcagtctttctaacaagataaccagagtacaaaagtccaaacatctttaaagtaatgcttatttttcccttaactactccagtgttttggcatttttgcctttggagtgaggggcttcccagcctgggactggggaaggactaattcagagagtctctgtccacagactgatgctgagaagcactcacaggtggagaggaattccctgtggtctggtgatgatgtcaagaaatcagacggaggctcagacagcggcataaaaatggagccaggttccaagtggaggcggaatccttctgatgtgtctgacgagtccgacaaaagcacgtcgggcaagaagaatcctgtcatctcccagacaggctcatggcggcgaggcatgacagctcaggtgggcatcaccatgccaaggacgaaggcttcagccccggcaggcgcactgaagaccccaggaacttgtaagaggccggggctgtcttggccctggggcaccaacgccagcagctcctccgcagttagcaaggatggcctgggctttcagtctgtcagcagcctccacaccagctgtgagtccatcgacatctccctcag

SEQ ID NO: 125785 - DNA, 1254 bp, Homo Sapiens
ttttttttcctgtctgtaaccatcagatttatttttatatttattaagcagtaagcaaacagagttgggggagatgacctaaaatggttttcttttggaataatattttttaaaaaatcaaataactgttatcactttaagttgcatgaggctgaagctgcacctggagaggaatttaattttcatgacatgcaaaactgattaggcagtgaactctttcctcccgcttcccctgaacacatttataaacttcaacgggggtgaattccatctaatactctgaaaaccatttctcatctcacagtttacccaaatcatgtgcatgactgcaagaggaaataaacaagaaatctttaagcatagataagccacaatggatagttaatcttgtacagacaatccagcattaaggctaatttgatcttttaaacattttatgggaaacagctgttgagttttctctagaaaagcccacaaggttccataaccccataggcatacagcctcgacaggcagggctccatcaggctcctcttgaactgggcactccttcacggaaggcaggaatgcacgtgtcttcacttcctgctgctctgcacgcacgtcacgatatctggcagaaggtggtttctgttttccttggtgacattaaacaccttcacatcctttctgtttctgatttcttctacaagagccagtggctttcctttaggaactgggattgtgccaaggattatagtccctggggtagacagcgtctgacgaacagcttgaatgaaaagctgactgaagagctccatcttcccaatctcatcgatgacgcacactctttgccctgggccactgctgcagtcggcattcctcaagacgggtagtgccaactgctcaaaagaagtcaggtcgaccacatactgcccaactcggcattcacgttttccaggtggaggctctaacccaactctcgataaaggcccccgggtgccggacaacgtgacgacatcgaatcctattcttctccctccctgtctgacttcttcggtataaaatccatcaacaggcacaccagaggattttaaaacctcactggctttatggatcaatgttgtttttccaactcctgggggccccgttaggaacacgtgccgggccatactggtgggcgggggtaggggttgcggtcaggggagcagtccaggttggggtcgcaattcaggtcaggtccggaccagggtcgcgactcaggacccgcccccc

SEQ ID NO: 125786 - DNA, 1276 bp, Homo Sapiens
ttttttttaatttataaatgctttattgaaaaatacacttatcttcatataaaattacagtagcagtatcttgagaagttttataaatatttttgcagaacactattctaattgaacaatgtaagttccatatttctctcagcaatatgaagttacctagtaactttgtttatactgattcaatttacaattgaattttctccctaataagattattaatttgacttgaaaactgctggaacaatagtgattaataaagatatgtatagataattcagctgttaaataacattttctaatttgtataaatggtactatggtactaataaaaacctaaattctccaaccaatttttttaaactgccaggaacacccaaaaatatttttaaatatatcaccttaatagacatttcttttagataactccctcctaaaggaagaggtcataagttttcatattaatcccctcaattcaacttgattaaaatcttttcttagctggttgatccctatataacaaaaaactggagaatttaaaacattcccaaaaggtggctataggggttttaacattttaaaaaaatataaaagcattaaagaaaatattggatgtttagcctggaagttttgtatttaataaagttcacattgtagaaagtgctatcacaaatatacagcaaaatctgggttacaagaatcatgcattttacagccctaaagtgcctccacttatacaggttcactcagacattgcacacccgaacaatcaaggacttttcacactgcaccacaccgaatggggagagggaagatgtgcacaaagggaacgggagacgagggctaatgacctaggacctccaaacctgggtgtgctctcctttgtcaggaatgcaaaaaatcacacactcctaccaggtgttttaggacaaaatacctaatttttgttttgctttttatgaggactacagctgaccacaaaacaggtaggattgaacttgaaacacagttcttctgttggagtacgtcaacagaagcctcctatgctcacgtttgggtacacatcattttcttgcagtatttctaaaagctttgccagagtcaaaaatccaagtttggattctaagcagccttgacagtaatcactgaatggtagggaaaaaaagacagttgggatgaattaaaatgttctaaggacactggaaggagttaagtcccatttctcaccaaaatgtcccctcatgttactaacaggctgtaactcatcagctggattaag

SEQ ID NO: 125787 - DNA, 1409 bp, Homo Sapiens
ttttttggtaaagacttttaagagaaagaagtattttaaaaagtagcagtgctctgaggctcagggtgtaggatcgggggcacagcctggtcccgggaggccccttgtgcacaggtggtggcccagggccacagtgctcgctcttgggggacgcgcggccgggggacgcggcctgtgtccggcccggggctcccggcgggctccggcggcagggacaatggcgaggccgctcaccacttgaggaagaccatcccggccaggacggtgtagcccagcaccaggaagaggaccttgagcagacggtcactcttctcctccagctccttggccaggatctccaggaaggtgatgaagaggaaggtgccgcccgccaggccctgcagcagcacggacgccacgctgcccggcacgccctgggcgctctcaatgcccaggcccaggccgatgcccagggggatcatggcgcttacggtgaccgccagcttggccgcgtcccgcaggggcatggcactccgggccatgctgatgcccagggccacggccaccagtgtctcgtggacggccacccccacgaacaggctcaccactttctccccctcctcctgcaggcccagggccaggccctcaaagaccgagtgggccgacagcgcgaaggccaggctgagcaggcgcacggggctggcgcgcgagaggccctgcacgctcaggctggggccgtggccgtggggctccacgtacagcgcgtggccccgcgcgccccccatgaaggggctctcatactccgagtcgctgcccacgtccgatccggcgttgaaggtctccaggtcgatgaaggacggcttctccttgcggaaggtcaggatcagctgctccaggaagacggtcatgaagaagcccagcaggaggatggtttcggccagcgggtagtcggtgctgatgtggccgaggctcaggaccttctggagcttttccctcacagcgggcagcagagcgttgaagcacgtggccagaaacacccctcctccaaaggtgttgcagagagagaggatctttttcgagcgatgggccttctcaaaatctgtctcgatgatcttcacggggagcagggagccgagcagcatgaagaagaacacgcccaccatgcacaggattttggccactagcaatttcaccatggtggcggcttgggctgctctggtcactgcagggccaaaccatctgtgggcgcacacccaagtcccacgatgtgctaccgagcccaaccacacagttggaggctcatgtctcagtccagcaactcccgggggcccctcgtccgccgactggcgccgctgcacgcccaacggccgcgcagtctcgaccccacagacgcggcccggagaggccccgctcggcgcggctggtccacg

SEQ ID NO: 125788 - DNA, 927 bp, Homo Sapiens
  misc_feature (131)..(131): n is a, c, g, or t
  misc_feature (137)..(183): n is a, c, g, or t
gtttttggaaattccccccaaaatttaaatggagcccttgattaaacctgttttattggctgggcactggcgcttttacccccaaagtggccccaagtgggcacctgtctgacctctctggagtccctttntggggnnnnnnnnnnnnnnnnnnnnnnnnnnnnnnnnnnnnnnnnnnnnnnntgacttgggacagcccttgtcgatgtgccaatcacagtgggaagggggagaaggggggaggtcacagtgcatggggttcaaggtcacagtgggcggagcaagggggatcacagtgcaagtaagtcaggtcgttccctctgctcaagtccagctgtctgccacggcagtgcaacccgtggcggacgacccaggaggcggtgacggcagcaacggcggcatcttttcttgcctgcatttatctgcgctgtttgaagccttgagacccatcaggacccaaaggctgtctgatcacattattgggctgcctgctgtcttcgggttgggagatcctggttggcctgtcgaggatgggtttctcctgctcctcctcggggctggcgctgcccaggatccgcttccgggcctcggcgtactcggcctctcgctgtgctagggacttgactggaagggtgggcctgctggtggagttggggctgctgaccacaccgttgctggtgggcctcttgaggatgcggatctgtggagggggccccgcgggaaggctatcgtcctgaatcacaatgggcactttgggaggagatttggatttcctgctctctttttgtgtgatcttcagttttttttccaaccgtctgtctatttccccgctgtctgccgcctcttcccagctctcagcgacctcctcatcttccatcttaccggacgcgtgggtcgacgatatcccgggaattccggaccggtcca

SEQ ID NO: 125789 - DNA, 963 bp, Homo Sapiens
  misc_feature (226)..(236): n is a, c, g, or t
gggagagagtatgaagtcgacggcgcgccgaattcggcacgaggaggactcagagagtcagacagtgccacttggccacttggggtaaagccagtgccagcaataacagtttatcatgctcattaatttgggatttcaaaacacaaatgaaaactcacacccacccacccccaagtgcatgtctccatcacttaaaaagtaagttccatttgaaaatatcctttcnnnnnnnnnnncttcctatttttgtttgtttatacaaatatctgatttgcaagaaaaagtgcatgggaggggttttagtggtttaatgaatttttaattaagaaagggtagtttggtagtctacttaaaaatgtttctgggaaattcactagaaacattaaccaataggattttggtgagcttagcttctgtattcctactgccgcccagaaaaggggcagggctctgcagccgccaggacagacgagcaccccatgcctatacctccctccccgagctaagtcccagggcatctgggccttgcctggagactgggctagctctgtaggctcggagagcctggggagggtgccaaccccacctctagtattttgggagatagggaaagtgaaccgacttccccttcccatacccctcagggtggttccctaccagccaggcttactacttctagaagaaagcagagtgccagggagtgagattgcatccctgggcttagaagtgacggagagaagacttgtttagtattttgccatcagcacaaggaaaaccaggagagagtctgcctccggactctgagcttctgctcgtatgtcagaagtggatggtcttcactcagcatgcttgaactctaggtctcatgctcatctcattgtggccactcatactatactgtaattctggtcacatactgagcaactcgatagtgaaaacactgctgcaatgtacatgtctcac

SEQ ID NO: 125790 - DNA, 1963 bp, Homo Sapiens
  misc_feature (103)..(103): n is a, c, g, or t
  misc_feature (205)..(205): n is a, c, g, or t
  misc_feature (1055)..(1065): n is a, c, g, or t
ttggggaaggttattttttgtccagaccagggagggctgtctggctggctgaagggataaggcgcagtgcaacggaaagggatcaggaagcctgaggaggagncaggttccccacagttgttttgggcagctgccctcttagtctttttccccttcaaagagccaaagcaaaaccccaggcttccaggacagaggataaactccnttcatttccaggcccctcgctctggaaaaagggggtgacgggtagcctaggcctctgaggaaccagtctgtcatcaatctttgcaaagcaaagctgttctttttccaactttattcagaatgttctgccttcaaggtactgattgcacacaggaaatgtaccaggtatagttactgagctggggccaccaatggagatggagcactgcagacccctaagagttcaagccatgctggagtgggaagacctatccaccttctgaacatacgaggcagaaggctcagagtcctggaggcagactctctcctggttttccttgtgctgatggcaaaatactaaacaagtcttctctccgtcacttctaagcccagggatgcaatctcactccctggcactctgctttcttctagaagtagtaagcctggctggtagggaaccaccctgaggggtatgggaaggggaagtcggttcactttccctatctcccaaaatactagaggtggggttggcaccctccccaggctctccgagcctacagagctagcccagtctccaggcaaggcccagatgccctgggacttagctcggggagggaggtataggcatggggtgctcgtctgtcctggcggctgcagagccctgccccttttctgggcggcagtaggaatacagaagctaagctcaccaaaatcctattggttaatgtttctagtgaatttcccagaaacatttttaagtagactaccaaactaccctttcttaattaaaaattcattaaaccactaaaacccctcccatgcactttttcttgcaaatcagatatttgtataaacaaacaaaaataggaagnnnnnnnnnnngaaaggatattttcaaatggaacttactttttaagtgatggagacatgcacttgggggtgggtgggtgtgagttttcatttgtgttttgaaatcccaaattaatgagcatgataaactgttattgctggcactggctttaccccaagtggccaagtggcactgtctgactctctgagtccttgctgggtccccccaaccttcccctaacccccaccctttccctttccattgacttgggacagcccttgtcgatgtgccaatcacagtgggaagggggagaaggggggaggtcacagtgcatggggttcaaggtcacagtgggcggagcaagggggatcacagtgcaagtaagtcaggtcgttccctctgctcaagtccagctgtctgccacggcagtgcaacccgtggcggacgacccaggaggcggtgacggcagcaacggcggcatcttttcttgcctgcatttatctgcgctgtttgaagccttgagacccatcaggacccaaaggctgtctgatcacattattgggctgcctgctgtcttcgggttgggagatcctggttggcctgtcgaggatgggtttctcctgctcctcctcggggctggcgctgcccaggatccgcttccgggcctcggcgtactcggcctctcgctgtgctagggacttgactggaagggtgggcctgctggtggagttggggctgctgaccacaccgttgctggtgggcctcttgaggatgcggatctgtggagggggccccgcgggaaggctatcgtcctgaatcacaatgggcactttgggaggagatttggatttccccgctgtctgccgcctcttcccagctctcagcgacctcctcatcttccatcttactcgccgctttccctcctccccc

SEQ ID NO: 125791 - DNA, 820 bp, Homo Sapiens
ctggggagccggcaaagtgccagttctgaggcctcttgccacaggaaacaggtgacatcagcagtggagtggagaaaatggaattgtggcccctcgggccctcggagcagcgcttcctgcaatcgtctgagccgtctgacttcagcggggccaggtgggtaactgtgtcctttggtcttggttgtccggcgcaacttggagaaagactcaaatatggtggggactgccccctcctttagcctgtgatatccactgattcccaccagctcaaagcagtcctcctcaaagtgtttggagcagaagtagatgtactcggatgccgggtcccacaggccctggccgctggggtccagccgctggcagttggccagccacaagcctcgcctcgggttgtccttcttgggaagtctgtggagccacaaacccgtgagcaccaggctgtccacagccctgggctcatgctgcccaagcaccccagaggggaaacgcagacccaacacgcgccgccacgagacctccctgcgaccccgccgggtaagcaccaccgcccgggcacagacgaggcaacggaggcctcgagaagaaaagcagtttcctcagcgtcatctggcaggtaacagagtggggcgggtccaagccggctagacttcccgtcctccccttcccgactgcattcagtcccgccgggaccgttccgcttcacctcccacccacaggttcaagcctcctcagtatctgagaaaggcgcgaagcctctacgcagttgcgacccgaggccctcgtgccgaattcaccacccaggcctcgtacctagcatgac

SEQ ID NO: 125792 - DNA, 1202 bp, Homo Sapiens
ttttcgtctagaatccgctttattatggcacctggtgggtctggtgggatctgagggaggaagaggctgcagtcttgctgggcagcccctcggtcagtccagcagcccctcaggccatgctgctgctcagctgcatggcaaagtcctgcacatgctccttcagagtctggcgggcatctgcctgtgcccgcttctcccgtgcccgctcctgctgcagcttggtcagtctcaaccgcagccgctgctcccgccgcttgcaggcctgcagctggcgctgggccttgtcaagggcatcaagggctgcctcggctcgccgcttccagagtaaggcgctgcccacctggtagctgtgttcattctggatgtaggctccggcgggtgggggcaggcgcagcatatacgctgagggggagactggccgtggttcgagaggggagggctgccgctctggtgaaggctgggcgctgcagcctgcttcatctgcctgggcacccaaggggcccagtaggtctgaaaaggggctgctaaggccaggctccagcctcccagctggggaggccggcaaagtggcaggtgctgaggcctcttccacaggaaagcaggtgacatcagcaggtggaggtggagaaaatggagttgtgggccctcggccctcggagcagcgcttcctgcatcgtctgagccggctgacttcagcggggccaggtgggtaactgtgtcctttggtcttggttgtccggcgcaacttggagaaagactcaaatatggtggggactgccccctcctttagcctgtgatatccactgattcccaccagctcaaagcagtcctcctcaaagtgtttggagcagaagtagatgtactcggatgccgggtcccacaggccctggccgctggggtccagccgctggcagttggccagccacaagcctcgcctcgggttgtccttcttgggaagtctgcgaccccgccgggtaagcaccaccgcccgggcacagacgaggcaacggaggcctcgagaagaaaagcagtttcctcagcgtcatctggcaggtaacagagtggggcgggtccaagccggctagacttcccgtcctccccttcccgactgcattcagtcccgccgggaccgttccgcttcacctcccacccacaggttcctcgtgccgaattcaccacccagcctcgctacctagccgtaa

SEQ ID NO: 125793 - DNA, 961 bp, Homo Sapiens
caggtgtgtggaaagcctgcatagccgagctgggctgaccagccagaaagaattcgttgatttgtggacttgctggcaagactggggctctggaagatactctctggaaaggctcctgttttccccttgtgtcacaggcacagtgatcctggggctgggtttcactgtgcagagctgggaacaggaaacagcccccttggacgcaggctgctcaagggacttccatgacctgcagctgtcccagtccgccgggagccccacatcctaccccagcgtcggccggcagggaggcccacctgattcccaccagctcaaagcagtcctcctcaaagtgtttggagcagaagtagatgtactcggatgccgggtcccacaggccctggccgctggggtccagccgctggcagttggccagccacaagcctcgcctcgggttgtccttcttgggaagtctgtggagccacaaacccgtgagcaccaggctgtccacagccctgggctcatgctgcccaagcaccccagaggggaaacgcagacccaacacgcgccgccacgagacctccctgcgaccccgccgggtaagcaccaccgcccgggcacagacgaggcaacggaggcctcgagaagaaaagcagtttcctcagcgtcatctggcaggtaacagagtggggcgggtccaagccggctagacttcccgtcctccccttcccgactgcattcagtcccgccgggaccgttccgcttcacctcccacccacaggttcaagcctcctcagtatctgagaaaggcgcgaagcctctacgcagttgcgacccgaggcgagcaacaactagcgcatgcgcacgtgagcccgcggcgcacgcgcgctgacctgtggaaggagatgccgcggttgcgcgtctcgcgcgtgtcccgtgtgcagcagccggcggcggagcagtgacgcggcatgctctggcc

SEQ ID NO: 125794 - DNA, 343 bp, Homo Sapiens
  misc_feature (23)..(23): n is a, c, g, or t
  misc_feature (43)..(43): n is a, c, g, or t
  misc_feature (79)..(79): n is a, c, g, or t
  misc_feature (98)..(98): n is a, c, g, or t
  misc_feature (104)..(104): n is a, c, g, or t
ggtaactgtgtcctttggacttnggttgtccggcgcaacttgnagaaagactcaaatatggtgggactgccccctcctntagcctgtgatatccactnattccnaccagctcaaagcagtcctcctcaaagtgtttggagcagaagtagatgtactcggatgccgggtcccacaggccctggccgcttgggtccagccgctggcagttggccagccacaagcctcgcctcgggttgtccttcttgggaagtctgtggaaggagatgccgcggattccgtctcgcgcgtgtcccgtgtgcagcagccggcggcggagcagtgacgcggcatgctctggccattg

SEQ ID NO: 125795 - DNA, 1541 bp, Homo Sapiens
ttttttttcatagcaggaaccagtttattggttgaggtggtggggaacaggggggttggaggcacaccatgaggagcgagggctcagctctccccagggccctggaaatccatgccctccaccaagtcctgcaggtaggccttgtactggtcggaggtgagggagagtgggtggctgttggaaatgtgcaggtccacagtattctccagggaggaggcaccccctacccgggccatttctaccaaggccctgaggcacgtgggcacaaccttgaccatcacgagcctcttggtccacggctggtcctggggccatgactcccccacacagaaccagagggcatagcgtggtgagcgtccgcttccttccgtgaaggtaatcagatctacaatgaagggccccaggtcaaacacgcctccttccttgtccttggggacctcgccatcaggcccatgcccgctgttggggagcagctcctcgctcactgcccagtatgtgtggcagtgccccagccgctgggcccagagccactgcccggcccgccagagagccagtcccccacccaggcagctcagcacatgcctcacgtagctcatcactcccctgtctgtcagggacatgccagggtctggcagtgtgactggccatccaggcagcgtcctgtctcccacttcggaccccaccagccgcaggccctccgggcaggagatggtctgctggaagacttggcggccccggtagaaggctgtcacctcgaactcccactcttcccccggcaccaacagccgcttcagtgggttctcagagggccccaggtttgggaagggagtgggattgtccaagctggggctccgcaggggctgagggcagggctcaggggctacagccaggcttgggggtcccggatctgggagtggggccaacaccatgttacccagtaactcatccagaatgtcttcctgggtatcagaagtactgcctccaccattggtgtccggagaggtgtctggctgggaaaagtccccaactcctgagttcacaaactcgtagattttatgtgggtcgtgagggtccttgctccggtcctctgctaaacgcaacccttctttgcggttgagggcagagcggaaattcctcttccaggttggcaggtctggcttatccctcccgggaacatatgcaccagtggcctcggcccaggccagcgttggcacgagcccgcccctcgcgcgccacctccgccttctcagccgggcccactaggagtcctttccgcccagcgcgcagctccgggtttccagcgtcccaggtcgtcgcacgcacctacgatggaaggtcggggcgtgcgggcagctggaacccacccctgtcttggagctccgggtagctctcaaactcgaggctgcgcaccccctttcccgtcagctgagctctagagcgctggggctttctttttgatcgacttcttgaaataaaaccaactttatcattctttgggtaacagacccaaaagccgatgggacggcccgctgggctgttcc

SEQ ID NO: 125796 - DNA, 877 bp, Homo Sapiens
  misc_feature (94)..(94): n is a, c, g, or t
ggcagtaactactacggttctaaggtagcgaggcctgggtggcgaattcggcacgaggggcgggaacagcccagcgggccgtcccatcggcttntgggtctgttacccaaagaatgataaagttggttttatttcaagaagtcgatcgaaaagaaagccccagcgctctagagctcagctgacgggaaagggggtgcgcagcctcgagtttgagagctacccggagctccaagacaggggtgggttccagctgcccgcacgccccgaccttccatcgtaggccggaccatgggaaccccaaagccacggatcctgccctggctggtgtcgcagctggacctggggcaactggagggcgtggcctgggtgaacaagagccgcacgcgcttccgcatcccttggaagcacggcctacggcaggatgcacagcaggaggatttcggaatcttccaggcctgggccgaggccactggtgcatatgttcccgggagggataagccagacctgccaacctggaagaggaatttccgctctgccctcaaccgcaaagaagggttgcgtttagcagaggaccggagcaaggaccctcacgacccacataaaatctacgagtttgtgaactcaggagttggggacttttcccagccagacacctctccggacaccaatggtgggaggcagtacttctgatacccaggaagacattctggatgagttactgggtaacatggtgttgggccccactcccagatccgggacccccaagcctggctgtagcccctgagccctgccctcagcccctgcggagccccagcttggacaatcccactcccttcccaaactggggcctctgagaaccactgaagcggtgttgtgc

SEQ ID NO: 125797 - DNA, 1152 bp, Homo Sapiens
  misc_feature (241)..(241): n is a, c, g, or t
cagcccagcgggccgtcccatcggcttttgggtctgttacccaaagaatgataacagtggttttatttcaagaagtcgatcaaaaagaaagccccagcgctctagagctcagctgacgggaaagggggtgcgcagcctcgagtttgagagctacccggagctccaagacaggggtgggttccagctgcccgcacgccccgaccttccatcgtaggtaacgcggaagagcccgggagagcgntggtggcgtccgagagcgaggagcgggaaagaggatgggtctgcacggagagtggaaaggcaggctgtgtactctggggaaagtggagcaaggaaggagctacagtggccgacgctggaggtcggctgcagaaaaactagaaaaagtagggaggaaagaggaaaagaggaggcgtctacactgagggggttctagagagggaggggtggactccgtagatgggggtagttcagtctcgaaacctggggcgtgctctgtcctggaggagggaggcgggcagtcggaggggaattgaatggaagttctgtgttggaaatgtttgggagatcttctgtagggggactgtggaagggggtctacataggggtaagtgcaggaggtagaggcttacacgtgaatcgattctgcactgaaataactagggaaagaggatgctaccctgaaagtggggatacttactttcgatgatgtgggggagggaggaggtctatactggcggaattgagggagtggagggtctgcactgaagacgctggggaaggatgtgccatggatatgggaaggaaccctagctgattagagagcctctcgggaggatgggaggatgggaagaggaggtttcctgtttgtacccccgaaaatatgggtgaaggacctgtgccgtggcccgtgagaaggaggtctgggtgcggaaactccaggccaggtgggtccgggggaggccggtcgcgcccaggaaatgccctatacgcgcaggccggaccatgggaaccccaaagccacggatcctgccctggctggtgtcgcagctggacctggggcaactggagggcgtggcccgggtgaacaagagccgcacgcgcttccgcatcccttggaagcacggcctacggcaggatgcacagcaggag

SEQ ID NO: 125798 - DNA, 779 bp, Homo Sapiens
gccctccgggcaggagatggtctgctggaagacttggcgccccggtagaaggctgtcacctcgaactcccactcttcccccggcaccaacagccgcttcagtgggttctcagaggggccccaggtttgggaagggagtgggattgtccaagctggggctccgcaggggctgagggcagggctcaggggctacagccaggcttgggggtcccggatctgggagtggggccaacaccatgttacccagtaactcatccagaatgtcttcctgggtatcagaagtactgcctccaccattggtgtccggagaggtgtctggctgggaaaagtccccaactcctgagttcacaaactcgtagattttatgtgggtcgtgagggtccttgctccggtcctctgctaaacgcaacccttctttgcggttgagggcagagcggaaattcctcttccaggttggcaggtctggcttatccctcccgggaacatatgcaccagtggcctcggcccaggcctggaagattccgaaatcctcctgctgtgcatcctgccgtaggccgtgcttccaagggatgcggaagcgcgtgcggctcttgttcacccaggccacgccctccagttgccccaggtccagctgcgacaccagccagggcaggatccgtggctttggggttcccatggtccggcccctgtcttggagctccgggtagctctcaaactccgaggctggcgcaccccctttcccgtcagctgagctctagagcgctggggctttctttttat

SEQ ID NO: 125799 - DNA, 898 bp, Homo Sapiens
  misc_feature (61)..(123): n is a, c, g, or t
  misc_feature (833)..(833): n is a, c, g, or t
  misc_feature (836)..(836): n is a, c, g, or t
  misc_feature (862)..(862): n is a, c, g, or t
  misc_feature (864)..(864): n is a, c, g, or t
  misc_feature (873)..(873): n is a, c, g, or t
gtgccaagctaaaattaaccctcaactaaagggaataagcttgcggccgcatacgcggtcnnnnnnnnnnnnnnnnnnnnnnnnnnnnnnnnnnnnnnnnnnnnnnnnnnnnnnnnnnnnnnncaaagcaggaaccagtttattggttgaggtggtggggaacaggggggttggaggcacaccatgaggagcgagggctcagctctccccagggccctggaaatccatgccctccaccaagtcctgcaggtaggccttgtactggtcggaggtgagggagagtgggtggctgttggaaatgtgcaggtccacagtattctccagggaggaggcaccccctacccgggccatttctaccaaggccctgaggcacgtgggcacaaccttgaccatcacgagcctcttggtccacggctggtcctggggccatgactcccccacacagaaccagagggcatagcgtggtgagcgtccgcttccttccgtgaaggtaatcagatctggggggcccaggagcctacaatgaagggccccaggtcaaacacgcctccttccttgtccttggggacctcgccatcaggcccatgcccgctgtttggggagcagctcctcgctcactgcccagtatgtgtggcagtgccccagccgctgggcccagagccactgcccggcccgccagagagccagtcccccacccaggcagctcagcacatgcctcacgtagctcatcactcccctgtctgtcagggacatgccagggtctggcattgtgactgggcatccaggcagcgtcctgtctcccacttcggaccccacaacgcagcctccggcanganatgtctgctggaactggcgcccgtanangtgtactcnatccatcttccccgacaaagcgttg

SEQ ID NO: 125800 - DNA, 994 bp, Homo Sapiens
  misc_feature (944)..(944): n is a, c, g, or t
gggagagggagccgtggtttccggaacttcgcccgcgtctctgggcttttgctctgtcaggctggtggcgttttggtgtcttcgtttgttatggccgctgctgtcgctatggagacagatgatgctggaaatcgacttcggtttcagttggagttggaatttgtgcaatgtttagccaacccaaattaccttaattttcttgcccaaagaggttacttcaaagacaaagcttttgttaattatcttaaatacttgctttactggaaagacccagaatatgccaagtatctaaagtaccctcagtgtttacacatgttagagctgctccaatatgaacacttccgaaaggagctggtgaatgctcagtgtgcgaaatttattgatgaacagcagattctacattggcagcactattcccggaagcggatgcgccttcagcaagccttggcagagcagcaacagcaaaataacacatcgggaaaatgaaaaactggatacaaacgaggcacttaatacatgtatataatgtatttcttttgtacagtgaagacaaaaaaaatgaaaactcttcctatctacctttattatggtagcccctagaacctttagtgtgctttttcatccaactttttattgttaatagactatttctgttaaacctgaattgttctttgatttccctgtggatttgtaaggtgtttttcttttttacgcatttagcataatcagctgattaagaatggaaaagttaggtgctttagaccaaataaggcactggggcatggggtaggggtgggccaccaagtatactgaattctaaggctagctgttcctgacatatagtagggcaagaccatctcctggaaccttactgtctcagatcaactactctaccactctactctaagatgtagtgagagtagcggagtcactgacctctttanatcataggacaggaactgcataaaggttcttgaattctgcaggacaggaa

SEQ ID NO: 125801 - DNA, 533 bp, Homo Sapiens
ttttcaaagaacaattcaggtttaacagaaatagtctattaacaataaaaagttggattaaaaagcacactaaaggttctaggggctaccataataaaggtagataggaagagttttcattttttttgtcttcactgtacaaaagaaatacattatatacatgtattaagtgcctcgtttgtatccagtttttcattttcccgatgtgttattttgctgttgctgctctgccaaggcttgctgaaggcgcatccgcttccgggaatagtgctgccaatgtagaatctgctgttcatcaataaatttcgcacactgagcattcaccagctcctttcggaagtgttcatattggagcagctctaacatgtgtaaacactgagggtacctgggtttaagtttgtaagtgaatgaacaacataatttaggtaaataatgccaaggtataattcagttattctcttaaaaacgatcttgtagcctaccatttctataacagtaacttagtacactctggtagcatagggttttttccc

SEQ ID NO: 125802 - DNA, 755 bp, Homo Sapiens
gggtttccggaacttcgcccgcgtctctgggcttttgctctgtcaggctggtggcgttttggtgtcttcgtttgttatggccgctgctgtcgctatggagacagatgatgctggaaatcgacttcggtttcagttggagttggaatttgtgcaatgtttagccaacccaaattaccttaattgtaccctcagtgtttacacatgttagagctgctccaatatgaacacttccgaaaggagctggtgaatgctcagtgtgcgaaatttattgatgaacagcagattctacattggcagcactattcccggacgcggatgccgccttcagcaagccttggcagagcagcaacagcaaaataacacatcgggaaaatgaaaaactggatacaaacgaggcacttagtacatgtatataatgtatgttcttttgtacagtgaagacaaaaaaaatgaaaactcttcctatctacctttattatggtagccccctacaacctttagtgtgctttttcatccaacttttttattgttaataagactatttctggcgaacctttgcctaactaattcgccaacaccataattccctatgtgcgggccgccttcgggccttcgaaaaaaacttttccaaaccccatttcgttttgggcgccgcggggcccccactaaggtaaagggcaacctgggcccataacctgttttcccagagaagaatcctggcccagggacctaggggctgggaattccccacccat

SEQ ID NO: 125803 - DNA, 1593 bp, Homo Sapiens
  misc_feature (438)..(529): n is a, c, g, or t
  misc_feature (979)..(1012): n is a, c, g, or t
  misc_feature (1555)..(1555): n is a, c, g, or t
tcgtgtctcagtggtgcgggccaccgttcttcacggggcgtggctgtgctgtcacgcccctcgtctgtgccaccgcgtcgcacgcgcccctggctcctggttgcgactgtgcgccccccgcgcgtctcttgtgcagcgcgtgtccgctgtgtcgtgtgtcgctgcgccctgtgcgctcccctcctgcgtgctcccctgcgtttcgtaccttggccgtgtgcctcgtcttcgcccgtcctcgtccccctgtgccctgcccacgcgccctggtccgctcctccgtccactcccgacctgctcctgcgggcttcctggcctgtgccgctgctgtggctgcgacctcccctcgctgtcggtgcccgcccaccgactgccccgggtcgcgcggttgctgccctctgcgccctgtgtggatgagccggcgtgcggctgctgttnnnnnnnnnnnnnnnnnnnnnnnnnnnnnnnnnnnnnnnnnnnnnnnnnnnnnnnnnnnnnnnnnnnnnnnnnnnnnnnnnnnnnnnnnnnnccgcgggggtggaatagatggtgttgcgacggtgtgctggggctcccggggttgttctccaggcttcttccaagctgtcgcagtctatatgctggggttgaggtgagccgccgctttatgcccgtgtgggagtgttaatttgttcccttttgggctgctgtgaaatgtgttggtgtggggatgtgttgggcgcacgaatatggtgcgccccccctccgggagttaggggggtctcttctccctggggggtgcctcatggttgccgtgtgtgtgcgccgttcgcggggcgtgttgtgaagtggcggggcgcagggcctgtggctggtgtgtgtgtgtggtctgtttgtagggggcgccgcgtgtgtggccgagtattggtgtgggggtccgcgcggtagacgttgggggcgctctcccgggggggttatattctgtggcgggcccccctgnnnnnnnnnnnnnnnnnnnnnnnnnnnnnnnnnnttgtttaaagagcccagaacagatttatttttctttagataaagttcatacagaatatgttacagtcaggagttctcagctttcaccaaaaggtcagaagttattgcagttgtgcccagtggataggatggaggaagggaaacttctagaaagctgcctgtgttcagagaaggaatcgtcaatgtttaaagttgtggggctgccctgcaaaggatgttccagggcaggtaggagtcaggagtaggagacaaggcgcgtagggggcgatagggtggcctgggcttgggcaggctggaggctgcctccctaccggaagcagcatccgggccatctggccaggacctgccaaggggacagcagagccagggccacagggtgccctggggccagccctgccagccggtgtctcagccccgccgtagtgcctgcagctggtgggccactttctccagctctgcttcaatggccgacaggctctccagctcctggtcctctggtctgcggtttgcgctgccctcctcctctttcttctcctcggggtancctcggacctggaggggcaggcccgcctcaaggctgtc

SEQ ID NO: 125804 - DNA, 1717 bp, Homo Sapiens
atcgtgaagagattcctgtcatttaattagatttgccacaaaaagcaataaccttagctaaccacgctgctctcctcctccacctaacccccatctcccttcatatgcacaaacacaggaacccaaagcccctcctccccacaatcctccccactcacattatgggaagaaatgtcactaaatggacttggcctcctccatatagcacggaacaggtgaataaaaatatctttatgaagaattttgttgtgctattatcttagggttgaatcagggccaagatggaggcagaggcaagtgaggtctggggatctcttagagatcagaatttgtctgagaggcacagagcctatagttcacccagaaagggggatatatctaagaggacaggggctagaactggctaggctgaaagttttttcaagtgtatgtgtgagggtaagggtagctataaatccattctctttcctcccccataccttccctagctcccagatagaagggcaggggaccctgaacagggaacagagtcacaattccctcaagtttcatctgattcccacagagcttccagcaggcagtgagttgggcatatcccctggtgctgcatgaccccttcccccagctcagggcttcttctctccacctgtgagcaccagggcctgcaggatgtcagacagtgatacaattcccttgaccacatcattttcatccaccactacaagtcggtgaacctctgcttccactagcctgttgatgatggtctccagagtctcatgcaggtagcacttgagaacaccctcaaagtaatgtgatcgatgttgcaaggctttagtcacagatacatctaggttgttgtaggtcttttctgctgccagattgataacatcaaacttggagtagatgtccaccacacgccccttctcatccaccactggcagggctgagactcgatgctgtacaaaaatccccagagccacatagacgggggtggtagtgcgaaccatagcaatattggcataggtgccaatctgtagctcttccagagacttggacatgaactctggcttggggaactcagtgataaacaatttgaggaacttcagaatgcgcttgtgggtgaggatgtacaaagtattgcctgattctgggtcaataactggcagcctgtggatcttgttccgaattaatgaagagacagcatcaaacaagctggcattaggagaaatgcagacaagcggtttaaaggagtcctggagatacacctctctccaagtttctatcttgtgttcttctagctcatagatctgtaccaaggctgatttatagtagcggtgcaggatattgatgaaatcagtgatggtcagcatgcccacaaaactttgcttcttactatcccataaaggggcagctcgtacaccgttagtcaccaaagcaaaaaaagctttcttcacctgcagggacgtatcaaatacaaccaatttggagcttgtgggaatcaggtcatagcagcgatgagacttcatgaaggaagtatacacgctattgttggattctggggtctcttgaggatgctcattttccacagctggggagctatctgaagaaatgaccgtctccattgcaagaggcgcccggctatcccgaaaattctcaaccccttacaacgccatcgcgcggcctctgcgcggcggcgatgtagaattacaacgcacat

SEQ ID NO: 125805 - DNA, 1296 bp, Homo Sapiens
  misc_feature (488)..(496): n is a, c, g, or t
  misc_feature (664)..(674): n is a, c, g, or t
  misc_feature (876)..(931): n is a, c, g, or t
gacactcttagccgggctaatatcatagctcgccgagtgcgctcgatcattcgatgaacagtataatcatcagtgttcatcatcttcgacttcatatatatcctgcgggtgttatcattacgtgcgaaagaaaatgcatatatgtcgtgctggactaccggacacaacagtacacatgtctgtaggcgagtctttatccacaagtctgtacccttttgcgagacgtgctccgctcctccacacatatgtcgaacacacatcttctcggtactccccacgatgtagtgcatgccacgcgtgggggcagaataaaattattttctcatcaatagttgttatcgtaagagactcgtattctgataccttcctatctttgcgaattattaagagggcgaccaaacactatctccgctttggtgaacacaggttcattcccagaatgtaggagagaagagcgttcatatctagatatttttccaccaccgtgnnnnnnnnnggaggtgtcaccagagtgccgcaggctgtcaaaattcaaaatactaagaagactcccacatgggcccaccccacgttgggaagcagcacaaagaaaaaggccctcctcaaaacatcccatcttggggaacgttttcaacacaccccagtcgggtccccccgcggggcnnnnnnnnnnncattgtgggaatctccagcacctcatttttatgtgcccagattttcatttgggaacgaggtaaatgcccccatttcctttactattggggggccccgcccccaacgaaatggtttagaaaatttttaacaaggccgaggggggcaaaaaagaaaatattgggtattattttggggtttggtgttctcttttaaatttattannnnnnnnnnnnnnnnnnnnnnnnnnnnnnnnnnnnnnnnnnnnnnnnnnnnnnnngtaaaaagaatccatttattgggttttaaactagttacacaactgaaatcagtttggcactactttatacagggattacgcctgtgtatgccgacacttaaatactgtaccaggaccactgctgtgcttaggtctgtattcagtcattcagcatgtagatactaaaaatatactgtagtgttcctttaaggaagactgtacagggtgtgttgcaagatgacattcaccaatttgtgaattatttcaacccagaagatacctttcactctataaacttgtcataggcaaacatgtggtgttagcattgagagatgcacacaaaaatgttacataaaagttcagacattctaatgataagtgaactg

SEQ ID NO: 125806 - DNA, 718 bp, Homo Sapiens
  misc_feature (481)..(481): n is a, c, g, or t
  misc_feature (669)..(669): n is a, c, g, or t
gtttgaaagatttttttgtttatttggtatggggtcttctgtagctcacacaaaattattgggaaaataaataacccaggggagccccctttgcccacggttcctaggtcgcggagtcacagcagccccaaaggggcaggaacctgggaatccgaggggtcccggccctggcggtcacttgcccagcaggaggccggcgcgcagcacgcggggcacgcggcggatggtcagcgagacccgggtgccgcgcaccaggcaggctcccggccgcgccgacgggcaggctgccgcattgggcggcgaggaggcggcgtccagcgcgtctacgcgggcggcggcgatgccgtggagaagacgcgtgtaggcggggccgcggagcaccagcaggctgcgcggttccagcagtagcgaggtggtgggccggggcggaggccgaggctgttctgtagggtcatcgtcctctggccgccgcggctcgtanaagtccagcacggtgtgggggcccaggctgatggtgcatgatgccctccccaggctgatggtgcatgatgccctccccaggcagatactggttcacgaggacatggttagctgggaggcctccaaagaggctgaggtttgacactttgtccacgtagcgctggaggcatgggggcagccgctcagganacatccctcggggatgaggaagccacctggggaaggcaatggggtcctg

SEQ ID NO: 125807 - DNA, 923 bp, Homo Sapiens
  misc_feature (756)..(793): n is a, c, g, or t
ttttaagatttttttgtttatttggtatggggtcttctgtagctcacacaaaattattgggaaaataaataacccaggggagccccctttgcccacggttcctaggtcgcggagtcacagcagccccaaaggggcaggaacctgggaatccgaggggtcccggccctggcggtcacttgcccagcaggaggccggcgcgcagcacgcggggcacgcggcggatggtcagcgagacccgggtgccgcgcaccaggcaggctcccggccgcgccgacgggcaggctgccgcattgggcggcgaggaggcggcgtccagcgcgtctacgcgggcggcggcgatgccgtggagaagacgcgtgtaggcggggccgcggagcaccagcaggctgcgcggttccagcagtagcgaggtggtgggccggggcggaggccgaggctgttctgtagggtcatcgtcctctggccgccgcggctcgtagaagtccagcacggtgtgggagcccaggctgatggtgctgacagtcgggtagtacagtggtccgtcctcgtggggcatgatgccctccccaggcagatactggttcacgaggacatggttagctgggaggcctccaaagaggctgaggtttgacactttgtccacgtagcgctggagccatgggggcagccgctcaggaaccatccctcggggatgaggaagcccaccccagttctgtaactttctcccagagagctgggtccactttggctttgggnnnnnnnnnnnnnnnnnnnnnnnnnnnnnnnnnnnnnntttggagatgaagtcagggacatagtagattacaggtggtgcctgctccactctgaacggttccagggctgggactctggcgtcctgctcctccatcaacaccaactccttgcacccaatccgtccacca

SEQ ID NO: 125808 - DNA, 539 bp, Homo Sapiens
aacaccttgacccgtgttataattaataacttaagcaagccagcaggcagacacacaacacacccaagggcaccctatgctcaaaaacccactggggaagggaggaattccacgggtgtgcagagacctgggacgtcttatggcccagctgggggacaagaaggggtcctgacatctccttctctggtggtcctgaggagccgaaggtcgagaggggaacttcctgttgtctgtatagtgccaggcccatgcctgtgtcccctctcccactcctctgtgatgaaaatcccaaggccagggttccccttcctttcctctgtccaattccctgagaaagtggctgacagagcccccccagaagtagctggagggacctcaggcccccgaatgcctggagacagaggggtcccccagtcctcagcctcactggcaggcccggaaagtgctgaattcgggggtctcaggcgaggaggacgtggaagtgggcctcttccgggtcctggagttgctgggggtggcagtggtgcctgagtgatcat

SEQ ID NO: 125809 - DNA, 948 bp, Homo Sapiens
  misc_feature (450)..(470): n is a, c, g, or t
caaagttttcttgtcaattcttgtttgtgttttcatctatataacattttatagtaacgtgtacttgcaatatttaatggtatcagtataggaacaaaattgaatttataaataactataaggacaattgatgttgataatattgagtttttctgcctaagaatatgatacaaattgtctatttgcttatgtctacattcatatatttcaaaaactttctatgttttttccaaattccgtaaatatttttgtaatatttattcctagtttattctgctaaaaagtaatttgacacacaatgaaattgcaaagtgtttatttgagtaagagcaattgataaattataaaatatcagacggaaagatattgagtgcttcattgacagtgtaagaagcaagtatttatttgaaaaatgtagaaacaaagaaatcatttggtggtagcacaacnnnnnnnnnnnnnnnnnnnnngtctgtttaccttgttggacagtttctatttatataaggttgttggctacttctgactggttgagcttcatttctcttttttcaatatgcagctacaagaaataatttaagttttgtttgtatttgcaaatcaagcgaggttgagatcacttatgagacctaactaattttgtctgctcagagattattgagacatgatctccattttaatttcctttaacaaattttctgtacttttactttccatccaaacagtaacttataaattattattgttgtacatatgtaggcccatgttgtgtatgctttgaagacctgtcctgcattcaaactcatttgtattatgttattattgaatttgccccatttattggaattataaactgcaatcccccaactacaagaggtatgagctctgatgagatacgagtaaagatgaatcagaagtgaaaacagtcctccaacccacacatgcagt

SEQ ID NO: 125810 - DNA, 678 bp, Homo Sapiens
ttaagaaaaaatatcacttagtcaaaatttatttcaaggcctgaaaacattcagactaatcaaaatggtactactgtaacttcttataatacataatataaaagtttttgaaagatatagacacaattaacccctaaacaacacactatctgattctcaaaagcaatggctatttaacaagatgtaaaaggacaataacatatcaaagaactttcacacacctaaagatagcatttagcagcaagttagtcagacaaaacaaacacaaatattttcacatttcctatgtttgtttttaactttacttcataaagccactgataattgaggtttctttcaagtataagatttctaaaattaaaaactgtttttgacatatttttataaagaaataaaaagcaaaacgcaatccaactatttatatgagtccctcttctccaacagctttagatgtttttctgagtactttttacacagaatatttttattaaaatcagttctaattcatttatgcagattaggggaaaatgattcataataaattaactttaaaattaccttctatctgcttctacctctatccccccatcaccaccaaatctgttgctacagtgaactgtagcaatgtactgtttgagggggcccaaagcatctgtaatcttaatttcccacatatta

SEQ ID NO: 125811 - DNA, 610 bp, Homo Sapiens
  misc_feature (558)..(558): n is a, c, g, or t
ttcacgggagtagaaggaggcggcgtccggccgcggccgacggtagttcgcttccccgagagtgcgcggaggcccgggtgcgaggagggcctgtttctcttcagccctggttcattcacctcgcggaccgagggccccgccgtcaggagccggcgaccgtgccctgttgcgagctgtgatggtcattgtcctccagagcagtgatggaggaaataccagcccaggaagcatcatggtcaccaagggtccagtttcagtctttggagacccagtctgagtgtctgtccccagagcctcagtttgtgcaggacaccgacatggaacagggactcactggggattagaagcccaggacccaggaaggagacacaggaaatttattcaaagtccccacgctgcagttccaagagcctctgagttcctgccttttttcatctctgaatccccaccattggcctacattgggagtggggcgacctgtaagtgcacagtgaatttttgctgagggagtggctgggagggctgcgtggagtggacagcaccaagctgcacttttcnaggggagtggggtttggaaaatctggggagcagaacaggcacccccgccccc

SEQ ID NO: 125812 - DNA, 650 bp, Homo Sapiens
ctttcaggtgagactctagagcatcccccgggccagtacggatgtgaaagataaggattcagaggttctaagtcctggaatctaagccacactctacagaccttctcagagaccttatacttaggaagaaacaagagagtaaagaaattcaaatagataaaccgaataataaggaagtccttacccagtgagaccacgttcccataattctctaacatcacttctctgtagaggtccctctgaacagggtccaggtatccccattcctctcgagtaaggtgcacagccacatcctcgaatgtcacaaactcctggtacctggctgtcaagagcgcagctgcctggtctcctgggcttccctcacggggaagagcaggcacctgaggaacaggtggagccccagtgagtccctgttccatgtcggtgtcctgcacaaactgaggctctggggacagacactcagactgggtctccaaagactgaaactggacccttggtgaccctgctgcttcctgggctggtatttcctccatcactgctctggaggacaatgaccatcacgaggggaggggcgggcctggccgctgtcctgtcacctacacactcgcgctcggggccaccacagcctctcacagggccgctgtagacag

SEQ ID NO: 125813 - DNA, 1144 bp, Homo Sapiens
ctgcactccgtcgccggaagtgccaccgagaagcgccggcctcggggctgtctacagcggcccgggagaggctgtggtggccccgagcgcgagtgtgtaggtgacaggacagcggccaggcccgcccctcccctcgtgatggtcattgtcctccagaacagtgatggaggaaataccagcccaggaagcagcagggtcaccaagggtccagtttcagtctttggagacccagtctgagtgtctgtccccagagccttcagtttgtgcaggacaccgacatggaacagggactcactgggggcatacttctccgccttcccaccacccggattcatagtgtgaattcctgcccggccctgagtcatacccaggcaagtgctttctctggagaaacacttgccgtccttacagcaggaatctccaagagatggcccaagtatcggcttcccatcgatattgctcgtccctgctcggaaactccttttccacgattgtgagatattaaaattgactgatggaatagaagctccccaggatgccaccactgtgtaaaatcgcagctcctcaaattacctctgtttaatttcaaatgttagggtccaaggaagccctctgttgcaaccagatatgttttgaacccagttcattcagaaaccatggttggtggtcatcatctacttgtattgtgaaaaaccagaaattccaaattcagctcttcagttatggtcttttcatattattttagaatgtgaaacttatgctgtgtgcccctccttttatgtggcgaacacaacctgccccgtatggtgcctaactctcctgtgaaccctgggcttccctcatgtttaacattctggtttcctccttccttgaagtccctgtggccctcttcaaggtcctaccttcctaccctttattctttgtggttctgtacagattgatgcaattatattgcctttcctgattaagtgttccttactctgtccttgatggaggggagaagggagggcaaagaagttaaatttatttcagggcatcaaattgaatatctacttaataactttgtaaactgtaaagtgacatacatataattgtaaagtactgttaattttatctaataattacagagtttccaacagttaaa

SEQ ID NO: 125814 - DNA, 1378 bp, Homo Sapiens
gcacgaggcggcacgaggaaatttctgacattcagtctcagcttgagaaattgattgaaaagaatactttcttcataagtcagcccaggaagcatataagtcatacatacgagcctatgattcccattctctgaaacagatctttaatgttaataacctaaatttgcctcaggttgctctgtcaatttggtttcaaggtgcctcccttcgttgatctgaacgtcaacagtaatgaaggcaagcagaaaaagcgaggaggtggtggtggatttggctaccagaaaaccaagaaagttgagaaatccaaaatctttaaacacattagcaagaaatcatctgacagcaggcagttctctcactgaacacatgccttcctttcatcttgaataactttgtcctaaaatgaatttttttccccttgatttaacaggatttttgtagactttagaatttggacttacctaacaagagtataaattgacttgggttgcaagcactgagcactgttacttctatcacgtctctcttttatttctgggatataaaacaggctttaagtttcttggttgcccaagggcagagcaaggaatatctggtgtttcttgtgatgataatattttaattttaaatatccctccctcatacaagtgtatgttaccattttaatataattctttttgtatctttccttcttgttttgtgaagatttttgtggcatggattgctgtgctcactgctgtaaaaggtgacctagtgtactgggcagctggtggtggtgcagaaaagagtctcaggttattttttgtttttagttatttcttggaccttgacagtatctaatgactcctcctgaaaatgctgcagtataaaagagcaaagagctttgggaaatacctaagaagcaccttaagattagggtggcattgcttttatagattcttgattttaaagcaacaggcctttctcaggtgttgcattttttggagcaaaaactatgggttgtaatttgaataaagtgtcactaagcagttataacgtttgatggctggggggtaggaagaggatgggattgagatgtttgagcctcatttacatcaatagaggtgtaatgtactgcatttcttcatttggtaacataacaaagactttcatacaaagaacgatgatgctcctcattaagatttgtttaattcaaggtggtttggatttggtaagcctttgcactctgtagagtacttagaagacaagggcaacttactttggagttagagccaagctgtcagacggtgcccagcacacattaatgttagcttctttctgagaaaaaaatacctcttccaggccgtgaaacaaaaaatacatttgctgtgaagattga

SEQ ID NO: 125815 - DNA, 1494 bp, Homo Sapiens
ggtcttttggtttttaaaggcaaaaaagtaactttattgactgctaatcttaccatgaaatatctataagaaataattacaaaataatgcaggtttctttttacatacttttggtatcatcttgatatgatgatcctttcacagaaaggattatttacagtttatgtagatataaagctcactgttgcatatacaaatgtagatgtgcagaggcaatatataccaaaacgggtatactgacaagcgatagatatgtaagaaatgcagaataaataacagctttatatatttcctttcctttttatttttaaaaacaatttccaaatacaaaacatggattattcaaagtggatttttcctatacatatatataattctgctgcaaacagtggatcaaaaagcagaagtgttcttagcatgattcatctttgaaaacccatagaactattcataaatccaattagaaagaacatgtgcaaaaccaccaacaatgtcagcaaaacctcaaagatctgattttggttgaagtagagagaaaataaacataaagcagtacctgtttacagtaattaaaaatggtctctttcgtgatctgtgctgtcgtaaatatgtctttttttaaatgtttgcaagaaactctaagggctaaggaaatgcactgcattatgatctgggctccttagagtacaaacctcaccaggcttaagcatcatccataagaaatggtggattacttaatgacttataagtaaaacagtcattaaatgatcctttcatactttaatcctcttatgcagagactgagatacttccatacattccaatatctgcaactttggttctattaaagtatttgataaaagcaaaaccaattttgtgaccacagaactctatggaactttttttctttttaaagtgtcaggtgaacctagcgtgataaggcaatgttgcctacacatccgcgacccagcacaggagggacagcacagacagggcatgttccagctcaccatttgttgtataatactgactcccagccaggggtaacactgcttatgttccactgtaccctacatctatttcgttacctgaaaacataattttgtataaaaatatgattgtttctttagaaaataatatatagtttttttaataaaactgggcagatagaaaaaaatggtatatcaaaatatggtaaacaaatgttgtaaaatactaaatcattaaaaatatcttatagaaagacattgtgctatgaagttctctcctgaagtgtgaactacgtttttactttacatcaaaagattgataaatttactcccctgacttggtttcattatatattgtaacagcagcacaacaggtaactgtcttaaaaatggccctttctcatacactacgtcttctgtacacttttacttcaaaattaacaagacacccccaggatcagtggttttcaactttgttgcatattagctccatctggagaacgtt

SEQ ID NO: 125816 - DNA, 973 bp, Homo Sapiens
ggaagctttttaaaatataatttaaaactattttgtaccagtacaatatattaattttacaaatgtaaaatttttatcagctgttaaagcatttgcaaaaaccacacattctacttcagctttattgcacaatatctataagaaaatattaatttttaaattagaaaacataaaaatgctttcaatatagaagagacaatctgattttaaagacaatactctataagaatgtctactcagaaaataacaaactttcacaggataccagctggacagatgcttcagcagatccggtacaaagcactgtttaaaaccagtccaagatacttaatccaaactgtatcatgattcttcattagaaatctagacaccactcatggtggtttcttacactttaaaaagttgaggcattttcagtgtgagcattctgaatatctcttacatatcaaaaaccaatacttccaactcaatagccatttgcagggttctttttccttcatgcagattatcactggcaactgtttttaatgactattcatgaccattttatttatgctgatagaaaacatcaagttaaatacgcttttaaaactttgtcctttacaaaaatcagtgtataaatttgcatcataaaaattagtgttgagaccatcaagatggccttcatttatatggttgtatattagttggttttcccagagttgggaatggcagatgtctcacttttcgtatgtagtgtaatcaggaaataaatccaagcactaaactggaatcccaagacagattaataaggttgcatgatggattttagggggttatgaccctggacgcatatactaatgtgggtgttaaaatactgacagcaaaccctggtgggaatttaatttacctcagacaataaacattatctggagagacataaaggaaaatgttcatttgcatattaatcagcgtggctgtgtgtatcatagaa

SEQ ID NO: 125817 - DNA, 2368 bp, Homo Sapiens
  misc_feature (142)..(142): n is a, c, g, or t
  misc_feature (158)..(158): n is a, c, g, or t
  misc_feature (225)..(225): n is a, c, g, or t
  misc_feature (252)..(252): n is a, c, g, or t
  misc_feature (320)..(320): n is a, c, g, or t
  misc_feature (349)..(349): n is a, c, g, or t
  misc_feature (654)..(662): n is a, c, g, or t
  misc_feature (824)..(832): n is a, c, g, or t
  misc_feature (2288)..(2322): n is a, c, g, or t
agcggcccggcgcgggcgcccccagaacggggaaatattgtgttttctgagataaaatcctcttgtgtctcgggggcgcgtcgcgcgagggcggcggtgctccagacacaaacgattatcgaagagagggtcggatgctggngtggctcgtgcgtcgntgcgggcgcggactaaataaatctctccggcggggttaggggaaattggtctaaacacaaatgtttntatgtttgttcttccgcgttgtagcgngggagtgcccagcgaaaaaagtctttctcccccaatgtaaaaatggtgttgttattttccccctttgngtatatctccgggaagggagttccctttngttctttaaaaaaccgtggattgcccattccagggagaaattaagtttggtatttaaacgccaatatttatcccttaaagccacccaggagtggtttgcccaacccaggaaattttaaaaaaggtgggtctaaaaaaaatggaccttcccggggggaacctggaaagaaaggaggaaaaggtggaagggggaaagaaaaatgggtttgcttttcccacttcttaaaattctttcagcaccaattcttatttctttaaaatccagaccaaggggctggtggtagaattttttgtccaatttagttnnnnnnnnntttattttctttctacatagggaatagggcctgttgaggaacccctatttaattggtaatgaggtttcaattcaggttagtcaactcaagttattataaaatgcagcgtggatttaccagaaaataatttcctaccgtacacgtgccagtatatttaaactnnnnnnnnngcatacaatgtacaaacaaatttatttacaaaaattacaattacaaactgtacaaattgagacaatttcccatgcctccaacagaagccaagagcctttactgtcaaatggcagtttttgttacttttaaatgacacacaaaaagaaatatgatgcctattcagtcatccactgccagtttaaaaatgcttttctaaataattccaagaagcctattagtgatatgtatatggataatttccctcaactctatttctagaatggctatgtacaaatccagcaaaactggaacagaacagggtaagaaagcacatagcaactgctttttcaacagtaaattttgactattcccctaaatatctacctagtggcttaaaactaaaactatggtctttggctttaaaaagaaagtcaaaaaattttgacttttaatgactgcacaattctaccaaagccagtgtttacctgggtattttttgtcacctgtagtttacatttccctgctactgttaaagaaacagaattctacagtattcaattctgtatattgtcttttaaggtttttcaatcagactcactactactgcttgaggagtccgttgacataatctctacatcatcttcattttctttattatgcccaggaggttccaacaaaaagtcactactatgatttggtggtaacatattcatcgacatgtcatttgactgccatggatactgtggagcaaggacatctggcaatcttcctgctgcaagtgcatctcctggtaaatggccattcacgccattagtggaaggattgttcatctgacccagtaacccacttctcatctctaaatcagttgggtagggtctccgggggtcccctggaacccaggtcagtggagcacatacagcattacttgcactgatcctatgtgcatacttaattatttcttcagaggagatagcaccttttcttgctttttctattgacttgagtttctccttcgcttggtaaacagctgttgccagtatttgttctgcttcctttagctgtttttgtagctgctgaatatcactgtctctcttctctacttctttttctaaaacttgcatttcatgatgaatttttccctgattaagtgccaatttcattagttcttgaaattccccatctcggtgaattaacaactccaggacctggttttcctctccagcctgtaacaacttttggtttcttgaaattgccagcatttctataagttccctagacaggacctccaagtcctcaagcgcagacagcagccgctctcgtgtgctgttaccacccgccactcccaaaccgcctcccagccgctccttctccttctcaccactcgaagacgcagccattttccccagagtcccgccaccggcgccccccggccgtaatggccgaattcccgggcatatgtccggtaccgtcgactgnnnnnnnnnnnnnnnnnnnnnnnnnnnnnnnnnnncggccgcttcctcgctcactactccgctgcgctcgggtcgttcggc

SEQ ID NO: 125818 - DNA, 1233 bp, Homo Sapiens
  misc_feature (139)..(147): n is a, c, g, or t
  misc_feature (420)..(420): n is a, c, g, or t
  misc_feature (1204)..(1204): n is a, c, g, or t
aatctttttttaatttggcccccagaattgaaaaggggaggagttgaaaaaaaccctttaagggggggaaattcccatatttttttgttaaaaaatggggttaaagaaaattgtttattcaaaaaatggctttctgggnnnnnnnnntggctttaggttaaactgggccaagggccaccatggggaaaaaggaaagtttcttacctgaataaataaagggaaattcccattcccattttaattttggggcacaatttattctcaagaatcaagaaccctagggtgtagccccggggccaggggagtcagggtgatgcagagaggagggtggtacctcttgtgtggaggccaaggactgcagacagttcagccacatcaggtgggttgttcatgtgaattagatggaccttgagttctctntaatgctcatgttgtattacattgaaaccctagcttcaacactttaaaaagttcttattagcaagtaaattacagattgaacttctgaattgtttgcagccattttttattccaaacatgtatgtttttgtaaacctgacatttcccaaacagtgcaagtgaatcagaagtgactgcttagactttaatacacgtgacattgtgaggcagcacaacctccccccacccaccaaaattcctcagtggaaatgtacatggatgcatcagtaaagttctggaaatgcagatagcgtgggtgcctgccaagcaattaatcactcgtaaagcttttaaactcactctgccagtcacaccgtgcccattagaattaaaacaacaacatcaacaaagaaaaaaccttaacacagtctgaaatctagatcattgtgctataaagcattgcacgatgttgggaaatttgttcacttattccccccatgtgctgaaaattcagaagacatcctagaagtttcattttggccctactggctctgtattctcccttcagccactctttgaatattctccactgtgtatattattattctatatatcaaaatatcagctaaaagtgtgcatactaaagcatttctgaaatgatgctcactttctgccttttgtctactaaaggctccaagtgacaatcctttccagcacctctaaattttgagaagtttgagccaagtatacagttcaccagatgtacgtttcacacgtaacccagacataactgcatgcacctggncataatgccttacccaaaaataaaagtca

SEQ ID NO: 125819 - DNA, 500 bp, Homo Sapiens
  misc_feature (404)..(419): n is a, c, g, or t
aagtcactgtccatttgtattgacatgcctctgtttctagtccagtttggagattttataaagttataacaatgagttaatgtgttcattttcatttgttgcatgtgacttaaatacagctagtatttggcattgagattttaatagaggttataattaacagttcctcttatagataataatctgggatccatgggtgggcttcagagaatctgtgtaccccctaaaattgtatgtagaattttggatatttacatttttattttttaactcttggatccatcagtaatatgtatttttctatatggtacaagatttaaggatctaattttatttttattccaaacagatagctatttgtctcaataccatttattaaacattctttctcccactggatctgnnnnnnnnnnnnnnnnaagataatagattttatacataggcaagtaagatttaaggaccaaacatggtattaagagactatagcacgattgttacca

SEQ ID NO: 125820 - DNA, 839 bp, Homo Sapiens
ggccctgctggcctctttgcccatattagagggaaaagaatagctgcagagagatgtgatcatcagcctcaggctaggctcctgagctcccagtgccatccccaccccaccacccctctgtgcctcctgaggtatccacaatactctgccaggtgtcttccagtcatccctatagaacaaagctggagactggatacaaattgcagtttattaaggctccagagtgagaaatggcacttggttctgggcaggggcaggggcaggggtgtcagtggaacccaaaggagctgggtccaaacatgttgggagggacctcctccatccccctacccccaataaataaagtctcagctccatctcagggtgctggtgcagggcagggatccctcactgaggagaacccagggctgctacctccttcatatttctccccacattggacctggtcacaggtcagtgagcaacagggcttctgtggtcctagtactctgagggggctggggagttcagggtggagagctggggcctggtggtggcctccccgtagccagtcatagtccgaggctgcccagggcaggctcagagtggggcctgcgttggggacactgtgcgcatcccaggtcggggcccagcctgggccacagctagatgtgcagctccgtgtcatcaggtggctccaggccagactctgcgctgagtgctgaggctgagggaccctgggccaccccaaatggtgagacaacgggtgagcgagcagccagaggagacagagagggtgagaagctgggggacatggcagctgaggacagggagccttcatggctgatgggggagcggtg

SEQ ID NO: 125821 - DNA, 1268 bp, Homo Sapiens
tttgtttccttaagaaaataaatatttccacgaggtcaagccaaagtacaggggctggagacggggtgggaagtggggcaaacactttagatgagcacagtagctcctgctagctggggcatcagggcactcaccatgtccctgcacaagatgctcacccactccaccttcccatcctggagctgcacaaattgtccctttcttgaagttgatgcaatgtgtctctgtgttagatatgagctcccaactgggcccaaggacttggggtgatggaggctgcaggctcttgccaaagccaggtttaaatccctgtttctattttaccagcagggaagaaatgagagtcgagttgagaaaatgctcagttaagacagtcagtcacgggacagctgtatcctcaggaccagcctgtcatcgataagtccaagccctggctactgctgctggagaggcaaaggaacaatcttgcctttcagcgccgtcggaaagctcgagatattctccaggcattgggttcctcatagcggttgtacaagggttcaagacgctgttgcttcttctgtttgcttagcttagttgggtctgagaccttgaagaaggctggggcaaactccacaagccaccgagggtcgatggtggtaacttcacgcatgtattccttggtggtgagcaccagctcatggtacaccacccattctggctgtctgttgaagagggcactggaaggatggatatagaccacctgctggtcgatcagtgtccggtaaccctcctgcgggtctttcttggcagcattacggaagaacccactgcagatggccttctgcactcggactgtggacttgccacaggaaacaacatccagcttgtgtctgtccattatgcctaacatctgcttgcgaatgtcctgggcccggcgcagggaacgagcctggataaagttctcatagcaccatgggttggagaacttgttgttcttccaggagttgtacacagctagcagggtgaggtggtccccttcagtctggtggaatttggccttcttctgatctgcaagggcttgtttatccttgggcctatagaagacgttctgcacagacagcatggatacaatggtcagcatttcctcactgcagcccagatgcacagacatgatgagcattttgcatagcattggctccagagggaactctgccatccggcggcccaagcgagtgagcaggcggacgcgtgggtcgacgatatcccgggaattccggaccggtacc

SEQ ID NO: 125822 - DNA, 987 bp, Homo Sapiens
  misc_feature (734)..(734): n is a, c, g, or t
  misc_feature (814)..(814): n is a, c, g, or t
  misc_feature (853)..(853): n is a, c, g, or t
  misc_feature (915)..(915): n is a, c, g, or t
tttctgtgtaaaaacatttatttttactaatgtttagaatacaggaactaaagaaagaaaaagaaaagacacctcaactccaaagcgacagtgagttagggcctgcccacggccaagggggaaggctactccagggtgtcctggcatggactgtccccccactacttaatgtcagtgccactaagcagaaaacttgaggaatcagggtgtgaagaccttaccagctgctagcgagcgtgcaagggaagaaagggatgtctatgtggcttccccatgagctgagagccaggatacacggggcaggtggcagaggctcccaattcagttaagagcaggaggctgaatgcccaggtccaggaagaacaaaaaggggattttggaggtaggcttttttgttgtgttaaaaaacaggcacattatccatctccttgtggcccccgagctgctggcctggccccctgatccttcccctctccccacaaaaccaaaaggagtaggaagggaggcagaagatgagaaattccaagggtggggaatgcttcagtcactggagaccgaccgtaagagtgagccaggagagcaatgggaataacaaggtgaagctactgttccccctggggtggggtggaatgggacagggcagaaccaggagggtgaccgagaaatcctgactccagaaaagacactctgtagcaggaacacagggcgcagagagcactctggaggaagaggtnaggctatgcggcacaaggcatgaaagctcttgtggacgtggctcagctgctcgctccagctccctggctggctggctctngaggacaggaactctggagacaaggggaaggagacacanagaatgagtgctcccaatcttctggaagaacttttgacctgggatacaggggtgggccagancaaatgatgacttatgggagacgaagactgggcaaccacgctagggaggtgttgctctcccctaaggcgggc

SEQ ID NO: 125823 - DNA, 1012 bp, Homo Sapiens
  misc_feature (751)..(751): n is a, c, g, or t
  misc_feature (782)..(782): n is a, c, g, or t
  misc_feature (793)..(793): n is a, c, g, or t
  misc_feature (806)..(806): n is a, c, g, or t
  misc_feature (891)..(892): n is a, c, g, or t
  misc_feature (894)..(894): n is a, c, g, or t
  misc_feature (905)..(905): n is a, c, g, or t
  misc_feature (966)..(966): n is a, c, g, or t
ctggtttttttctacaaattattttattagaatgtcagactcaaaagaactaccaggaacatgcctgaaaatgctatatatgatttatgcttgacccatgacacctgctgtcactggatccagagtgagcaagggaaaggaagtggaggtaggcggggacagcaccagccctggctggccagacctgaggcccacagacctggtccccacaaccaggattcctacaatgtacacattcctaattcaggctcaactctcctttacccaaaagtaaatgcctcaggactcaatctgaatcactgtctgtctcagcttctttcacatccacgctgaatttgtactcctggtcacatcccatgtaagcgtcactcatgaagtacagagtgtagttgtgggcaccagtggctggggccacaaagtccaacttcaccttggccttctgctgcaaggtcagcctcttgatggagatgaggctattggacttggcatctccaatcaccacccaccagccctcttcacgtttctgcgggaagagaggcgcaatgacagggcctgtgacttcctcctctcgctccagctgcaccagcaccacaactggcccgccactgcggatgctgtccttatctaccacctcataagatagttcgatattagggtagcggttacaaaagcgagccacatctgcaatctggctgtcagtcagctgaagcaacgcgttccgttcttcatcctccatctccatgatgtcganacactctccactcccttgtctgtgcacgttngatagctcaangtgaagtgtggcnctgctcaggtatgagtcttggacacatggcttgggtgacatctgggcagttcatagctgcagagcaggctgagccaccatgctgnnangacatcaccangctggatagcggatgcctactaggattcctcgtactgatgcactcagactcactgatgcanacaatgacctgcagagcagttggctgactgcggtactgactaaggt

SEQ ID NO: 125824 - DNA, 200 bp, Homo Sapiens
cgggccagtacggacgtgaaagaagccgagacggacagtgattcagattgagtcctgaggcatttactcttgggtaaaggagagttgagcctgaattaggaatgtgtatattgtagggatcgggccagttatttttccatggccttgattgcaacagctgcctcctctgtcatggcagacagcactgtgctcagatctct

SEQ ID NO: 125825 - DNA, 922 bp, Homo Sapiens
ctgtgttttgtttttcatcaccacagaactggcttttactaacaaaaccaaagaacctcaaacactttttgtggacttcaaattctttccttcagattttaaaatgacattatgcatgtacatatttttaaaatttagacacattttagagaacacaattgtgaacacaaatctaagaaatgaatgagatgttctgaaatctgattcaaacacttatcttaaactgacttctgtcaatcctctgtcctgtgaagtaagtcccgtttctcctttgcctggagggaccgagctggaattactgtcacatgttacagacatgaggcaggggttaatgcagaaccacggaacagcacctctgatgacatctagtggataagtaggaaggtgtcaacccaggtggcttttaaaaaaatctgtaaataaaatctcctcctttattccacagattttaatctttccctcagtgtgttagaaagactaatagtgtttttcaaacgtgtgtggatggactcacctggggagacacccgcatcctaggccacctttgtggctgctctgcagacacctggctgcacccgctgcctcctcgtctgagaggggctgccctggagagcaccgtgctggctgtgttgcctactggcttcccttgagaaatggggaggcaggacctctactgagtgctgtgatgtgttatgttttgatgtggtgggtggggaggatggtaacaatgttatttggatgagattggacatcgtgtgaggtcttcagcaaagcagctaccctcagctcattgacgacagcatcctgcctgcaggtgtgggctgctggactgcctgcaaagcccatcaacaggccctggaggccaggtaaaataggatcaggatgatttctattcacagaagtcatcaatctaacatgaaag

SEQ ID NO: 125826 - DNA, 1026 bp, Homo Sapiens
  misc_feature (727)..(852): n is a, c, g, or t
ttttttttaactggaaatggctttccatctttattgacactccctgtctttgcacttaaattgtacatgccatttaaggagcccaacaagctttgggaacagtctctaacgcatccctatttgcagctgggcgaaggcccgcctgagcaggttaagtcccaggcggcaatggtgagccaagcgtggaacagcccaaactaaagtcggggtctctgtgcggcggcacgggccacttcggcacttcagtgtttaaacttctgcatgcagtgtaaagacagacagctggccacagtgctgccctgcagtaaagaccagccaccgtgaccggctctcccctgcctccctcctcccagcccacagtcagacggagcctctgtggcaagctcaggcccagtccagggccctcagagtgtagatacaggtggaggcctttccaagtcttccagttgtccagttagagtggcagaaaagtcagtggccatgttcaccgtgtgcctcactctctgcagcctggctggatgcagtaaggcatggtggcctcaacagcgagggaaggcctttatgttggggcctatgtggaaactctagccccgtgcttccattacatacaaaccgaatatattaaagctttagagtttttacaactatctgtctttcccctgacatctccccagccaccttagaggtgggaaaggaaaggatataagaaaaccccggacgcgtgggnnnnnnnnnnnnnnnnnnnnnnnnnnnnnnnnnnnnnnnnnnnnnnnnnnnnnnnnnnnnnnnnnnnnnnnnnnnnnnnnnnnnnnnnnnnnnnnnnnnnnnnnnnnnnnnnnnnnnnnnnnnnnncgtccgcgggcctaaggctaaagtcgggaggctggaatcgggtcccgtggttcttctatggaggtcaaaaaccggggggaatggcgttcctccaggccgatctgacgggttcacctaaacgagctccggcttaaaatagaccctccaaccggaacagccttaccgcccatttgg

SEQ ID NO: 125827 - DNA, 804 bp, Homo Sapiens
  misc_feature (594)..(603): n is a, c, g, or t
tagattgctttttaaattgctttattagctttaaatttttccatgcaaatgggtgaaactactgctgacagaaacttacactgagtgcaaaggcaatcttcaaatagaagctggcaacacaagacccacttgacacatggaaataacatagggttcacagcaaacggatcagtaaaggcatattaggaaaatgcaaggaaaaagaaaacagcgggaatcacagtattaatctcatgataaatggcaggagtcaaggcataaggcaaaattcatcatgatggtcatggtgattagagagctcccccataaggatacgcagacaattcctcaactgcagctccctaagttttcttctgatttctctcatctcctccatgaatatttccatatcatctccatctccacccatcccatcattgatctgcctattgggtatggcccatcgaaaattaggggcaagtcggcgagcctgtccccgtcgatttcctgcaggctggtggccttcacctcctcccaaagggcggtcttcctctccattctgcataggctgctccatctcttcgttttcctggtgaatatttgccatgatgagannnnnnnnnnctggttgtttttctgggcctatccttgcagtctccttctcctccggattctcgccgcgaggtgcgccgcggagacacttagcctcgcagacctgctccgcttttccccgggccgaatgccagcccgccgagctcagggcagcggggagctggtagccagacgcgagtgacgactgccctcgtgccgaattcgccacccagc

SEQ ID NO: 125828 - DNA, 807 bp, Homo Sapiens
gcgctttttaaaatggctttaattagcctttaaattttttccatggcaaatgggttgaacctacttgctggccaggaaactttcccctgagtgcaaaggccaatcttcaaatagaaagctggcaaacacaagacccacttggacacatggaaataacatagggttcacagcaaacggatcagtaaaggcatattaggaaaatgcaaggaaaaagaaaacagcgggaatcacagtattaatctcatgataaatggcaggagtcaaggcataaggcaaaattcatcatgatggtcatggtgattagagagctcccccataaggatacgcagacaattcctcaactgcagctccctaagttttcttctgatttctctcatctcctccatgaatatttccatatcatctccatctccacccatcccatcattgatctgcctattgggtatggcccatcgaaaattaggggcaagtcggcgagcctgtccccgtcgatttcctgcaggctggtggccttcacctcctcccaaagggcggtcttcctctccattctgcataggctgctccatctcttcgttttcctgggcctatccttgcagtctccttctcctccggattctcgccgcgaggtgcgccgcggagacacttagcctcgcagacctgctccgcttttccccgggccgaatgccagcccgccgagctcagggcagcggggagctggtagccagacgcgagtgacgactgcaccgaaggctgcgtcgctcggacgcgtgggtcgacgatatcccgggaattccggaccggtaccac

SEQ ID NO: 125829 - DNA, 1087 bp, Homo Sapiens
  misc_feature (87)..(104): n is a, c, g, or t
  misc_feature (112)..(280): n is a, c, g, or t
ggggaaaaacaccatagtgcccctttttcctttcgcttttggggggcgcccggccccccaccaaatgtgtttaaaaaaatttttttnnnnnnnnnnnnnnnnnncgccaacnnnnnnnnnnnnnnnnnnnnnnnnnnnnnnnnnnnnnnnnnnnnnnnnnnnnnnnnnnnnnnnnnnnnnnnnnnnnnnnnnnnnnnnnnnnnnnnnnnnnnnnnnnnnnnnnnnnnnnnnnnnnnnnnnnnnnnnnnnnnnnnnnnnnnnnnnnnnnnnnnnnnnnnnngctttttaaattgctttattagctttaaatttttccatgcaaatgggtgaaactactgctgacagaaacttacactgagtgcaaaggcaatcttcaaatagaagctggcaacacaagacccacttgacacatggaaataacatagggttcacagcaaacggatcagtaaaggcatattaggaaaatgcaaggaaaaagaaaacagcgggaatcacagtattaatctcatgataaatggcaggagtcaaggcataaggcaaaattcatcatgatggtcatggtgattagagagctcccccataaggatacgcagacaattcctcaactgcagctccctaagttttcttctgatttctctcatctcctccatgaatatttccatatcatctccatctccacccatcccatcattgatctgcctattgggtatggcccatcgaaaattaggggcaagtcggcgagcctgtccccgtcgatttcctgcaggctggtggccttcacctcctcccaaagggcggtcttcctctccattctgcataggctgctccatctcttcgttttcctgggcctatccttgcagtctccttctcctccggattctcgccgcgaggtgcgccgcggagacacttagcctcgcagacctgctccgcttttccccgggccgaatgccagcccgccgagctcagggcagcggggagctggtagccagacgcgagtgacgactgcaccgaaggctgcgtcgctctgcagctctgggtcaccctcgtgccgaattcgacacccggcctcgtacctagccttaagttt

SEQ ID NO: 125830 - DNA, 807 bp, Homo Sapiens
ttcacacaaatgtatggattttattgacaagtgatattttcttacagtaataaatataatgcagtcttcttaagagtcagtttggagttgagaaggcagtgtacccttgatggaaacagtcagactggtggtaccatcttcttcagaactgcatctaagaggctgtgctggctgggaatcatacagctgtgggcaacaactgcatcagccccaaggcttccctccagaccaaaaggtgattcatggcccctggttaatatcaccctaggttctcccctgtcccagttttaacataatatttcatagaaatactagtgccataaaaagtcaatatttcaaatataaaaattattttatacaaatgtaattcataatcattcttttaaaatacagcattgttatatatgtttgaaacattattaaaataaatatttcctagagaaaaaattttgcttcacaaaattataaaacagaagcatataaaactaattcatgattggtgcttcttcagtgtgtctctcattctctcttagtgtagacagcatgaagtacatacatctagcctgaaaacataccaccatcaacctatacatctaaatgcttggacttcatgtgtgtctacccacagtgcccatgggctatctacttacacaccctctacctggagcttctgtggaaagaagggctgtcctgtgaccatttgcactaacatacttttccagctaaactctagttcaaaagtctgtgagcttggcactttcctgggagtggggaaaaggcatatcacccttcttcattaaggggacc

SEQ ID NO: 125831 - DNA, 955 bp, Homo Sapiens
ccaattatttttacaaagttttattgaaacttgtccatcaaggtgacagtaattcactgttttgaaaagtcacaaaaaagggtacccccaaactcaggtataccaagtaaatactggaacccagggagctcactcctccctctcccaccaggagcaaagggcataacgggagcttccgctgactcacagcaacctgggctagtgggtacatctgtggcgactcccgggaaactgagctgcgtataaagaagtctgctttggtccaaaggacatcttcctgacccagactcagaaggctgctgtcaagttctacattcctttcagaataagcaacagcaactgctgcagtcttgctaactaggggcagaggtcctgagcaaggtgccacgggaccttgtaaaatcacgctgtgtgattttatagggaagagggcagagtgcctctcaagttttcacggttaacactgtcacctattatgactggaataaaaagctggacaacctgccagctaactggtcagtcctgaggatcatccagctgaatggagaaatccggcagcaggttgaaaagtctgttctgagaacagattattgctgagcagagttcatgtgacttctagacgtggtgacttaaaaaatggccttaaggctgcagagccagccacctctgcttacaaaaagagtacttagtgcacatgactgtaagaaacaattgtaaaacctcatctagaaatcagaaagcttctaatttctatagaaatgacacctccctggagccgagagacaatctgttgttgattttgaaggacaggcaagaccaacactgtatttagttccatagccaggcctcaacagggacaagtggctggccttaaaaacacacagatgactggaaatgatgtgtggcctcagtccctgtttcccagaattttactggcaaaggagttagcattcat

SEQ ID NO: 125832 - DNA, 1003 bp, Homo Sapiens
tttgctgtttctccaaaattttattttaatttaaattacagggccagccagatattctgataagaaattcacttttccttaggagaaagaaaatgctttcatggcattgttaacaaatgtatacatctccacttttttaagggttaaaaatcacattaagtaactgccttatgtaaaattaaacctttataacacaaaaaccacttccagtataatagtcttggtaatatgaatatattaaatgatcataacttcaaatgcaacatttcaaacttaaatgttttcacattgttttgcttaaaaacaaaacccacgaagtctgaactaccttcagattccaatgtaagagtaacatgaatgttgtgtctgacacgctgcaccctcacttcttccacctaaaaggctacgacctcactgccaaagtggaagctgttctagatgtgtaagttctaagaatgagcttggcaagaagacgtttcttccacttggtgtaatccatgtttttacactaactccatacacacagcactacaccacaaagccaggacaccacatcacggccaagtcttccttcctaaacatccaagagattttcttttcaaggagactagattgccttatttcacacagattctggtaaagacagtcttgagaaatgccaattatgatgtagactgccattttaataaaaataaaatatatctatattttctggagctattttcctaactggtgttcctgaaggtttaaaacctgctgaaacagcaattgggaggcccattttactggccagtatataattccattagtaagagaggctagcaaagaataatcatatcaatttcttaatcagctgcagccatgctgaatttgaactggcaaactctgatttgtcagttgttagttgtgatcttcatatcactaaaatgaacagataccattctaataactttacatagatatagtctagaagacattgttctgccgtggtcacagtaacaaa

SEQ ID NO: 125833 - DNA, 1583 bp, Homo Sapiens
  misc_feature (845)..(858): n is a, c, g, or t
tgccccaagaaaacgttcacccagtgatcttgggctggggttgtctttaggaaaagttgagactataagagtcataaataagtccttgtgtttccttaatttattttgttaacacccctaattacaaccaaagtgatgatgtggagtcttctgtcttcattttggccccagcattcttaatttcaaagctttattctgtctgcctaagagaatcaaccaaaggtgattctcctaaagagcagtgaaggaaatgtcaggttagcaggacccaagttttgggtgtgaaatgttgccagcttcctataatgtaaacggacttgttaacctaacctaattatgctcagtggacttctatagatggttttgaaaaatgaactgagctgccttcccgcatcgcataaccagttccatcatcctggtggaacttgaacatttagagtttatctagagagcttggttaatctttccatattatttgtagtattggtcacaaatgctgttccctcttagcctcattctgtgcaaccaagtgcatataagatgccctgaaaagagtaacaaagtatgctttgcctgtttccacttaccaggaaattccttcagaactagattagcattgccctgcctgtctgaaaggacagtttacctaatggtgccagcctccttttgctttggcaagctggatttctcagagccagcatgttgtttccataactactttgatattttaactcaggtactccagtcttcaccccaacctcagctgattgtagtacacctgctagctctgttgccccctcaaaactgcacccagagcagggccacaagggtgctttttttctttnnnnnnnnnnnnnnttagaaccaattcatgttcatgccaaaaacaaatggtccccaagcctatatgtattaaaatgttaactttgcctaaaaatattggcagtgactttttaggcaggagtgccaaaggacactatgaacttttggaactgacagtttctcctaactttctgctttagcgtaatggctcagagtagagagcccccacaaagttatttaaaagatgccctagcagcaatccaccagtttttctaagctagaacctttgagtcccccaaactggcctgaagacttaagtttgtgtgggcactggaagtcactttgatagatggattgaaactgttcctatttgccctgggacggtttctatctatcaaaggaaggttttcacctgtagaaagccccctgcctccagccaaatagtcccatgctgactttctatcttcctttctcaaactgtcttaggaaggaccttcagtgcagatcaggtgcagtaatggctttcttgtcccttaattattcaccagacccagaagttgtacgcatttaatgctgtttgtaaccatgcatctgttttcattctttgctgtaccttttgctgcccatcctgttacttttgagtttctttcattgtggttgttcttgggttcttttgtcttgtcagagctcttctataacctcgctctaatggcttaacagttgttctgggtggaaacgtcccctcatttgaatgctcctct

SEQ ID NO: 125834 - DNA, 616 bp, Homo Sapiens
tttgggtgttgttatttttaattctgttttattttctcagcattaacttagataattctcagaaagcctagcataaattaacagcagagtgtagcatggtggttaacagggcttcttcgcagtgttttattacagctaacttctactcctcagagtctgattcaggggccatctttcaggctagtctagcttcactactgattattctgtcttaggatttaataatgactgtacattgtaagagcagcaaacctcatagttgcccaagttctgatgccaggcaacaatcaccttgcatcatatggttcaggcccttctgcttcccatctcacctggaccagggatagcaacactgccaagtgggaacagcatacttatgatgcacttcacccaccagatttgaaactgtgggcggtttcaataatattttttaatttgagggggaggcacaaagtagagacatcatttttaaatcttgttttatatccaagtatctcacatctgcttgattcattatcttaacttaaaaataaaagacctaaaaataagtaatgaaactctttttcttcatctttcatagcagggagttaacagagtacatataactttaatgaat

SEQ ID NO: 125835 - DNA, 460 bp, Homo Sapiens
ttttaggacatttatcatctttattcacttaaaagctgaagagtaaactcttctcagatctgtcagagaggtagggtcatcaggcaaagcgccgacccatcagtataagaggtgctaggctcttcatcatcactgctgacagatcaatgtattcaagaacaggtcgtaatggtccttcactgacaaactgaatgtcgtcttcattttcatccgttgttgactcagatgcctcagggccagctggagggacagattctattatctccgaccccgggtctcccatgtctccgacggccgcgctgacagcaccactgctcctgctgtccctgccgccgccgtcgccacgaatccccttcccgccctgcaccgcctggcgctaccgggacccgcccctgcgtgagcgccgacgccaccggcggaaagagacgcaaaacctcttcaaaggaggagcggcccttac

SEQ ID NO: 125836 - DNA, 820 bp, Homo Sapiens
aatgaaaaaccttttacaggtaggcatcaatattttatattattttgtttatgcactaaattacaaaattgaatccattagttgattcctttaccaaatcctgaaattttaccatgggctttagaaaccatcatgttccctaattttttttcgtagagaagcttgcctagtagttttattactgcccattaggggttactaaatatgcaatccattccttggacacatggacatgcttttctgctttcgattcccaaatgccgaactgctgaacaatccttacatcctaatttaccttcttttatttcaagccatttgtattgttctgtaaacataaatgcttgtttttcattccaacaatctggaagcacaagattatctatttctttctttgatgaaagtgatggcttttcttcaatgattggttgttcaatatactcgaaatgtggttcctttgccttagacaatctgcagtgatttttgctcacttcattattttctgtgtctgttttcaccttcttcatatttaaaaaatgcaaaaaatcaccctgtcgttttggcattttaggaaacagaatatcactataataggcgctagggttttcatcatcaccacagaccagatcgatgtattcaagaacaggtctcgatggtccttcactgacaaactgaatgtcgtcttcattttcatccgttgttgactcagatgcctcagggccagctggagggacagattctattatctccgaccccgggtctcccatgtctccgacggccgcgctgacagcaccactgctcctgctgtccctactgccgcccc

SEQ ID NO: 125837 - DNA, 565 bp, Homo Sapiens
cttctaaatctcaatcagttgtttattggttggcaaacaagtttcacttttacaacaaatattagtaatgaggtcatccaactttgagaccatacaaaatggatcataaattaaaaaaaattatatgtgctgctaatttaccttttgtattcctacattactcaaaatcctgtcaaataaataaattttcctgttaataaacagaagacttttttttaaaaaaatcacttcaaaataatttgaccttccaatgcttacgagggagtgaatttcctctaaaaagtggtagtgcaggtgcccacttgttgatcagactgagcattcagcactttaatgcctatggaaaaccgtttttcacatgcagaagccccactagttctatagacaccttttgacttctagaatcatagctagtgtcctggtgatgaactgcttgccaaatatgctttgcattacaacagacgtgccctgtaaacataaaagtttgtcctgctctaatttgcaaaaaacactgttggaaatattctgactgcataaagatatatagtgagggaaggaagtctaa

SEQ ID NO: 125838 - DNA, 1006 bp, Homo Sapiens
  misc_feature (721)..(721): n is a, c, g, or t
  misc_feature (758)..(758): n is a, c, g, or t
  misc_feature (816)..(816): n is a, c, g, or t
  misc_feature (821)..(821): n is a, c, g, or t
  misc_feature (842)..(843): n is a, c, g, or t
  misc_feature (867)..(867): n is a, c, g, or t
  misc_feature (922)..(922): n is a, c, g, or t
  misc_feature (951)..(951): n is a, c, g, or t
cgactttggttctggtttattgcccctcagcaggcagcgggagtcaaggcctaggctggggctgcccggctcagccagcgggtctaaacagtgtgtgcaggggcgccgttcgcgccctccaggaaaatgcgcgatcgggaatgtctcgaagtcagtccaggaaagagtcggcccctagtcgtgggggattggggcagggaagggcagggcggggcggggccacgccgccgggccagtcggtcccgccaggcagcgatcaaacgtcgagggaggaggcgggggacagggagggggttcgagagggcgtggcgggcgccggccccgcgcccccagcgcccagcactcgccactggaagatgctggcgtccttgccgcccagcgagacgaggtgcgagtcgtcgtgcgtgaatcggacgctggtcacgtggctgccgtggcccccgtacatgcggctcggcgccttggcacgagcgcacgggtactggaagagatgcactttgcagaagtcgtcggccaccgccaccacgcgctcgttgtgggagcggcacagggagttgatgtcggtcccatcggagccgtccggccagacgcctagcacagcggccggcctcagcccgacctcctacccaccgccacccacggcccagagctacaccatttcaggcgctccggcagccgcggccaccactgccgcgttccaggcaagccttcccggtccgangggctcctgggctggatctcaggtttctggactctcnaccacgacacacgccagcgttccaagcccaactgggctccactttgtcccagccttcnagcangtttcacgccctgctcacgtnnacgtgaaagccacacacagtgtangtagccaatcccggtctcggtctctagcgatcctcagctgctgcagctccagcangtcccagtaagactcatatcccaggatgncatgatgaatcccatctttggacatcagcctctgccgatcttggctgagggcaat

SEQ ID NO: 125839 - DNA, 2156 bp, Homo Sapiens
ttttttgactttggttctggtttattgcccctcagcaggcagcgggagtcaaggcctaggctggggctgcccggctcagccagcgggtctaaacagtgtgtgcaggggcgccgttcgcgccctccaggaaaatgcgcgatcgggaatgtctcgaagtcagtccaggaaagagtcggcccctagtcgtgggggattgggccagggaagggcagggcggggcggggccacgccgccgggccagtcggtcccgccaggcagcgatcaaacgtcgagggaggaggcgggggacagggagggggttcgagagggcgtggcgggcgccggccccgcgcccccagcgcccagcactcgccactggaagatgctggcgtccttgccgcccagcgagacgaggtgcgagtcgtcgtgcgtgaatcggacgctggtcacgtggctgccgtggcccccgtacatgcggctcggcgccttggcacgagcgcacgggtactggaagagatgcactttgcagaagtcgtcggccaccgccaccacgcgctcgttgtgggagcggcacagggagttgatgtcggtcccatcggagccgtccggccagacgccgtagacgtgaaagcccagcacacaggtgtaggtagcccattcccggtctcggctctcatagcgattcttcaggtgcttgcagcctccagccgcgtcccagtaaagaatctcatagtccccagaattggacatgatgaaattcccatccttggacccagtcaagatgaagtgatgaagcctggagtgacccatacagcgggccaagcggctggattttggcaccatcactggaaacactatagatgtagatcacgttgtcatgggaaccaatggccaggtacaacccatctgggctgtaccggaccactgagagctgctcattgccatcaatgacatcagacacgatctctctggtctctgtgtccaaaaccaaccacctccccgtgttcagtcctacggccacaactgccccactcgggtggaagtcagcacagagaccagtctccttgaggtcgatgctccaggccagtgcatggctctccccatcccacaggcagagctgccggtcgtggccgcaggtgaggaagcggttctgggaggggtgtgtgcagagcccccagagctcatcagtgtggccctggattacaggggagaagccctgggccaggtctcccctcagcaatgcattcttcgtggttcccaccagcagctcagagccaagcccttcagcaatggctcgcacggccccgaagtgctcgggaatctcagcctcctggagggccaccaacccggggcccccactgtaccagccggcggtcccgcccgccaccactcagcactgtcccgtccctccggagacacaaggcgaagatagaaccttcatgagcgtgagcctgggccacaatcccataggtctctttggcgccacccctgcctggggtcttggaatctgaagggctccgcccccaggtgagaatgttcccctctgagtctccagtgagaatgtctccatccggaaggaacacaaagcaagggataaacttgggtttcttgtatttcccaaagacaccctgtttccgggtaagggtcccattcccaggaacccctactccaccactccaattccagaagtggacgtgagatttcccactggtgacgatgcagctgctgtcacgagggttgaagccaacggccaggactgagtcatttgtactcttgatctcagccagcttcattccccggctgcagtcccacaccgacagcatgtgctcattggaatcatccaccacacaaagaaaggcaccctgatccgcagctgaaaaggccagggccccaacaccccgctcgaaggcccccagtccaatctcctgcagtttcaacagcgtctctgagtcccagatgtgaaccacaggctgcaggggctttccatccttatccactccagctgtctgtcccgaggctacccgaacaccatcagggtgaacagcaaggcatcgaacgcagtctgtgtgcccccggtaatgtctctggccgccacctccaggaccccctgggcctcctccaggccggtacagcaccaccacacaggcgatcctcgtgccgaattcgccacccaggcc

SEQ ID NO: 125840 - DNA, 1027 bp, Homo Sapiens
  misc_feature (592)..(707): n is a, c, g, or t
tcttttttttgcactgagtttcagcagagattaaacattttatataaatgactcttaaagctttacaccttgggaccagtgtaccttctcgtgcagaatacatttagatataaaaagacgttattaatacattgcacagttttcaaaatttaaaaacaaaaccgaacgctgctctgcggcagccgccgccggttgctgctacatgaacggtcccagccgaggcccagcgcccttccaacgtccgctgccccggcaggttccctcggggctctttgggctctaaattggctcaccgcagcctcttgcgcggggtctgctccaccgagcccacgccaggggcggcgcttggagagggacacggcgcggggacatcgcccgacgacttctcaggcgctgatctcttgcgcttggcgaagaaatcggagatcagaggcccggacagcttcttgatcgccgcgccgttggcgctggcggccgcggtgccggccgcgggacgtcccgaaatccccgagtgcagctggtcagcgagaggctcctggccgcgctgcccctggttcgcgccctgctcggcgctctcttgaggcgccgcgtnnnnnnnnnnnnnnnnnnnnnnnnnnnnnnnnnnnnnnnnnnnnnnnnnnnnnnnnnnnnnnnnnnnnnnnnnnnnnnnnnnnnnnnnnnnnnnnnnnnnnnnnnnnnnnnnnnnnaggaccgcgaccgcgaccggagccgcgaccggagccggagccggggccggggctggagccaggaccgggactgggggcggagtggacgccgtggccgggaccgggacactaggcagctgctccggcgcctcctctaggtcgtcgagggactcatcggccggctcgaggggcggtctgacagccaccgcgaccgcgacgggccgcggcgccagcagcatgtgggagtgctccacctgcaccgtctcgcggtagaacgcggtcaccgagtcggtgtccacttctggtcactgcaagcgtccatggccgctgagcggcatgtc

SEQ ID NO: 125841 - DNA, 1079 bp, Homo Sapiens
  misc_feature (242)..(275): n is a, c, g, or t
  misc_feature (277)..(277): n is a, c, g, or t
  misc_feature (279)..(279): n is a, c, g, or t
  misc_feature (1060)..(1060): n is a, c, g, or t
ccctaggagcttaaatttccggtaggtagtttgtcccaattatgtccccccccagaaagtaaggttccttcaaaaagtatcccaaggttaccagttttcccagtccagacggttgtaaaacgacggccagtgctaggcttataatccgacttcactataggggaccacttggtacaagaaagctgggtacgggtaagcttgggcccctcgaggggatactctagagcgggccgccctttttnnnnnnnnnnnnnnnnnnnnnnnnnnnnnnnnnntntntttttttagaagtcattatgaatttattatttacacgattgttaaagtacacaaatacagtggcgatacaaacgcacagctcggagactggccgtcagtgcacagctgacacgacgtcctacctacgtctcctgcacggggcgacggggactagatactgggcaaggactgtcacaagcactccgaagacgcgacccggcgaggctcgggctggaacccgggcgcagagctgcctcgcacaaacgttctgggcactacatcgggaccacagatatttacaaagcaagcttgcgccacttcaggccacagcgcgacgtctctccgggtgggggacgtctaccttcaagaaggggtccagcaacaaagaaaatctcttaactcggctctgacccaccccaacctccctctgtacttcaacacacagctcccacccgctcaaggccccgtactccaaaacgcttacacagtaaccagcctaggattgagaaagcatccatgggctcaggcagacggccagccagctggtgggggggtgaacaactgtgttctgggacgccagccagttatggcatccggggaactctggggaggagaagggagaaccaaggtgcacaccttcgaagccctagagtccaaagggaacatcgtccatcgtgatggggtccagccgaagtgcccacgaacacagactgccctgcgcattggggttgggagcacatggccactggctaccgcccaagtgctgcggagtgagaggcgagaaggcatcctgggaactcanggcacagcagcatggagct

SEQ ID NO: 125842 - DNA, 1328 bp, Homo Sapiens
  misc_feature (1034)..(1034): n is a, c, g, or t
  misc_feature (1114)..(1114): n is a, c, g, or t
  misc_feature (1117)..(1117): n is a, c, g, or t
  misc_feature (1135)..(1135): n is a, c, g, or t
ctgtgctttcaaagttaaatttattatgcacagtaatgggtaccatggagacagggaaagggctagaaagtggcatcatctatacagagggaacatataaagactgtcccggggtgtacccccctaactgtgctgtcactccaactctgtcagaaagaaaaagtagtgtgaggtgtatttgtttgcaagaaacaaggtggaaactagatggaccagctgagcagggaggccaaggtcatttccatctatccctaatggtgttcagtatagccctctccttcctgagacctaagaacagaagatacgcttccacaacagagatttttgattttttaatggcagcactctcataactacattcacggaccaaccaaagccatctccaagcctagaaaggatacatactacacgcagcgaaaatgccaaccactgatccagaattttcaagatggcacctttccccaaacttctataccattcattaaacatagactgcaaactgctagcctgtagaccaaattcaacctctaagtattatttgcttaggtgcctaagcatctttaaaaatttgatttagttggcaatacactgggaggtttcacataaatatctaggtttccagcttctctgaagaaatgagaaaatccattcccacatggcaacaaccagctggagctaacagctgttagacagcatgctgctccccgctactgccttacacccagccagcttcatgtgtgcatgttatctgcctgccattcacatcggttctccttgctcagcaaatgtcccacctcaacctcacactcaatacccttatacaggttccctaatcagagttcagtagggcacccacactatagctgggcaatccctggatgctgtgatatttgttaaccattatgttctttccaaccacgggaaccttcctaagagctcaagagcttcactgctggataaaaacagttcctgatcccggattctgacctttagttttccttttccagtcactgccccagtctgcctggccctgngctctgttccatattggcaatgagagccacggcagggagactccagcaggcttttccacagtgcagccaactatcagtantanactttgttctccattacnagcctgtagcactgagtgctttaccttatccactggctctacgcatctgttccagtctcgtccccgatctggctcgagggcaattcctataggagtcgtataatcgtatcagtcaagcgttccgtgtgaatgtatcgtcacatcaacacatagacggagataatgtagcgggggctatgatgacatcaatatt

SEQ ID NO: 125843 - DNA, 669 bp, Homo Sapiens
tacagtgactcagacccattcatacacttttatttcagaatttatggcgtccattttgtgtactttttggctcttccattctgcttctggcagtaactgttttctcgctccagggagtctttgatcgtcttcagtcatgaagatttgcattgttttgtcctttgtcactttccctcttcctcaaaaagaaacccagtaaatgctcaaggtctgagctcagaaggacgcgctgggaatgagaaggtgctgtgataattctggttatccagatttttcagagaggtcccttttcctgcttggaagctgtgggctctgtcctctgggttctcagtactcagttcaaccaccttctcctccatccctctccgtgagtgaccatggtcaggggcctgtggagtgggccagggtgggtggggctggggcaggtgaacatagaacattcaggatctggctgttccctttggctccctgagcagaactccctgggcctccctgtcatagcagctcagcccaaccctggcacttgctcggggacaatcactgggcatctgccaggacgaagcaaagcgggccgatggcagctgcagggagcacaacccacctcggggctggggcaggtaatcccgggcaagcctttgcttccactgaacgcacaacgtgctggaccac

SEQ ID NO: 125844 - DNA, 1229 bp, Homo Sapiens
  misc_feature (699)..(728): n is a, c, g, or t
caaaaaaaataaggtgtctttattgtcttggatgcaaatatagtttaaaaaatgcattgtagtgttgaatacagctggtggaaacgtgcttcttgacagcagagcaatcagaggggtgtactcagggtgacgtggaccggagggggcctctggccaaaccagactcttctctggtttgttcttcagaccacgaggtggaaccatctcttcaaaggagccctgccaccatcaccaaagctcacaccagaaaaaaccgccatttacacaacaaactgaacctgaaaaaggaacggaacatggtgcttccgccgtgaacaaaatcagcaagtgaatccgttttcctttcccgggctgttcgaaaaagattcggctagagaaaagggggcactgtgggcagcccgtaggggatggcctggagctgtggggcccgggctgagccctccctgccttttaactgcaggatgtaaactctatggaaatgtatagaacttcagtttctcccaaccctccacaacctcaactcttgagaccaccaaataactgttaggaaacgcagaagagagtccttcaaatgagctacacccaggttcagagcgcagaaccaacagtgtgactggggcatggaggtaaattctgacacgattggaggggaatttcacaaaacaaaattccatgaagtcaacacgcacacgcgcgtgnnnnnnnnnnnnnnnnnnnnnnnnnnnnnnaagtcaacattcaacgtgaagagttcccttttctttctcgaaggttggtttttgcaagccctgacaagcaaagagtcccttgcggtggccaggggggccaagacctcagaatgaaaagcccacagctgctctgtcctcacccgctctggaggccagccctggtacaggcatgggggtgggggtcctaaaacccttcgtcagcgttcctggagcccttgccaagcttaccatgtgccccatgcgtgtccttcacatcacaaaaacctgtccagccgcccaaggccatggtgtccaccgaatgccacgaacatgctgctgagcctcaaagctcttcaacctcccaccttgctgtcccctctcccctgacaagtgtgcagacaaggtaaaaatcccccaaagcagagatgtcgagggcccggagccacacaccacatccccgtgcatctttggcactctgactgccactgctgcctcgtgccgaattaccaccagcctgtctgg

SEQ ID NO: 125845 - DNA, 1367 bp, Homo Sapiens
  misc_feature (76)..(122): n is a, c, g, or t
agtgtgactggggcatggaggtaaattctgacacgattggaggggaatttcacaaaacaaaattccatgaagtaannnnnnnnnnnnnnnnnnnnnnnnnnnnnnnnnnnnnnnnnnnnnnnaagtcaacattcaacgtgaagagttcccttttctttctcgaaggttggtttttgcaagccctgacaagcaaagagtcccttgcggtggccaggggggccaagacctcagaatgaaaagcccacagctgctctgtcctcacccgctctggaggccagccctggtacaggcatgggggtgggggtcctaaaacccttcgtcagcgttcctggagcccttgccaagcttaccatgtgccccatgcatgtccttcacatcacaaaaacctgtccagccgcccaaggccatggtgtccaccgaatgccacaaacatgctgctgagcctcaaagctcttcaacctcccaccttgctgtcccctctcccctgacaagtgtgcagacaaggtaaaaatcccccaaagcagagatgtcgagggcccggagccacacaccacatccccgtgcatctttggcactctggctggccactgctgcacacgctgcctgcccggatcagtgctgtccagccctcctttcccttccccaaggaaacgctgggccaagctgagctccaaaataggtgggttcctctggggccggggagcaggtgttgagggaaaggccactttcccaccagaggggaaagagagagtctcatctcacacccaggctgcctgctaggaggcctcagtcaggtcgaggcagcggccaggcgacaagggaaagggacaagctgagggcgaacgggggtgatgagacgggccctccaagccttcccacgtcagagccagggtaaggaaaagagctggaccaaagcaaggtccatctgccagtgcattaaccaggcccacagcaccccaaatcccccacacacaggggtccactggcccgggacaggcccagctccacacccatgagttctgagagctctaacgtactgtccagcagacagcgagacctcaccatcttgaaaacctgaacctgccacctcaggttcacccgggggtccagctagggccttggaggaaggggcctcgccagttctcagctgcagctcccctctatgagagagacccttacctgcaccccatgtgccgcgcacggccagtcatgactgcgcacggagatgaggtgggcgtgtaagcccgcccaacgtcagcaacagacagaggtgctgcatagccactgtgcactcatatctgggcagggactgggggtgccatgccctctaagaatccacaacgtacatcctcatcagcccagagtca

SEQ ID NO: 125846 - DNA, 1088 bp, Homo Sapiens
  misc_feature (67)..(111): n is a, c, g, or t
  misc_feature (160)..(295): n is a, c, g, or t
gtggggggggttccccacccccttttttcttgccccggggttttctttaggaagaacacaaatagannnnnnnnnnnnnnnnnnnnnnnnnnnnnnnnnnnnnnnnnnnnnaagggttttataaaaaatttttgaggggcccggggggcccccacaaaannnnnnnnnnnnnnnnnnnnnnnnnnnnnnnnnnnnnnnnnnnnnnnnnnnnnnnnnnnnnnnnnnnnnnnnnnnnnnnnnnnnnnnnnnnnnnnnnnnnnnnnnnnnnnnnnnnnnnnnnnnnnnnnnnnnnnnncagatttaaaaaacatttattttaataagactattgcaaacacattaaaaaaactaaatagtaatattacaaaatctatatacttgcacatttagtatttgtcaatgtgccagaggttttcttcatgaaatttgacttctttgaagtgaaggcttttttctatcatctcttatagctctgactgaataagtcttaatgctttcttcatgttttctatcaataggggtaaatcccgaggctcatatgtgtacaatctgttagagtatcttccagctatgtcagctctaactgttaaagaagggtctacaaacatgattctaggcacatattgcccatcaggtgataaattcttatcagtggtttcatgcataaggtttagcatgatgaacttattctgagccatttcttgtatttcttcattttgggcaaatactttctttagtgcttgagagtattgacaatcctccaggtgatgaataaccattaatggcttcttacttttttgagcataaaagagaccttcttcataagtttgtacccaagtgatgtcatctccccatcctcttgagagtgtctgaggaggcctcttttccttttttattgcaatggcaaggttggaagaaactgtgacgagtaagaggcagagacccaaagctgagtgtagcatcatgtcttctagagactctctcagaagaagctgacttggccagtgctcttgttggaaatgtattctggatgtttcccccggccgtaatggccgaattcccgggcatatgtccggtaccgtcgactg

SEQ ID NO: 125847 - DNA, 870 bp, Homo Sapiens
tttttacaggtgaaccatagtctcactttatttcgaattttaggactgaacagaaagaaggttcacagatatttcttcagggaaggaaagtgggcaaatagcacaatgaggcaaaccacacaatctagacgtactttcccgggtaaacaaactgggaagcccagagctcacagaggaggagagcagagcttggggtggcagagaggtgttcattgggaaggagtcaggaacacaagagaaatgttcatgagctcatccaggatagagaggactcttggggaaggggacctccttccccatgctgtctctgccccaagcccttaatgaagcaggagagggaagtctgtccagaacctcatctggttagacatttgcagcaggaatagggagggggtggaggcagagccactttggacatgggaaatcacagttgcagtagacagtgagctctagtcactccagaagcttgacataatttgcagggaagagtccaaagtggccatggcaacgtccccgccaccagccctcgtccaccatctcaatgtcagtgattacgtcgtccggatcaaaggaaagctcatcacttccctctccttggtaatcatatagagccacagctgagatccccagagccacagccccagccccagccccagccgggcagcctgatgatccagccagagcagaagaaaaagaagaatcttcaggctcgagcacctcctcatagtccccctctggttcatcctcctgctcatgcctgtccatctcctcaacgtcctcatagtcattcttaggctcgggctcaggctcgggctcaggctcaggctctgctttgtacactggctcttcctccacctggaggccttccag

SEQ ID NO: 125848 - DNA, 608 bp, Homo Sapiens
acacttaggaaaatgatctatattttttattcatgtcttaaccatgagctatattcaattactgtgcattctctagtctttaacatttaaatataccattttgaaatataaattagaaaataaaacatcatatagctattgcacttatacatttttaattttttcaaaagttttccgtaatgatcttttataccattttcctaatgaaataaaaaaatcagaaaacaaattctaattattttaatactcaaaaattgataactgagacagaatgtgcttatttatacaagtctgaaaagtgaaacacgtatcttaggtattcttgatgagacacttccaaagaatggattacgtgcacatctacaatattaaagcaacaaaatatctttcacctgatagtcaaactggttcactggccccactgcaaaattatcgggtggtccaccaaagttgtgattgttctggttaaatatatgcctgttgtcaggggcaaattccccactgtcctgactgttgctgtcttcagaaggaggaacaatgtccattgggcctggtgttggtggcatccatggctgatctggaggggggtgtgggggttgctgatgcat

SEQ ID NO: 125849 - DNA, 1605 bp, Homo Sapiens
  misc_feature (281)..(308): n is a, c, g, or t
  misc_feature (1000)..(1013): n is a, c, g, or t
tagatctcgttctatctctaatctttaccctagccctattgctctctattttaattctgcgagaatagcttctactcctgctacgtctagctttgattgttggagatctactcctactgtgtctctttttccttttaggagaagaagaccgagaagaagtacgactactacctgagctagaactgtatgaagagctagagacagtactactagtactactagttctgctattgctactggaactaccactactagaacttcccgacctactccttgcttgnnnnnnnnnnnnnnnnnnnnnnnnnnnnggttctaaaactgatgtggtttcatttggagttctcttcttttcattaaccacatcaccgtctgcttctcttgcttctagtagtgataaactattttgctctttatggataaattcattcatctcttttgtaaccctttctgtttgctgcttttcttcttccatctgtttatcatgtaatagctgctgttctttttcttttctccaaaaagcttcctgtttttgccggattcgatgccgtaattcttcatcatcagtgtcagatgactcagatcctctgtcactcctctcatcttcactgtctcctgatccataaccacccagtccaccgagtccagtgagggaagccagtgcactggactgtgccagctgttttgcaggagctttgtatcacatctttcgttgctttgcggtgtgcatctttggctacgtaataaatttcttcatctgtgacatccagcagaatttctgttagaagcatttttgtcagcaacatcatttgatactctttctcctcttcagtcatctcagggtcactgtgctcttcttgaggaactggggatggacttctggtgactttcccactacttgcagcctcaacattttcagtgtcttcttgttcctcatcactatcaaatttacttctctgaggtaaacgagggccatcccctccttcagcatcttctgtggccnnnnnnnnnnnnnnggacaattgtgaacgttgttgttccattctttctttctccaatttcttctgcttttcacgttccattttttcaagaccttcgcgaatccaagcgggaagagtcctgcgttttactgcgtctgtttcacgtgggaaaaatatacgcaagtcagttaagtaaaatatttctacaaacttgtgagtaaatttaaaaaatatcccattaaatatcatgcctttcttcaatgccatcacttttagtaacagcagggaccactgctctagtgcttacaatctgccaggacacaatgaaagcatgttaaaccatcatctaatttaatccttacaaaagccctcagagatcactactattactccacttttttccacaggtgaggaaactgagactcgaaaaaattaagtgatttgctagtaagttaaaaaaggagtaaagttagaatcttcctaaaatgtaaaaagtaaagatttattaacaaatgctcctgtccattaaatactgaacaatttagaactttccagatataaagtggcataaatatgtatttgtcacttgaaataggctggctctataatgttatttaaaaaattgaaa

SEQ ID NO: 125850 - DNA, 624 bp, Homo Sapiens
ggacaattgtgaacgttgttgttccattctttctttctgcgattttttctgcttttcacgttccattttttcaagaccttcgcgaatccaagcgggaagagtcctgcgttttactgcgtcaatttgtggaggctcctgcttcacaggaagtgcaataggtgaacgctgacgatccctgaatgatgatggcctttctcttcgattctggggaggtgctggaggtcctggaggtcctggttgccaataaggaggatgaaatccaccttgcggtggaccaaaagcagccccatgctgaaagagtattgcagtttattttttcttcaaattaatacaatatactctctgggacacacgtgtgttatgaactgggacagtagaaatccatgtgtgcagcacatccaagaattccatggctctaatatccaccgatacttctatggtcccaagaacctaggcttacttgtcttaagattttccggctatgtaaatgcaaagagggcttctaaaagccagctgataagctactttcaagaagtatatgaaatttttcattctgaatccatttacaagctaatcctaccaacactaagacatcaaatagatactaatttctctttaactaga

SEQ ID NO: 125851 - DNA, 984 bp, Homo Sapiens
ggacaattgtgaacgttgttgttccattctttctttctccaatttcttctgcttttcacgttccattttttcaagaccttcgcgaatccaagcgggaagagtcctgcgttttactgcgtcaatttgtggaggctcctgcttcacaggaagtgcaataggtgaacgctgacgatccctgaatgatgatggcctttctcttcgattctggggaggtgctggaggtcctggaggtcctggttgccaataaggaggatgaaatccaccttgcggtggaccaaaagcagccccatgctgatagtcaaactggttcactggccccactgcaaaattatcgggtggtccaccaaagttgtgattgttctggttaaatatatgcctgttgtcaggggcaaattccccactgtcctgactgttgctgtcttcagaaggaggaacaatgtccattgggcctggtgttggtggcatccatggctgatctggaggggggtgtgggggttgctgatgcattccccattctggttgccacattctgttgaagtttgaatccccttggaaattcccatgattgtttggaccagattccattgtagacatatcttgtccatttggcatcattcctggtggttgttctaccatgctttgctgtcctgaagcttctctttgggcaatccaagcttgggccaatgcagcccaatcaatctggcttggatcctgttggtgctggaatgactgcatccattgttgctggttcaagggccactgctgccaaggctgtcctccttgatcccacatcccttcttttaaaatatacttgattttctatctcagaggttcaccttctgtttaaaacttaggttgattcagactacagcttcgaagcatagcagcaagattatgtatgccccactctagttcgggaacacccttgtcgccgccgttccggtaacacctctccaacgctttcgatgcttctacttcttcccc

SEQ ID NO: 125852 - DNA, 677 bp, Homo Sapiens
  misc_feature (606)..(606): n is a, c, g, or t
tcttccaattctatttatttattttcacaaatcagaggttaatttcaagccttttactgaatactaatttgaaaatgtccatatgcttggcatcttctatcaacaacaaatcccagcggcctaggttctattgaaggcttgacacaagcaccttattagatctgtgatgtgtctctgcaaatcatattctatctttagacacagatgccacgattagcacctcatgagtgatgacaccacttaaaaagtaatcttctctgtgaacagcatcaaaacaagctgtcttgtaagtaaagtccgctccactgtgaatgatgttactcaccaatgtatataggacctacattttttaaagaaactcataaagaaataaagcacccgtacctctagtttttcactgaactcctcagtatagggaataaatcgactatctgtgtcccccttgtaaaaccaagtacagcgtctcacttcggctggctcctcttcccagtaggcagccttccttattcggtcatagaggtaaacatcgtagcgccctccatccgtgccaagaaccacgctctccggatctggctgaactgaattatagatttcttcaagattcanagagtcgaacacacttaaaggcatgcacagtgttggtgttctacctccttgcagtaaaaccagtggggctg

SEQ ID NO: 125853 - DNA, 716 bp, Homo Sapiens
taacacttaaaaagcaggctttattcaaatgcaaaattgcatgttacagggtaacctttcagtaagaagccaggaagaggagctcatcatgggttggattagtaaaggactagttataaaagaagtggtggggttgagggaggcctgagatgaaatttaaagaatatgtagaatctaggtaagtggataaaaggtctgggggcaggggaaaggagagcatttcattgtgaatcaaggaatttctccacctgttttaactcttccatatgacatcaaagagatgtcacttgcagctagcatttcagtgatgttttcttactaataatatcgtgataaaagaaacattgactataagaaataggaatgggtctcataaaaggaaacagcaaaacccccaaactaaaaaacagcgcaggctatttctctcttctctccttttgcttggcactcatgagatgctaggtgtggaagtcagccaactgaaaaagagaggtggctgaagaaggtggggaggctgaagccagttaaataggatggtccaattcacagacggcgaggctacagtgcaaataggactctttcaacttgagcaggaccccattacttcactggagttagaaagaaaggagagcgtagactttttgaactttctataagagtgtacctccacagtatacagaagacgacgtgaaatttgatctgcaagaaaactgagt

SEQ ID NO: 125854 - DNA, 889 bp, Homo Sapiens
  misc_feature (109)..(109): n is a, c, g, or t
  misc_feature (149)..(149): n is a, c, g, or t
  misc_feature (183)..(183): n is a, c, g, or t
catcccagaaagctctccagtggatgagcctgcccctcgcaaggggaaggctgacagccaggccctcggggaaatttctggatccccgattcccaatgggccaaattcnctggcactctcaaaggtagccaggatgcccgtctgtttcntatagcccccaaatcccaactcccaacagcgagnaccctttggaacgttgtgtatagtgatggcgaagatgagcagtgcgatcctcctccaagctgctgccgccgggctgtgccagattccctcgagaaggcacagggacagcaggaccctctggaaggccagtggctgccgccttctgttctctgatatgcctcaccattctcactcttgtctgaaagaagcccagctctacctatccggatggaaagttcactctcagggaagagcagcgcgggaccctcaggatcagacttcttcttcatcaacgtagagccgaagttcagtgccagggccgtctgggggtcttctgctgcacccaagtgaggcatcaggaggtcagccaagtagacaaaagccgctccaagggtgaagccaacagccacagggaagaaggcaaaggcaccgaagcccccagaggacgtggccatctcaactgctggggccagaagagaccaataggaagctgccaacatgacccctgcagcaaagccaagacttccatctaagatccgcctctgtccactagagaatacgaacacgagagctgccccagctgctgtcatcccccaggtgaagaaggtccccagcaaggcctggaacacagagctgtggccttggagcatgctggatacagtagggtgccctctccagcccccactgcacttccatcagcccccgctgccactctctcgccggctcc

SEQ ID NO: 125855 - DNA, 1219 bp, Homo Sapiens
  misc_feature (157)..(157): n is a, c, g, or t
aacattctagaatgggggagaggcttcagccagtgatggagccaggagggccggattgagaaggtgtgctgcccactctgccctgagtcactaggccacccaaaatgcttaggagacgtcttttggtagctcgcttctataggtgaccttgaggagnttgggaggcagatagaaggtcccgaagtggagatttccctgatctgaagttccttgataatcccactgaagagagagtccattcagtggccaaaacaaagaatctgtatttccatgacaccttaaaattccccattaaatcaatctccctcaaagcaaagtaaaaatggttctattataatcagagtcaatcaggataatgagatgaagaagagaggaaggaaaaaagttttaatgtgaagaaagaagcttgttgtcccactcgaagccaaccactgctgtttcttcgtatggcctttcccggggtccgaagcgtctcagccctagcccaggccaacgtccagtgacatcatcactacaaatcccaggatggaggcccaggatgccagtttcccattaccactgatctgggcttcggggatgatgtcgtccatgaccacgtagaccatggcaccggcagcaaaggccagagcgtagggcaggatgggctcaaccagcaccacggcaaaggcaccaaagaccccggccaggggctccaccatgccgctcagctgcccataccagaaagctctccaggtggagaagcctgcccctcgcaagggaaggctgacagccaggccctcggggaaattctggatcccgattccaatggccaaattcctggcactctcaaaggtagcagatgccgtcttttctatagccccaaatccaactccaacagcgagaccctctggaacgttgtgtatagtgatggccaagatgagcagtgcgatcctcctccagctgctgccgccgggctgtgccagattccctcgagaaggcacagggacagcaggaccctctggaaggccagtagctgccgccttctttctctgatatgcctcaccattctcactcttgtctatccggatggaaagttcactctcagggaagagcagcgcgggaccctcaggatcagacttcttcttcatcaacgtagagccgaagttcagtgccggggccgtctgggggtcttctgctgcacccaagtgaggcatcaggaggtcagccaagtagacaaaag

SEQ ID NO: 125856 - DNA, 1076 bp, Homo Sapiens
  misc_feature (286)..(320): n is a, c, g, or t
  misc_feature (957)..(957): n is a, c, g, or t
  misc_feature (968)..(968): n is a, c, g, or t
  misc_feature (1040)..(1040): n is a, c, g, or t
gttattaaaaggaatttaataattttaattaaaaactcttaacagcgaattctgtcacaggccttggcagctggaagcaactccagggacatgtgccccctttgggatgtggctgagccacagttttggacccaaggcccaccggtgccgcgtggcaaggggctacgtggaagttacctcagtacgatatcaaagatctgcgaagattttttttaaaaaagttttaaatatattagactctcttgattgccatttttacacaaagctgctgatacagtatacagannnnnnnnnnnnnnnnnnnnnnnnnnnnnnnnnnnaagtgttctctgtacaccagtggcttctggtctggtgaattattgcggagggctgggggtctgcagacttttcctgggtgtgcagagccaggccccgcacggtggcacttgcaatgcccatgggaagcaggccctctggccaacaagagagacctgttggggagagggctatagcttctggcacagggggtcacttttgcagagtcatccactgaccattggagcctttgctcttatgtgccctggggcaggggagaccatccccaagttacaaatagcaagagttaaatacagcttttctgggcatcttaaaaggagcacccttcttaaaagtaccccagtatcctgctctaggagagagagcaggtaggtgagagagctcaggatgggaaggtatctgacaccaacaaccacaatggtcttatgttattacaaagccagcaaaccggtggggcaggacaggggacacacccttgttagcttttctaagccccttggaaatggattaaacagtgcagagcagttttacttatgctgtatattgatggagaattctatcctgaagtctttagtagccctggggctagagtttattcagcttccccagctactttgcagaactcacagtctggtgatnaacgcactttncagtgtttggggatatgatggtgagcatgcacacctgcctcgtgcgatttctggctcgagggcaattcctanagggagcgataattcgtatccgtcaagctgtcctgg

SEQ ID NO: 125857 - DNA, 3216 bp, Homo Sapiens
  misc_feature (2841)..(2863): n is a, c, g, or t
tttttttctgctttcaggaaaggtttattgtggtgagtgccttctgtacagtcgactgcaaatgaaacgcagaggatgggtgcccagaagcacctgcggcagaggcgcacgggaagcccggggcccaggctcatgcaacacgacgctcaccgcggctcgggccgtggggccgtcagagaaacctttttaaaaaatggagatgaatgttacagaattggacaacccgaactgcttttcaaaaccagaggaaggaggttcttagccgttactcagataccagtgctggggaggttggcctgacttcagcaacagctgtgggtgggctggaggccggcgcagcttggggccccccgcgccagctgtctcagccaccacctgtgcggcgcttgctccgaggggtcagcaagagcaactgatggctgccacttccaggccccgagagacaggcctcacgtaactttactgcagccgaggtccaggccgtggagggggtcctagctccgctgcattctgcatcccaagtgggcacgtggaggaagggtctgaaggaaggctccggagcacaggccctggtgttcctgtgaggacgctggacctgcaggagcggggagctgcagtgccacctgctgggtaccacgggccgggcctggggtccacgcctttgggttgggtgtgtctgatgtcttgccaagcgcctggtcctgtcctcttgagctgcccttgcccagcactgcactctggaggtgggtggtgcaggcagtggagggacacaggccagctcaagcccgctggtggcagggcgttttcccaccgggatacgggaagccacctgtgtcagggctaggccctgggatcgggagttacactaccctgtcccaagccgagggggccggtggaatgatttgagcagctctgggagtggggaaaaaagacgactaatttccaaacccgtttgttctcagataaaaagcagttttataaacccgcaatctgctccagattcaagcagtaatatttcagcaggaggaggtggtcatgggaagccagcacagcagaggctccctgaccgggaggcctgcctgcttttcaggttgtttcccatgttcagcgtggactgcagaagtggctcacgctcctgtggtgagggcagggtgctccacagacacctccagacccagccaagaactacagggcggcgggctgcggtcagcacgtgtgctcgggacacagcggagtcagggccagagcccttccctccaggaactgatccttgggaaaacagccatgggccaggctgcagtctggttcccagtggggctgcctcagtcctacccccagcaccctcaaaagctggggtgtctgcatgtcccttcacataattgataatggtaccaccttctataataataatataaaataaaaacatctgatgtctgggttttttcatttccaaatttgtagactcccaggaaaagattttttgcggccttttaaaaatctggttcttggcagtttatccatctgtatcgatcctgtgggactgctttggtatccggagggcctcactgtccagcaccatcacctgatgcaggacgccccggaactgatagagcactttcaggttcttctcttcccccacacacgggtcataaaagccaggcagcccagccttggaggcctccgtgaggatgagcttcgagtccttcaccaggcactgcaggggcacagtcacgtcaatcaccttcaccttctcgctcttcctgctcttgtcattgacaaacttcccgtaccaggcattgacgatgatgaggcccattctggactcttctgcctcaatttattcttcggacagattcctgcatcagccggacagcggactccgcctcttgcttcttctgcagcacatcggtggcggcgctttccctctgcttctccaattccttctctttctgagccctgaggtatggtttgatgatcagacggtgcatggcaaagtagaccactagaggccccacggtggcatagaacatggcgctgggcagaagctggtccgtcaagtgaatagggaagaagtatgtctgactggccctgttgagcttgactttgagagaaacgccctgtggaactccaacgctgacagctgcacccaaaacgctgtgcctggagatcttcctctcagctccgtactccaccaccgtcccaaagaagcctgctttgagggatcctttcacacgagtctgatcgtcatcttggaatttgtgctgatagctgatcagtgcaaaggagtgagggattcccagctgcagggccacagtgaagtggctggttttagtgtctcggacgatgctagtgttcatggctgactggataccccatcgccactgcaggtagcccacggtgttcttgtctaggttccgagctaggacagtggtcaggccgggtcggattccacgggatgaaaactgcagagcacagtttgttgtcacaaagcatcttggtgtgagattacggaacagcttgagaccgaacaaaggcccctgtaggtctccagctccaaattccaactctccccatccctttgccgaagttactcgtctgagcgcaaagttaatggaacctcctccatttccattctgggttgagaggcttccagagaggatggctgtgtctgtcgctgtcaagggtgcctcaatggactgggatatgtgcattttattaatttcaatctgcggaaagctactgccggacacatcttcatactcctcatcatagcgatcaaaaaggtcggtggcatctactccaacgctgatcgttcccttgggattggttcgctgctgcaannnnnnnnnnnnnnnnnnnnnnngcagccgctcaaactcctctcgaatttcagcaggggttctcctcctttccacaacctcccatccttccatttccagtcctctcttcccatatatatcatagatggccctggtttgggggtcactaagcacttcataagcctggtgaacaaggttaaacagtcgttccgcctgtgacttgagctctgggtctctgtgcttgtctggatggtagagcatacagagcctccggtaggcagctttcagctcttcagaagaggcctccctgcgcacgttcagcaacgagtaatagtcttcattgtccagctcctcctcgctcaaggccgtcgccatcttcgcaacctttcaccccccc

SEQ ID NO: 125858 - DNA, 646 bp, Homo Sapiens
  misc_feature (206)..(228): n is a, c, g, or t
gcaacagccagctcgctttaattgaacaagtcatttgacttcagggttcactgagtttaggtaggacactccaccaggaagcccacaaagcatgaatgtcacagtccgaaccaaactgcagagcaccacagacgtccagagctagaaaacatcatttgaccaggagagccggtccgcatgtcttgggattggttcgctgctgcaannnnnnnnnnnnnnnnnnnnnnngcagccgctcaaactcctctcgaatttcagcaggggttctcctcctttccacaacctcccatccttccatttccagtcctctcttcccatatatatcatagatggccctggtttgggggtcactaagcacttcataagcctggtgaacaaggttaaacagtcgttccgcctgtgacttgagctctgggtctctgtgcttgtctgggatggtagagcatacagagcctccggtaggcagctttcagctcttcagaagaggcctccctgcgcacgttcagcaacgagtaatagtcttcattgtccagctcctcctcgctcaagtccgtcgccatcttcgcaacctttcaccccgccaacccctcgtccgaattcgccacccagcctcgctaccttaagaccgtgagagtacttgccgtcc

SEQ ID NO: 125859 - DNA, 772 bp, Homo Sapiens
  misc_feature (416)..(438): n is a, c, g, or t
  misc_feature (762)..(762): n is a, c, g, or t
caattagaacaaagtctggcgagtcatttccacggatgaaactatagactcaatttgttttcacaaaacttttggtttaagattcgaaacagctttaaacctacaaaaggcccctgaaggttccaagtacaaattccaactctccccatccctttgctgaaatactttgtctgagcgcaaagttaatggaacctcctccatttccattctgggttgagaggcttccagagaggatggctgtgtctgtcgctgtcaagggtgcctcaatggactgggatatgtgcattttattaatttcaatctgcggaaagctactgccggacacatcttcatactcctcatcatagcgatcaaaaaggtcggtggcatctactccaacgctgatcgttcccttgggattggttcgctgctgcaannnnnnnnnnnnnnnnnnnnnnngcagccgctcaaactcctctcgaatttcagcaggggttctcctcctttccacaacctcccatccttccatttccagtcctctcttcccatatatatcatagatggccctggtttgggggtcactaagcacttcataagcctggtgaacaaggttaaacagtcgttccgcctgtgacttgagctctgggtctctgtgcttgtctggatggtagagcatacagagcctccggtaggcagctttcagctcttcagaagaggcctccctgcgcacgttcagcaacgagcctcgtgccgaattcggcgcgccgtcgacttcatactctnataacacatg

SEQ ID NO: 125860 - DNA, 683 bp, Homo Sapiens
  misc_feature (293)..(305): n is a, c, g, or t
  misc_feature (384)..(417): n is a, c, g, or t
  misc_feature (566)..(574): n is a, c, g, or t
aattacaagctatttaaagagatgaatgtggccaaagttttacacaattgaaaataaagtaaaacagacggcatgtgtttaaacctgagtttatcaggcatggcaggaagttgcaggagagagaggcagtgacccaagccagtgcacttgatgttcatggacatatattttttttaaataataaattaaaacattttaaatagaagcataaattgagttgtttgttggcgctgagatactgcccactgtgaaacaaagctttgactagttttttgtttgtttactttcttcannnnnnnnnnnnncaagtttgggtaggaaagaaagcataaatgaacgtgaccctgaggtgaagaggtatatgaacagcctttgcaatgtacnnnnnnnnnnnnnnnnnnnnnnnnnnnnnnnnnntagagcaagtgaaaccaaaaatgatgttcttggtgtttttctataatgtagtcttgttagcttttttgttactgtaacaatgctgatctcgaactgtaccaaaatacatggagactaacaaacagaaccacatggaactttcaaactgnnnnnnnnntttgtcacaaaaactttgttgtcatagttaagttgattgtagatggtaattgaatatactcctttgaaaatatttcatcaagtatgtttcctgctcattgtgatacatt

SEQ ID NO: 125861 - DNA, 440 bp, Homo Sapiens
  misc_feature (50)..(62): n is a, c, g, or t
  misc_feature (141)..(174): n is a, c, g, or t
  misc_feature (323)..(331): n is a, c, g, or t
cactgtgaaacaaagctttgactagttttttgtttgtttactttcttcannnnnnnnnnnnncaagtttgggtaggaaagaaagcataaatgaacgtgaccctgaggtgaagaggtatatgaacagcctttgcaatgtacnnnnnnnnnnnnnnnnnnnnnnnnnnnnnnnnnntagagcaagtgaaaccaaaaatgatgttcttggtgtttttctataatgtagtcttgttagcttttttgttactgtaacaatgctgatctcgaactgtaccaaaatacatggagactaacaaacagaaccacatggaactttcaaactgnnnnnnnnntttgtcacaaaaactttgttgtcatagttaagttgattgtagatggtaattgaatatactcctttgaaaatatttcatcaagtatgtttcctgctcattgtgatacatt

SEQ ID NO: 125862 - DNA, 730 bp, Homo Sapiens
gaacaaaccaagtaaaaaaaaccatgaatcatttattctttggttgtctacacagacacttaagtactgtatcgctgttatgcagcggcctgtggaggcccctgggggtggctgggcctgtgtcctgagccctcagccagatccagggggtgcggtgtctggtcatgtccactccaagagcagtagcaccatgtagaaggctgtgagcagggtcccctcggctgagtggcagatgtaggctcactgctctgcagccccgaggggctggccagctcagagtgcagaagagttcctctccatgggtctagtcacccatccgtctgacctggacgctgtcatagctcatccttgggcttcgattcactgcctgagagagactcttgtgcaggttcgggggggccctgctgggcatccaggggctgctcctgggagaggtccatctcttctgggctgaagagcatcttcaccaggtcatctgcctgcaccctgtcccgctcgctgtgtcgagggtccagggtgaaccacagggcgatggcacagcgctgccccctggtgacagccttcactccatgtgggttttcagtgcctgaagagaatcccacggctcttccacactgaggctgcacctctgccgtcacggtcttggcatccagttcagtgaaataaaagtttccgccatcgaagtcccatttaggtaaaggatggcgctgtagtcgcgcctcgtgccgat

SEQ ID NO: 125863 - DNA, 655 bp, Homo Sapiens
ttttaaaaaaaaccatgaatcatttattctttggttgtctacacagacacttaagtactgtatcgctgtcatgcagcggcctgtggaggcccctgggggtggctgggcctgtgtcctgagccctcagccagatccagggggtgcggtgtctggtcatgtccactccaagagcagtagcaccatgtagaaggctgtgagcagggtcccctcggctgagtggcagatgtaggctcactgctctgcagccccgaggggctggccagctcagagtgcagaagagttcctctccatgggtctagtcacccatccgtctgacctggacgctgtcatagctcatccttgggcttcgattcactgcctgagagagactcttgtgcaggttcgggggggccctgctgggcatccaggggctgctcctgggagaggtccatctcttctgggctgaagagcatcttcaccaggtcatctgcctgcaccctgtcccgctcgagctgctctcacccgctcgctgtgtcgaggggtccagggtgaaccacatggcgatgggacagcgctgccccctgggtgacagccttcacttcatgtgggttttcagtgcctgaagagaacccacggctcttccacactgaggctgccctctgccgtcacggtcttg

SEQ ID NO: 125864 - DNA, 1760 bp, Homo Sapiens
tttaaaaaaaaccatgaatcatttattctttggttgtctacacagacacttaagtactgtatcgctgtcatgcagcggcctgtggaggcccctgggggtggctgggcctgtgtcctgagccctcagccagatccagggggtgcggtgtctggtcatgtccactccaagagcagtagcaccatgtagaaggctgtgagcagggtcccctcggctgagtggcagatgtaggctcactgctctgcagccccgaggggctggccagctcagagtgcagaagagttcctctccatgggtctagtcacccatccgtctgacctggacgctgtcatagctcatccttgggcttcgattcactgccatcgaagtccccatttaggtaaaggatggcgctgtagtcgcggaaggtgtaggctgggggctctttgacacacacgagggtctcggcattcaggatgcagttgtccacgtggactggatgactatcatccttcctctctgcctggacttcttcgatggcagtgcggcacaccagatgagagtaggaaaagtagaggggcgtatccaggcggaagtaggactccatgatgcgccgcaccttctccgtcacgttgtagtacaggtgggcactctgcagaggaactttgccttcttgccccagcttgagggctttgaagacagtgacaccatagaacttttcattgggagtatgtggggaggtctgaccccggtagccatctcctgaggttgctgccacattggtcagtctctgcagctcctgacactcgtggtcagagattacgccgtccatcaccacccgctgggaaccattcaggagtttggagttcatggtgagactgatgccttcatacagcagggggccaccttcccgggtcagtctgctcacatccagtgactccttggtcttctcttccacaagggtctcgatttccttcataaggttcccaatctcctgggagatgcgtacggctgtttcccgttctgacttctgtttctcttgcaatctcttgggaatcacttcttctggagtccatgaatccggatccacaaagggaattccaaaaacatcataagcgaagaaaagcagttctttttccagtaggcttcgctgtcggtactccttggcactctcacgggggccgatggatctggtgtgttcttctccaagcatagctgcataataggcccaaattttggttcaatcacctcgtcattggggaagaagagaagataggtcttggcacattcaacagcctgtgtataattcccaatgttatagtaggcaaactgcagataattataatgcgatgggaggaagtcttcaaagggcttctctcgacttgggtgggaagcaagctccgtgacacagttctgcttacagttgaggacctggatgtaatgatctgtgatggcctggaagaggtcagcgttgtactcaaggtagttgtagccatcgtagtcatagggcccttcgcagagggcacggcactcctcataggccacaaagtattcttgcagcgccgcctctaggtggggcacagcttcctgtggctgttcctctgagcacagtcgcactcccagtcgaaattcttgcatatggggttgagtctcaagatccttgaagtcggcctccttcactccagacatggtttggtaatagtctaggttctgctgcatttccatgtgctcaggattgcccacgaagaaggtgtgtgctgcatccacagctttctcaaaacttg

SEQ ID NO: 125865 - DNA, 549 bp, Homo Sapiens
ttttaacacttttataaactgcatttattgtacagagtactctgaagaaagaaaaaaatatgtacagccattcattttcattaacacatatattctgtcctgcaatactggagaggtggaatgtgtctggcacagaaataacccctaggagttataaattagaaaaacaacacttttaaaaaagatttttacttttctggtagaaatataaaaactgtggttcatggggaaaaacattaaaattaaaaagtccaatcaattatagaggtggctttaacacttaaagttttctccctcaaaccaacttgtcaacagcagtgtttaaaatctacatataaataaatgggcagcgctgcccagatagcagcacggtatgagcaactcacagtcacgctgcgcggtgttctcagtgcacaaataatgccccttcccggcatcccgcggtgggcacttacagaagggcatcacctggtgccacaccctgcaactcaacatccatcttctcacaacaccaccatttaaaggtaccaaaacaaactgtttgggttt

SEQ ID NO: 125866 - DNA, 1534 bp, Homo Sapiens
  misc_feature (252)..(283): n is a, c, g, or t
tttgtcataatacttttttttattacaatatccaaaaaactgggtatgcaagtttaggggatctcaagaccccttcttcaatcgtaggaatgtgccatctcaagacgttatatttaaactataaagaagttcaaatgtaaaggaaaaagaaaatgcaatttcttcataaacattctgtgtgtctcttactaccaatcacatactcttttgtaaaccctgaaaaatttccctgtaaataatatatatatatannnnnnnnnnnnnnnnnnnnnnnnnnnnnnnnataaagtgttggtagctcccttccccaaagatcagctgttttccttaatcatctgtattagtgtcaacaaacggctacagatacatatttctttgagaattaaatacataattgtgagattcaaacaagccgaagggcaagaggaaaaagcactatgtggatggcacatttggggtaaattaccaaaacatctgtctttctgagtcaccggttccctcttttgcagactgcctttccaggaaattctttctttattgcaagcacagccccaaaggcactgggcagtctcctcactgccatcgcacccggtggttccagtattgctatcagcaaacgtatcggctccctgcacagtccgggagccatgtaagggcacaggacatgggcgagggctgctaggactggggccatcgcacctgctctgcccaagcaccgctggagtgcccaggacacgggcgctgcccgctgggtggccttaaggccttcgctcctggcgcctcaacaggtgccctgcgtctttttaaagaggggttccatgaagcgggaacgagttgaatgcacgagcgccacttccgatggaaaaggaataatgtgaactcgccctgctcctcccctcctctaaagctggccggccgggtgggctcgagtgtgggtgtgaggcctggatggcataatgggagacgaaccgaccaagcgacctgaacataaagagagactcgcagagaagccgtcggggccgtccccgcgggaggagcctctgccacaaggccgggcgggcagctccaaccgtggggcccgggaggcgagtgtggggccggggcgccgtcactgcagggccctgacgaggtagagcttctccccgtgctcgctggtgaagatgggcgcctttttgtagtgttccaccagctcgtccatggtgtggaagcgccgctgcccaatgcagtagacattgtccacgagctgcaccttgaagtgtttgttcttccctgacgctttaagggacacggagaagtcgctgggcgaggactcgctgtccctaatgaggaagtcgccctccacgccccgctcgttgagggcgcactcggcctggtgccgcgtcacgttcccgtagtaccactctctgcccgcgaagcgcccgctggacgagggcccggtgtagcttatctgtggggcgtgcgcagggtgcagggcaggcccgtcactgaggaccaccacgcctcgtgccgaatttaacacccaggcctcgtacca

SEQ ID NO: 125867 - DNA, 1225 bp, Homo Sapiens
aaggcccggccgggcagcttccaccgtggggccccgggagggcgagtgtggggccggggccgcggtcactgcagggccctgacgaggtagagcttctcccccgtgctcgctggtgaagatgggcgcctttttgtagtgttccaccagctcgtccatggtgtggaagcgccgctgcccaatgcagtagacattgtccacgagctgcaccttgaagtgtttgttcttccctgacgctttaagggacacggagaagtcgctgggcgaggactcgctgtccctaatgaggaagtcgccctccacgccccgctcgttgagggcgcactcggacctggtgccgcgtcacgttccggtagtaccgctgtctgcccgcgaagcgcccgctggacgagggcccggtgtagcttatctgtggggcgtgcgcagggtgcagggcaggcccgtcactgaggaccaccacgtagtttttggggacgaggcccacctggccccgggcatttttgcatttccaccactcggggtcgttctccggcttctcaatcacctccatggtctcccccttctcgaagttgagctcctcctcggtgactgagctgaaggggtacagcgtctggaccacatgcagcacgcgggagccctggccattgctcagcgaggcgcccttgcgcaggctcaggaagcttgggggctccgcagccgcctcgtccacctcctccaagacgtagttggaggggaaccagccgatctgcccgttgtagctgccccgccaccaaccgtcgctgcacttctccatgacggtgacgcgcgaccccttcaccagggacaactcatcctcccgctcggccacataggcgaacttgacgaaggccgggatgttgaggtcgtagatgcggcctcgtgcgccgctgccattggcggggtactcggcgtccgtgctgggcgtgggggacgcatcccgcgcgctggtcttcctgcgctgtcttgccgagccctagtgtgtccttcaggttcttcaggagggagcccttcttcaggctgttcttccgctccacgtagttggacggtacatagcccgtcctgttggccgcgttcctcacccgccaccacgtcttggagtcgtccagcaaccacagccgctcgttcttcttgcgacgcgtggtcgacgatatcccgggaattccgaccggaccagcctgctttttgaacaactggttctatagtcactata

SEQ ID NO: 125868 - DNA, 473 bp, Homo Sapiens
  misc_feature (48)..(48): n is a, c, g, or t
  misc_feature (187)..(244): n is a, c, g, or t
ttggtaatttaccccaaatgtgccatccacatagtgctttttcctctntgccttcggcttgtttgaatctcacaattatgtatttaattctcaaagaaatatgtatctgtagccgtttgttgacactaatacagatgattaaggaaaacagctgatctttggggaagggagctaccaacactttatnnnnnnnnnnnnnnnnnnnnnnnnnnnnnnnnnnnnnnnnnnnnnnnnnnnnnnnnnnttacagggaaatttttcagggtttacaaaagagtatgtgattggtagtaagagacacacagaatgtttatgaagaaattgcattttctttttcctttacatttgaacttctttatagtttaaatataacgttttgagatggcacattcctacgattgaagaaggggttttgagatcccctaaacttgcatacccagttttttggatattgtaataaaaaaaagtattat

SEQ ID NO: 125869 - DNA, 1061 bp, Homo Sapiens
  misc_feature (945)..(945): n is a, c, g, or t
  misc_feature (1041)..(1041): n is a, c, g, or t
aaggacgtggaaagaatttaatttgatgattaaaaacatgcaacagttttgtgtcttagctctcctactaggattatcggcgccttgaaggaattctcattcatctttgtgttacctttggtctgggtcacaccaactggtatactgaatgcatattaacttagtatagtgcctggcatgtaagagattctcaacaatattctcaataaatattcgctgaatatgagataaattattaatagctactgaataaagaaagattatttaaaaccagagaggaaactccatatatgttctttaatccaaacagtttaattcaagcaatctggaatataaaaagcactttctgatattagaaggagatcagactcccaaaaaagatcagcattctttagtcaagcaaaacttggaagtttacaaacagctaaatcagaagcttgaaattcaggtcctctccagtacctgctacattatatgtaattccaaacatgacttcagagattaaagaagaaagggaagatgtttcccattcttttgtaccctatataaactaagggtaccctgccctaatcttttttccaacacttccccaaataacccttccttacaaagaaagaagtctaagagaactctctcatctaaatatatttaagtagaggcaagcctgaaaaaaacacaaaaacctaaatggtgttaggctgtggttcacctattctcatggcacctcaaattaatggcttgggtgttggtgtaggtaacgcttggcctgtatgttgaggtagtcactagataaaattctgggcacaacatccgtttagcaattgggcatacattctacagatttagccataacgttttgaagctgattattttacagatcaactaattaattcctctccctaactttacagatgagaaagctcagatgatttgcccatgggttantaaactacttccttacacagtggcagcatcagaactggaattcagatctcttgcctcctaggcagtgtttttcctattataatatggtgacttcgntaagcagggttaatacatcc

SEQ ID NO: 125870 - DNA, 1767 bp, Homo Sapiens
gaggcacacacttcattaaccctttattacaagtcacgctcttatagaagtatatgtggacttacgtgaaaaaatcaaatgtatccaagaataaaaaacacagcacataaagtagtatatgcattccagtgttcgcgccagagacggcgggcgcccaagtaaaagctcttctaaaacggcctgactggggcaggccgggtgcgaacggttccgggcctcaggcacagtgtgggggccgcctgcctcctccgcggcccggcgggcgggggcagcaccagctcctagggcctccgggccagcggcggaccccaggccggcccaagcccgacgccaggcagaaccctttgggcggggccgtatctggccctccggggacggcagtgacgacacccccagaaatgtgggcttcagggctggccacagggtaccctcagaagcccgcagcttagtcggcctttttcaggaagatctcgctcagaatcacccacacaggggagtccgtctggatcgagaggcgcagtgcttccagagggccgaaggctgggtccacctctccctctgccactcccttgtagaaggagccgatctggaggtagccgtcggggctccgagggtaccggagggtggcggtgcggccctcctgcagggcctccttgtctgactgagggttgtcgaagggcagcacctccacagacgtgttgaagagcttgtcctccgggtgctcgatgttcccactgcggaagaagaaccgctccagtcttagaggttggaagaagcggaagcggatgaagtcccccgcggcaggggtgaaggcccagaagaagtcctcgcgcaggtaggctttctccagggtgaagtgctggtatgtcttcaggctcgtgctcacctctgctggcgggttcacatgctccttccgcagcgcctgctttccaaagtctttgtccttcagtttctggatcttgccagccagcgaggagtgagtgcccacgtgctggaagagggacggtttgaagcggatccgcaggttggctttctgccggtcacagtgcttcgcatccttctcggggttgcagactttcacccacagaatatggtccaggagccagtcgatgggcttgtcccggtagaacatgagaatgaactctacaatcaggctcaggtccagcgacttgagcatcttgccaatgaagcccagctgggagcactccaggatcatccagtcctctgaaggctgctgcagtgcaaagttcttcatggtgctcaggtagttgggcttggccacgatgtcatcctccagctgcacgtagtagatgcctttggactgcgcgtacatcatgaggaagcagtaatcgaggttctgtttggtcctccacctgactctctccttggggtccccaaaggactctcggaggcgggagaagtcagggtagaagtggggggagggtgagatgactctccaggagcccagaatggatctccgtggggaacaaggccttgatgttctctgtcactgccggaagtgtcctgtgagtcagtctcggcgatcagcaccacgatgaccgagtcctccttctcctgcgggctcagctcggagatgagcgagtgcagagtgtcagtcaggtacgagtgcacctcgcgccgcacgctcgggatgcccatccccaccgacactccggtgcggccttggcccacgcgcaccgcgggctgcagactgctctccttggccctcgtgccgaattcgccacccaggcctcgctacctaggacc

SEQ ID NO: 125871 - DNA, 1040 bp, Homo Sapiens
  misc_feature (113)..(132): n is a, c, g, or t
  misc_feature (828)..(943): n is a, c, g, or t
agttttcccactgagaagtgtgatcccggggggggtcccccaaaaaggttctcttggaagggccgggagaaagccccggggggcaaaaaggtgggggagagggcgtaaaatannnnnnnnnnnnnnnnnnnnggaagggattccccgtggggggaacaaaggccccgggatgttttttctggccccgccgaaaagggtacccgggaatccagtctcggggggatcagcccccccggatggcccgagtcctcctttctcctgcggggtcagttcggagatgagcgagtccagagtttcagtcaggttacgagtgcacctggcgccgcacgctcgggatgcccatctcccacggacactcccgtgcgggccttggcccacgcgcaccgcgggctgcagactgctctccttggccagcaggtgtggcaggtgatggaagacggtgggcaggtgcagcacgtgccggtgtgagccgttccacggcttcaatcgggggtcctctgttaggcggccccaggtgcgattgccgtctccgtctcgcagcgcctgcctttctgacacggccctcttgatctcgtccagcaccaggttgagctccttggagcgcttgaggctctcctgctcagctgcgtgcaaccgatcgcgcagcgccaggaactcccgctggtaaacgtccacaacgtcgcctttctggccgctgagtgccgcgtaccaggacagcgagaggaaggcgcacaggcagaagagcagcagcgtcaggaaggtgccattgcggagcctcatctcctcgggtgcgcggcgggcgcccgcggggccgaggctgcatggccnnnnnnnnnnnnnnnnnnnnnnnnnnnnnnnnnnnnnnnnnnnnnnnnnnnnnnnnnnnnnnnnnnnnnnnnnnnnnnnnnnnnnnnnnnnnnnnnnnnnnnnnnnnnnnnnnnnnagcgcgccggccgcccctcagggcgcaagctttgtgccctgtactcagggaagaggaacaggctcagaagggcagaggcaggtatcaggctcactgc

SEQ ID NO: 125872 - DNA, 1792 bp, Homo Sapiens
  misc_feature (58)..(75): n is a, c, g, or t
tcgcacaagtttgtgggggggtcccggcccttgctcttcctttccggcgggacccccnnnnnnnnnnnnnnnnnnaagccccccaggctccctaaggggccttccggggcccaggcgggggggcccccagggccgggtccccaagcccgaccgccagggcagaacccctttggggcgggggccgtatctggcccctccgggggacgggcagtgacgacaccccccagaaatgtgggcttcagggctggccacagggtacccttcagaagccccgcagcttagtcggcttttttcaggaagatctcgctcagaatcacccacacaggggagtccgtctggatcgagaggcgcagtgcttccagagggccgaaggctgggtccacctctccctttgccactcccttgtagaaggagccgatctggaggtagccgtcggggctccgagggtaccggagggtggcggtgcggccctcctgcagggcctccttgtctgactgagggttgtcgaagggcagcacctccacagacgtgttgaagagcttgtcctccgggtgctcgatgttcccactgcggaagaagaaccgctccagtcttagaggttggaagaagcggaagcggatgaagtcccccgcggcaggggtgaaggcccagaagaagtcctcgcgcaggtaggctttctccagggtgaagtgctggtatgtcttcaggctcgtgctcacctctgctggcgggttcacatgctccttccgcagcgcctgctttccaaagtctttgtccttcagtttctggatcttgccagccagcgaggagtgagtgcccacgtgctggaagagggacggtttgaagcggatccgcaggttggctttctgccggtcacagtgcttcgcatccttctcggggttgcagactttcacccacagaatatggtccaggagccagtcgatgggcttgtcccggtagaacatgagaatgaactctacaatcaggctcaggtccagcgacttgaacatcttaccaatgaagcccagctgggagaactccaggatcatccagtcctctgaaggctgctgcagtgcaaagttcttcatggtgctcaggtagttgggcttggccacgatgtcatcctccagctgcacgtagtagatgcctttggactgcgcgtacatcatgaggaagcagtaatcgaggttctgtttggtcctccacctgactctctccttggggtccccaaaggactctcggaggcgggagaagtcagggtagaagtggggggagggtgagatgacctccaggagcccagaatggatctccgtggggaacaaggccttgatgttctctgtcactgccgaagtgtactgtgagtcagtctcggcgatcagcaccacgatgaccgagtcctccttctcctgcgggctcagctcggagatgagcgagtgcagagtgtcagtcaggtacgagtgcacctcgcgccgcacgctcgggatgcccatcaccaccgacactccggtgcggccctggcccacgcgcaccgcgggctgcagactgctctccttggccagcaggtgtggcaggtgatggaagacggtgggcaggtgcagcacgtgccggtgtgagccgttccacggcttcaatcgggggtcctctgttaggcggccccaggtgcgattgccgtctccgtctcgcagcgcctgcctttctgacacggccctcttgatctcgtccagcaccaggttgagctccttggagcgcttgagcctcgtgccgaattcgccacccaggcctcgctaccttg

SEQ ID NO: 125873 - DNA, 1201 bp, Homo Sapiens
accagtgtctccgctgtgccccaagcgcctcggatcctcctcagggccaagaagccctttttggggcggggggccggtattctgggccccttccgggggatcgggccagttgacggacacccccccggaaaatgtgggttttcaggggcttggccacaggggtaccctcagaaggcccgcaggcttagtcggcctttttcaggaagatctcgctcagaatcacccacacaggggagtccgtctggatcgagaggcgcagtgcttccagagggccgaaggctgggtccacctctccctctgccactcccttgtagaaggagccgatctggaggtagccgtcggggctccgagggtaccggagggtggcggtgcggccctcctgcagggcctccttgtctgactgagggttgtcgaagggcagcacctccacagacgtgttgaagagcttgtcctccgggtgctcgatgttcccactgcggaagaagaaccgctccagtcttagaggttggaagaagcggaagcggatgaagtcccccgcggcaggggtgaaggcccagaagaagtcctcgcgcaggtaggctttctccagggtgaagtgctggtatgtcttcaggctcgtgctcacctctgctggcgggttcacatgctccttccgcagcgcctgctttccaaagtctttgtccttcagtttctggatcttgccagccagcgaggagtgagtgcccacgtgctggaagagggacggtttgaagcggatccgcaggttggctttctgccggtcacagtgcttcgcatccttctcggggttgcagactttcacccacagaatatggtccaggagccagtcgatgggcttgtcccggtagaacatgagaatgaactctacaatcaggctcaggtccagcgacttgaacatcttaccaatgaagcccagctgggagaactccaggatcatccagtcctctgaaggctgctgcagtgcaaagttcttcatggtgctcaggtagttgggcttggccacgatgtcatcctccagctgcacgtagtagatgcctttggactgcgcgtacatcatgaggaagcagtaatcgaggttctgtttggtcctccacctgactctctccttggggtccccaaaggactctcggaggcgggagaagtcagcctcgtgcggaattcgccacccaggcctcgctacctt

SEQ ID NO: 125874 - DNA, 975 bp, Homo Sapiens
tccagttttctggatcttgcccagcccagggaaggaagtgaggtgcccacgtgctggaaaaggggacggttttgaagcggattccgcagggttggctttctgccggtcaccagtgcttcgcatccttcttgggggttgcagactttcaccccacagaattatggtccaggagcccagtcgatgggcttgtccccggtagaacatgagaatgaactctacaatcaggctcaggtccagcgacttgaacatcttaccaatgaagcccagctgggagaactccaggatcatccagtcctctgaaggctgctgcagtgcaaagttcttcatggtgctcaggtagttgggcttggccacgatgtcatcctccagctgcacgtagtagatgcctttggactgcgcgtacatcatgaggaagcagtaatcgaggttctgtttggtcctccacctgactctctccttggggtccccaaaggactctcggaggcgggagaagtcagggtagaagtggggggagggtgagatgacctccaggagcccagaatggatctccgtggggaacaaggccttgatgttctctgtcactgccgaagtgtactgtgagtcagtctcggcgatcagcaccacgatgaccgagtcctccttctcctgcgggctcagctcggagatgagcgagtgcagagtgtcagtcaggtacgagtgcacctcgcgccgcacgctcgggatgcccatcaccaccgacactccggtgcggccctggcccacgcgcaccgcgggctgcagactgctctccttggccagcaggtgtggcaggtgatggaagacggtgggcaggtgcagcacgtgccggtgtgagccgttccacggcttcaatcgggggtcctctgttaggcggccccaggtgcgattgccgtctccgtctcgcagcgcctgcctttctgcctcgtgccgaattcgccacccaggcctcgctacctt

SEQ ID NO: 125875 - DNA, 979 bp, Homo Sapiens
  misc_feature (205)..(205): n is a, c, g, or t
gagcggtttgaaagcgggattccccagggttggctttttttgccggggccccaggggtttggccatcctttttcggggttggcagacttttccccccaccagaaatatgggtcccaggagccccagttcgatggggctttgtccccggttggaaccatgagaaatgaacttcttccattcaggctccagttccaggggacttganacatcttacccaatgaagccccagctgggagaactccagggatccatccagtcctctgaaggctgctgcagtgcaaagttcttcatggtgctcaggtagttgggcttggccacgatgtcatcctccagctgcacgtagtagatgcctttggactgcgcgtacatcatgaggaagcagtaatcgaggttctgtttggtcctccacctgactctctccttggggtccccaaaggactctcggaggcgggagaagtcagggtagaagtggggggagggtgagatgacctccaggagcccagaatggatctccgtggggaacaaggccttgatgttctctgtcactgccgaagtgtactgtgagtcagtctcggcgatcagcaccacgatgaccgagtcctccttctcctgcgggctcagctcggagatgagcgagtgcagagtgtcagtcaggtacgagtgcacctcgcgccgcacgctcgggatgcccatcaccaccgacactccggtgcggccctggcccacgcgcaccgcgggctgcagactgctctccttggccagcaggtgtggcaggtgatggaagacggtgggcaggtgcagcacgtgccggtgtgagccgttccacggcttcaatcgggggtcctctgttaggcggccccaggtgcgattgccgtctccgtctcgcagcgcctgcctttctgacacggccctcttgatctcgtccagcaccaggttagctcctggagcgctgagcctcgtccgaattgccacccaggcc

SEQ ID NO: 125876 - DNA, 1332 bp, Homo Sapiens
  misc_feature (1112)..(1227): n is a, c, g, or t
atatctttttgctcccccccacaattttgtgtgtcgggtaccccccttggaacgggctttgttacccgggtaagccccgggggaaaggaactttttccaatccgggcgtccgggtccaggcgactttgagcctttttttacccaatgaagcccaagtctgggaggacccccgaggatccatcccggtccttctgaagggttgctgccgtgcaaaagttttttcatggtgctccaggtagttgggcttggcccacgatgtcatcctccagttgcacgtagtagatgccttgggactgcgcgtacatcatgaggaagcagtaatcgaggttcttttgggtcctccacctgactctctccttggggtccccaaaggactctcggaggcgggagaagtcagggtagaagtggggggagggtgagatgacctccaggagcccagaatggatctccgtggggaacaaggccttgatgttctctgtcactgccgaagtgtactgtgagtcagtctcggcgatcagcaccacgatgaccgagtcctccttctcctgcgggctcagctcggagatgagcgagtgcagagtgtcagtcaggtacgagtgcacctcgcgccgcacgctcgggatgcccatcaccaccgacactccggtgcggccctggcccacgcgcaccgcgggctgcagactgctctccttggccagcaggtgtggcaggtgatggaagacggtgggcaggtgcagcacgtgccggtgtgagccgttccacggcttcaatcgggggtcctctgttaggcggccccaggtgcgattgccgtctccgtctcgcagcgcctgcctttctgacacggccctcttgatctcgtccagcaccaggttgagctccttggagcgcttgaggctctcctgctcagctgcgtgcaaccgatcgcgcagcgccaggaactcccgctggtaaacgtccacaacgtcgcctttctggccgctgagtgccgcgtaccaggacagcgagaggaaggcgcacaggcagaagagcagcagcgtcaggaaggtgccattgcggagcctcatctcctcgggtgcgcggcgggcgcccgcggggccgaggctgcatggccnnnnnnnnnnnnnnnnnnnnnnnnnnnnnnnnnnnnnnnnnnnnnnnnnnnnnnnnnnnnnnnnnnnnnnnnnnnnnnnnnnnnnnnnnnnnnnnnnnnnnnnnnnnnnnnnnnnnagcgcgccggccgcccctcagggcgcaagctttgtgccctgtactcagggaagaggaacaggctcagaagggcagaggcaggtatcaggctcactgcagagatca

SEQ ID NO: 125877 - DNA, 718 bp, Homo Sapiens
cacggccatttgctcttttcctagactagctatggctgggcctggtcaagctttgggaggctgaggctgtggagttccaaccctcaaccttggaagagctgtcttggaggcaggcaggtccagagccccacgtgccatgggacctaaaccgagagcaagcctgggcctgggcactggagaacttccctgtgctgagccgccactcctgccaatgccatcagctctacgggagcactgctgcgagctggctgctgcactgcacctctactgggcacggagcccttcccggatatgagaggggccaaaaatggcctcgacacttccatgtccagaagtcaatggctgaaaccatagacgggctccagtcacctcaagaagacgcagatgctaccgatggtgaggtccaaagcggcctgaagcagcctggagatgccagcgcctgcggaggtggaagtacacacgcccagggcgccttctgcagtccaggcggcctccggaagctgctgaaaaccctttctcaagccccatgttgcacgccaaactgttgtaggactttctccttagttcagctaaaagccaggttcttgtgcagcggccatgagagattaatctcgcagacaccgaggagatgaggctccgcaatggcaccttcctgacgctgctgctcttctgcctgtgcgccttcctctcgctgtcctggtacgcggcactcagcggc

SEQ ID NO: 125878 - DNA, 985 bp, Homo Sapiens
  misc_feature (87)..(121): n is a, c, g, or t
  misc_feature (501)..(535): n is a, c, g, or t
aaagctgtatagactcatataggggtcaagcgctggtagcagcagaacgaacgagcgcagcggaagtagtgagcgaggaagcggcgnnnnnnnnnnnnnnnnnnnnnnnnnnnnnnnnnnncagtcgacggtaccggacatatgcccgggaattcggccattacggccgggggaaacgcgaatgaggcgcccagacggtctgtctgaggctctgagcgtacatagggaagggaggaagggaaaccagaaagcagacaaagaaaaaagagctagcccaaaatcccaaactcaaaccaaaccaaacagaaagcagtggaggtgggggttgctgttgattgaagatgtatataatatctccggtttataaaacctatttataacactttttacatatatgtacatagtattgtttgctttttatgttgaccatcagcctcgtgttgagccttaaagaagtagctaaggaactttacatcctaacagtataatccagctcagtannnnnnnnnnnnnnnnnnnnnnnnnnnnnnnnnnnacccagaaataagataactccatctcgccccttccctttcatctgaaagaagatacctccctcccagtccacctcatttagaaaaccaaagtgtgggtagaaaccccaaatgtccaaaagcccttttctggtgggtgacccagtgcatccaacagaaacagccgctgcccgaaccttgtgtgaagctttacgcgcacacgggacaaaatgcccaaattggaggcccttgcaaaaacacgggcttgtggcattggcatacttgcccttacaggtggagtatcttcgtcacacatctaaatgagaaatcagtgacaacaagtctttgaaatggtgctattggatttaccattccttattatcacttaatcatctaaaaaatcattggaaatccaattaacaattttaccaacataagatatgaatggggaactgaatatatctgggtattta

SEQ ID NO: 125879 - DNA, 1485 bp, Homo Sapiens
gttctgtgccccgaaaagggggagcctattccctattatcccctcgtgccaggcggtttccctttgtatcccagtattcggtccccatcaattaagtgaagagtgtgaatggggattccagggacgttgtttaagatgattagtgataataaaggaatggtaaatccataaccaccatgtcgaagactggttgtcactgatttctcatatagcatgtgtgacggaagatacctcccaccctgtaagggccaagtatgcccaatgccaccaaacccgttgttttttgcgagggctccaatttgggcatttgtccgtgtgcgcgtaaagcttcacacagaggttcggcacgctgtttctgttggatgcactgggtcacccaccagaaaagggcttttggacatttggggtttctacccacactttggttttctaaatgaggtggactgggagggaggtatcttctttcagatgaaagggaaggggcgagatggagttatcttatttctgggtaaaacaacaaccacaaacaaccaaaatactgagctggattatactgttaggatgtaaagttcccttagctacttctttaaggctcaacacgaggctgatggtcaacataaaaagcaaacaatactatgtacatatatgtaaaaagtgttataaataggttttataaaccggagatattatatacatcttcaatcaacagcaacccccacctccactgctttctgtttggtttggtttgagtttgggattttgggctagctcttttttctttgtctgctttctggtttcccttcctcccttccctatgtacgctcagagcctcagacagaccgtctgggcgcctcattcgcgtttccgcaagatcacatagatgacaccgctgagaagggccagggggaaggccacccaggccaggatgtaggcgaaaccgtaggagtaatccgagttgagatgccactccgggtgcctcaccgtgtagatggccgcagcactcatcacgcacagaccagcaagaatttggaagattccagtgatgtaaaacctgccccccttggtgagggtgaagagttggcagaagaacaggaacagagacagaatgctgaagatgatcgacaggatcatggtggcctggacagactgcagccattcgtttggtgatgatgagaaacagtggtggacatttcctgaggaagaggtgctacagttctgccagagatcagttgcgtgtccattgcccacgatccattggctgacgatcgtggagacgaacagcagcaccagcaccgcgacgtggaggacgatgatactcagcaacaggaggagcattctggcggcaagttctgctcagcggagtttctgcagcccaaaggaacagctgtcccgatcctcagggtggcctcaaacacaaactcgggtgcgttggctccgctgctggcgccgccaaagctgcgctgcggggctgcgcgcgcgcgaagc

SEQ ID NO: 125880 - DNA, 906 bp, Homo Sapiens
  misc_feature (796)..(830): n is a, c, g, or t
gttttttttgaggttctggatgtttattttaatgcatcttagtccacacagttggtataaaatcagaaaatgcaaagcaaaaacaaaaggtctggagtcttagcatcagaagggcaccatatatacatctacagttggtggccaatacaagtcattgccagacagtccttggaggcacagaacagcctagacccagccaagctctaggaactcacggtcccaaggagtctagacgcttgttctgatgctccgaccgtaagaaaaatgtgggagtgatgaaggctttatgatttactcattatagtaataatagcagcctagctaggtacaaaagcagttataaaccatttatattacacagaattattcaggtctccattctatcttatgttgtaaaattgttaattggatttccagtgagttgtttagatgattagtgataataaggaatggtaaatccatagcaccatttcaaagacttgttgtcactgatttctcatttagatgtgtgacgaagatactccacctgtaagggcaagtatgccaatgccacaagccgtgtttttgcaagggctccagtttgggcattttgtccgtgtgcgcgtaaagcttcacacagaggttcgggcagcggctgtttctgttggatgcactgggtcacccaccagaaaagggcttttggacatttggggtttctacccacactttggttttctaaatgaggtggactgggagggaggtatcttctttcagatgaaagggaaggggcgagatggagttatcttatttctgggtnnnnnnnnnnnnnnnnnnnnnnnnnnnnnnnnnnntactgagctggattatactgttaggatgtaaagttccttagctacttctttaaggctcaacacgaggctgatggtc

SEQ ID NO: 125881 - DNA, 509 bp, Homo Sapiens
gatgctccaatggctttattaactccctctttccgttgtggcaggacctcattagctgcagagctggaagggaggccaagaagctgtggtctcagtacgggtcattaaaggggtacagaggatgccctgcatcccttgggactctcttcccatccaccgtaagcataggcacaatatatctccaatttttgttcagggcatttagctgcttcatctcttctgggctaaaggtgaagtcaaacaccttgatgttctgaaggattcgagaaggagtgatacttttggggatgcagatcactttccgctggacctgccacctgagcaagatctgagctggagatcggccatacttttcagccaatgccaggactactggttcctccagcaggacaggctcactcttccaggtacccagaccaatcagaggcatcttctgcccagtgtgcagtagaacacaggaagccgccattgcccccttggcacaagcacagagcgtgaatagggtactg

SEQ ID NO: 125882 - DNA, 1101 bp, Homo Sapiens
  misc_feature (343)..(386): n is a, c, g, or t
ggtccggaattcccgggatgcctcattgtgcccaggagttctccaacccgcgctgcggagtgagtgaccaagttccggccagttcgacctcgaggatccagaggtggagacggtactacctcccagctctgttttccatccccttcaggtccttcctcgggaggcggcgaaggcggtccaccctgcgcgtgatcctttatgcccggcccctgcccctccctccgggtggaacttccccctcaccgccagacttaagctgaggatcgttggatctctggcggggtgcagaactgagcccaggccacagtaccctattcacgctctgtgcttgtgccaaggtttnnnnnnnnnnnnnnnnnnnnnnnnnnnnnnnnnnnnnnnnnnnntgtatgagccactgcacctggaaaggagccagaaatgtgaagtgctagctgaaggatgagcagcagctagccaggcaaagggggcaatggcggcttcctgtgttctactgcacactgggcagaagatgcctctgattggtctgggtacctggaagagtgagcctggtcaggtaaaagcagctgttaagtatgcccttagcgtaggctaccgccacattgattgtgctgctatctacggcaatgagcctgagattggggaggccctgaaggaggacgtgggaccaggcaaggcggtgcctcgggaggagctgtttgtgacatccaagctgtggaacaccaagcaccaccccgaggatgtggagcctgccctccggaagactctggctgacctccagctggagtatctggacctgtacctgatgcactggccttatgcctttgagcggggagacaaccccttccccaagaatgctgatgggactatatggctacgactccaccccactacaaggagacttggaaggctctggaggcactggtggctaaggggctggtgcaggcgctgggcctgtccaacttcaacagtcggcagattgatgacatactcagtgtggcctccgtgcgtccagctgtcttgcaggtggaatgccacccatacttggctcaaaatgagctaattgcccactgccaagcacgtggcctggaggtaactgct

SEQ ID NO: 125883 - DNA, 1729 bp, Homo Sapiens
  misc_feature (148)..(148): n is a, c, g, or t
  misc_feature (150)..(150): n is a, c, g, or t
  misc_feature (152)..(152): n is a, c, g, or t
  misc_feature (156)..(156): n is a, c, g, or t
  misc_feature (160)..(161): n is a, c, g, or t
  misc_feature (166)..(166): n is a, c, g, or t
  misc_feature (169)..(171): n is a, c, g, or t
  misc_feature (173)..(174): n is a, c, g, or t
  misc_feature (178)..(178): n is a, c, g, or t
  misc_feature (180)..(181): n is a, c, g, or t
  misc_feature (183)..(195): n is a, c, g, or t
  misc_feature (1696)..(1696): n is a, c, g, or t
agccctttaggttcagtggcccagggatttccctttgggaaaacccggttatggccccaggtttccctttaccttaaggggggcccgcgggccaaaacgaatggttttagaaaactttctcggagggcccgaggcggccgaccatgtntntntttncttnnttttnttnnntnnaaancnntnnnnnnnnnnnnntttttttttggatgctccaatggctttattaactccctctttccgttgtggcaggacctcattagctgcagagctggaagggaggccaagaagctgtggtctcagtacgggtcattaaaggggtacagaggatgccctgcatcccttgggactctcttcccatccaccgtaagcataggcacaatatatctccaatttttgttcagggcatttagctgcttcatctcttctgggctaaaggtgaagtcaaacaccttgatgttctgaaggattcgagaaggagtgatacttttggggatgcagatcactttccgctggacctgccacctgagcaagatctgagctggagatcggccatacttttcagccaatgccaggactactggttcctccagcaggacaggctcatcaggatcacgccatgcacgatcagaggagcccaaagggctataagcagttacctccaggccacgtgcttggcagtgggcaattagctcattttgagccaagtatgggtggcattccacctgcaagacagctggacgcacggaggccacactgagtatgtcatcaatctgccgactgttgaagttggacaggcccagcgcctgcaccagccccttagccaccagtgcctccagagccttccaagtctccttgtagtgggtggagtcgtagcatatagtcccatcagcattcttggggaaggggttgtctccccgctcaaaggcataaggccagtgcatcaggtacaggtccagatactccagctggaggtcagccagagtcttccggagggcaggctccacatcctcggggtggtgcttggtgttccacagcttggatgtcacaaacagctcctcccgaggcaccgccttgcctggtcccacgtcctccttcagggcctccccaatctcaggctcattgccgtagatagcagcacaatcaatgtggcggtagcctacgctaagggcatacttaacagctgcttttacctgaccaggctcactcttccaggtacccagaccaatcagaggcatcttctgcccagtgtgcagtagaacacaggaagccgccattgcccccttggcacaagcacagagcgtgaatagggtactgtggcctgggctcagttctgcaccccgccagagatccaacgatcctcagcttaagtctggcggtgagggggaagttccacccggagggaggggcaggggccgggcataaaggatcacgcgcagggtggaccgccttcgccgcctcccgaggaaggacctgaaggggatggaaaacagagctgggaggtagtaccgtctccacctctggatcctcgaggtcgaactggccggaacttggtcactcactccgcagcgcgggtttggagaactcctgggcacaatgaggcagtggcgctgccacgtgcggacgcgtggtcgacgtatcccgggaatccgaccgtacagcctggcttttttgttttataaacacccagcgtgggggntctatttatgtgtcatctaattttgtctgtcgc

SEQ ID NO: 125884 - DNA, 1568 bp, Homo Sapiens
tttttttcacatcaacttaattttacaagtttattatagctcatacctgggaccgattaaggtgtcaacattttaaaattactcaagatattaaccagaaaagatgattatggcctttaaaactattggacaaactgatgctatttaacattgttcacagccatttaatttgaataacaaattttagattctaagtaggccataacttctttgcaaaacaattgatttataaaggtacagtttcagaaggtaacagcatgagactagtcttcctataggcacattttagtagactgctcttctcatccctggtcaaggagcttctctaactgatggttgatatttcgcagatggctttcggctcccagaagtgttcttgctttaaataacagagctggaaggctggatgaatcatacgtttcctttacgtttggttcttgagcttgaacatctgaataatcttgataaagctgttttaaattagataagaaatatgctgcattcctaagggaagactttctctctttaagttcatcatattttgtttgtagttgtttcagctgtggctctaaccgaagcagttcatcctggacttcaatcatacgctgccttttcttttcgatatctgaaatcatcttagcattcttccttttcagatttgtcaacatctggctttctttaagcattttgatgaattgttctttaacattaacataaaatgtggcgatggctgccttacaaactttagattctattctttgttgatgctctaggtgggttttctcaaattcaggcaaaacaatattcaactccttgatgtcactggttttcattccttctggacaccaaatgtgcacaatgtcagaagtatctgagcctatggctttacttcttgatttcttccttttgtcatgagatatcttccctttgtttctgagttttcgattgactttctattgccaagttctctttttcaacagagggctgggccactaaggggtcctgtctttttagaagtgacagactcagctggtttctctgaaagttctgaagacgctgtggttcgaataacctcatgacgttgtgtacttattttctctgctgatttaacttttctccttgtatcactttcttcaatgctttcagagtcatcactaatgggcctgagctttcttcctggcttttttgcactaatttttacagattcgatttcacttgcttcatttccagaagtgtctgaacttctttttgcttcttttcctggaggagttgaagagagagacagtccacaatgtttggagaattcttcttcatcagcatatatagctgtgctatgtaaaggaggatcaaaggtctcataagtttcttcatctttctcattttcacccagcctgccaatgcttgagacatcagaattatcaggaaagtcgaacacgtcaataggcttgcacttttgaccagctttatctttcatggaatgtgttctttctaaagtgttctttgaacgtcttgcgctctcagacctgtgaggccgggccgccgccgcccccgcggggccatggtgccgc

SEQ ID NO: 125885 - DNA, 1515 bp, Homo Sapiens
  misc_feature (1167)..(1167): n is a, c, g, or t
  misc_feature (1243)..(1243): n is a, c, g, or t
  misc_feature (1246)..(1247): n is a, c, g, or t
  misc_feature (1256)..(1257): n is a, c, g, or t
  misc_feature (1271)..(1272): n is a, c, g, or t
  misc_feature (1330)..(1331): n is a, c, g, or t
  misc_feature (1384)..(1384): n is a, c, g, or t
  misc_feature (1409)..(1409): n is a, c, g, or t
  misc_feature (1431)..(1431): n is a, c, g, or t
  misc_feature (1433)..(1433): n is a, c, g, or t
agaaagaaagagtagtcacgtgctcccagaaggactctaagtcaagtcacagagctaaaaatacatgaaggtggcaccagctcatggggcactgggcctggctctgcagaggcctctgccttccttcactgtgcaccttgggctcatgcaccaaggcagagaacaggaagaagtgaggggacaagaagaaggcagaatgtccagatggaggataagaccaaagagccagcacctacaggacttgggctgcttcaggctgaacgctgggagaccacttcctgtgctgacacacagagctcccatctccatgaagaccgcacagcgcgtgtaagccagcccagctgacctaaagcgacatgagactactagaaagaaacgacacccttccccaagcccccacagctactccaacccaaacaacaaccaagccagtttaatggtaggaatttgtattttttgcctttgttcagaatacatgacattggtaaatatgccacatgcctttggtggaagtacaactgttgttattactctatacaagtatgagatcagggttaggaaaaaaagacaaagaggtgatgacagacacacagtggaaaccccacatcgtctcatggcaaaccgaagaacgggatgtgggaagctcagcttcatttgactgcaaagtcccagggttttgttgcacatttgctcatgcacatgggtggtgggaggaaagggggatagcagagacacacagaagagggtacagggtgggtgagaaagaaagtagaagggctaatacccccaaagaacaaggccaactacacctggtgagcctcagagggacagaaacccaggaatgattcctgtgatagggctgggagagccaagaggacggattcgctccaggcttgggacacatcgaggacagtggtggttcttctccagcggtgaccccctgcattaggcaaggaggagcccagaggagagtggagaccttcgaggggggccgttgggagggtactgactgctttcttccagctcttcagtcccgcccttgggcaggacgaagggaatgtgggaaacaagggcgaaaggaaaggaaggatggttttgagcaatgaaatgctgctgcatggaaagtgggcatccagaccctgcccagcatggcctcagcctcttccnctgttcgtggaccgagggacagagggaataaagggccatgggcattctccgctctgttccccagctgccctcctcnccnnttgcactgnngctatccccacatnnatagccatcctgaagctcagcattgccccggagataggctgagcagttccatcctcanngtcactgtctatcacacaaccatgcaagaggaagaagagaaggaggcaagtanaatcagacaggaagggtggttcaangggatatactacaggagaacananaggcgtctccaggacaggcccatgaagcaagcaatcacagcaactgaccaggtggagctctcccagggtggcgggggtccca

SEQ ID NO: 125886 - DNA, 987 bp, Homo Sapiens
  misc_feature (735)..(735): n is a, c, g, or t
  misc_feature (824)..(824): n is a, c, g, or t
  misc_feature (881)..(881): n is a, c, g, or t
  misc_feature (913)..(914): n is a, c, g, or t
  misc_feature (955)..(955): n is a, c, g, or t
catatttaccaatgtcatgtattctgaacaaaggcaaaaaatacaaattcctaccattaaactggcttggttgttgtttgggttggagtagctgtgggggcttggggaagggtgtcgtttctttctagtagtctcatgtcgctttaggtcagctgggctggcttacacgcgctgtgcggtcttcatggagatgggagctctgtgtgtcagcacaggaagtggtctcccagcgttcagcctgaagcagcccaagtcctgtaggtgcttgccgtctctgaagccccaggaacatcagtgcaagaaggaagagactgctggcaaagatgactcccaaggctgttctccgctctggtgggacaacctgggtgctggccccaaggggctcctccagagagatgtgtgtgacctggcaggtgtaagtggcacctgcagagccaggttctgcggtgagagaggaggagatgctgtaggtgcctgccacgctttgcctgaggctggagaaggaggcaccagagacttgggctggggatccacccagctcctctcgggtccacgtcaccaccacatccagagggtaatagccagcaatgtcgcaaatgagggtgggcagcagagcttcgtttgccaagctcagtcgtactttaggggaagcttggatgttgagctggatgatctgctgagctcggtacagagaggtggtgatctggcaaatgtaggtcccctcgtcctgtatantgagggcgggcagggtgagggaggcatccctgggcatgcccagttgtgcaagctccagggtagcgccttccgcacagctgcccctgccntgcggtcagctgtacacaactgaccctgccttgtgctgcatcgcactccaactgatnaggttcaagccggtgcatggagagcacatcanngagtgagaccccacagagctcaggatggtcgttcacactgnatcactgatcgcaatccctgggtcatgcagtt

SEQ ID NO: 125887 - DNA, 1125 bp, Homo Sapiens
  misc_feature (146)..(146): n is a, c, g, or t
ggtggccaaccagagttttgttttgccaaagtttcagtttgttttttagggggaaccttggatgttgacctggatgatctgtggagttcgtaccagagaggtggtgatctgccaaatgtaggtcccctcgtcctgttatagtgagnccgggcagggtgtagggaggcattcccttgccatgcccagttgtgcaggcttccagggtagcgcccttccggcacagcctgcccctgccctgcggtccagctgtacacccacttgacccctgcccttgtgcctgcagtcgccaactccacactgatgaggtccaagcccggtgccatggagaagccacagtccaaggaggctgaggaccccagcaggaagctcagggattgggtctgtgtcatcacctggaactccactgcagttcgcacagtcccctgggggctcagtggcaagttcagcgtcgggtgccagagcgcctcattcttggcgaccctgggagtcttcatcaccaaggagatgctaggtcccccgtccagagacctgcacgttggccatgaaccaagctgctgtcttaacagtggtctctgtcatctggagaaagtagcgggagatctcacaggtcacctccttcccactgcagtcagcatggagcaaggcctcggcctggggaatctggaccaggtccactgaggcctcaaagataataggtgggtcatcttgggccagtgtgcccccttggaaatcggtgaagtcctccagggagccatcgtccagcactggcacctgcttcagcacaagggaggcccttgccctgtcctcactgctggcgagagctccacggtgcgcaccgtccttcgccaggaagcagtctaggaccacgtccactgcccgccactgcccctctgctgggtggggcttggtttctgctgctccagatagagccaggcagagcagcaggcaccagccctcctgtgtgcccatggaggctgctctcgagttccctccttgcccaccgcccttctccacagtcctacgctgcttgcgaggcccggcggaagaagggggctctccaagcacacctggcagcctgcagcctttaggtttcttccctgttccctctgctgccgacatttcttt

SEQ ID NO: 125888 - DNA, 937 bp, Homo Sapiens
agtgatgacaagacacacagtggaaccccacatcgtctcatgcaaaccgaagaacgcgatgtggaagcctcagcttcatttgactgcaaagtcccaggtttttttgcacatttgctcatgcacatgggtggtgggagaaagggggatagcaaagacacacagaagagggtaacagggtgggtgagaaagaaagtagaagggctaatacccccaaagaacaaggccaactacaccttggtgagcctcagagggacagaaacccagggaatgattcctgtgatagggctgggagagccaagaggacggattcgctccaggcttgggacacatcgaggacagtggtggttcttctccagcggtgaccccctgcattaggcaaggaggagcccagaggagagtggagaccttcgaggggggccgttgggagggtactgactgctttcttccagctcttcagtcccgccttacaataactaccacgatgatggcacagatggctcccagcatgatcatcatcttgcagtttttccaccaatacttcctctttagctttgcagcactgctctcaaattgtgatgctcctgcctgcaaggcatcagctcggtcatccagctctgacagcttctggtccctctccaggaccttgtccacgttcacacgtatgatgtccaccacctcctccacttgtgcctgggtttgctgtagtcgtctgttactggtcatgttaggaggagggccagggggacccccacctggggcagtcccttctgtcccttcagcaggtggctgagctggagcagacatttttctgacagagagagtgagggtctgttcctctccggaggctgcggcgagacacccggcgagggacgctgcggctgaagtggacggaactgccaagctccgcctcgcgccgactaccccgcggtctagctgc

SEQ ID NO: 125889 - DNA, 1076 bp, Homo Sapiens
  misc_feature (346)..(346): n is a, c, g, or t
ccttctcttcgctctggtcgcccgcttcttcctcctctccttgataccgctgtaccctgtctccgtgggacgctgtctccgcggtgtgttcggccgctgctcccgtgggcagcccttgcttctctcccacatgtccttctctcttgtcgtctcccccgcaatatttggggcccccagacttgttccccccactgggccttgtcctcactcttgtttgatttatgcccatccctttgctcgcttccctctgaaccgtggccatgtactctcagcctttagggaagggtcacagagatgcctctgtccagcacttggtcgggccggacggaccgtctgggggccaganccgaggagtgcgaatggtcagcacataagagcaggacaagggctcgtccacgcgatcgatgtagtccccagagatacctgcaccctcgtcacagaggaaccgaacctcggcctcccggggcctcccattaaggtcgcacttggacccattgccataggtctggctgtggtagcgtttaagacgatgctgcttggaggccttggctgtttcatcatcccagtcgaaggctgattggtagtagccgagatagaggacttcacctttgatctctgaatcttccatgtggtattgctggatgtggcgtccataacagaattcatatgtccaccagtcctttgtcttcagcaagcagggagcatctctcattgggctcaacaactcagggatcccaggcccttggtaagcaggtgtttcctcctccctttcacgctggaagtgaatagctccagctggcaggcgacactcatagcgctgtttgtacttagaggagacaatcaccacgtccgaagattggctctgccctcccatgacaggcaacggcaggatctcgatcccataacgcatctcactcagctcctccaggttcaggctcccgacaccgccggtcagacttgcgggtaacaggagtcccagaagcagcagtcctaacaaactggacagcagcgtttccgccgccatctttcgttccccctcgtgccgaattcaacacccaggcctcgtacctagccga

SEQ ID NO: 125890 - DNA, 1152 bp, Homo Sapiens
  misc_feature (897)..(950): n is a, c, g, or t
tgagggtcggacaatacagccgtagtcagtgtgcacaggcacagctcaccagcccacaccacgagtgccagagtcacagtcagtcacttgctgttgccctcaggttccaggtgggagtgggagagcaagccagtccagagagttctgattccgtgagggtcaagttagtgtggtctcagaagtcaaatcgtccaggtcccctgtgccctccccacctggagagccccacacccggcggtaattgctctccagctctttctgccgctggcgttccttctgggcctcttcagctcccggcaccaagatattgaagaagatctccttgaggtttctcgtgtcctcatcagtcagccaacgtgcaccctcttcagtcccttcagcccatgggcggacaattttgatctcaattttccctgcagctgtgagtccctccctctccagcagctccttcaccagcccctcgatttgtttcagctgtgggttttcccgtttcatctcgaggacagtcagatcctgattagggcctccgagacggagcttggtgacccggacccggactctgtgctcaggatcctcctctgtaggttggggtgatgggggaggctttttggggacaaccctctttttcttgtgcttcttcaccagctctggactctgtttttcctccagtcttttgatgagtttgttgagagtggatgtgagagccagcattgcccgatcccgctctgactccttcttcagcccatctgggtccagctctttctctgtctcctggatgatgttttccagttcccgctccatgccagccttcacctccgaacggagccggtctcggtctgacggaagcaggatcccttccagttccttctcaaattctcccagtaactgccgttcatnnnnnnnnnnnnnnnnnnnnnnnnnnnnnnnnnnnnnnnnnnnnnnnnnnnnnngccgttctggatcacccctttccttctctggttccctctgagggacttctgcagcatcatccacaggctgctcttggcctatatttggcttccccttttttgttccacctttcagctcctctatgaatcgaatcaaatcacgcagggcttcgaatcctcgtgccgattaacacacccggcctcgcacctagctctattgtgc

SEQ ID NO: 125891 - DNA, 1910 bp, Homo Sapiens
  misc_feature (559)..(621): n is a, c, g, or t
taatgcacaccaggggggccatcccgtctgctcagttcaggtgagtgggggcaccatcgaggtctgttcctaacgcatgaattgtccagagtcattcgtcagtcccggcctccacctgaggccaaaaccggcgtaattgtcgcagcttttcgccgcggcgttccttgggctatcagctccggccgcagattctgaagaagatctgcttgaggtttctcgtgtcctcatcagtcacgccaacggtgcaccctcttcagtcccttcagcccatggcgaacaattttgatctcaattctgccctgtagttgcgctgatggggagctttttgggacaaccctcttgttctcggcttcttcaccagctctggactctgtttttcctccagtcttttgatgagtttgttgagagtggatgtgagagccagcattgcccgatcccgctcgtgactccttcttcagcccatctgggtccagctctttctctgtctccgaacggagccggtctcggtctgacggaagcaggatcccttccagttccttctcaaattctcacacgtaannnnnnnnnnnnnnnnnnnnnnnnnnnnnnnnnnnnnnnnnnnnnnnnnnnnnnnnnnnnnnntccgttctggatcacccctttccttctctggttccctctgagggacttctgcagcatcatccacaggctgctcttggcctatatttggcttccccttttttgttccacctttcagctcctctatgaatcgaatcaaatccgcagggcttcgaatgactttgacctgcacgttgttctgaaaatcattgggagcaccagaagctgaatctgctgcctcagggcttgggtcctgctcctcagccggcacctcctcccctcctggggcctggtcctctggctcattaagcatcttccagaaatctgagtccttactgtcatccttggtcgggctcgcacctgccatcttttggggtgccaccccagacttggtctcactccacacttgggggcctagatcttgcagctcctctatgattttatctccatactgctttgagtcggcttgcctctgaacgtaggccatgtactcctcaggctgtagggaagggtgacagaggatggcctgcggtgcagcactgggtgggggccggaggagagggtgggggcagagccgaggagtgcgaatggtcagcacataagagcaggacaagggctcgtccacgcgatcgatgtagtccccagagatacctgcaccctcgtcacagaggaaccgaacctcggcctcccggggcctcccattaaggtcgcacttggacccattgccataggtctggctgtggtagcgtttaagacgatgctgcttggaggccttggctgtttcatcatcccagtcgaaggctgattggtagtagccgagatagaggacttcacctttgatctctgaatcttccatgtggtattgctggatgtggcgtccataacagaattcatatgtccaccagtcctttgtcttcagcaagcagggagcatctctcattgggctcaacaactcagggatcccaggcccttggtaagcaggtgtttcctcctccctttcacgctggaagtgaatagctccagctggcaggcgacactcatagcgctgtttgtacttagaggagacaatcaccacgtccgaagattggctctgccctcccatgacaggcaacggcaggatctcgatcccataacgcatctcactcagctcctccaggttcaggctcccgacaccgccggtcagacttgcgggtaacaggagtcccagaagcagcagtcctaacaaactggacagcagcgtttccgccgccatcttcctcgtgccgaattcgccacccaggcctcgctacctaaacaccgtagagttactgccg

SEQ ID NO: 125892 - DNA, 1307 bp, Homo Sapiens
  misc_feature (91)..(99): n is a, c, g, or t
  misc_feature (136)..(138): n is a, c, g, or t
  misc_feature (140)..(140): n is a, c, g, or t
  misc_feature (143)..(147): n is a, c, g, or t
gcccaagaggggggcgcctaaaaactctctcccgggggctgtggcggttcccacaaggggggtgcgcggagttcgtgagggggactcactnnnnnnnnnctcactatgggggtaccgggtccttacattgttggtnnngnttnnnnntttggatggtccagttgtttatttagaaacctgattgttcaagaacatggtgggtgcttcacacctttttcgctgggattgtgctggaggtgataggcagcattctaccatttcctcagcaacagaggtgaaggctcctcaactcagaagcacaaattgtaggggacagggtgggcagggaaagggagaaggaaatcccaaggcaattcaatagaagagggtaaaacgactccaaacatcactaagggcaggtgggggcctgcttgctcagtgcctgctaagtgtcctgccctccttgctctctctacccacctccactcaaaagatcctactgaatctccaggtaggcagcagggaatatcctatcattaggggacaataacaggaaaagccacagaggagaggaagaggattgagtgagagttcaggagagcaaatatcacaggcccggtgaggtctcaaggtggctgccagcaggggcagcagcattcacccagggcccccacacccacagagttgcccgagaggtccacagctcagctccactctgctgtttggccctcaggggttccagggtggggaggtggggaggaggcaagccagtccaggaagagtctggattccgtgaagggtcaagtgtagtgttggtctcagaagtcaaattcgtccaggtcccctgtgccctccccacctggagagccccacacccggcggtaattgctctccagctctttctgccgctggcgttccttctgggcctcttcagctcccggcaccaagatattgaagaagatctccttgaggtttctcgtgtcctcatcagtcagccaacgtgcaccctcttcagtcccttcagcccatgggcggacaattttgatctcaattttccctgtaggttggggtgatgggggaggctttttggggacaaccctctttttcttgtgcttcttcaccagctctggactctgtttttcctccagtcttttgatgagtttgttgagagtggatgtgagagccagcattgcccgatcccgctctgactccttcttcagcctatctgggtccagctctttctctgtctcactggatagatgttttccagttcccgctccatgccagccttcacctccgaacggagccggtctcggtctgacggaagc

SEQ ID NO: 125893 - DNA, 748 bp, Homo Sapiens
  misc_feature (55)..(55): n is a, c, g, or t
  misc_feature (86)..(103): n is a, c, g, or t
aggcgcgtcagttgtaaacgacgccagtgccaagctaaaattaaccctcactaanaggaataagcttgcggccgcatacgcggtcnnnnnnnnnnnnnnnnnnctcgcttacagctttttggggtaaatattggacacacaccccctatcacacaaatcagttgccacttctaagaatcagaaagacttttaagcgcccctagaacacaggcgaacacatattcctgttaggggtcttagagttgtatcctcagtttcaactgggatggtgctgacaactcattccttcccctcctctgcagatgggcggcccctctacgtgctcatgctggggcagatggacaccaaaggcttggtgagagcgctcggggaggaagccctgctgagatacgtaagtgcgcggctgcgagactccaggtgccactgtggcgtcactttttttctctgccagtaggattggggtgttaaccagcctgttagaacaaacatgaattgcttatgtagttaggactgaaaatatattaatatcgtcttaaaatttcaaaaggagacacagaagttataaaagtgtttctcacagtggaagcgtcagtgaggcagtcagggtctcccccgagatgcctgtgtagcagcagtttgagtcttttcattcactcccatgtggaattgctctctctgtggggtatggacgccacatccagcaataccacatggaagattcagagatcaaaggtgaagtcctctatct

SEQ ID NO: 125894 - DNA, 1120 bp, Homo Sapiens
  misc_feature (76)..(94): n is a, c, g, or t
  misc_feature (803)..(803): n is a, c, g, or t
  misc_feature (807)..(809): n is a, c, g, or t
  misc_feature (864)..(864): n is a, c, g, or t
  misc_feature (951)..(951): n is a, c, g, or t
ggttttaaagacggccagtgccaagctaaaattaaccctctctaaagggacaaagcttgcggccgcctgctcaggnnnnnnnnnnnnnnnnnnnatatttatgtttttatttaggaataatcaaaaggtttgaagtaccattgaggcccatttcaaattgtacaagcaatttgtccgtgttcccctcccttatccaaatccacagatacaaaatctaggaaatgtgcaatttgcatcttagaaatagcagcatccccacaggggacctcgtgaggcctggagattcagccccaagagggcaaccccactcctgcctcagcacgaccacagtccaaaccgaagttaagttccatttttttgttaaaacgtttacccagggtaaagaattcccattctacccaaggcttaagtgatagagtatgctgttttctcggtttggtctctcacacctggccatggcaggagatgggaccctcttgcagagtttggctaaagtttcattgtgcctcaaaacaaacaaaaacagggcagttgcctcttacttgtttagcaccaagatgatcaccttttcagccatctctcctgacagcagactgctcaacagtcactccccagtcttattgcccagaagtccggccacagggaacaaggctttgtgctgaagaccaaaatgcaaatgggtgctagaaaaccaggaatcaagaccttgtcaggaggcatctacaggcctttggcaacctccctgacttccacaaaggctgccctcagtaaaactcaatgaacaatggcagcaagggagaaangaannngtggcgtgttttctccttttataccaattaatggacaatctgacccctctacacntcttgaacaaagcactgctcaaaagacagcgggaacctctaacaagggtgatgctcccccctggcccgccaatctaacgaaaaaacngatgctttgtggtccttcttagagtaagacggggtctcaacctgcgaaatccaattgggtctgcctgttcaccaaatgagaagaacaacatagggagaaggagatgaagatccccaaataagataaagcaaggattttttatgattacaggggtctgaaacaaattatc

SEQ ID NO: 125895 - DNA, 836 bp, Homo Sapiens
  misc_feature (529)..(606): n is a, c, g, or t
  misc_feature (634)..(634): n is a, c, g, or t
cctctccttctctcgctcctgttcttgttctttttcaagttctttctcacgctcccgttctttttctcgctccctttccctaatttcctctggagatggttgtttttccaggatgccaagcttctcatccaatcgtttcagtttctccgcacaagctgccttcctttgttcttccattcttcgctcttcctcttcacgccgtttacgagcacgttctactgctgcagaaatttctgattgttgtcttcgtctttgcttccatatttcatcttcatcagctacttgctgcttggagggaaaggggcctggtcttccaggtactgcctgtcgatctggaggtggatgctgctgtgcaagcaactttggaggtggtggcagatgtgaagatgttccacgttcctgattaaatgaaggtcctttcccatagggaacttttgctactgatggttgggcaggtatttgggaagatgatttagtgttggaaacttcatctgtttcttttttgttttcgcctcgttccgaattcttnnnnnnnnnnnnnnnnnnnnnnnnnnnnnnnnnnnnnnnnnnnnnnnnnnnnnnnnnnnnnnnnnnnnnnnnnnnnnngctcacattcacacacatacgagcggancataagtgtaagctggggtgctatgatgactactcaatattgcgtgcgctcatgccgctccagtcgggaactgtctgcagtgcatatgatcggcacgccgggagagcgttgcgtatggcgtctcgctctcgtcatgatcctggtcgtcgtcgtgcggacgtacatatcaagcgtatcgttcaagtcaggatccagagaattg

SEQ ID NO: 125896 - DNA, 312 bp, Homo Sapiens
ccatttctctttgtttttcctgctccttctccagctctttctccttttcctgctgtctctctctgtctttttccctctccttctctcgctcctgttcttgttctttttcaagttctttctcacgctcccgttctttttctcgctccctttccctaatttcctctggagatggttgtttttccaggatgccaagcttctcatccaatcgtttcagtttctccgcacaagctgccttcctttgttcttccattcttcgctcttccccttctgtcgtcttctcgcagccgtatagtagtagtagtaggcggccgc

SEQ ID NO: 125897 - DNA, 582 bp, Homo Sapiens
tttcatctttcagactcattttaattataacagttctttctagagaactgttttttaaaatactctgatgtttattcagtgatcaatagcaaaatactaacttcctaatagttggtgtgttgacagttgttatagtgcaaggaataatggacggggaagttttacagatgaggatagaatgttatagcctgacacagatgaggctccaaataatgtaaaattcacacagttgcctgggagcagatcccagctggggagggaagatccagcacggggcaggagggcaggagtggtcatgggaagatgttctcacgggcacacagcacagataccctgagaatgcctcgggtcatgggctgtcgcatgcatccccaacgcacaacccccagaggcatcacgtctagtctctcattcaccacggcattcccacggccaggtgctcagaggatgttcaataaatgtttgttcaatggaaaagagagggggtgggggaagagtctgagctatgaccctgcaggcaagacagagccctcaggaagatgaggtctcagctaccaacacgtgtcaaggttttgcctttac

SEQ ID NO: 125898 - DNA, 1320 bp, Homo Sapiens
  misc_feature (97)..(97): n is a, c, g, or t
ttaattggagggtggtttccgcggggcgcgttacacttggcgaggttttcccttcctgtggtgttccctggggaggaaaggaggcttccttgatttncaaggctgaggtacccttgcccagtccccaggaggtggaggcgcatgtcattagaaggagccgggggcccaggaggttgaagggcgagtcggtttcttctgggttcacgccacagtcacgtgtggtggctggtgtagcctgcagccaggtgccattgttcctcatgccctctgtgagtggcttcattccgctctggggtctggcatggccctccccatcgttatcctttctgcattcatgacagggggttgggcaactcgcttgcccccttcaggtctgccgtcttggttcctaggttgctaggaaaggaccacgagggggcccgcttgattctccataccccaccctgcacaggcgtatctgccaacggctgcttcatgtttcgtgtgtcccacagtaggatgtgttcatcatagcttccccgtggccaggatgtgctcccgatgagggcttctctggatgctgcacacacccatggtgtgtctttttctggtgaagagaaatttgccgggtaccttggtgtcccagcccctcagaaggccatcgtcgccccctgaatacacaatttctggatgccagtaattgaaagcagcaatccaggcctcgaattgatgtgcctgccatgaggccactttctgcagcctgggcctcgtctcattcaccatcaggaggtggagctgccctgtggagtcactgctgatgatcttcaagggctggtccccggcccttccagttttcccagtggaccaatctagggacaaagccagacactgctcctccagggcaaggctggacaatggctccagcacgtggctcttctcagattccaccaggcggagcagttgtatggatccactggcatctgccaagcccaagagggcatgtccagccaccgggatgtgacaccttgttctgggggccggcaggccggtcctccggccgccgcagctggtaggtcccgcacgccagcaggtgcctgcagccttgcagcgggcaccactccaccgagtccgcggtcagctcggtgtccaccgtttgcagggcgaaacagcccatcatccagccctcggggaagggcgcggagccggcagtagagagcgggtcgagcggggccgggctgggtactgcgcggggcggcgaggccggggccggccggacgagcgcagagccccccccggccgtaatggccgaattcccgggcatatgtccggtaccgtcgactg

SEQ ID NO: 125899 - DNA, 1094 bp, Homo Sapiens
  misc_feature (57)..(57): n is a, c, g, or t
  misc_feature (60)..(61): n is a, c, g, or t
  misc_feature (66)..(68): n is a, c, g, or t
  misc_feature (70)..(71): n is a, c, g, or t
  misc_feature (73)..(76): n is a, c, g, or t
aatggtcttagaaaagtcttcttggaagggcccgagggcggcccgaacatgtttttnttnnttttnnntnntnnnntttttttgccaaaaaactttcatttaatacaaatagttgcttaaacaagtatgaaaggctgaaagtcaaaatctgcctgagaaacttaacaaatctgcaagctggaaaccgcgtcttttccccactctctgccagacagaatcacccagtccactttcaggggcccagcagggaagctgatttaagagaagtcaacagcttttctgactacactgtggattccatcagtgcacaggcacctgcagggctgcagtaagcatctctgatgaggtggtcccgggcactcactcgcagtctccctcctggtttccttgtgggaaggggcttcatgatttcaagctcagttcccctcccactcccagaggtggagcgcatggtcatagaaggagcaggtggccaggaggctgaaggctgagtctgcttcttctgggttcacgccacagtcacgtgtggtggctgctgtagcctgcagccaggtgccattcttcctcatgccctctgtgagtggcttcattccactctggggtctggcatggccctccccatcgttatcctctctgcattcatgacagggtgttggcaactcgcttgcacccttcaggtctgccgtcttggttcctaggttgctaggaaaggaccacgagggggcccgctgcagagaacggaagagcagccaggaccagtcggctccatacaccagcgagtcgggcaatgtgtgagatgtcaggaccgtcgcctcctgcctctcctccattgccttttggcagttgaggatcttaaagccactgtgcatgcaggcggccaggagcaggtggtggtggaaagggtgccacttgattctccataccccaccctgcacaggcgtatctgccaacggctgcttcatgtttcgtgtgtcccacagtaggatgtgttcatcatagcttcccgtggccaggatgtgctcccgatgagggctgctctggatgctgcacacacccatggtgtgtcttgctggtggaagggtaccgagctgata

SEQ ID NO: 125900 - DNA, 258 bp, Homo Sapiens
tttttatatttttttctgaaacccagacactttatttaaaattatgacaaacattaatgactgtcaaaattgctgacaaaggtacaatgactaagcaatttcatgtttctatgtgctggtacttaattagcattttctaataattaggctaatgatgttttattactacaacctatatttagagttcactctcattgttcccatattagaaataaaagcaaatgaaaatgagtttaatcaggcatcacatgctacagg

SEQ ID NO: 125901 - DNA, 739 bp, Homo Sapiens
ttttttttctcccaaaaggtttatttgtcacatttaaagtacaaaatcaaatacacagatccagatatgtgaaccatatatacatatctatacaaccattatttagactttcacaaacctatctatacattctaatttatctatcaacactatcccttaagtaaaaagcaacatatctcttaagtaggtttgttatcagtaacactatcgaatgtaaattattttcacttcatcacttgaaacggtagaaataggtacctcctagaaactggagaattaccaagcatatatccaatttgtatagatttcttaaaatacattctataggaataattaaccgaagaaactgccaatcaaagtttttgggcatatttaacaaaacttgagtcatgggaagacataaagttaattaattgcattacaagagttttgttttgactttggttttaaatgcaaagaggggctttattttgtttagtacacagagcacttccaagtcatatttcctgtggagttatagtgataaatttctcaggggctacctatcgctattaaaatttgaactggtcactaaaggaggtatctgatttttaacactgtgtaggttatttcaaccaaaatgcaagaacacattctttaggagaaaggcagaaattttagacttctagatacagaatgtatgatgtcactgaacacacagatatcctgctgatcaggggggataagttaaacagcttct

SEQ ID NO: 125902 - DNA, 775 bp, Homo Sapiens
  misc_feature (662)..(696): n is a, c, g, or t
  misc_feature (747)..(747): n is a, c, g, or t
ctgactctatgaggatcccccttgaatttgcaactgaatggtcatatttattggagagcttgagaaaaatgaaaataccatttagcttaagaagttgtgagttatctgcaaatcaactcatttcaggagtggaagaatccccggaattatttcttaatatcaaaatgtatgcaggtttctcttatgaatgttttgtacttttagagaggccactgtacaaagtctcccgttttccatacaggacaaattctttgtttcagccaactctcagtggaggggcaaccaggacaacgccatctccccggacaaagagcattggaatattccgtttcgttgatttatatatctcttcatatgtttcttcatcaatttctatagtagtcacagtttcttccacatctcccaagatcatatttaaatgttgatcataagcatgtaatctgcctcgaagctctcggtcatttctcattttcacataaattcgctcatctaggctgagcctgataagatccaggggctcctctacagtgttggtagtttgttgctggtctacgtcgtccgccatgtttcaaaccctgcgccctttcccgcctctcgcgagaacacaagaccccggccgtaatggccgaattcccgggcatatgtccggtaccgtcgactgnnnnnnnnnnnnnnnnnnnnnnnnnnnnnnnnnnncggccgcttcctcgcaatcactactcgctgcgctcgtcgttcaggcgaagncggcagcgccatagagatcaaagttttc

SEQ ID NO: 125903 - DNA, 1315 bp, Homo Sapiens
gggatttcactcaagaatgtgtctttattgaagaatttgtaagaaaaaaggatgtaccctctgtaaaaagaggagatgttgcctccaacagcagggaggaatgagacctgggtggcttcccagaagtcagtgtttccggcatgactggctcctttcctggcaaacactacaatgtgtcacactacagctagcaattcctccccactccctcccagcccttcctccctccaccccacaaccctatagccatttgaggcaaatggctttctaaaggcccagggatagatgtgccaggcttgcctcttaatggggtcaaagtgagttttgctttggaaaaattcaaacaggaatgtaaaatggtttgagctctttctagtccaaccaaaggtgattacatccagcccctctcaagggaatgggggcagagactgtcgctcctgaatgtgcacacatggggtaaatggactatatcgcagtctgctctttatttgaatggagaatggaaacaggttataagaatatataacatccatgttcaagagtcactgagttctggagggcagagggagcacagaggcctgctgattccaacagtgctcctgatggctatcctcgagttgtagggatggttattcctctccagctggaagattgtcctcaatccgcctgatgaatctcatccggatttctgtcacaccgtctcctttcagggtgtcctggacaaacttggcctccacagccatctggaccatctccaaagctccccgcaacaccccacacaagagattggaataaataagggatgagtggttatcaggaagttccacaaagtccaccaaggggttattttccaaaatgagggagaattcatcaccagctgggctccaattagtaatgcttggagtgatgcccaagtacatcttgaacgccaccttggcaatgacatccgcagtttcccgaaagtcatggcacctcccaacatttgaccgagccaagaaatcttcaatcagccggactccaatgttaaagcccattttgtccagctgtttattcacatcttcatcattttcatagtccttacatagctgggtgaccagggcaccataggtcagggtgaagagctcagagctcattttcttgctctcggtgccacggttcgcctgcctcgacatggtgccggccgccccgccccactcgcctagccacgggttagctcggcgacccctgcagacgccggagcctaagccgctgcccctcagcccacaagaccgaccggccctcgtgccgattcgacacccggcctcgcacctagccc

SEQ ID NO: 125904 - DNA, 910 bp, Homo Sapiens
  misc_feature (717)..(733): n is a, c, g, or t
gccaccttccctgcctgcgcttgtgccccctctcctccttggcactggcggcctccttgcctcccttccacccgtgctgccatcccgtgcctgtcgtgttggttcttcacacgtgctctgttctcggggttgttccattcatgccttcttggagggtgagggtggcttgggaaccgacccagtgatcatgcctactttcttctttgtatctccctccttcccagcccacccgggcagcagactctgatggaaggaaggtgccgtaggtgggcttttagaaactaacgggactggttttcaaagcagttatcttgggaaactgtttattccagcgatgtgacttttttcagaatatttcttggaatcatattcagagtctggggctgtgtgttgagcagccttaaggatgctagacactcatttagtgcccagggagtccagcgaatgacgtctgtggccaagcgaggtctcaggtgcaaagcaaaaggaccatttaaagtaaaatagcttggattcaatcatgtgacttttaaattggctcagaaagcaattttgtaatttcagagagtgttttgagccatggccacgttgtcattgtgagtctatagcttgactccttggagaacaatattcatttggttgtggagactgatttgctgggagaaatctgtcctgttactttctggtcatcccaggttctgacttttaccaggggcnnnnnnnnnnnnnnnnngcaagagggagataaatcccatctgtgagtttgtcttattggcgcctttttcctcagctgtcttccaagtattatttttactgttaaaaaattttttaaaaatgtgaaatgtaatgtttttacagcaacaatatgaaatatattttataaggaataaaatggtaccttgtctgaaaa

SEQ ID NO: 125905 - DNA, 1031 bp, Homo Sapiens
  misc_feature (865)..(865): n is a, c, g, or t
  misc_feature (879)..(879): n is a, c, g, or t
  misc_feature (893)..(894): n is a, c, g, or t
cgaggggaaactcacctactaaatatttattattctaactcatacggggagactaaagggcaatttgttgaagatcaaaatattttcctagatttgttgacggggttaaaaaataacatgagttctcctgaagtctgcacacacaatgctggtgttacgttgtgtcaatgcgagtgcgtctgagcaagcccagttctccactggaggcttcatcagaaggtttcgtcgtcattgcagttggtggcccagtgtccaaacatctcacagatttcacagtatgggcgttcctcaccccgactgccatggtgtgtggaatggggagggtcctctgacatctgtgcctgggtaggacaatcctctgtgtcgtggagatcaaagcagtcacaaatgtcacagaagaggcgaggtttcttcttggactgtttctcctgatcatcactgtcataattgtttaggtcatccccgttcccattcagggctgcttctgacatcatctccaccttcatcttgaggtcttgattcttcctttgaaggtccactattactgaatttaggaaatcaatctgactctcctgggctctttcatcctcgtctgcctgagtgtctgtattacctgaggagctgctgagctgcctcttgttttctttgagttgaagctccaagttctttaccttgagctcgagcttcaccttatcagactctagagtctgaacaactgaatgcaaggacttggcagaggcgttttctcccctgagcactgtgacctcatttctcagtttctccagctcggcatccttttctgtgagtaagcactagttatactgatggatttctgcaaggaagctttctctcatctgcgtctttnatgacttggatctnctttttcatttctnnacactgatatgaggaagatctttctctccagctttgatgactgtgactcgtcctgctctcccagtctcagcagttacgtctcttctgcacgctgaagtgctggactctgagctgtgctgcttaggttccctctgcga

SEQ ID NO: 125906 - DNA, 447 bp, Homo Sapiens
ttttgagaactgttaattgattactttatttcatataaaagttacattgaaagaagaggttgaaaagtcaagtatacttgatttgcacacacttgccaagtctcacaggattcaaccacttggataattgttttattgataacaggatatacatattaaaagcctcacactgaagcccacacgcatgtccaacccagacaacaatgtgcaaatgaatatgcagaacaatctcggaaactggcgtctccaggatcacccacactttgtccctctggctgtgacgcagctcttcccccaacggcgcacacgcttctgcggtgaccaagtccacttccaaaccccctgcaggtttgctcgcttggctaggacggtggctcaggtaggtccctttgtggttttgcatcagcagtggtagaagccctgattcggatggggtacagagtaatt

SEQ ID NO: 125907 - DNA, 1028 bp, Homo Sapiens
ctttctataaaagcacaaaatttaaatcggatttgactttacatattagggctttcatcttgatgagaaactcataacagcagcagctcaaactgattgttaaaaggaaaaaacacagggcagattaataatgcaacttggatcttcactcttctctttccaattcaaatgctggaatatgacactctttttataatattctgcccatgaggttctctcccttcttttctgccttcagagtcctttccaaaaggaaattactgccttgcattctacattattcctaatttccaggtggaaaaatgagacaaattaagtgacttctaaaaacactaggaactgtattttttaaaaacaagacaatacttcagattttcttgctttaattcttctctatattaccacagtaaaatatttaacaaagtccaagagattactgatatgcaataatgacctatgactttacattaatggagtgatgtatcaataataaactgatcagttaagtaactggaaaatgtttgcatgtaaagaatgattcactatcctttttatcttgtattgaaatcgtcaaaacatttaaaaacacaaagttgaagtaattttaaataataataactgtgaaatactgcaacatcttgaagtactttataaatgaccaaaaacaggtaaaattttgttcagtataacttcagtgaagaagttttttgacacagaactacatatatttttaaattggtaatccacataagatatacacaaaaccttcaagtgactacattgttcaataaataaaactctacattgttttgtttttacagcctagtgagcttataactcagtaacacccttttaagaaattctagtctacagaatgacatgtccaaattgtttggtcctattaatttctttagcaaaaacctccaattcctttatatttaattcctccacatatcatctttgaaggggctgactaataaatcacacagtgtaaccctccagtctccagtctgggtttttcatgagtt

SEQ ID NO: 125908 - DNA, 815 bp, Homo Sapiens
gataacacaggtctttatttcctaagggtacatatgaattattcccttttgaatgagacagtttttaaaagttgatttataaatacaaaaatacattctccaaagatagtatttccaaactgttatatacccatctactcccaacatggatataagttttttaaaaaaatagttgtatataacatacatatctgccccagtgttacttcacaggcctatgccctacgggaactccactctcccagccccactttttctcttggttctcccacattcttattctcccacatccctacccacgtttgagctggaaaggatgtccctaccctaggcatgaggtatattttattctgggcaccacacatttgccccatagataacaatacacgtgatgatgtcactagtactacctttctagtatttacatacttaaaagtagtaactagaacagttatcactggaactaagaattttccccacagaggtgaacagaccaagaactaaaatttcaggaaacctgtttaatttcttttgtatctttgaaaagttagttttatatctaagatttcttcacataggttataattcatctgtatgttcaagcttttatgtaaaaatatatagtgccttcagttttaacatagtttcacatgttctcagaactgctaaattcagtgctaccagtaaggcttaataagtagttcattgaccctgtaagataggagcactcagctctgtcacaatttgttgttaaacacatcactcaatgtaagtataaaaatatttattgataaaaaataaacttataattcagc

SEQ ID NO: 125909 - DNA, 647 bp, Homo Sapiens
cctgctttgtgagcacatttaataaagaaagctgactgttcccggtggctgcctggatcctgggcgccctccatttctgtggccatgaaggatatttcctgggtaagggctaagcgctactcttggtaccgtccccttctgaccctcaccaggaactgcatggttggagcagcatctgatcccacctggagtgtgtggggtcccaaaagtccccacagtccccacagaggtatcaggatctctctctctccagctggctccagagtgcctggctgctccagagatacagacgcttctaactccatacaaggctggagaccagcagatgtggtacagaagtgagctctgccattccttttactttggggccctggcaccttttgccccaacagtcaagcttcctagggtcgaaaaaaactcctccatttccctctgcaacagctggttcctcctctccgcatcctcccgcgcccgttcagagttccgcagctttatttccagcatgatgtattttttcttttcctggtccagttcttcttctaaccgggacattcgttttctcaggtcagcactcccttcttcgattcttttcacactcctcctcgtgccgaattcgacacccagcctcgtacctagccgtaaggttt

SEQ ID NO: 125910 - DNA, 1821 bp, Homo Sapiens
gtcatttttccccactagacttcaagttccatgaaagagatttattttgtcctctgttctgtggtgtgcttggcataaagtagataagcaagcatctgctgaaggaatgaattaaatgccagctgcaatccccaaattacagtagatacacgggaaaattttctttaggaggctgaattctaacagcatgatatcaaacaaggatagggtcaatacagaggccagtgctgtttgaaagtcatcatttcaatggtaactccttcacttgtgctggactcggtctcccctcaggagactcctttcctgttcaaagtcagtattttatatactcaaaaccaacaacaaactccaggtgtaactttattccaccttctccaacttcagagttccaaccttagaggatagagcattatgtggaaggagggtgaggacttgatatgaaaaaagtgatgacatacccctggttcatttctgggtttcctcctaggccaattcaaaacttccaaaataaggtcaagtaacacaataggctcacacttgcatcacaagctgtttagaaagtgtgcacagatctctgactcagaccagatgtcctccccaccatgggcaagggctggtgggaaagacactcccagccttcgccttcatccaatactaataaataacctacagaaagagcagcgctggaggctggcccttgagccacccactgctaccgttgcggagccaggcctgcctcatagccctctgtcttcatgtcattgagccctagctcctcattttggtcaaaggtgcgcttgtaacgctccaccttcatctcaggatcatcttcaggcgcatacacattctgcaagtaactgtttcctgctggatcatccataataaagtgggccttcatgttaccttcgatgatctggtccatcttctggctaaactcctgtagtctctccgtctgtccaggattggaactgtcgcccagtgtgaaaggatttttggtcaccagttcccggatgtctttcagcagcccttccagtgtggtgaacttgcccccgaggactgccattcccagttcaaattctagctctgggatttccacactgcaagtctcagacttgaggaggtctctggtcatatctgaggcatctgtgatgtggagggtgatcctggtgcccaagggttctactgctcctccagatttcacctcattggtccgatgcccacagttctcgcagttggtagccatgatgataacctccttaaagtgagggatttgtactagcttcatgttggtctgagcgggggcattgcattctgggcagtttgtgctgaactggagcacttcatttctgagatcttcctcttctggcttctctgctggtgcttcttcttgaagccccagcatctcttcctgctgtcgggtccggttgtagtgtgtgatcaccagggcatcatctttctgaggagcatgtgggttttccacaaaactgttccctgagggatcatcaatgatcagagtgaaaggggaggctacttgctttagctccttcagtttgacaatgaactcatcaattctttcagctgtagcatctttgtttgcccttcgtgcaggctggtcctgctccaggccagagatagcacgggtgatcaatccttcaacagtggtcagagctcctttctggctaaaggcaggaatttcaaaatctagctcaggaatccttgtggcagcagagtcagtcttcaccacttctctgttcatgtcctccctcgtgccgaattcgccacccaggcctcgctaccttaacaccgttagagttactgccg

SEQ ID NO: 125911 - DNA, 1344 bp, Homo Sapiens
aactctgacggtggttgtaatcacaggttatttgttcgtaagattacgcttggtcgttggtcgtgttgggatatctatatgggctcgactagtggttgcactcgagttgattttgatctctgcatgtattttgctaccgtccgttgtgtgtgattccgagggtgtacagtacagtgagtaagttggactgggggttctgcacctgcagtttgtcatcgttatgtgtgtttgggttaatatcgtggtgggaacttctatatcgtatgaggtgggtatacccgtgtacccacaagtggtgtcctacatgttatctctaccagttatttcaccgtgccactgtgtctcattcccaacagtattactacagttcgtagccaatgtgatggtgtaccctccttaaaagttgagggatttgacactacttacaggtgttcttgaccgggggccaagtgccattctgggcagtattgtctgtaactgtacacttcaatgtctgagatcttccgtcgtgcgggcttctcgtgctggtggcttcttcgtggaagcccccagcatctcttccgcgtgttcgggtccggttgtagtgtgtgatcaccagggcatcatctttctgaggagcatgtggtttttccacaaacctgttccctgagggatcatcaatgatcagagtgaaaggggaggctacttgctttagctccttcagtttgacaatgaactcatcaattctttcagctgtagcatctttgtttgcccttcgtgcaggctggtcctgctccaggccagagatagcacgggtgatcaatccttcaacagtggtcagagctcctttctggctaaaggcaggaatttcaaaatctagctcaggaatccttgtggcagcagagtcagtcttcaccacttctctgttcatgtcctccagagccctgacagacaaagtgtagcgcactccctggtcctggatcctgcctgccgactggatctccgtgttgttccagccacagtgctcgcaggaaaaggagctcactattatttctctgaagaagggaatcttggtgagcaggaggcgcgtcatgccattgcagtaacagttcatgcatagcgactcgatctcggtgggctgctgctcctcgtcctcggcgctgatgggccggaacaggtgatcaggggcagcggcggggccggggcgggcgacggggcgacggcagcccccgggggcctggttccacagccccgctgccgccatggccaccacgcgcaattcagaccgaacgcgtgggtcgacgatatcccgggattccgaccgtaccagcctgctttttttacaactgttctatagtcacatgc

SEQ ID NO: 125912 - DNA, 1513 bp, Homo Sapiens
  misc_feature (1461)..(1461): n is a, c, g, or t
tttttcaaagtaaacatgtttattctcagttctgccttaggggtctctagttttgcaagcatgagtaaatggaatcaacaataatcctctccttaaatgtctggcattaaaatttgtcacttaagaagtttcctgttttgcctaaagagagtgtgatttgagggtgacctgaaacaaggcttgaggcttgtggacacatagggttaatcgccttatttcctgccaaatcgcagagcagtgaaaggccaaaggcaactataaatagcagcccggcagatctgtccttccaagagggaaagaacttagcaacaaagagagacacgaggggtgaagtgggcaaagaatcattagcccagtttctgcccatgccagggcatgtgacccttgtgaatgctgcgaggcccagcagaggaagaagaggatcaaagctttcataacctccaactcagtgcatcccaaacccagacgggcctggaccgacctgtgcatttactcctgaatgccctcagtcagcagacacgggagccaacaggtgggaaaacgtgtcctccagagtgctcctgttgttttgaggtggaccacagctcccagccaagaaatggcagagaggagagggatccttccccttggagtggccttctgtcttccagggttcacaggacagtctctcggatgaccccaatgaggctgtgtggccgctcagcctccactcgccggggcctcctctcggctcggggcctccccgctggtgtgaaggtgtgaaggtcgccgcagctctggaggtgcagcaggccaggctgtctccgcgagggcagcttgtgggccctggatgtgctgggctgcaatggggccattatctgttctagaaaactggcacttgtgatggcttcctccatgtgctcctcatcagatttcaaaacagatttaatgttttctacaagttcatggatgtctggggtcatggtacaagaggactgctccaggaacctcgccaccagcagcttggtgtccatgtaggatttgtaatctatcaaagaccgcggtctgcatcgcgaagctctagatctcaagcctctcctcagagtcactgcagccagatccagtctcctttcagtctgtgttgcagcttcacagctgagcactggggcagctctctcctcagaaggatggagcacagggtcactcttcgacctggtcctcaagggtgggagggctctccggcttctgataggacgcaccagggttgaactgggagttgaggtggatgcattttcttcggcaggtatgttaggaatgtccccatcttgagtcacttgtgtgcagcccagatccaatgggatcacagcagcttctgatccttctgacatttggaatgaagatcccacagcttcatatggcggcgggagatccagaggacagaacacttccacacctttgattcgagctccgtagatgtgtggnaggggaataacatcaggaccaaccatcctgcggttcatccgaagcagtgcct

SEQ ID NO: 125913 - DNA, 1009 bp, Homo Sapiens
  misc_feature (47)..(47): n is a, c, g, or t
  misc_feature (155)..(155): n is a, c, g, or t
  misc_feature (202)..(630): n is a, c, g, or t
  misc_feature (648)..(668): n is a, c, g, or t
gggacgctacacggaatggtctacagctagttgggaagccacgctcncgaggagaagcgacagttccgtagcgcaggtcgaacagaggccacgagggctccaggggacgcttgttctatagtcctgtcggttcccacctctgattgaggtcgatntgtgtgctcgtcagggggcgggctatggaaaacgccagcaaccgccnnnnnnnnnnnnnnnnnnnnnnnnnnnnnnnnnnnnnnnnnnnnnnnnnnnnnnnnnnnnnnnnnnnnnnnnnnnnnnnnnnnnnnnnnnnnnnnnnnnnnnnnnnnnnnnnnnnnnnnnnnnnnnnnnnnnnnnnnnnnnnnnnnnnnnnnnnnnnnnnnnnnnnnnnnnnnnnnnnnnnnnnnnnnnnnnnnnnnnnnnnnnnnnnnnnnnnnnnnnnnnnnnnnnnnnnnnnnnnnnnnnnnnnnnnnnnnnnnnnnnnnnnnnnnnnnnnnnnnnnnnnnnnnnnnnnnnnnnnnnnnnnnnnnnnnnnnnnnnnnnnnnnnnnnnnnnnnnnnnnnnnnnnnnnnnnnnnnnnnnnnnnnnnnnnnnnnnnnnnnnnnnnnnnnnnnnnnnnnnnnnnnnnnnnnnnnnnnnnnnnnnnnnnnnaagaattcggcacgaggnnnnnnnnnnnnnnnnnnnnnaccaattttcatccttttactgaggaaaaaaatatttaatatttttgttatataaggaatagtgcctaaggcaggtacttatactcctgacctcagccccacacactctggttttataaagctataggacagagcagagatggaactgaaaaacagggtagaaaataacataaattggaggggaacagtgggatgcagaaagaatgacaacagccacatgtgccccagtcaaatacttttagtccctgcagcagaagatgccaaccaagtctctatactggctggggatcctgccatggatgcaggagaaaaaattcaatcacaagggagtaagtgacaac

SEQ ID NO: 125914 - DNA, 1764 bp, Homo Sapiens
  misc_feature (1081)..(1096): n is a, c, g, or t
  misc_feature (1705)..(1705): n is a, c, g, or t
agaacatttgtggtctatttctctgttagtgtttaaccaaccatctgttctaaaagaagggctgaactgatggaaggaatgctgttagcctgagactcaggaagacaacttctgcagggtcactccctggcttctggaggaaagagaaggagggcagtgctccagtggtacagaagtgagacataatggaatcaggcttcacctccaaggacacctatctaagccattttaaccctcgggattacctagaaaaatattacaagtttggttctaggcactctgcagaaagccagattcttaagcaccttctgaaaaatcttttcaagatattctgcctagacggtgtgaagggagacctgctgattgacatcggctctggccccactatctatcagctcctctctgcttgtgaatcctttaaggagatcgtcgtcactgactactcagaccagaacctgcaggagctggagaagtggctgaagaaagagccagaggcctttgactggtccccagtggtgacctatgtgtgtgatcttgaagggaacagagtcaagggtccagagaaggaggagaagttgagacaggcggtcaagcaggtgctgaagtgtgatgtgactcagagccagccactgggggccgtccccttacccccggctgactgcgtgctcagcacactgtgtctggatgccgcctgcccagacctccccacctactgcagggcgctcaggaacctcggcagcctactgaagccagggggcttcctggtgatcatggatgcgctcaagagcagctactacatgattggtgagcagaagttctccagcctccccctgggccgggaggcagtagaggctgctgtgaaagaggctggctacacaatcgaatggtttgaggtgatctcgcaaagttattcttccaccatggccaacaacgaaggacttttctccctggtggcgaggaagctgagcagacccctgtgatgcctgtgacctcaattaaagcaattcctttgacctgaaacctcccaacttccccatcgccgcgccccccgccggcccggaaccagaaatatcttgtcggnnnnnnnnnnnnnnnngaagaaatctttccagaaccatttcctttgggccccgccggggccccactagggaaacgggaacacatgggcccctagccgtgtttccccataaaagagaatcccctggagcaaaaggaaaacaaggggcggcttgggggcatttccctccccccccaatattataatataaaaaaccctccccccgtggcggggggattacaaccccggataacgctcgcttcttcttgtgagaaaacaaaacaaactcccccaggatagtggggaaagtgttttccgttgaaagcggccccgactttacagccggggcgagatttcattatgcccacacccagggggaagtcgccccccaaaccgcccaagccccctgcgggataatctcccgaagaattgtgacgcgcgcccctcgcggctcctccgtggcggccaacctctcacttcccgcgagggaaaaaccggggcggtcggtgagcacttatcacatctataaaagggcctatttttcttgcgcccccgagaaaatgtgggaaaagacaccccgcttctccaccgaaagcccggggacgactggagatgagacaaaccccgggagaagacgccccgccgcgncgaggagaatacacagcgcccaccctttgggggcggccccccttgtgggcgcaagaaaa

SEQ ID NO: 125915 - DNA, 875 bp, Homo Sapiens
  misc_feature (411)..(453): n is a, c, g, or t
tcttttaggcggggcacggggtttggcgacagagaaaacaggataagaacagaagcaatgagtcaactggcttaccagaaatcaatggcggggaagggtgtgaggggacagaggactaaatttactgctaacatgaatgttgtttaatatcaggctatgattaacatacatctgaaatttcaactgtgaattgttgttacgctacaaatatgtatacccacagaacagtacatgtcctggggcaaggtaaatggcaggaaatttcacaatccactccctgctccttcatcgaatctacagcagaggaaagtgttgaaacaagttttaggtgccaggcttagccttttgcttttcagttgaatatttatgttgacacgccaactttctcctattagttatttagtgttaggnnnnnnnnnnnnnnnnnnnnnnnnnnnnnnnnnnnnnnnnnnngggcggggcaggggttggcgggggcagtcctttgaactaagattctctcaggaaccactgcaggaaatgaagtgattcagaactcaccaattatgaactaaccttcaatgccagaggctttaacagtttctaataaaaattcagttcagatctcaagttcagataagtctgaaaaaacacttcaaggtcatctgaacgaacatattctaccagtactttatataattgtatttacctgttcctaaaactttccgtgaaagaaatgttgaattttcttcagaaatagttttgagcaaaatgtcaaaacaattctcccatgctcagtgtacttttgactatactctgaaaatatttcttcttgttttcctgcacttacctgttagtgtgctcacactcctgtattatggaacatgttcagtaac

SEQ ID NO: 125916 - DNA, 650 bp, Homo Sapiens
acaatgaggaataatcatccacttatatttccataactctctgcaataaagcactttaagttgggaataaggatgtttgcagacacatgccaattacgtgcggaacaggtgctgaattccaattcctgggagtttcttctttcaaaacaagctgctttcttttgttcagtgaacaagtatgtccaggactgaggtgaccatgcagggagtggaaagggtatgagattcagacttcactcttaatctggctctcctttgccagcttgagccaggtctgtagctactggaagatgttctggcgccctaggcggaggctgggggagtctgagggcctctcaggtgccatgtccaagcagtgggagccagtgcggataagaagagttgattctgaggatcctaaagcctgtgttacacttagcacatgccaggggtctgtgtccccattaacaaacagcactttgttagccccaggggtctggccaccgtagtaggagttcgtctgagccacagcctgggctactgacaaggctgagagcccaaacacctgctcacataggtctagctgggagggcagtgctgggagctgggagaaaggacatctgggattctcacaggtgacatagaagccgaactcggtacatgtctgatac

SEQ ID NO: 125917 - DNA, 976 bp, Homo Sapiens
gtgggccatttccatttcccccgggggcccataaactggtgcacttcgtcaaacccatgttccgggatttcctccccctttttccaacctcgccatagcactttaattggaaaagaagtccaacacctccattacggccgcccagtgcggaattccaatcctgggaagtttcttcctttcaaaacactgctttctttgttcagtgaacaagtatgtccagaactggaggtgaccatgcagggactgaaaaggttatgagattcagacttcaccctttgccagcttgagccaggtctgtagctgctggaagatgttctggcgccctaggcggaggctgggggagtctgagggcctctcaggtgccatgtccaagcagtgggagccagtgcggataagaagagttgattctgaggatcctaaagcctgtgttacacttagcacatgccaggggtctgtgtcccagaagccgaactcggtacatgtctgatacaaccactgccggtcacccacaccagacagttgaggttctgtgctcctcagctgtgccactgtctctgctcgggaaaagcttaaacacttctggcccaggctgtgcaagacaatctgcaccgcccgacgaagcccgcagtagggcgtggagtggctgcggttgcccccgcccccgaggagaagtccgcagagctgtcgcacgcttagcggcgctcccgtctgcccatcatactgcactacacctcccaccagtgcctgcagcgcccccaacagctccgcctggttttcagcgcggcccaggggcccgcaagcgctcagctccgtccgcaatgctgcttgagccgccccacccgagcgcagccgccgctccacttcagcgaaggcgactggacaccgccgcccggcactccagggacccgccgattcgcggtgctcattaggcttcggataccaaactgtgggcggaccgcctcgtgccgaattaaca

SEQ ID NO: 125918 - DNA, 690 bp, Homo Sapiens
ttctcggatcgttatcccgtgcaaatcaaaggcatatctgtaatattcttaaatgacgaatatcattcaactgtgagcgcaaaagtcaaatttgttttgtaacttttctgtgcagtcacacattttcaggttcaacaccaatgtcttcacaaaatttttccattccttctggccctacaacttcatcaggacctgcatattcataaaaccaagccaggcacttcttgcttgaaaaatgttcctctccacttattagtctagcagggggttgggatctgcaatagctggagattttacactttttgaggcctccgtcttccgctactgctgctgccaccccaggggattttctcttcttcttcaccggcatcttccgccctccccggcagggtgggcaggggagccggggaagggggtccctgtccgctggaagcccctcagcgctggcacccagttcccagagacagcagcaagcggaggagcagagtcgccagcccgcaccggcgcggcccagcccggccgccgcccgctcccaggtatcctcgtcgtctttctctgaccgggacagggctggctcctcgccggtggacactgcggttcgttctcaccgggaggagataacgcggacagcgcggcagctccaccagtccctcgtgccgaattcaacacccagcctcgtacctagccgta

SEQ ID NO: 125919 - DNA, 1712 bp, Homo Sapiens
  misc_feature (65)..(65): n is a, c, g, or t
  misc_feature (1235)..(1251): n is a, c, g, or t
  misc_feature (1382)..(1383): n is a, c, g, or t
  misc_feature (1544)..(1558): n is a, c, g, or t
gaaccggaagcgacctacgaaaggttttggtaccaacacccccagacgagggtttatgattaaanaaacggcacggcagtactataacggtctaaggtagcgaggctgggtggcgaattcggcacgaggagctgccgcgctgtccgcgttatctcctcccggtgagaacgaaccgcagtgtccaccggcgaggagccagccctgtcccggtcagagaaagacgacgaggatacctgggagcgggcggcggccgggctgggccgcgccggtgcgggctggcgactctgctcctccgcttgctgctgtctctgggaactgggtgccagcgctgaggggcttccagcggacagggacccccttccccggctcccctgcccaccctgccggggagggcggaagatgccggtgaagaagaagagaaaatcccctggggtggcagcagcagtagcggaagacggaggcctcaaaaagtgtaaaatctccagctattgcagatcccaaccccctgctagactaataagtggagaggaacatttttcaagcaagaagtgcctggcttggttttatgaatatgcaggtcctgatgaagttgtagggccagaaggaatggaaaaattttgtgaagacattggtgttgaacctgaaaatattattatgttagttttagcgtggaaattggaggctgaaagcatgggattttttaccaaggaagaatggttaaagggaatgacttcattacagtgtgactgcacagaaaagttacaaaacaaatttgactttttgcgctcacagttgaatgatatttcgtcatttaagaatatctacagatatgcctttgattttgcaagggataaagatcagagaagccttgatattgatactgctaaatctatgttagctcttctgcttgggaggacatggccactgttttcagtattttaccagtacctggagcaatcaaagtatcgtgttatgaacaaagatcaatggtacaatgtattagaattcagcagaacagtccatgctgatcttagtaactatgatgaagatggtgcttggcctgttcttcttgatgaatttgttgagtggcaaaaagtccgtcagacatcatagcaagaactatgtgaagaaaatgcaaacctttcaattcccacgtgtatacaagctaatgtgatgagggggaaaaaaatccaacgggtgcattttcattcatatgaaagacttctcatagtacnnnnnnnnnnnnnnnnnaaaggaggtttttcttgttacatgtgatgggcattgagccacacctcttcttagactgaatattgaagtttttgttttgagttatgtttataacatttatttcagaacaataaagattcagatttgtgacnncgaaaaattatctttcaaccaaaaacaacgccggattttccccggcataaaagagctttgcccccagcacctagaccatagtaataactaccacagtacgtccaacaaccctccccggaaggattataaccaaaaaggtaaggtgtggaaatttggggggnnnnnnnnnnnnnnnacaaaaaaaattttttttaacaccctttcgttgtggggggccggggcccccccacaaagaaaaaaaacaccagtggcccatcgcgtgtgtctctccacaagaaaaaccccgcgggatataaaacaacagggggtggcgttttcccccacccaat

SEQ ID NO: 125920 - DNA, 1485 bp, Homo Sapiens
  misc_feature (140)..(149): n is a, c, g, or t
  misc_feature (173)..(416): n is a, c, g, or t
  misc_feature (436)..(449): n is a, c, g, or t
ttttaaaagtatataaaaacatttattcattagaaaacaaggagattggcaaacatatattccaaagttgaagcagctcaacgcagttcagttaggctaatttaagagaaagccttgcattttaaagagcgtgtaggcannnnnnnnnnaatttgagatggaggttcgctatnnnnnnnnnnnnnnnnnnnnnnnnnnnnnnnnnnnnnnnnnnnnnnnnnnnnnnnnnnnnnnnnnnnnnnnnnnnnnnnnnnnnnnnnnnnnnnnnnnnnnnnnnnnnnnnnnnnnnnnnnnnnnnnnnnnnnnnnnnnnnnnnnnnnnnnnnnnnnnnnnnnnnnnnnnnnnnnnnnnnnnnnnnnnnnnnnnnnnnnnnnnnnnnnnnnnnnnnnnnnnnnnnnnnnnnnnnnnnnnnnnnntgagccacagtgcccggccnnnnnnnnnnnnnnaaaaaagagacagacaaatattttacaagggaaacagaattcgaattccaggtcaccctacaggataccctgcacagggaggacaggaacagacttcctaggatctgtgcctgcgagccgatgctctgagaatgggagttgttttcttgggtgtctcgtcttctgtcatctctgctgaaagatcttcctcactggactcatcacttgagaagacaactttgggtttctttttggaagctcgctgctgggtgtttggatgccgacgggtagtacggcggggctctggtgtgacaaagtcattgtctgaggctgtagaagccagaggctggtacctagaaccagtggatggtttcttggctgatggcgctctctggctacctgcttggccaatctcaagctccttgattccatccaaacctctggtatgacaggcccgaagcttctgctcaaattcatctattatagccttgccctcaggcttggccccacgtcgcagcttgcccacaactgacaaaaaagcactgaagatggactcatctgacagtttgtctccaaaacagtcaaaattgtcaagcatcttacggaggcctcgctctgtgaggggcagctgtgacacacagtaggccaggtctcgctgctgccgctcagttcgggatgtgcggaaccgctgacacagcttttccaccaggctctctgtctgcttgtccttggtgatgtaggagaggagctgtttcatgatggtgtggaaaggctcttcctccacccccagctcggggtctgacaggcggctgatgatatctggaaggagattatagattgcgttgcccttgtgggagagctcattgaagaagttcttggccagggcagcaatctgaggctcggggtcgatgagcagcaccgccatctcgctgacctgccccttcaccttcaccatgtccttgaggatcaggtgggtcatcaccagccccgctgttttccgcacttgctgagcagggtcccggaggcgagcatacagatgaggagtccaggggtcccc

SEQ ID NO: 125921 - DNA, 386 bp, Homo Sapiens
tgtggtataaatttttattttaaaaagtgttaaaaaatgccttgccctcttgcctttgaacattaattattcaacctctttggaatctaagagatttgataacaccatttggatggtggtacaaggagcaaacagaactcacccaggcccctccagcaaagcctggagcctccctccattctcccttttgggctgtaggagccaaggctgcgtggtggccaagtagtaaccggacaggtgcagacaggagagccgaggctcattactttacagcagtgctcttctcaaccggggcaattttcccctttccttggaccatttgacaatgtttagagactattgtcacaactggggcggggggctggggagaacagtgcccctggcat

SEQ ID NO: 125922 - DNA, 2164 bp, Homo Sapiens
  misc_feature (56)..(97): n is a, c, g, or t
tagtgctggtatttgttgactaccatgcagaagggtatcttttattcacgtcaaannnnnnnnnnnnnnnnnnnnnnnnnnnnnnnnnnnnnnnnnnaatactttagggtcctgatttgtgggaacagaccttcttgtaaataaccactatttgagttgtggcaggaggatgataaagcacgcggcccctcccaaaggagcccttgagctagggaggtggtgcagtcagcctcgctctcaacgtgacccggggaatgaccacccagagggatgagctagcctgtagaggggaactggggtccaaaggtctttggggagggaggcagagctggctggctcagctaagtggcacgatgacgcatgaaggagattatgttgtgctctttattgccaaaaataaacacttttaaaaagacaacttctgttaatcaataaatatcctttcctttctgtactggatctctggttttctccaggctgcctaattaactgctttgtgcatgttcctatctggagacagtgctgaggggttagggccagagccttcattaaggagaaatgaaatactcctcctgtgtatgtgggaggggcccttgctcctgcggctgcttccacggccacacccgcactcacacacacccccaccaaactaaatgatcaggtcattggaggtgaaggggttcatgactgctggacagagaatgaaatatcatgtttatttggtggggaggggacagccagggtctaatgctattccaaaaggttacttctcaaattagggacacctgggaatttgaagcgctagcaggccagccctggggcaagaactggaagggtttataggccccctgaataaaggctatggcacttgatcctcaacaccagacatctaaggtacaactgaaaatgactcattttggacagaaagggtttagagtaaagagctggactaaccaggagagaagtctagttggttccctacaggtgcactggaaacactccagcagggaccttctgggatctggggagcactgctgccaattattaacagcagtcagggccagtaaagacctatcctgcctaaacaccactgcatccctggtaatctatctatgacccacttctagttggtactgatgtcctgccaagaagctcaaccaacagtagactagattctcagaaacgagaagagtctgaagagagacccccatatccagctgctggcctgaatctccgtttttgctgaagcaggcaagctgcagttaatttatggttagcacatcactctggatctcgtggcttaattgagtttgtaaatcactcagtttcttcttcaatcctgagagggctgacaggacaatggtttcaggacgcagagagccacaggactccacattgtagtaaaacctttctggcttgccgttggggtcatagggagcctgcgactcatcctcatccagctccgagtactcactctttggccattcctcgggcttggggtacactgtgtgcctcagggcattgtctggatcgtattcaaaagccacccctgcagtagggttccacttggcatgctccttgccaaagccctttttggcataggctcgaagtctcagctcctggccctttctcaacttgacgatgaggatgtcatcctgctccacgtagtcattggggtcattatctcggttccgggatgtcaccggaatgacccgggggctgttggagatgaggtctcgagacgtgacatgtcgcgtctggtcttcattgcaccgcacatcgagggtgaactccaccgagcactcggggcagaactcctcacatgtgcagtcccgagagtactgcagcttgtccacaatgtcatcactaatgaggggaattaatccaagcctgtgagcaatgaattcatcatgaaggactgaggaattggcatcaatctgaacccagtcaatggctattatgggaacctcagcgatgaagaccctccgaatcgaattggccaccgccaggtcggtgttctcgatgatgaacttgacattctcgtcagtgagctccgtgatccgcacggtaggctggttggcgtacggcatctcgcccaggggccaccagcctccgcgtctgctccgcggtgactgcgcggcgccacattaccgggattccgacc

SEQ ID NO: 125923 - DNA, 1755 bp, Homo Sapiens
  misc_feature (1505)..(1534): n is a, c, g, or t
  misc_feature (1627)..(1661): n is a, c, g, or t
  misc_feature (1664)..(1702): n is a, c, g, or t
tgccagcaaatagtgtcaaatccctcacgctgggtcatagaatacaaaaaagtttagggcacttttgaagaccttccgcctgccaggccaatacagctaattagaaatggttggacgcagatggaaacaatagaaccaactccaggtttgtttgtttcaattgacccgaaatgacaagccccacgtgtctactgtgagcgacaaattatgcttcctaatcatcagaaacatatcgagcccacagctgataactgccaactgatggtagaactctgtatgagaccgtcagagtttacctcaaacttttctaacccccatgcaaaatactgattcagaagggagccacactgtctacagcctttcaaaaggaagaaaggcgtatgaagatgtagaaggttcacacacaaggtaatgattttaattctgaaggggcaccttgagttccatttggcacgtttctgaatttaactgtcaggagtacacttaaggccattttatcggtatttaactttttggcaaaatagaagctttggtcatagccatagttctttaaaaatttttttaaagaggttatctctgattaaaacaatatttttagcaagtgatacataacaataacaacaatgtaaacatcttcaaatctaatgcaagagcaaaagctcttcaccagcatcttaaatacagcgagagtcagtagtgcttacaaaaagtagagggttctcttctagggaatcagaaaattatcaaaataaggcacagcctgttgttatcacagatttgtgttaggcagtagtgtttttttctggaaggcataagttggaaatctgattacccaaaggtttaaaatgtggttctgaaaataatgccaaatgacaagggtaactaactgggagtaatggcaattaattagtgacaacattacatctagattatagcactctggaacttaagaaggcctcttcatcagcccatacgtaaatctgtaaaggcactgtgcaaaatgtggacggggccggccttctaatttggagtgcatattaaaaaacaaaggcacgtttcctagaaattcaactttacattaacacaaaaaaaattttagagataacagtaggtaagcttgataatatagcaggttctaagtcaaaagtcttgaagaggtttcttgaacagcagttttgagttccgctggttcttcatgaagagacaacccacacgatgatgatgatgatgaagataaccagaacagtaatcccgattgcccacatcttgcaattcttccaccaatatttcctcttcaacttggctgcgctcgtttcaaattgagaagcgcctgcctgcagtgcgtctgcacggtcgtctaactcagagagcttctggtctctttccagaaccttgtccacgttaactcgcattatgtccaccacctcatctacttgattttgtgtctgctgaagtcttcgattactgccagtggcagcagttggacctgtagacattttggcagnnnnnnnnnnnnnnnnnnnnnnnnnnnnnngtcagcagagaagcgaagttgggaccggaggccagggagatccccggccgtaatggccgaattcccgggcatatgtccggtaccgtcgactgnnnnnnnnnnnnnnnnnnnnnnnnnnnnnnnnnnncgnnnnnnnnnnnnnnnnnnnnnnnnnnnnnnnnnnnnnnnaaaagacgcactgcggctcccttattagtgggagttcgtattaccaagtcttt

SEQ ID NO: 125924 - DNA, 2872 bp, Homo Sapiens
  misc_feature (605)..(668): n is a, c, g, or t
  misc_feature (992)..(1049): n is a, c, g, or t
  misc_feature (1155)..(1266): n is a, c, g, or t
tgtgtgctcgcgtgctccgctcgtctctgtgtctcgttctcctatccgcctgctggctgccgctggctcctctagtgtgcgtgtctcgtgcggtttcgtcgtctcgtctctccgctcgctcctttcgcgtcggcggctcgctgttgcgtcctccgtctttgccttgcttcgtcgctttcgtcgctttcccgtggcgctcccctcttcgcgtgtgcatgtttctatccttttttgtgctcgtctgtcctgtctcgtctctcttttttccgctgccgttctctctctgctcttgttcgcctccgttccctctgtccctgtgcttctgcctgctccttcttcggtccctctgtcttctctgtctgaccctgctgctctctcctctcctccctcgcgcttgctcggtcgtgtttgttccatctccgcttctgtcccctcgtctgggcccgcgctggccgcgctcctgcttcggttctgtgccgtgtcctcttcgtgcgtggctgcgtgctctggcactgagtccgcttcgtcctctcactctcttgctgctctgcattttggtttgctctatgctcgtgccttcttctgtctttcgtcctgtctgctgnnnnnnnnnnnnnnnnnnnnnnnnnnnnnnnnnnnnnnnnnnnnnnnnnnnnnnnnnnnnnnnncccttctgtctcctggtgctgttgttcgctggcgcgtgtgctggcgctgcctcgctgcgccctttctctgctttgctctttcttttgttcggttctctgtcgccgtgctgcctcccctgctccccttctctctcctcttgttcgtgtctgtcgtgtgtttgtcttcgaccgtccgtgttgtcttctgtgcttgtctgttttcttcgttcttttggtcgtttttctcttggtctttctcttggtagcgaccgcgtctgttgtctgtttggtcgctggttgtcgtcgttcttgtgtatgtttgttttgttgttttctgctggtcgnnnnnnnnnnnnnnnnnnnnnnnnnnnnnnnnnnnnnnnnnnnnnnnnnnnnnnnnnncttgctgtttttctgcttccctgtgcttcctctttttgtttgtctgcttgtttctctgttcttctctgtgtttgtttctttttgctctcccctcccctctccttcnnnnnnnnnnnnnnnnnnnnnnnnnnnnnnnnnnnnnnnnnnnnnnnnnnnnnnnnnnnnnnnnnnnnnnnnnnnnnnnnnnnnnnnnnnnnnnnnnnnnnnnnnnnnnnnncatgtttataaacactttatttaggtgattacagtgggtaagttcccagctaagtgcacagatagaagcgaggtatttctgggttaatgcaggagccagtgggttacatgggtctgggcactgtggccaaggggcgagtaccaaggtttctgagtcagacccggccagagaccctgcgctgaaggtggactaatgtcctaacactgccagctgctttctcctcacagctggccacaccgcaaggcatctcttcaacagtaaatcatttcagcgatgttaagggaacagacgttaaagaaatggaagctgtgtcctggtgcgcctcagctgttgctgctttataagtcataatagcatgtgaacaagagttttagaatattccagtaacaatgagccacagagcgataaagtctgtgtctttctccctcagtgcctccttgcctgttttctttcatacctgaattcccatctttaagctgtggatcctgatgttgagtctcatgcatacaagaaaagtttttccgatgacaaagtttctgcttccagcattcccatcaacagcattgtctgcagttgatgatatcaaagcaaaggtctctggttggctactctctgtgaaaagagccattcacccctgaccaatgcctaattgcaggcataatttagaaaactgatttaggaagcagaatgtgaatacaaataggaaacaaactccaaagttatagtttatcttcatatttgggccagataatgatcaagttcacaggtggtcttacttgaggctacagaattgttgcttgcataattatcagaaacatgctggagtccacagctgataatctgccaactgctgggtagaactcttttatgagacggtcagagtctacctcaaaccttctctaacccccatgcaaaatactgaatcagaaggggagccacactgtctacagcctttcaaaaggaagaaaggcctatgaagatgtagaaggttcacacacaaggtaatgattttaattctgaaggggcaccttgagttccatttggcacgtttctgaatttaactgtcaggaatacacttaaggccattttatcggtatttaactttttggcaaaatagaagctttggtcatagccatagttctttaaaaatttttttaaagaggttatctctgattaaaacaatatttttagcaagtgatacataacaataacaacaatgtaaacatcttcaaatctaatgcaagagcaaaagctcttcaccagcatcttaaatacagcgagagtcagtagtgcttacaaaaagtagagggttctcttctagggaatcagaaaattatcaaaataaggcacagcctgttgttatcacagatttgtgttaggcagtagtgtttttttctggaaggcataagttggaaatctgattacccaaaggtttaaaatgtggttctgaaaataatgccaaatgacaagggtaactaactgggagtaatggcaattaattagtgacaacattacatctagcgacgcgtgggtcgacgatatcccgggaaattccggaccggtaccagcctgcttttttaaccactgttctatagtcacaatagct

SEQ ID NO: 125925 - DNA, 972 bp, Homo Sapiens
ggtccagttggaaagagggagaagaggaaagaggccgtttctgtccaggaaagaggcgcttgcgcttctggtgcaggacgagggccagcatggcgaagaaggtgaagatgaagaggatgaagatctggccctcggtgaccaggtaccagtagtacaggccactgggtgccaccaggagcagggcaggccctggaatcaagctctcagctttagaggcagtaaagcagccgctgaagtacatgaagaggatgaggaagaaggggatgtaccacatgcagtgacccaggtactcatcataatagtagagcagctcaaaggagtcgatcagcgtctccggcttgagattcttgatgatggggttctcacggacagacaggtggtgctggtagccactgaagagcaggcggtggttgacagagtcacccaccaggtggatgctggcacccatgatgaagatgatgatgctcacgtacgtgatggagcgtggcagggtgcggggggaccgctcgatgagcttgagcaagagaaagggcgtgatgacgttgtaggccatgtggaagtagtccccaacactgggcttgttgagtggaaaccactcgagagggaataccagcatggcaatgggacgcccaaagtccagaacccagttctgcagtgtgaagtagaaccagaggtcgaggtggaagggagccgtgcgggcagcctcatcagcgctcacagagccatgcctggcctgcaggaaggaggcgcccagctgcgcgcctgggccgcccgtcgctcccaggtgctgccgcctccgcgtcgcctccatggctgccccgcaggcccctcggccctgcctttccgaggaagagaccggttcagctcggctgccccggcggagcggacgcgtgggtcgacgatatcccgggaaattccggaccggtaccagcctgcttttttaaccactgttctatagtcacaatacgcctc

SEQ ID NO: 125926 - DNA, 463 bp, Homo Sapiens
gcagcatcctgggcagctaatgctatctcatggtgacaagtttcatgttaagttggatagtctttccaattgactcaattctatttcctccccacccataataccagtattttatagaactagctttttaaaaaataagaatttggcattttggaactttgtcccatgtgagacattgtgctttaaactgcccctttctaaaaatgaccctaaactcaaacagatctcagtgtctgcgtttcaactaacttggataccatacatagcaaaagcacagttgttaaaaccagcagattttttcttccaaaggaacatcagtaggacttcccaaacatgttactagttcataaccagctatatgacaaagcaattggttccccacagtgacagctcacataaacacattttgactcgacacactgaaaacaaggatttccaagctaagcaagtcatcagaccagct

SEQ ID NO: 125927 - DNA, 749 bp, Homo Sapiens
caagtcccaactgaatctttactttgatcatcacttccagcggcattcagaggctgctgtgcggtcagacacagagctccctcgaggcccctgtgtgcttatgaagtacctgcaggttctgagcgtcggcgccagcccgggccaggggtctgcagacagaggcacctggtggctgctggggctccctggggtgagccatggcacgggagcccctaagcgccaagctcgccacggtcttcgtctctcggaaggcaggggaagaagcagcgctcccagacaggacagagaaaagcctatgaaacaatgctctccagtcaccaaccagttgcctgatcagagctggaatttactgctgggacaagagtgcactccgatttgctttcattttttccagacgcttcactaagtggccgttgctcacctcgagctcttctgttttatccaatgcagagcggagctctctttggagtttccgtttttctgccttaagttcatcttctattttttctgcattttcagccgctgatttgtaacgtgatacttgactctctaaccttattacattttgttctaatgcagttatctcttgctcagattttgcaagtttaaatttgaggtcgctgatctgtctgttggcatccctttgtaggtccattacatgcatgtctgtcccgttttccaagacatcatcttcagatcgaagattgtctagtttgccaatcttctgtctctcatacagccgcggccgc

SEQ ID NO: 125928 - DNA, 489 bp, Homo Sapiens
tctaccttcagctcttcggtctcaatcagagtagacaaatcccacgatttttctggagggtgttttcatattaagaaactcaaagggcagctggaggagagacagaagattggcacactagacaatcttcgatctgaagatgatgtcttggaaaacgggacagacatgcatgtaatggacctacaaagtaaatgtcaattcttgtgtagaagtaaatgctttcacatgtgctgttttagtatacttgtgctggcagagaaaactgtcacggcaaagaatgccctcattccctcacatccccacaaaagcccttaaaaataaaagcacaaggaggggtaggtagacagaacaatggtgtttctctctgagcctatgaaatagaacaggtacccaaaaacgtgcaccaagataccaccacatgttgtgccgatggaaaccacatttactttgctggatacagcaatctttcgatctgttgattgtatgaaa

SEQ ID NO: 125929 - DNA, 1088 bp, Homo Sapiens
  misc_feature (67)..(101): n is a, c, g, or t
tatagggcgctactcgctatagccgaacgacgagcgcagcgaagtcagtgagcgaggaagcggccgnnnnnnnnnnnnnnnnnnnnnnnnnnnnnnnnnnncagtcgacggtaccggacatatgcccgggaattcggccattacggccgggatctttatcattcttctaacatgttttggtttctctaatggttcattttcctttagcttgtgaaaattagggcagtttgtccagagccttactcgcaggagacaccagacccaacccatgcttagatttctgttaataaaagggagaagggtatttgaataggtagtaaaggcaggtacaagtttaagggagcagggctatcatatgtactaggtgagatttctataaatgtctgaaaagttacatgcatagtcattggctcaggtaatttctctgaatttgaacttatttgatttatttaaccaagttattataatatgcagttctctttaatcaatcttctattattcaatcatctatccatttattaattcaacaaatatttattaaagtgcctaccatgattatgtgctgtagaaaagacaaggacatttactaggggggattgtgggcccaatcggcatcataagcatgtctgaagcaaaagacaataatcacatccaacggcaccagttcagctcaactttagaattcagcagtaacagtacagatggcctaaagtacatctgtgtgtatctgtacgtgtgcacacacccatgtatatatatttatctatctgtacaaacactacatatgtatacacactatctatgtaaaatataatatatgtataatgcatataaattctaacaagtgtatttgtgttatctttaaaatagaacaattgtatcttgaagtggtaaatgcagagaattggttttattgttgatctgtggatttaatgatttctaggtgaaaaggacgtttaagtgtacaatttcttttcttaatttaatatatttatgtaaatgcatgcctgaaatttggttagattggctgtgttttgtgtcttttaacatgatcaaatgattaaactttatcttatgacttgaaaaaa

SEQ ID NO: 125930 - DNA, 1402 bp, Homo Sapiens
ttttttgcggttagagcaaatcaacttttatctccaccgaaaagacccattccactggaggggcccgtgagctagacggacttgccgtccagccctccaagccccctgcggggcggccaggaggatccctgagtccagcttgtaaacaccagagccagccctggagcctcaggcctctggagtcacggcagcccctccagacccttggattggggacatctgaggcttcacgagcccgggcagagctgcaccctgggctgtccactcggtcaccccagtaccagggaccacctcgaagcccccctctggtcggcccacagagacctgctcaggcttcagcaatcgtgagtcatgattcgtgtcttctggaggaagcaggcggaggctccagcggcccagcccaccccgcatcacaccaagactgacggcctcacttgtcctcacggtgtcctgattaaagcagagacgaggaggagcccagagccagttcagagcctgggccacttggcggttgccggtgctacgtgggcccttggaaaatgccacagacccagcaaggtgcctctgcccacccgaagtccccacaccagcagccatccaccctaggcaggggtccagataggcagagggtgggcttcggtgttgaacacgtaggcgtccaggctgagcaggtttgggtcatcggagaagagcaagacagatacttgagcgtctcccccaggaagaagctctccatcttgtccctaggctcgggcttctgaggatcctggacattgttgatggaagaatagccacccgaggggacccgtgtgaatcggctgaagctctgcagaatctcccagccccagtcctggtatttgcggtcccctgtgacgcggtacaggtagaacaggctctccacggtctctggccgcagcaggttgtgcctgtctgctggcttgacctccacgtcccgacggcccggctgggggtaaaggttgaagtgcacgatctcgggactcagccccgtctccatctgccggttcatctggtaacaagtctccatgagctcctgggccagctccatgtggctggcgggcaggccgtggtagacgcccagagccagcgtccctggcaggaagcacaccaggtggtccatcttggcactgaagcggccgtgggcaagctcccccacaaaggtgagcttactgggctcggagtgccgcagcaggtgcgttctgacaccctcgatggcttccacgtagtcttccagcagctgtgtctcctgcttcccgccctggatccactgcttcagcaggtactcatagtagctgtcggccctggcgcccagcgtgaatacgcccaggtgggtgaacctcgtgccgaatcggcgcgccgtcacttcatactctctcccgcttaa

SEQ ID NO: 125931 - DNA, 815 bp, Homo Sapiens
aatggcgaagagtatgaagtcgacggcgcgccgaattcggcacgagggacggcgctgcgatggctgcctgcgagggcaggagaagcggagctctcggttcctctcagtcggacttcctgacgccgccagtgggcggggccccttgggccgtcgccaccactgtagtcatgtacccaccgccgccgccgccgcctcatcgggacttcatctcggtgacgctgagctttggcgagagctatgacaacagcaagagttggcggcggcgctcgtgctggaggaaatggaagcaactgtcgagattgcagcggaatatgattctcttcctccttgcctttctgcttttctgtggactcctcttctacatcaacttggctgaccattggaaagctctggctttcaggctagaggaagagcagaagatgaggccagaaattgctgggttaaaaccagcaaatccacccgtcttaccagctcctcagaaggcggacaccgaccctgagaacttacctgagatttcgtcacagaagacacaaagacacatccagcggggaccacctcacctgcagattagacccccaagccaagacctgaaggatgggacccatggaggaggccacaaaaaggcaagaagcccctgtggatccccgcccggaaggagatcgcagaggacagtcatcagctggagggagcggtgatcgaacttaacagggcacgagctccttcaggagagcaaaatggccacaagcttcctgcaccggccagaaaaaggaacccttgtattaattatcccaagggcttatgactttcctcttgtg

SEQ ID NO: 125932 - DNA, 2146 bp, Homo Sapiens
  misc_feature (77)..(77): n is a, c, g, or t
  misc_feature (235)..(235): n is a, c, g, or t
atgggggatgccccaggggccccccaaggttgccagtgtggcccaccccgaagggtggcgggaaagcccggcccctnccggggacccaagtccacagccaccacccaagaggggagccagcctgagcccccacagccccaagccgtgcctgtggcccggtggccgtgaccacgcggggcgaggacaggtgctcacccgtgtgaatcggctgaagctctgcagaatctcccagccnccagttctggtatttgcggtcccctgtgacgcggtacaggtagaacaggctctccacggtctctggccgcagcaggttgtgcctgtctgctggcttgacctccacgtcccgacggcccggctgggggtaaaggttgaaagtgcacgttctcgggactcagcccccgtctccatctgccggttcatctggtaacaagtctccatgagctcctgggccagctccatgtggctggcgggcaggccgtggtagacgcccagaggccagcgtccctggcaggaagcacaccaggtggtccatcttggcactgaagcggccgtgggcaagctcccccacaaaggtgagcttactgggctcggagtgccgcagcaggtgcgttctgacaccctcgatggcttccacgtagtcttccagcagctgtgtctcctgcttcccgccctggatccactgcttcagcaggtactcatagtagctgtcggccctggcgcccagcgtgaatacgcccaggtgggtgaagaggccactgtgggtattgatgaacatgggcaccagcccatccttcttcccagacaggccgtggatgtgctgtgtcaccttctccactgcctcctgaaacttcttatcccctgtgagacgggagagctcccggaactccagctgaatgctggtcacctcggccacagtgctgtcggaggtccaccgtggcgggtgggcaactccagtaccgatgttcacatccgagtaaggaatcttggatggtgttctgaaggcaggcattagccgatttccaaaatcctcagctttcctcaggaagaggctgtccccagacaggtggtaggcactcaggagcccccccaggatgcggatcgtgctctcaaacaggttgacgtccacgtccttttcaaagtgtaacttcttcgacacccacttcctggcttcctcaaattctttcctcagacccaagatccacatggtgtccagcgcgtcgatcagtgtgagaccgaggccaaaccactcactgaaggacctggacacaggcttcagctcgtcatggccccatgcaaacttgcggtatcctttccatgcatgcaggaagacgtcaatcacgcccttctggcgatagttcagatgcactggtgtgccctgtgtcctggccggtggcaggggaggcttggtgggcacttctgctcttcttgaagggagctcggtgccctgctcaggctcgatcaccgctcccctccagctgatgactgtcctctgcggatctccttccgggcggggatccacaggggcttcttgcctttttgtggcctcctcctgggtcccatccttcaggtcttggcttgggggtctaatctgcaggtgaggtggtccccgctggatgtgtctttgtgtcttctgtgacgaaatctcaggtaagttctcagggtcggtgtccgccttctgaggagctggtaagacgggtggatttgctggttttaacccagcaatttctggcctcatcttctgctcttcctctagcctgaaagccagagctttccaatggtcagccaagttgatgtagaagaggagtccacagaaaagcagaaaggcaaggaggaagagaatcatattccgctgcaatctcgacagttgcttccatttcctccagcacgagcgccgccgccaactcttgctgttgtcatagctctcgccaaagctcagcgtcaccgagatgaagtcccgatgaggcggcggcggcggcggtgggtacatgactacagtggtggcgacggcccaaggggccccgcccactggcggcgtcaggaagtccgactgagaggaaccgagagctccgcttctcctgccctcgcaggcagccatcgcagcgccgtcaacaggccgccttcggcgcgccgtcgacttcatactctc

SEQ ID NO: 125933 - DNA, 556 bp, Homo Sapiens
cctcgcacttggttgcccgtgcagctgcaggctgagggcagggcctggtatctggggctgaagaggccctctgattccaggaccacctggtgtgcttcctgccagggacgctggctctgggcgtttaccacggcctgcccgccagccacatggagctggcccaggagctcatggagacttgttaccagatgaaccggcagatggagacggggctgagtcccgagatcgtgcacttcaacctttaccctcagcccgggccgtcgggacgtggaggtcaagccagcagacaggcacaacctgctgcggccagagaccgtggagagcctgttctacctgtaccgcgtcacaggggaccgcaaataccaggactggggctgggagattctgcagagcttcagccgattcacacgggtgagcacttgtcttcgccccgcgtggtcacggccaccgggccacaggcacggctgggctgtggggctcaggttggctccgcttcttggtggtggctgtgacctgggtccgggaaggggcgggcttgccgcaaccaagtggagcc

SEQ ID NO: 125934 - DNA, 630 bp, Homo Sapiens
cgtattagaggatcgtgctccactggttgggcaagcctgccctccggacccaggtcacagcaccaccaatgagcggagccaatctgagccccacagcccagccgtgcctgtgggccggtggccgtgaccacgcggggcgaggacaggtgctcacccgtgtgaatcggctgaagctctgcagaatctcccagcgccagtcctggtatttgcaggtcccctgtgacgcggtacaggtaggacaggctctccacggtctctggccgcagcaaggttgtgcctgtctgctggctgttggcggatgcagagctcaggggcaaaggccaagccctgccaagcaccctcctcctgatggaccctgacccaggcccaggcccaccttgacctgcaggtcccgacggcccggctgggggtatcaggttgaagtgcacgatctcggggactcagcccggtctccatctgccggttcatctggttacaagtctccatgagctcctgggccagctccatgtggctggcgggcaggccgtggtagacgcccagagccagcgtccctggcaggaagcacaccaaggtggtcctggaatcagagggtctcttcagccccagatcccagccctgccctcagcatac

SEQ ID NO: 125935 - DNA, 2766 bp, Homo Sapiens
ttttttttccataaaaatggatttattgccaaactttaagaaaggcgcttcataagcagaagacacagaatgccaccctcctcaaggaggcaagcacggaatgccaccttcctcaagcacgcaagctaggcaggccctgcacgttctcactcctctcccagaagccagcttcctgcctagggcccagcctgctaaaggatggaaattaatagcatttggtcacttgaggtggccccagagctacttgcctacccaccaggccccagggagagtggctgggcctcaacctgtgacctacatgcagggtctctgcacccacagactctgccctcagtccagctgctgcagttagctacttgacacaggagggaactgaggctccaattcctggcagtaggtggcttggctaaagccccagccagccatggctgctggtgggggaaggctgttcctaaggcaagatggcaggggatcacatgactgggcaactgatgtccttcttgctcttgtcctggggcagatggagggaaagccagactgtggcatgggggcccagtttgcacaaggaggctgatgggggctcccgaaccagtgcattgctgctcacctctgctccggccccacgcagcccagagaagacatctgcccctcctgatccttgactactacctcaagaacaaagtgacagtacaataaacgataacgaaggcattgacctgtgcagcaggcctcagtggggttggggaacagagcagaaaggccagggcatgttgctgtgacccccccctttctctctttcagtaaacaaaagtgcacatgcagaaatctgggcaggtcctatcggaagctgctctcaccccagaggccccagggagagtggctggacctcgggagccagggcctctgcacctacaggctctgccctcagtccagctgctgcagcacgatggagactggatgtgcccctagagtcagggacaatgtgggggagaggctgggagaggaccagggtgcagggatggaccaggaaagggaaagaagaaaatgtctcttctcctagaaagttacaggagagcagcccatctggggcttgaaggcggggaagtggcttcggattccaacatacccctatcagcatttgaagaaatgactgggatactggacctgtttcggctgagaaggaaccacagagatccagataaatccccatctgaggaggcacagaagttggtggggattctcttctgaaggctgacatgatcattacaagtaagtttttctaatgtggacatcagagccactctgggatccacctcttcagaaatatacaaggctggacactatccaggggcagagactagactaggggaccccttaaattcctcttccactcttgaatcctccagacctaagccctccaatcatagctcactgagaggaaggggctgcagaaaatgtccttgttttgcaaaaaaggaaacagggccaaagagagagaggccacacagctaatgtcctcctcacaaagaggcctctcatctccctcaagaggctccagctgggtcctacgttccccccaactgagggatgaacctagagcctggacccaaggcctctgcagctactcagaataggtgggaggaggggctggctttgaggctgccttagccatgaggctctttgcctaggaatagctggagatgggagctgcagggggctcagctgtgctgtattcagaagtcaggaatgtaaactactggggatggggaacagagatgatgtcattcccagaaaccccaagtgccgcccccaaagccctggggcagtttggaacgaccacacaaacacataggtcccagcgtgtgtgctcccagccccagccccagcccagaggccaggccagatagccaggcagtagcctgggtggcacctggcaccactggccagagcagagtaggaaggacgccaggagtctcttcgggtcatggccaaaccctgacatgcccaatggccctcctgcagccattgctgtagaagcagaagcacatttctcagcagggctgggccttgatggacttgatggatggccagaagggatggtgcctctggcccagaaggccctagggtgcacttctcctgtagagggtcaccagctccttccgcttctcccttagcccaggtgcttcctggctcagctctcccaaatctctcatttcctgcaggacctgggtggcctgcctcagctgctccacagcctggctgagcaatgtttcggcactaacaggggccggctcactgcccagcaccttgttcaacagtttctccgtctgttccgaggccaccttcacctccagctgggcccgatatagccgttccctgggctgcaagggatgccgcgggccttccccaagcaagtccccaagggaggagcagcggggatggaactgaggtggcaggtcccaggggggcagtgctgtggatgttgttgcatcctttggaggagttcctggggtgccctcagcctgagagggcttggcaggctcaggactgtcatccatgccattcactgagacctgcactgtgcctggagcaggtggcccagaagcctgcatctcacccatggaggctttcagtttctctgataagatcttgggtgggggtgtagggggcttcccaccctccctgggggcagcctcagaagtctcagaacagggtgcctgggacggttctgcactctctgcagcaggggctcttctcctcgtgccg

SEQ ID NO: 125936 - DNA, 1497 bp, Homo Sapiens
  misc_feature (506)..(506): n is a, c, g, or t
  misc_feature (543)..(543): n is a, c, g, or t
  misc_feature (585)..(585): n is a, c, g, or t
  misc_feature (737)..(747): n is a, c, g, or t
  misc_feature (783)..(799): n is a, c, g, or t
  misc_feature (1405)..(1457): n is a, c, g, or t
agagccaagttttctttgcgtgccgcgggtttttaccaccaagggggacgaaatattttttattgccgccaggggcgagccacaggagggtgtattatatggccgcccgcggggggcgctggctcaggtgtgtgctcttccacgggcgccgttatctggaagagagggtgttataccgcgtgtgtgcgcgcacgagaagaacgcctctgtagcgtggacaatttcccgcgccccacgtttgtttgcgcggacagaagagactcgtctcccaacgagaccccggcggccgcgcgacaacaaattggagatatattctccgggaaggtgctcccgcgagcttcggcgacgcctcccccgcgtgttgtgagacaaagagaaatctccccgcgcatgataaaatagtgagcccctcgtcctccacgagagattcgtctccactctattgttggcggagatgttgtgtggtttctacggggagagaacgcggtattgtggtgtgttggacncccctcgcggggggcgcgtgtttttttgttatttatngggtgtgggagattgtcccaaagaccccttttagtttcattngaccccgcgggatttttccctatgggaaacacaaccgttttgggcccccgggttcccctttttccttgcggggggcccccgcgcccacataaagaaatggtttttgaaaaattttttgggggggccgagggggcccaacaaagtgtgtttannnnnnnnnnngtctggtgtgaaagctgtttccggggtggcgtgtgnnnnnnnnnnnnnnnnnattagcaaaattactttattctaacaaatagtttaacacaaaaatacgaactagccctccagggatctttggggtctacgcttcccatcgcctcagtgtccggtgcatgaggaaggtgtcctctgaagggcggggccggagttgaagtcggagagggggcagaccgtccagggtcaggtgtggagattcataaaatagcgtttctgggtcacacaagatggtcatgtctggcccaggcccaggtggctcctttgggtgcggggctcgagcctgtggcggcaggagagccaatttctccctgagcgcggcattcagaacctgttcctccggcacctgcaggctcaccaggtcccggaagagccgcttggagcgcggcacgttcagcccctcggacacgctctcctccaggccgcagcggatctggaacgactttctcagctgttcctccacggccttcgcagcatcaaagtggctcccggctgcggcccgcagctccaggcccaaggccaggctgctcttcagcacgggcatctccagctcctgcggcaccgcaggctgcggctcggaccgcaccggggagggcggcgtcaggcggaagcggacctnnnnnnnnnnnnnnnnnnnnnnnnnnnnnnnnnnnnnnnnnnnnnnnnnnnnngggctgccgtgccgcggctgagggctgtcgggccgcgggc

SEQ ID NO: 125937 - DNA, 686 bp, Homo Sapiens
gtttattagcaaaattactttattctaacaaatagtttaacacaaaaatacgaactagccctccagggatctttggggtctacgcttcccatcgcctcagtgtccggtgcatgaggaaggtgtcctctgaagggcggggccggagttgaagtcggagagggggcagaccgtccagggtcaggtgtggagattcataaaatagcgtttctgggtcacacaagatggtcatgtctggcccaggcccaggtggctcctttgggtgcggggctcgagcctgtggcggcaggagagccaatttctccctgagcgcggcattcagaacctgttcctccggcacctgcaggctcaccaggtcccggaagagccgcttggagcgcggcacgttcagccctgagagcgcagcggggacggaggtgagtggcgcgcctcaccccgactcccgcacgcggtcggtcgcccgcccccctcaccctcggacacgctctcctccaggccgcagcggatctggaacgactttctcagctgttcctccacggccttcgcagcatcaaagtggctcccggctgcggtccgcagctccaggcccaagggcaggctgctcttcagcacgggcatctccagctcctgcggcaccgcaggctgcggttcggaccgcaccggggagggcggggtcaggcggaagcgga

SEQ ID NO: 125938 - DNA, 474 bp, Homo Sapiens
ttattagcaaaattactttattctaacaaatagtttaacacaaaaatacgaactagccctccagggatctttggggtctacgcttcccatcgcctcagtgtccggtgcatgaggaaggtgtcctctgaagggcggggccggagttgaagtcggagagggggcagaccgtccagggtcaggtgtggagattcataaaatagcgtttctgggtcacacaagatggtcatgtctggcccaggcccaggtggctccctcggacacgctctcctccaggccgcagcggatctggaacgactttctcagctgttcctccacggccttcgcagcatcaaagtggctcccggctgcggcccgcagctccaggcccaaggccaggctgctcttcagcacgggcatctccagctcctgcggcaccgcaggctgcggctcggaccgcaccggggagggcggcgtcaggcggaagcggacctgccg

SEQ ID NO: 125939 - DNA, 1104 bp, Homo Sapiens
cggctagtacgaggcctggtgttgaattcggcacgaggcgcgagcccgactgccacgggccgggagacgggcctgggagcggcggcggcggcccgagagctgcgccgggagagctgtgccgcgagcctccgcctcttttttggcaccgcacagtggatccctggaggccgagcgccacgccgcccgggtacccggcagatcgcgaggtggaacgggccgtcgctgcgggggacagcgttccgaggcagttggtcctctccgggatgccgtaggcatcagctgaccggcccagcccacgtgactacaggggcacttgatgggaatcatggcagcatccaggccattgtcccgcttctgggagtggggaaagaacatcgtctgcgtggggaggaactacgcggaccacgtcagggagatgcgcagcgcggtgttgagcgagcccgtgctgttcctgaagccgtccacggcctacgcgcccgagggctcgcccatcctcatgcccgcgtacactcgcaacctgcaccacgagctggagctgggcgtggtgatgggcaagcgctgccgcgcagtccccgaggctgcggccatggactacgtgggcggctatgccctgtgcctggatatgaccgcccgggacgtgcaggacgagtgcaagaagaaggggctgccctggactctggcgaagagcttcacggcgtcctgcccggtcagcgcgttcgtgcccaaggagaagatccctgaccctcacaagctgaagctctggctcaaggtcaacggcgaactcagacaggagggtgagacatcctccatgattttttccatcccctacatcatcagctatgtttctaagatcataaccttggaagaaggagatattatcttgactgggacgccaaagggagttggaccggttaaagaaaacgatgagatcgaggctggcatacacgggctggtcagtatgacatttaaagtggaaaagccagaatattgagttatttcttaacaagtttcgagagagaagggagcaagacaagagcaagcaacggctattaaatgtcacaatcctttaattagaaaccatttattggccggacgcggtcgtca

SEQ ID NO: 125940 - DNA, 1450 bp, Homo Sapiens
tttttttcacgtggaatggtgttttcattggtgttagttgggggaagaggttaatggttacagagccagggcctgggccaatggggtcaggctctccctgccctcaggtgggcagtcggggctcctgctgtggtccgaagcccctcccccattgtgtcctctcaggcagttgatagaataaattccatttaaaatatatgcatttctctctgcttagaaaataacatttacaattgaaaagttaggacttgtgggatctgttaaccccactgcctcccacccctgctagccctgcctcagtgagggaaggcgggggcaggagctgcctgggcaccaccgctgtgtatttacatgtcctctgtacacctacggagagggggcccggccagacacacgcctcctccagcctctcagggcctgggcaggatggtgggtggcaagaggcattcccttggcacaacttgggacatgggctggggggtacagagaaagcacccccaaagccccacccctacttcctccctgaggagagagctcttaccagggtccctgtccaggagcagggctgtcctgctcaatcgatcaaaccctgggaggggctttgctgagatgcagcggaggtccctcgctagtcaggttctaaggtgggctgccccacaagagctgtggtgcccacagccgcgggctgagtgggaaggggccctgctaggaggggcacttcagcctgaccagcccttggcccgtccctagggtggcaggggcctcttctgtgctggggcaaaggcagtggacttcggcaggtcacagtgggcactgctggagggctcagtccagcatggcgtccagctggtcagccagggcgtcgaacatggtgctgatgtcatccagaatgtgcttggtggaggcgctgggggtgccctcttgctccttggtgccaatgctcttctctgcggctctcagtgcagctgccagggacgagctggtctgctccagtctctgctgggcctggcctgggcccacagtcccagtgctctcaggccgtggaggaggcactgggcgggggccgagccggggcgctagcttagggccagaaaatgccagctgggtgcaggccaccgacacaggcttgggggctgttcctgctccgggcaccttgaggagggcagcaggggcggccgggggttctgtctccccattccaccgactagctgctgagctttccagacctggccctgggcagggcggcactggaggctgcatggcggggctgggagcaaggggggttggaactccttgggctggaaggctgctgggctcgggctggggaaggctagaagctggaggagactcgccaggagttggggaaggcagtggggcagcggggccaggcgtggcactggccactccgaaggccagcagtgcggtctgcagtggctctctccctcgtgcc

SEQ ID NO: 125941 - DNA, 879 bp, Homo Sapiens
gaagttccataataacaaaagtcagtttattaaatgctcaattctcaaaattatatatatatttttttaattatttaaaaaaacttccatgcccttccattcccctccctccaaactaggtattgtccaagttgtatcaaatgccacaaagtctaccatgcacccagaagcagagaagacaggaggtccagaggacaaggtatgctggggtcactactcgcactgcagagtccacgcgagttaactcatgctgggggcaaagaatggaaagagctaatacacagacaaagcaaaagaacgaaatgcgcagcctgaccagagacgtttacaatttataccaacttacaaatatttagggtgcccaccaactccgagagaacagaccaaactaaccacatgaaggaagacctctgccggggcctcctctccctacaacctcctctcaagaatcattaggaagcccaaacagcttcacagttccggcttcccggctgctgtcatatttgccgtctttgtcatcacaggcaaatgccagcagaggccttttggggtgccacgccactgtgaaggtcggagactcacactgtacctcccatagtttgtcccctgtctccacttcagcaatgtcaataaaatgatcttccgatgctgacgccagcattttcccatcatggctgaaactgagggttcttacaggccaatccagcctggaaaagcaccgaacacacactaactcatccacatcccagaggctgaccaaagcatctgcacttcctgtggcaaagtacttccccatggggtcaaacttgatacagatgcagttggaaggatgggcgttgatggaccctcgtgccgaattcgccacccaggctcgctcct

SEQ ID NO: 125942 - DNA, 1166 bp, Homo Sapiens
ttcttaccagggcccattcccaggcctggaaaaaagccaccggaaaccccacattaatcttcattccacatccccagagggctgacccaaagccttctgccctttcctggggcaaagtacttccccatgggggtcaaacttgatacagatgcagttggaaggatgggcgttgatggactgcacaggcttcagttctgggtagctgaggatgttgatacaaccattgccatttgtcaggaagaacatattattgtcattgttccaggagatttcgttgacctcgaacttgaactgctcttctgctttggaacggtgtgtcttggcatcaataaaggtcaccacatcatccttgttgcctacagcaatggtctgcccatcaggactccagcagatattaatgttctcccctttagtgttcacagtggcaatgcattttgtagtcctcacatcccagatgcgaatggttttatctccggacgccgtaacaaataggtcaggattacttggatgccaacaaagctggtccacactatccccatgtccccgataattgttttctttgaccaaccggtccttctccagcaagaagacgctggccgtcttgtcgaaggaccccgaggctaggcgacgcccgtcgcaactccaggccaccgagtgcaccttggcgctgtgcgccaggaactcgcgcgtcttgctgtggccccggaacagctcctgcatcccaagcacgtagcgcgacgggccgctgctcactgagcaccacggggccatcgagccggggccgctctggcccaacgccgagggccccatggctgcagcggggaccgccatgccgagctccccagcttccaactcacaacactgcagcagcctccacggcgcagtcagtcctggcgccgctgccgcacgcatgcgcccggaagagcgacggccccctctgcgcaggcgcgctgtaccccgccccggaagggactacaaatcccggtatgcagcgcgtgcccgcgtctgcttacttagtaatatttggttcttttaactccaaatatgcttcacacttaacgattccgagtttttttagtgttcttatttctcccttacctattctttggtagatatatgtgtattcctgtttaatcgaataaaagaaccaacactaaccttctaaa

SEQ ID NO: 125943 - DNA, 2241 bp, Homo Sapiens
  misc_feature (225)..(808): n is a, c, g, or t
  misc_feature (838)..(857): n is a, c, g, or t
ggcgagtagccaatcagatttagaccgactctcgttgtatctttccatggtttcatggcaaatctgttccggatggccaggcgatatcccggtaaggccgcgtcggtgaaggggattctcacacacgcagctgggggaagacgtacccgactgggtcctacaggtggctgtggaagcccacgcttccgagggagaaagcggacaggttccgtaagcggcaggtcnnnnnnnnnnnnnnnnnnnnnnnnnnnnnnnnnnnnnnnnnnnnnnnnnnnnnnnnnnnnnnnnnnnnnnnnnnnnnnnnnnnnnnnnnnnnnnnnnnnnnnnnnnnnnnnnnnnnnnnnnnnnnnnnnnnnnnnnnnnnnnnnnnnnnnnnnnnnnnnnnnnnnnnnnnnnnnnnnnnnnnnnnnnnnnnnnnnnnnnnnnnnnnnnnnnnnnnnnnnnnnnnnnnnnnnnnnnnnnnnnnnnnnnnnnnnnnnnnnnnnnnnnnnnnnnnnnnnnnnnnnnnnnnnnnnnnnnnnnnnnnnnnnnnnnnnnnnnnnnnnnnnnnnnnnnnnnnnnnnnnnnnnnnnnnnnnnnnnnnnnnnnnnnnnnnnnnnnnnnnnnnnnnnnnnnnnnnnnnnnnnnnnnnnnnnnnnnnnnnnnnnnnnnnnnnnnnnnnnnnnnnnnnnnnnnnnnnnnnnnnnnnnnnnnnnnnnnnnnnnnnnnnnnnnnnnnnnnnnnnnnnnnnnnnnnnnnnnnnnnnnnnnnnnnnnnnnnnnnnnnnnnnnnnnnnnnnnnnnnnnnnnnnnnnnnnnnnnnnnnnnnnaagaattcggcacgagggcggctgtaggcnnnnnnnnnnnnnnnnnnnngactttcctacatcagttttatttaaaacacaaacaagtatttctctttctgtaagggcaaatggttcaaataatgcggaacacgaaacattgactaatacaagtgctttaaatatgaaacaaaattattttttaaaaaagcaaaagaataaagaatatatacaaaagggacctggaatctgtaaggtgattccaaaaacgaaataagtagaaaatccatggtgaaacctgaacattctacctctgctttggagaagggctatcatacaacattcagtcagctgaagatggattggtagaggtgtgtctatacataaacttcagtcatttttgcttgtgcagaatcatcccaatcttcccaagactgaatgggcagtcctgtggctttcttccttttccatattcccaacaaggctacgtgaagttcaactcttgatgagccgcttacaacagcagttccttaggagccaacatgacaggtgggtcagatttccctatgagaaacaaaactggccacctacagcaaaatatcaaaatgggtaagtccttccttcctcttcctcctgattatatacaacatatctcctttcaagactattatttccatcatgcttattccttcacaaatctaaaccttgaggtgatatgaaggaaaccaacatcaagaaaagaaaactcaattcagaaatgaagaaaactggcaggtatacaatacacccccagagcatctcaatatccctggcacagtacaattcagtgtactgctacagcccatagataaatattggcagcttgaataagctcattttttccctcaggtggttaaaggccaccaaacaaatactgggcaacaggggtttgttgggagagttagaaataaaaaattaaccaaattttgtccctgtgttaattcaatgccagcaaggaggcaagtactgaagaagaaaagggacaattttcatactaaaaaagaattcctctaatcatgtcaccatctcatataatgaatccagggaatcccagaaatagaaaattagtttcaggggacccctgaggcactttaaagccttttaaaaaattacagtaataataaattagatattgctcttcagaggctaacagagcagcagaagcatcaagatcaggtccaaagagttatgcccacattacaggcttcctgagctgctcagccctctttaaagcttagttgaatctttaaatacctttaaaaagacatacaatttaacacagactgagtgggtatttttgtttagtggtagcataaaatttggtccttaatggtagcagctgtcttcatccatttcaaactcaggtaatattaagtccatcaagacaatacataaagaatacaacaaagaagaaa

SEQ ID NO: 125944 - DNA, 220 bp, Homo Sapiens
ttttacttgtttaagcacatggtatttattaggcattaattggcacacaaatataaggcacgagtacttaatcctcaccctccccccttagcaacgtaaagagacataatcgcatagggacactcacttacaaacacactcacactctctcacgtacttaaacacactcagcctcacatcttaccctgttctctttattagggtctgtttataaaaaagg

SEQ ID NO: 125945 - DNA, 485 bp, Homo Sapiens
  misc_feature (114)..(127): n is a, c, g, or t
aattttgtaaatatatttatgttgtaaaaatttagttttgttttctgttttataactatagtgagaatgatgttttgaagcaaaatttttggttataaaatagttttcaggatnnnnnnnnnnnnnnctggatcctatcgccttttagtagaatatgaaatattcttttagaaatccaatataaataggttataatagccatattctttattactttattgagatataatttacatgccataaagtttacccttaaaatatataattcagtggtttttagtgatatttacaaagtggtacaatcatcatcactttctaattccagaatattttcatcaccccaaaaagaaatcctaaatccattagcagttacttcccattcttcccttcctccagcccctgaaaacactaccatctacttttcatctgtatggatttgtctgttctggacatatcacataaatagactcaaacaatatatggct

SEQ ID NO: 125946 - DNA, 965 bp, Homo Sapiens
  misc_feature (84)..(84): n is a, c, g, or t
  misc_feature (101)..(101): n is a, c, g, or t
  misc_feature (176)..(176): n is a, c, g, or t
  misc_feature (197)..(197): n is a, c, g, or t
  misc_feature (210)..(210): n is a, c, g, or t
  misc_feature (225)..(226): n is a, c, g, or t
gggatctttgatatgatagttatttataaagagacaaatttaatgtagaaaagcagacttcatgcaagtacaaaattagctttnaaaattagatttcaatntaaaattgatctattgacttagtcagcagaataaatttactgacatatcataaaatgctagtatgagaacaatcntatttatttgaacactgagangagtaacttttcntaaacacttatatanntaaatgaaataaaatgctagttatattttagatataaacatcatattttttattaatacctacatcaaatggaaaatatctgaaatttttttccatagcaggtattttctactagaagtagttttactacttttcatttagaacagagtatgagtcttaatctgaagtctttttcatgcccttgttttaaaaaaactactttttttggcctcaaaaaaatcaagggtgtaatttttaataaattgttaatcctatgttttgtaattttcattttaggagcttgacttatttttttctctctcataaaaacacatttgttttaattgtaggagaaattttctcagcattttgcatgttctttctaatctttgttggtctgaatatattggtagtaattactgtaattattcaacaaaaagcatatccgttcaaaaatttttccactatgtcttttttctagtggctactgttttagttttctagttgaatatctctgacaagctttcgtatggttttgttatattttcatctacatgtaatgtgttattaattttattaaatgaaaactaatcaccttcatgtggaaatgctctgagaattgtccttaggcatttggtagtaaccagctaaccaagaagaaacagagaaaccagaacttcatatggcagtccatttagatgaagaatgatgatataaaatctggttccttcttagcaaaataaaaaacaaacaagaaaag

SEQ ID NO: 125947 - DNA, 682 bp, Homo Sapiens
gactcaaactattccctgaatgacaagctgtggataaactttcttttgtttgtatttggaaggctacggcattggggatgatgaatactcctgtgcgtatgatggctgccggcagctgatttggtacaatgccagaagtaagcctcacatacacccatgctggaaagaaggagatacagtaggatttctgttagacttgaatgaaaagcaaatgatcttctttttaaatggcaaccagctgcctcctgaaaagcaagtcttttcatctactgtatctggattttttgctgcagctagtttcatgtcatatcaacaatgtgagttcaattttggagcaaaaccattcaaatacccaccatctatgaaatttagcacttttaatgactacgccttcctaacagctgaagaaaaaatcattttgccaaggcacaggcgtcttgctctgttgaagcaagtcagtatccgagaaaactgctgttccctttgttgtgatgaggtagcagacacacaattgaagccatgtggacacagtgacctgtgcatggattgtgccttgcagctggagacctgcccattgtgtcgtaaagaaatagtatctagaatcagacagatttctcatatttcatgacacatgtgaagaggcatcgtggacttttttctactcaattccagccaagtgttg

SEQ ID NO: 125948 - DNA, 695 bp, Homo Sapiens
acaggcataaagaggaaacatggctttatgtctgacaagaagttttgtcctccccaaggcatatggcatcaaggctgggcctaacccagtctcatgaccttgtgaatccagtccacaaacacagagacacgcgtgaagacagctggccagcgggaccttgcgcatactcggttggggattataattccttccaggacccagcagttgtgggtaaagcaggcaagtgggcccccgtagtcaccctcacaggcccccacaggggccaacagtccctcagtgcacatctcactctcccgcacacgtcctcggtgcttgatgttacactcctggttggagatgacattcagcaaggccacatttaggactgtgtcattacccgtacctttggtctcaccccagcctgcaatctcacacttggtccctggaggcaccacataccattcagggggcaggcagatcagggccacacgctggttcagggtcacagatctctccagcttgagcaggacaagctgggagcctgagggcccacacaccatcttggctactgggacccgctgtaggcttggctctccatgctgtgggttctggaacagggtgcccaaccatacctcatagcccgtgagaggcatatggcaggaggagaacactgccgggcagtcagtatccactgctccttcactagagacccccgc

SEQ ID NO: 125949 - DNA, 780 bp, Homo Sapiens
  misc_feature (747)..(747): n is a, c, g, or t
tttttttaggaataattctcttctttattactgtttacttgtagggggaaaaaccattttcatttaagaaagtccttggtgaagtagtaaaaatattaattttattaaatctcagccttgagtacaagtcttgtccttgactgtacttacaagttttgtcctccccaaagcatatggcgtcaaggctgggcctaacccagtctcatgaccttgtgaatccagtccacaaacacagagacacgcgtgaagacggctggccagcgcgaccttgcgcatactcggttggggattctaattcctttcaggacccagcagttgtgggtaaagcaggcaagtgggcccccgtagtcaccctcacaggcccccacaggggccaacagtccctcagtgcacatctcgctctcccgcacatgtcctcggtgcttgatgttacactcctggttggagatgacgttcagcaaggccacatttaggactgtgtcattacccgtacctttggtctcaccccggcctgcaatctcacacttggtccctggaggcaccacatatcattcaggcggcaggcagatcagggccacacgctggttcagggtcacagatctctccagcttgagcaggacaagctgggagcctgagggcccacacagcatcttggctactgggacccgctgtaggcctggctcttcatgttgtgggttctggaacagggtggccaaccatacctcatagcccgtgagaggcatatgncaggaggagaagcattgccgggcatacagtatc

SEQ ID NO: 125950 - DNA, 556 bp, Homo Sapiens
tttagtaaaaatattaattttattaaatctcaaccttgagtacaagtcttgtcgttgactgtacttaaaagttttgtcctccccaaagcatatggcgtcaaggctgggcctaacccagtctcatgaccttgtgaatccagtccacaaacacagagacacgcgtgaagacggctggtcagcgcgaccttgcgcatactcggttggggattctaattcctttcaggacccagcagttgtgtgtaaagcaggcaagtgggcccccgtagtcactctcacaggcccccacaggggccgacagtccctcagtgcacatctcgctctcccgcacatgttctcggtgcttgatgttacactcctggttggagatgacgttcagcaaggccacatttaggactgtgttattacaccgtacttttgtctcaccccagcctgcaatctcacacttggtcccttgagggaccacataccattcaggcggcagggagatcagggcgacaacgctgtttagggtcacgatctctcagcttggcagacaagctggagctgaggccacaca

SEQ ID NO: 125951 - DNA, 764 bp, Homo Sapiens
  misc_feature (367)..(402): n is a, c, g, or t
  misc_feature (576)..(618): n is a, c, g, or t
gggggagtggggaggcggcaagaggacctgcggcaggccctcttcggcagtctctccggcccggtttccctcggcgtgctactgtgcgctcgatccagcaccatggggaagcgggacaatcgggtggcctatatgaacccaatagcaatggcgagatcaaggggtccaatccagtcttcagggccaacaatacaggattatctgaatcgaccaaggcctacctgggaagaagtaaaagagcaactagaaaagaaaaagaaaggctccaaggctttggctgaatttgaagaaaaaatgaatgagaactggaagaaagaactggaaaaacacagggagaaattgttaagtggaagtgagagctcatccnnnnnnnnnnnnnnnnnnnnnnnnnnnnnnnnnnnntctggtaggtattcatcttcttcttcatcaagctctgattcttccagcagttcttctgattctgaagatgaggataagaaacaaggaaaacggagaaagaaaaagaagaaccgttcacataaatcttctgaaagctccatgtcagaaactgaatcagacagtaaggatagtttnnnnnnnnnnnnnnnnnnnnnnnnnnnnnnnnnnnnnnnnnnngatattaaaggactcagcaaaaagagaaagatgtattctgaagataaacctttatcatctgagtccttgtcagaatcagagtatattgaggaggtgcgagcaaaaaagaagaaaagcagtgaagaacgagaaaaagcaacagcaag

SEQ ID NO: 125952 - DNA, 449 bp, Homo Sapiens
  misc_feature (363)..(398): n is a, c, g, or t
ctgttgctttttctcgttcttgcactgcttttcttcttttttgctcgcacctcctcaatatactctgattctgacaaggactcagatgataaaggtttatcttcagaatacatctttctctttttgctgagtcctttaatatgcttttctttctcagttccatcttttgacttctttttcttttgttaaactatccttactgtctgattcagtttctgacatggagctttcagaagatttatgtgaacggttcttctttgttctttctccggttttccttgtttcttatcctcatcttcagaatcagaagaactgctggaagaatcagagcttgatgaagaagaagatgaatacctaccagannnnnnnnnnnnnnnnnnnnnnnnnnnnnnnnnnnnggatgagctctcacttccacttaacaatttctccctgtgtttttccagttc

SEQ ID NO: 125953 - DNA, 479 bp, Homo Sapiens
ctatgtattttaatattcatactttcagcttttctattttctaatttttttatattctcaatatttataaaataaaaaggtaaatacaaccgtgtttccatacagtattcctcaattcaaaggcacagcatttttcatgttgtaacctcctgtattcactggtgtcttaggatcacttaccaaaaatctgtggcatcttagatttggtaacaaagcctaaatatttccatcctacaaacgtggtcatgcttctaaaaagccacatgaagtagctcaagatgtttggccagccaatgcgcagaagccctaattgaacatgtaaaaggcagatgagatgtgttaaggtattatcttagatacagattatgtggagctcaaagaccttgttgggaacaacattttctaattgcgtttcttctccgtggatgtgcgcttttttgaaatcaaaagacactaggggctaggcaaagtggctctca

SEQ ID NO: 125954 - DNA, 880 bp, Homo Sapiens
tttcaaatccagtccacagcaccttccattttattgttttatttacaaacagggtgaagtcaaagggaaagtcaggggatggagtcagtctgggccatccgaatgtggagtagttcttgggtcaagctctaccatgaaggccacctcttacatatccttttcctgccccttggtaatggccccttgattcctcagggcagcctcagctgctgtacctgaacacttttatgagggcagatggatcctggggtaacaggggtggtacgagggctggggccccctcagtttgtgtaaacctgagttccgatcacacgcatgatttccttctgtatcttggggtcctgagtattaatgttggcatcgcccacctgaccatcctcatatacaaagaagaatcttgtgcagacatggtcggacacagggcacacccagatgttcccatgcttctggaggtccttagatgtaatcacttcacaaagtgctatacagtttagattccgactctgcaggaaccgtgactgaatggatcgggtctgggggatggtattcatcctgttgtatctctggaccagctcatccttggagggcatcctgtgctgtccttttcccattcctgcagtttggtgtaggatgcattgaccagcccattgcgcaggatcgaatgccagttctcaatgtgggacccatggaaggcaaaggtgctgccatagagcttcttggcggtccggaaccgagcctccttggcaggagggctgctcagcaggaggaactggtgtgaggtgtgcatgaacttcagctgcctgctgagaggtagtttgacaacccacgcgtccgcggacgcgtgggtcgacgatatcccgggaattccggaccggtccag

SEQ ID NO: 125955 - DNA, 394 bp, Homo Sapiens
ttttaacataaaatagaaactaactttatttctctggaagaagcaggtactgaatgccggagcagcaacttcgccaacaggctggtgggaaaacatggaaccgcgtgggggaattgggtggaagaggaagcactgatgtccctccagggcggctgccccttggtctccttccagccctggggccttgggccctggtccccgccagagaatggtctggcaccctttctccgcttcctgagccacctcaggctatttccaggcacaagatcctgaggccagccaagtcccattcaagtccatggtaaggccacaagtcacattctgcccgacaccccagctgctgccaggggccccctggaagaaggcccagtcctaggaggtcccaccgggtgcc

SEQ ID NO: 125956 - DNA, 1053 bp, Homo Sapiens
  misc_feature (789)..(789): n is a, c, g, or t
  misc_feature (792)..(792): n is a, c, g, or t
  misc_feature (823)..(823): n is a, c, g, or t
  misc_feature (897)..(897): n is a, c, g, or t
  misc_feature (902)..(902): n is a, c, g, or t
  misc_feature (937)..(937): n is a, c, g, or t
  misc_feature (964)..(965): n is a, c, g, or t
  misc_feature (999)..(999): n is a, c, g, or t
  misc_feature (1001)..(1001): n is a, c, g, or t
ggcaagaaacatccgtttttaataaatagtttattcatccagcagtttcagccctgatactgaagcctgttgcggtgtttcttatttttctggctggagcctgattatgagaacatggcctcaccacggggccagcgctcagattcctgccctgccgatcatccagacatcagaggaaatgagagtattgctcaaatgagggagactggagctttattaaggaaacaaaaaataccagtaagactagagaggggtggttaatgtttctggaggcagctgtggaatttcctgtttgctccccctctcctgcctgccgcagatgaggacacacggggaagactcgctggagaggcttctcgcacttaataaggccccccgtcggggtgcttctggagcctgcctcccagggagcaggctgaggagctggcgggagggccggtgggcggcggcgcggacgctgctcccttgtggccggcagggggcagcctgcagccactgcgcctctcccgccgccaagagccgcggccggggtaacagaaacgccggctgcgctgaagttcttgttaaacagccccgcgtcggggctgtggtcacagtaaagcaaggcgatcttcgcacacagcaagtgcgaggctctgggccctgacgcagggctcccaagctcccggaatcggcgttctggctgcaggcctggtctagagtcgcagcttctgtgagaagcaacactgaggcgggcccgcccgaccctcctctctgctctcagcccaagtcctattcgggattctccangangctgtgcggctgctcactctccctgactganggacgtgtgtctgggctggtgttctagacggtccccctacagtcacttgtctaattctagcacttccctctcangatanaggccagcagcagagacagcttctccctcacctgnagtctcaggtacacccctccctttaanngagcctcgtgcgatcttgccgagggcaatcctanangagtcgataaatcgatcatgtcaacgttctgttgaatgtaccgtcaatcaaa

SEQ ID NO: 125957 - DNA, 787 bp, Homo Sapiens
ggccagcgctcagattcctgccctgccgatcatccagacatcagaggaaatgagagtattgctcaaatgagggagactggagctttattaaggaaacaaaaaataccagtaagactagagaggggtggttaatgtttctggaggcagctgtggaatttcctgtttgctccccctctcctgcctgccgcagatgaggacacacggggaagactcgctggagaggcttctcgcacttaataaggccccccgtcggggtgcttctggagcctgcctcccagggagcaggctgaggagctggcgggagggccggtgggcggcggcgcggacgctgctcccttgtggccggcagggggcagcctgcagccactgcgcctctcccgccgccaagagccgcggccggggtaacagaaacgccggctgcgctgaagttcttgttaaacagccccgcgtcggggctgtggtcacagtaaagcaaggcgatcttcgcacacagcaagtgcgaggctctgggccctgacgcagggctcccaagctcccggaatcggcgttctggctgcaggcctggtctagagtcgcagcttctgtgagaagcaacactgaggcgggcccgcccgccctggggctgcccgaccctcctctctgctctcagccccagtccctacttcgggatcctcccaggaggctgtgccggctgctcactcctcctgacctgagggaccgtgtgtctgggcctggtgttccctcgtgccgaattcaacacccaggcctcgtacctagcctatagttt

SEQ ID NO: 125958 - DNA, 755 bp, Homo Sapiens
tttaataaatagtttattcatccagcagtttcagccctgatactgaagcctgttgcggtgtttcttatttttctggctggagcctgattatgagaacatggcctcaccacggggccagcgctcagattcctgccctgccgatcatccagacatcagaggaaatgagagtattgctcaaatgagggagactggagctttattaaggaaacaaaaaataccagtcagactagagaggggtggttaatgtttctggaggcagctgtggaatttcctgtttgctccccctctcctgcctgccgcagatgaggacacacggggaagactcgctggagaggcttctcgcacttaataaggccccccgtcggggtgcttgtggagcctgcctcccagggagcaggctgaggagctggcgggaggggcttcaggagcagcaggagaggcttcgggaacgggagaagaggcttcagcagctggccgagccacagagcgacttggaggagctgaagcacgagaacaagagcgcactgcagttggagcagcaagtaaaggagctgcaggagaagctgggccaggtgatggagacgctcacctcggccgataaggagcccgaggccgctgtcccagcctcacgggactgggggcgagtcatacgcgcccttatggacctcctggaggagaaagcggacctgagggagcatgtggagcaactgaacttggattcatccagtaccggagagcagagtctccgtcgaacg

SEQ ID NO: 125959 - DNA, 1536 bp, Homo Sapiens
  misc_feature (524)..(532): n is a, c, g, or t
tttttttatttgttcttctataccatttaattaaatatgagatggttattacatacattgtacgcttatatactaagcagctctgcgaaatgtttgtaatgcatgtggatagtacacggttaaatcagagatcttcactgtagtgaacaatggatattttaaagaatagtcccaacaataaaccacagagctgacaaaaatgccacctaatctgcatcatttccaggagctctgccacatattcttcctggcccgtaccaagtctcttagcccctctagaagagctaagaaaatgcaggtgtgcacctctgaacagcccatacttggcttttctgaagcaaattcccatggaaaccacattgaaggaagaggcaaaggctggtaggaaatcagctgaatcagcctgggtgccctagacccagtcatgtttgttggaccaaattagctgtcttttcatttcatgctatatagaactggcagtttacacttctgattaatacattgtctccgatcaggaggtttannnnnnnnncctaataaaatctgaaaggagattgggcagaaccaattagtaatcttacattacacattgtccctaggtatataatcaagaattaacagcagttatgattatatgattataatacatgcattttaaatactacagtaacagacagaggctcagacactaaattccaaagataacatatgccaaacaacattgaaacaaaggattttagagctggagatatctcgatgtttttctatggtcatctcttcatttcttcgagagattgtctatttataccagggatacaaaattatggctcccagttctgacttaacgtgtgaggttgggtaatttacctgtcttcctgtgtcccagttttcccataagtcaaagaaaataacaataaatacttcaaagaacttctgtgaataaggtatcagagacctggcatgagattttgtggagcctcctatttgagacttgactcccatttctacaaaaggtaaagaacacctgcccactgatgaaaaatgtcttctgctgcctacaaaccaggcagattctacttttcctccatgtaaatttacatcatttttgtggcatttgccctgtctccaacagggcactttcaatatggctcttttatagcattttataatataataataatttgtttaccaagcagtcactttcattaggttttgcaatttatgaggcagaatgccatccttttatgtgtctttaggtcccctgtgcctaacagtatgattgacatgtagcaggctttccataaatgcctatcaaggaggtggaaggaatgcttatggaagtgctttgaaaattgcaaaagcactaggcaaacctaagggattatggcattgtatttattactgctggtgcagaggagagcactttggaaagtaaaacattcacctgaagaataagatggtttgattttaccagtcctttaagccaacagataaggtccattcatccacagttaaaaccccattcacagacaacac

SEQ ID NO: 125960 - DNA, 2309 bp, Homo Sapiens
  misc_feature (2105)..(2199): n is a, c, g, or t
cgagcgtctgagcgcctgaccgcagccctggatcgcctgcggcagcgcggctggaacagaggtgtctgcggttgtcagcccgcgaggcctcggaagaggagctgggcctggtgcacagagtacctttcactgcgcgcggctggccgcaggggctggactgcagctggtggacgctgtgctcactggagctgtgcaaaatgggcttgccctggtgaggcctcccgggcaccatggccagagggcggctgccaacgggttctgtgtgttcaacaacgtggccatagcagctgcacatgccaagcagaaacacgggctacacaggatcctcgtcgtggactgggatgtgcaccatggccaggggatccagtatctctttgaggatgaccccagcgtcctttacttctcctggcaccgctatgagcatgggcgcttctggcctttcctgcgagagtcagatgcagacgcagtggggcggggacagggcctcggcttcactgtcaacctgccctggaaccagttcaggatgtagcctgggatgtcctgccaggttgggatgggaaacgctgactacgtggctgccttcctgcacctgctgctcccactggcctttgagtttgaccctgagctggtgctggtctcggcaggatttgactcagccatcggggaccctgaggggcaaatgcaggccacgccagagtgcttcgcccacctcacacagctgctgcaggtgctggccggcggccgggtctgtgccgtgctggagggcggcctaccacctggagtcactggcggagtcagtgtgcatgacagtacagacgctgctgggtgacccggccccacccctgtcagggccaatggcgccatgtcagagtgccctagagtccatccagagtgcccgtgctgcccaggccccgcactggaagagcctccagcagcaagatgtgaccgctgtgccgatgagccccagcagccactccccagaggggaggcctccacctctgctgcctgggggtccagtgtgtaaggcagctgcatctgcaccgaagctccctcctggaccaggcgtgcctctgccccgcaccctctgtccgcaccgctgttgccctgacaacgccggatatcacattggttctgccccctgacgtcatccaacaggaagcgtcagccctgagggaggagacagaagcctgggccaggccacacgagtccctggcccgggaggaggccctcactgcacttgggaagctcctgtacctcttagatgggatgctggatgggcaggtgaacagtggtatagcagccactccagcctctgctgcagcagccaccctggatgtggctgttcggagaggcctgtcccacggagcccagaggctgctgtgcgtggccctgggacagctggaccggcctccagacctcgcccatgacgggaggagtctgtggctgaacatcaggggcaaggaggcggctgccctatccatgttccatgtctccacgccactgccagtgatgaccggtggtttcctgagctgcatcttgggcttggtgctgcccctggcctatggcttccagcctgacctggtgctggtggcgctggggcctggccatggcctgcagggcccccacgctgcactcctggctgcaatgcttcgggggctggcagggggccgagtcctggccctcctggaggagaactccacaccccagctagcagggatcctggcccgggtgctgaatggagaggcacctcctagcctaggcccttcctctgtggcctccccagaggacgtccaggccctgatgtacctgagagggcagctggagcctcagtggaagatgttgcagtgccatcctcacctggtggcttgaaatcggccaaggtgggagcatttacaccgcagaaatgacaccgcacgccagcgcccctgcgagggcagctggagcctcagtggaagatgttgcagtgccatcctcacctggtggcttgaaatcggccaaggtgggagcatttacaccgcagaaatgacaccgcacgccagcgccccgcggccgcgatccggaccccaagcccacggctccctcgactctggggcacggaaccccgnnnnnnnnnnnnnnnnnnnnnnnnnnnnnnnnnnnnnnnnnnnnnnnnnnnnnnnnnnnnnnnnnnnnnnnnnnnnnnnnnnnnnnnnnnnnnnnggcccgtcccatcgaggcccatgcaacccacgctcggtcccgttccggcccctgcgccccgctgcgcttcgctccccgcccttgcgccgttagtaaacatcgctcaaacg

SEQ ID NO: 125961 - DNA, 722 bp, Homo Sapiens
tgcaggaaggcagccacgtagtcagcgtttcccatcccaacctggttccagggcaggttgacagtgaagccgaggccctgtccccgccccactgcgtctgcatctgactctcgcaggaaaggccagaagcgcccatgctcatagcggtgccaggagaagtaaaggacgctggggtcatcctcaaagagatactggatcccctggccatggtgcacatcccagtccacgacgaggatcctgtgtagcccgtgtttctgcttggcatgtgcagctgctatggccacgttgttgaacacgcagaacccgttggcagccgccctctggccatggtgcccgggaggcctcaccagggcaagcccattttgcacagctccagtgagcacagcgtccaccagctgcagtccagcccctgcggccagccgcgcgcagtgaaaggtactcgggtggaagtagatggcgtcgaactgtccggacagcgcctgcagctcctccttgcctaggacctgggtctccctgtgcaccaggcccagctcctcttccgaggcctcgcgggctgacaaccgcagacacctctgttccaggccgcgctgccgcaggcgatccagggctgcggtcaggcgctcaggacgctcgatctcgcactcggggcttcggccgggagcagccggaggcctgggacctgcctggggcgcaggcgggcggcgggcaccggcctgggcggg

SEQ ID NO: 125962 - DNA, 1008 bp, Homo Sapiens
ggtaacccagcagcgtccgtacggtaatgaacacctgaccccgccagtgactccaggtgtaacccgccctccagcacggcacaagacccggccgccggccagcaccctgcaagcaagctgtgtgaaggtggccgaagcactctggcgtggcctgcatttgcccctcagggtccccgatggctgagtcaaatcctggttccagggcaggttgacagtgaagcccgaggccctgtcccccgccccactgcgtctgcatctgactctcgcaggaaaggccagaagcgcccatgctcatagcggtgccaggagaagtaaaggacgctggggtcatcctcaaagagatactggatcccctggccatggtgcacatcccagtccacgacgaggatcctgtgtagcccgtgtttctgcttggcatgtgcagctgctatggccacgttgttgaacacgcagaacccgttggcagccgccctctggccatggtgcccgggaggcctcaccagggcaagcccattttgcacagctccagtgagcacagcgtccaccagctgcagtccagcccctgcggccagccgcgcgcagtgaaaggtactctgtgcaccaggcccagctcctcttccgaggcctcgcgggctgacaaccgcagacacctctgttccaggccgcgctgccgcaggcgatccagggctgcggtcaggcgctcaggacgctcgatctcgcactcggggcttcggccgggagcagccggaggcctgggacctgcctggggcgcaggcgggcggcgggcaccggcctgggcgggagcgcacagaacctaggcaggctccgggatcccaggcgcgcagaaggcacggagcgaggctgcagtcgaagggggaggctccccgcgcctggcttccggcttcctcgcctcggacctgggtcccgccccgcgcctgctcccggtcgctatcgcgagctccgccccggagcgaggaaccagcgggcgcgaagcctcggcgccccgag

SEQ ID NO: 125963 - DNA, 1053 bp, Homo Sapiens
ttgtgttaattgttcaatggccccccctggatttcccgccccaagtgaccctccagggtggttagcccggcccctccaggcagctggtgtgaggtggggcgaaagcaattcgggcggggggcctgcattttgcccctccagggtccccccgatggctgagtcaaattcctgccgaggcccagcaccagctccagggtcaaactcaaaggcccagtggagcagcaggtgcaggtaggcagccacgttagtcagcgtttcccatccccaacgtggttccagggcaggttgacaagtgtagccgaggcccgtgtccccgcccccactgcgtctgcatctgactcctcgcaggaaaggccagaagcgcccatgctcatagcggtgccaaggagaagtaaaggacgctggggtcatcctcaaagagatactggatccccctggccatgttgcacatcccagtccacgacgaggatcctgtgtagcccgtgtttctgcttggcatgtgcagctgctatggccacgttgttgaacacgcagaacccgttggcagccgccctctggccatggtgcccgggaggcctcaccagggcaagcccattttgcacagctccagtgagcacagcgtccaccagctgcagtccagcccctgcggccagccgcgcgcagtgaaaggtactcgggtggaagtagatggcgtcgaactgtccaggacagcgcctgcagctcctccttgcctaggacctgggtctccctgaccagggatacatactctgggctgtgcaccaggcccagctcctcttccgaggcctcgcgggctgacaaccgcagacacctctgttccaggccgcgctgccgcaggcgatccagggctgcggtcaggcgctcaggacgctcgatctcgcactcggggcttcggccgggagcagccggaggcctgggacctgcctggggcgcaggcgggcggcgggcaccaggcctgggcgggagcagcacagaacctaggcaggctccgggatcccaggcgcgcagaaggcacggagcgaggctgcagtcgaa

SEQ ID NO: 125964 - DNA, 895 bp, Homo Sapiens
tgggtatccctccgtgcagtcacctcataggtctgttggatcagcaggttcaggaagtcagccacgtagtcagcgtttccccatcccatcctgcttcccaggccaggttgacagtgaagccgaggccctgtccccgcctcattgcgtctgcatctgactctcgcaggaaaggccagtagcgcccatgctcatagcggtgccaggagaagtaaaggacgctggggtcatcctcaaagagatactggatcccctggccatggtgcacatcccaagtccacgacgaggatcctgtgtagcccgtggtttctgcttggcatgtgcagctgctatggccacgttgttgaacacgcaagaacccgttggcagccgccctctggccatggtgcccgggaggcctcaccagggcaagcccattttgcacagctccagtgagcacagcagtccaccagctgcagtccagcccctgcggccagccgcgcgcagtgaaaggtactctgtgcaccaggcccagctcctcattccgaggcctcgcgggctgacaaccgcagacacctctgttccaggccgcgctgccgcaggcgatccagggctgcggtcaggcgctcaggacgctcgatctcgcactcggggtcgtcccagagcagccgggtggccgtcatgtcctcatggtacacaagcgcggtccccatggctgcaccgtggtcaacctgggttcccaaacgccctcgctagtaggtgcctgccactgcctgtccccaccttcggccgggagcagccggaggcctgggacctgcctggggcgcaggcgggcggcgggcaccggcctgggcgggagcgcacagaacctaggcaggctccggatcccaggcgcgcagaaggcacgagcgaggctgca

SEQ ID NO: 125965 - DNA, 497 bp, Homo Sapiens
tttgaccatttcactgattttttattagggcaagtgcatgttctgtaacatatttcacttgcaagcatgaaagatgaggtctctctctttctacatgggccgctcccggggtctggtcacaatataccaccacagtgggggcaaatcaccttcctttcgggcagggggcaaagcttcagttaaaggaccaccaggtgggcgtttcctcctgcagctgcttaacctttcgttcccagctttccctcccgcagtttcttccactgttctctcttggccaagtaatcaggatacattgccttctagaaagatgccccgtcatctagcaccattctggacccttgacaaaatcgatcttatagggaaggtgcccggcagagagggaaaaattttggctgggggagtggccggacccaaaattttcctcgcctcttacaacagggggggcttgcaattcttttatttttaagggtcttaacgggctccatcaagcaggatgg

SEQ ID NO: 125966 - DNA, 799 bp, Homo Sapiens
  misc_feature (46)..(54): n is a, c, g, or t
gaatcaccccttcctccgtttctgggtccattcccgtctaccttgnnnnnnnnnacacttgtttaacccttcccgcctcgtcccccccaaattttttcttctcttatcttcttctgaccattcactgatttcttattaaggcaagtcatgttctgtaacatatgtcacttgcaagcatgaaagatgaggtctctctctttctacatggccgctcccgggttctgttcacgatataccaccacagtgggggcaaatcaccttcctttcgggcagggggcaaagcttcagttaaaggaccaccaggtggcgtttcctcctgcagctgcttaacctctcgttcccagctttccctccgcagtttcttccactgttctctcttggcaaagtaatcaggatacattgccttctcagaaggatgccagtcatctaagcaccattctgggaccttgtagcaatcgtatctctcataggaggtgcccccaggagagtcagggaagatgtatggctgtggatgctgacggtaccagaattcttcctcggcctccttcagcagctgggtggccttcgccatatccttttcattcttatgttcttcaaaccgggctctcatcaaacaagcaaagtatcggtatttgtctctctggacgcaccacgactcgaggtggcgtagcgcccgcttataaagccgcaacaccttttgctgatgggtcaggtagggtcccgacgccaagaacgccattacggcgctccccggccgtaatggccgaattcccgggcatatgtccggtaccgtcgactg

SEQ ID NO: 125967 - DNA, 803 bp, Homo Sapiens
ccgggcaatgggccaatgttttgggtcggacaagggggtttttaccatttcactgattttttattagggcaagtgcatgttctgtaacatatttcacttgcaagcatgaaagatgaggtctctctctttctacatgggccgctcccggggtctggtcacaatataccaccacagtgggggcaaatcaccttcctttcgggcagggggcaaagcttcagttaaaggaccaccaggtggcgtttcctcctgcagctgcttaacctctcgttcccagctttccctccgcagtttcttccactgttctctcttggcaaagtaatcaggatacattgccttctcagaaggatgccagtcatctaagcaccattctgggaccttgtagcaatcgtatctctcataggaggtgcccccaggagagtcagggaagatgtatggctgtggatgctgacggtaccagaattcttcctcggcctccttcagcagctgggtggccttcgccatatccttttcattcttatgttcttcaaaccgggctctcatcaaacaagcaaagtatcggtatttgtctctctggacgcaccacgactcgaggtggcgtagcgcccgcttataaagccgcaacaccttttgctgatgggtcaggtagggtcccgacgccaagaacgccattacggcgctgaccttccccggccgcgcggagagccgggaaactgcacgcctgctgcgggtgactgagcggggcctcgtgccgaattcgccacccaggcctcgctaccattacgaccgtggatagttactggccc

SEQ ID NO: 125968 - DNA, 765 bp, Homo Sapiens
  misc_feature (133)..(166): n is a, c, g, or t
  misc_feature (742)..(742): n is a, c, g, or t
tttttttacataaatcgaggcttttatttacatcataggacaagaaaaggatacaaaagaagtctcttggtcaagcacatcaagcgaaagctctaaaactcaatactcagtaaggtgtgggcactgatattgnnnnnnnnnnnnnnnnnnnnnnnnnnnnnnnnnnggtaatctgtgacacaatccaaatgcttacactccagggattgagtaagagaaacccagggcagccctgccacagagaatgacggctcaggttgagtgacatctgagattcatcttctgtacccgtgaacctgactcccaggacaacccctaggaggttttgacttttgacattagtgagttaattcttaaccagattcttaagaatttcagggccaaacaggcttgaatgtacggtttttccaatttgggggatgggagtggggaagctcttcctgggacagattcccaggcaaggaaaggccccagcagctctgtcccctaccctgggctctgcctccatctccccacgagaaacttgtgggctgcctggggctcgtcagcagcctgcacaggctctcactctctttcccactcactatgcttggctttttcttccacttatgactatctctccctttctccaacacccagtgttgtggggcaagctgtaattatctcacgtgtgtgaaaatgtgccatatccactttcatcatctgggctaaaacagatcacttgtttcacttttcctcacanatattaacaatgcaggaattggg

SEQ ID NO: 125969 - DNA, 1021 bp, Homo Sapiens
  misc_feature (484)..(493): n is a, c, g, or t
  misc_feature (718)..(729): n is a, c, g, or t
actattaaccattgtatatttatttaaaagccataaagaatacgaaaaagcatgaacgcacaaattccagagaatttgttttttaatcaatccgatcaattttacacaacaaaatatcattaagaaacatagaaatcatgtgaattgtattaaaactatgacatatgacaatattatataaagaaaattttaactctaagagacaaatataattttttaaaaaagaaattaaaaatatcacgtcttatgctaaatatatatagatatatttattatgatgcagcaggttttggaatacagggatttaggcaagttaaaaataaaaagtttatatgcttaaactttctgaatattgtttgtctgatttcctatttaaatatcagacatcattataggaaatacatagtctacttacgattgcaatggcactttcaaatataaggccattaatattttagaaagcagcaacttttactttgttttnnnnnnnnnngctagtagcagcatgtaaaaatgagcattacgagaaactcaggaaaaccaatttaccctgaaaagatgaatataattaaaaaaccaagcacctgttcagtgttcaaaaagaactgtaggctaagaccctcatctcagaataaccccatctaagaacactcaggctttctttatttaataagcagcagcagaagaatacatcccattctacatactgactgtgttnnnnnnnnnnnntgcagtccatatgcaggtagaaaactaaagtgcaacagaagcaagttaattagagtgtactcacttatacactatgcttttaattagttaacacaaaaatgtgtaattgataatttattattggtcctacatattatttactggcatgctgtagaccatagagaaatagaatgtttactgtgttttattattattactctgtgtagatacatatttatctatcatgtcaataaaaagaagcacccggccgtaatggccgaattcccgggcatatgtccggtaccgtcgactg

SEQ ID NO: 125970 - DNA, 717 bp, Homo Sapiens
tgagaggagttggtagacagcaagggaagggtccctggagacccccagccaaacgggtcagtgtctcatccccacataacacaaaaagcagcctggggaagacaatcaagctacaggcactgataagggaactagcacaggggattgtgcctggagacatgcccatggctgcacagatagaagaacctccagcccattcaggtaaaaactcgcacaaacctccggctcactcagttaagggaacaagaccagacacagaaatgcctttgtcctttgtataatcagcaggctccgaggaaaaagtttcttcttttgtgggcatgaacacagtgggcttcagtaggttcaggttggcactttcttttgtggaaaaggaaaagcccagcctctgtaaatcatcacttcagctcctgattggtcccaggccaagctgaatagcccttaggaatcatcacttcaactcctgattggtcccgggccaagctgaatagcccttatgaatcatcacttcggttcctgattggtcccgggccaaggtcccagaccaagctgaatcacgctttctccaagacagcccgcagggtaagtgcattccttccccttcccagtccataaaaaccccggaccccagcctcatactgggcaacttatttggatccccatctccactgtggagagcttttttctttcacttattaaacttttactccaatttca

SEQ ID NO: 125971 - DNA, 1234 bp, Homo Sapiens
  misc_feature (795)..(806): n is a, c, g, or t
tttataaaaacatatacaaaccgagcatttgttataggtactttagaattaatttctatcctcttcccgaggataacatcacacagaatttggtctaaacaatgtaaaaggcaaatacgatgtaaaaaacatacacagagtatttgttataggtactttagaattcatttctatcccctccccaataaacttgtccaattactttgttctaaattaatccttgggaacgagatcttgatagtagcttcagttcatccaacctaggacacttagccttagagtatctgttcaaatttgcatcagttggtgaactgatagaccctgaaatctgaattaaatctagagttcaaagcccctgcaagaaaaaccaattctcactcccccttcaattctttgcaaaacatctcaatcatctctagatgtagtgtattttttctcagtcatacatatcaagacttgattaaaagtttggattttgtttaaaaaggctttattcattttttgatcagggaaaaggacaatctcaatgtcaactcgtcacctaatcataaatttgaacttacaggattcactaccctagacaccgcacctactgacaacacaacttaaaaatgaacttacttccattccctaaagttgcatgttgaatgaacagaatcccttctaacagccaacattggtacttggcctaagtttaagaatagcaaaacagcagcaaaaaagaggccaagagcattataatgtgatagcccaggaagtagaatcattgttaagaaagttgcaggcaccaaattnnnnnnnnnnnngggagggctcatgagcataagaaacttaccagttttgtgagatcacccgttgtgtgagatcaactactctgcctgtgaacacgtatgccaatcccagtaaataacactgaggccaaggtcccaaaatccaactacactgaatgcaaaatccaaagctttttattattccaggtcctctgaaacctggatataaaacggattcttttcaatgcacccagagggtccactgtaatgactcagtcacatttgtaatgacttagtcacatttgtaatgactttgtcataaccaagataccttttccactattcctttctgaatatgttaatatttaactacttagttcatgcactgtgtcgaaaactagatttactatcaagactttttctgaactcacagagcattaacagctaatacaacttcctcagga

SEQ ID NO: 125972 - DNA, 1101 bp, Homo Sapiens
cgcggcaaaggagctttattgctgcggcggcagaacgagctctgcgaagggcgagggggcggcgaatggcgcgcggtcggagagtacgagcgcctcctgcagggcgcggctctgcgggccgctgagcgcggggccgtcccggtgcacgcggagccagggggtcccacggcgcagcctctgacccacgtcgaccagcagctctgcgcccacccccaggcggagcggctccccagcgcggctgcgcccggccccgagctcgtgcagcaccagcgccagcggcagcgcccggaccagctccacggtgccatctgcgggcgccagcagctcctcctgctcccgggcgcgaggcagcagctgccggcgttctgcgggacttcccgagcacagggctcgggccagaccgggatccacgccctgcgccgccagcatccgctcgaagcggccaagggccgagccgtcgtccagcgccgcggccacccgggcagcgccctgggcctgagtccccgcgtgtccgctgagccagagcagggcgcccccgagcgtggtgaccaggtcccttaagtctggcgggcctgcgccgtccatgcagagcagcgcctcctccacctccagggcgtggcccacgcagcgacccaggggcttgtccatggcggtcagcgctgccgcgacccgaagccctaggctggctcccacgccaaccagcgtctttgccagctcccgggcctgctcctggttggggaagacggcggcccctccgaacttaacgtccaccaccagagcggacagcccctccacgagtttcttactgagaatggaggctttggggggggcagaggaggttggagacaatggagaacctggagcttcttgggagagttcggggatgccgactttggggtcaggggccctgagcattgagggtcaagtcccttattatgggggtggcagcacctggtgggttgagtatcaggccaccccacatggtggtggtcaggcatcttgtgatgggggtaggggggcacacggtcaggtgacgggtaactcctaacgagaggcccttgacttgtagtttggagtcagcgagccatgtgaacatgcaga

SEQ ID NO: 125973 - DNA, 850 bp, Homo Sapiens
  misc_feature (754)..(788): n is a, c, g, or t
ccctcttcggcctctcctagtgctaggactacaggtgtgagccagcgtgtcccggcagccatctgtgattttgtccaacttcccattttttgatcctacgtcatagttccactgatgatttcggtcctggcccattgactcatgagtatgccttgatcagtgtgctcattagtgaccctaatgatccactcgagtgatcttttagtgattctggccagggtctccatcatcaacctggatcaatgactgatccgtggcgccccgtacctgctctgggctctggatgacattgaatccaggaatagactccagcttatccaaggtgcctcctgtgtgccccagaccacgtccgctgatcattggcacctggtggtcagggatgctgagtaccctgcacagtacccctcccccacctctgtgcatcccttcaccttccctggctaggagtgcagctggatttggaaagtatttaagcagctataggggtgcccagctggtgagggaatggaaaggaagttttcttggttgagaagtgtcagtaggggaggagtttggtacctgtccttggggaaacaaggcttggggcagagggagggaagtcctcagctcctcccttgggggagctgtctgggacccaaggggaaaggggtctgaattccatcagtggatctttttcctgctccaaggggcctggtctggagcccccggccgtaatggccgaattcccgggcatatgtccggtaccgtcgactgnnnnnnnnnnnnnnnnnnnnnnnnnnnnnnnnnnncgccgcttcctcgctcacatgactcctgcgctcgtcgttcggctataacagcagctagcccc

SEQ ID NO: 125974 - DNA, 1084 bp, Homo Sapiens
cccagcgagcagcgcctcctccacgccaggcgggcccagcaaggacccagttctgccctgcggtgaaggtgccggacccgagccataggcggctccacgccaaccagcgtcttggcagctcccgggcctgctcccgggtagggaagacgcggcccctgccgcacgtgaacggtccaccaccagggcggcagcccctccacgagtttcttactgagaatggaggctgtgatgagtggcaggctgtccacggtggctgtcacatctctggctgcatataggattccgtccgcaggaaccagctgctcactctgacccacgatacagcagcccgcctggtccagcagcacttgcatctgctctgggctctggatgacattgaatccaggaatagactccagcttatccaaggtgcctcctgtgtgccccagaccacgtccgctgatcattggcaccttgcagccacatgccgccagggcaggtgcgaggaccaggctgaccttgtcacccacaccccctgtggaatgcttgtccacaagctgctggcgccaggcctctggccactccagctgctgtcccgactgagccagggcctgggtcagcaccgaggtctcctccagatccatgccccgaagtcggatggccatcagcatggccccgatctgtgcgccctgcgcgctcccattcaccacagcggccacgaagcccctgatgtccgcttcgctcaggcggcctccgtctcgcttcatgcggatcagctccgggagctgcttgggctctggcgaagggtcgggaagtccctggctcccttccccggagaagtcaccaggcgcgggtggggccccggttcccggggtcatcaaggctgccatcgctccgggcctgcttagggcgctgccctcgcccgcttgctccggatcccagcccaggtacccggcctcgcccgcgggtcgggaccgtagggttcagggttcgcgcacagcggtccactgccggcggcggggcgaagcggacgcgtgggtcgccgaatcccgggaatccggaccgtacagccgctcatccaacccacgcgggccgctccacagcg

SEQ ID NO: 125975 - DNA, 1152 bp, Homo Sapiens
atttttgccgccggcactttatgctcatctttgctgttcttatgctcttcggctttctctcgacctcttttgtgttgttcttcgtctttctctgcctcccttgattgttgctctcgattgtgtcccttcttctcgcttctctgtggtcttcactggctttctggcttcctttggcctcttttgttcactcttgtgtccaataccttcctttctcagtaccacttgctcccgtttcctgtgttcttcttcctactggtcctctagcacttcgtctggtctgtgtcatctgattgccttttgtctctcggaatttgtctgcaggcgtatcgcaaggcttccgtcctggtggtggcctcatgtccatcgtccgctgaatccactttgcatccttgcatggctacatgccgctaggtcaagttctgatgatcctagtctgatccctggtctactcacatccccgcttgtggtatgctttgtccacaagtctgcttgctgccaggcctctggccaactccagctgctgtcccggactgatgccagggcctgggtcagcaccgaggtctcctgccagatccatgccccgaagtcggatggccatcagcatggccccgatctgtgcgccctgcgcgctcccattcaccacagcggccacgaagcccctgatgtccgcttcgctcaggcggcctccgtctcgctttcatgcggatcagctccgggagctgcttgggctctggcgaagggctcgggaagtccctggctcccttccccggagaagtcaccaggctcgggtggggccccggttcccggggtcatcaaggctgccatcgctccgggcctagcggggatgcctgacacgtccggggtctgcggcctcccggcgtcggtgtctgagccacgtgctcctgtcccgacccccttttcccgtgtctctccggtgtccgcccctcggtcccgtgtctgtgtcgccctcgtccgtgtctgcctcccgcttccgccgcctcgcgacttgagccccgcccgtacctgcttagggcgctgccctcagcccgcttgctccggatcccagcccaggtacccggcctcgcccgcgggtcgggaccgtagggttcagggttcgccctcgtgccgaattcgccacccaggcctcgctac

SEQ ID NO: 125976 - DNA, 2993 bp, Homo Sapiens
  misc_feature (64)..(95): n is a, c, g, or t
  misc_feature (104)..(143): n is a, c, g, or t
  misc_feature (1002)..(1002): n is a, c, g, or t
aaatgaagcagcagcaatttttattgagggacctaaactgaaaataggttacgaacataatttnnnnnnnnnnnnnnnnnnnnnnnnnnnnnnnntatatgacnnnnnnnnnnnnnnnnnnnnnnnnnnnnnnnnnnnnnnnnaatatatagcaactgatgcctcccagccaccaggagcatcttacccgatgggtaaatctctggtaacgacccttttaaaaagacatgtaaatatatactcagatttatacactttgtgttttcttcatagctatatacagagcccccagtttggggctgggccccagggccacaacactgcccccaacctggccttcgcctcaccatcctctggtaccaggcatttggtcagcaaagcaaactagtatcggaattaataagccactggcaccacctatctggggcagaggtcaccttcaatcgaggcacgaagcactgacctccctactgctgtagccctgaggacaaggcacctgccaccagagtgcgaggggcttatgggtgaaggcaaaacagaccaaaccgacaggagaaagctcaggaagctctcacttgcatgcctgttcattggctcccactccctgccctccaggcagtgcctggtggcagggaggggtgttggtccaacatctgggaggggatgaagtggctggcagcaaagatctgcctctttgcacctctcaccagcaggtggagaggaggtggagggagaggtgagctgagtggggtgaaggcaggccacacaggaaggccccctggtaggcagccgggtccctgccagcaggaaaaggggacagggacggacaggtggtgggcccagcaggggctgtgggtgagggttacagctgacggtggagtctggggagggcgtgtgggtggcagtcagcggcgtttgagtccgccattggcaagctgggctgggtgtcggggcaggcagggctcctcgggcagcggctcatgagagaagacggaatcctcnccctgaggagcacgtagagctccgggtgtcgggaaagctgggggagtactggtccaggggcatggacaggtccaggtactcctggttggaggtcaaggccacgatgcggtccaggtcttccaccagctgcttgaaggtgggtctctgtgagggcactgcatgccagcagtcccgcatcatcatgtacctgcggcaggaagctcgttggtgcagttactgggcttgtccatgcggtgaccctccttcagcagcttgaaaagttcctccacaggcacaccggggtatggggagccgcccagagtgaagatctcccacaggagcaccccgaaagaccacacatcactctggtgggtgtagatccggtcaaataatgcctcgggtgccatccacttcacaggcagtcggccgttggttgtctttttatagtagtcgatgtggtgaatgtcccgtgcgaggccaaagtctgctatcttcatcacattgtcctctgtcaccaggacattcctggctgccaggtctcggtgtatgcacttcttggaggccagatactccatgcctcgggccacctggtaggcgcaggacaccaggtccttggaggagagctgctcctctgggttgtggctggggttgtagcagtattccagccctgggggcctccgggcctgcaggtactcccgcaggttgcccttggaggcatactccacgatgacatacaagggaccatcctgcgtgcaggcccccagcaggttgatgatattcttatgcttcccgatcatcttcatcatctccatttctgagatcaggtctgacaagtctttctctgttgcgtccgacttcaacatcttcacagccactttggtcacacggttgggtttgtccttgtccagcccgatagcctctgccaacaccacctgcccaaagcagccctctcccaggggtttgcctaagaccagtctgtcccgaggcagctcccagcgagggtcttcgggaagctcatactcagagacccctgctagcatgggagtcccactggaggagagccgtgatggccgaaccagaagaaccccagagttcatggatgcactggagtcagcagacactgttacctgtctgcgcagagggatgctcttggccagcttgtgcacagccatctggctgtggaagtcactcttcttggtaccactcttcatcttgtagacgatgaccgaccccaccatgcaggagatgaggaaggcccctgtgcaatagatgatgatctccaggtacaggggcgaggtcatcactgccggcctctcttccagggcttttgccacaggtctggtgacagtgagccatgcagagtgatggagagtccgatataattacccgccaagcacgtatactcccctgcgtcctcaaaggagacatttcttaagtgaagcacctccatctctttgtcggtggtattaactccagcagtcttcaagatctggacataaggcaggttgtctgggccaatcttgctcccattcacctcgatgtgctttagccactggatgtgcggctgcgggtcactgtacaccttacacatgaactccacgttgctacccagggccactgttttgttggcgggcaaccctgcttgcaggatgggccggtgaggggaccgctccacgacatccagctggtatgtgtggttgatgctgccgtactcattctccacaatgcaggtgtagttgcccttgtcagagggcaccacagagtccattatgatgctccaggtggcataacggaccttgtagcctccaattctgtggtcaggtttgaattctttgccatttttcaaccagcgcagtgtggggtttggggtcccactggaagggcatttgaacttcactgtcttggcagccggcactgcatgcaatttcttttccatcttttctggggatgtccaatatggagctacggggtttggtttggtgttatctgtttctttctcctctgaagaggag

SEQ ID NO: 125977 - DNA, 901 bp, Homo Sapiens
agttgagtcatcagactgtgctgatcatgaggactgagcgacagagaccaggtcagagcatgatcagcagcatgtaccgttggcgaggatgtctgccagtggcacagcatctgctttgagtcatcttcttgtacactctcatctgtagacgatgaccgaccccaccatgcaggagatgaggaaggcccctgtgcaatagatgatgatctccaggtacaggggcgaggtcatcactgccggcctctcttccagggcttccagaacggtcaaccatgcagagtgatgggagagtccgatagagttacccgccaagcacgtatactcccctgcgtcctcaaaggagacatttcttaagtgaagcacctccatctctttgtcggtggtattaactccagcagtcttcaagatctggacataaggcaggttgtctgggccaatcttgctcccattcacctcgatgtgctttagccactggatgtgcggctgcgggtcactgtacaccttacacatgaactccacgttgctacccagggccactgttttgttggcgggcaaccctgcttgcaggatgggccggtgaggggaccgctccacgacatccagctggtatgtgtggttgatgctgccgtactcattctccacaatgcaggtgtagttgcccttgtcagagggcaccacagagtccattatgatgctccaggtggcataacggaccttgtagcctccaattctgtggtcaggtttgaattctttgccatttttcaaccagcgcagtgtggggtttggggtcccactggaagggcatttgaacttcactgtcttggcagccggcactgcatgcaatttcttttccacctcgtgccgaattcggcgcgccgtcgacttcatactctctccccct

SEQ ID NO: 125978 - DNA, 817 bp, Homo Sapiens
tttttttggtttcttgctttattaggtttattataaggagcagtgatgagatctttatcagtcctcactacaaagctttcatctccagccttctccatagctctgtggagggcagagagttgagggaaggaagaatggagcttgggagcatgggatcatgtatgtataccaggaaagaaaacacacattctttattctattgcttcaaagacagtttgtgagaatggaagataacaagcacagctggccaggaaggcagggcacacatggcaggtcaagttcctgctatccagggaggtggcccagagcttccctgctgctcctggaggaagcagagtccaagctggcccagatgaggccccgggcagcactgcttctgtgtgggtatggccagtcgggacgtggcgccacacactgctcctccgaactctggtgaagggctgcccagcctcacaggcctgagcagagtctcccacatctgcgaatggggccaatggcactcactgtctcttcaggcccccacggacggcatgcctggggaagcctagtctacttaccatcagcacgttgatctgtcacacagcatggagccatagtttacaaaggaccacggcaggtcaaggacaggccactaaaactgttggtgctgggcaccatcacccaccctcaccaccatcagagacactggtgcagtgagacttcgagtctgcaaaaaaccccggggaggacaggaggcaggcacactctccctgtgtgtcatcagcctgcagtgcctgaaactccagcctgtgcacctctggcaggatgcccacactgc

SEQ ID NO: 125979 - DNA, 699 bp, Homo Sapiens
  misc_feature (407)..(431): n is a, c, g, or t
  misc_feature (434)..(447): n is a, c, g, or t
  misc_feature (688)..(688): n is a, c, g, or t
atattttagaaaagttttaatttgaacaacttatgattaaaaatacattttataaataatttttccatagacttgattgaggattgttgcaaactttacaaaaagatacactgcaacaacagattaaagaaattacaaaaaatatagctatacccctatttaaaaatacaacattatacatcacacagcattttctttgtgcaaaatgtttaagggaatgctgtgttaggcatgtcaagcatacttgcttagagggaagtaaactttaatacagttactttgcataatagtataggcatagctaaaataatggatttttccccctagaagttaatatatcttagagttcaacattttacttttattttgtaggattgaaagctaaacttagctttatacaaatatannnnnnnnnnnnnnnnnnnnnnnnnatnnnnnnnnnnnnnngtatgaaaacaactatctgatttcacattgaacaaatccccaacgtatttacagtattttcagagaatgtgttctccaaatcagtctgtgtacattttctctattaaacaactctttagaaaattaaactaagccaacatctgttgattaatggacatcctctgttgagacttccagttttcgctgtgggacaaagagagttcctaaggaggttttattagcaccctcaaaatccatgcangatgagctggt

SEQ ID NO: 125980 - DNA, 3190 bp, Homo Sapiens
  misc_feature (858)..(901): n is a, c, g, or t
  misc_feature (2939)..(2998): n is a, c, g, or t
gcagagtgaaacaggagtgctttatggtctgagtggagtgtttgggaggagtgcctcccggctcctgccttcgggctcacctgagcgggggcgcagctgaggccactgtgggaaacacaacccccactcccaggagaggcctcacatgctgccttcggtctcgccagccttctagcgtggggcctgggccgccctttagggtgagtctgcacacccgtgttcagggctcccggccggaagcggaaccataggcatgctgcggccccagatgagcgcggagggcaagcaggtgccggggcagcgcacaccccacagccaagcggcccctgcccagcctctgtaaacagaccctcacaggtccctcctgggcctcagtcacatccctgagaaacactggcggctctgccccgagagggccagggtgtccaccgagcctggctgaagccagctgtcccctcccttcttgcagagcaggctcacactgggcctgaaggcccagcacctgcagggcccagcctggggaccaccaatgcccggcctcttccagctcagaagcgcacacggcagccacggggcagcggcaaaggcgatggtacagaggcaaatgcctccccaggcagtgacaggcacgccccccgccccagggcggccactgcccacgccggcctagagctcctcgtagtcgccacccccagggtggcggccgcccggggccccgccccccaggaaagcctccagctcatcggcagccgtcctctccctgctgcgcgggggccgctgctgccgccgtcgccgctcctccttgccctcctccttgtccttgctcttcttgtgtttgctcttcattcttggcagcannnnnnnnnnnnnnnnnnnnnnnnnnnnnnnnnnnnnnnnnnnnccttagagggggttttgccctccttaccttcctcactgctctccttgggtccggcctcctccagccccagcccgaagaggtccgagtcattcttcagtctgaaggcggggagagggagcttggggggtgggggcggctcggcagggccctcatcctcgtcagtcacatcggaggggtcatctcgcacgggaaagtcatccgccctgcgctgtgtgtctgatccctcgctctcaaagtcggggtcatccatgacgaaggacagcatttgtgcagcaatgggtccctcggggtcactctccgacgaggaggcctgctcacccttccccggctccatctcagcagggggcctggtgctgctgcgcttctccggacctgtgcgaacagagacaccgcctggccaggggggtgctgcggtcctcgtgggagctgtccccctccgtggcttcgaagctggtatggaggaccacttggtctctggctctgagcactgctggggagctggggcagggccttttgtgggagctgccacttctgcttcctcctcactcgaaagagtgatgtcttgactggggacggggcctgcaggcagcgggggactcccacgtggctggtcttcgaggtccacatcgtcctggaaccctgccaccatcgggttgccgcccagggcctccccatcactgtcgctgtcctgctgggcagccttggcccccaccttcttctcgtccctggcgggggttgtgtcttccaggaagctgcggtccaggcggtcgtcaggaacaaagtcctccacactctggaccgttgctgggccctgtgcggccgggactggctctggaggtggaggggctgcctcggtggcaggtgacgtcccaaacagcctagagatgatgctgcgccgtggggcgggggctgaggggcacgcaggtgggggcagggcctctgagggtggtacagggggcacagaggatggtggggcagcattgaggggcagctgtggggcgggctggggtgtgccggggctggagctccccgtggacacagcgcctgcaggcaccactggtgactgggagcccggggatgggctctgcccgttggccgccagtggggacgcatggccacggctgcgagcctccatcatctccaggaagatgccgtagttctggtcctccgtctcctgctgcaccgacagctcctccagcgtggcgtccatgtccagctggttcgtctccagctgccgcaacagcgtctccctctgaagctgcaaaaatgggatattgaagaacttatgaaggtactttaggccgaagctgttcttcatggaagactcagcatagcggaagtaggaggaacctggaggtctgtccaggttgtcgatgaagtcacgcacgtcgtccggcaggatgactcggtgctcgcccatgtcccggtagttccccagcacgcacactggcacgtgggtgggcacttttggaagctcccggagaatgtaattgaaggtccactgcttggtaatgtcgaacatcatgaccaccccgttgcagttcttgtacacgtccaggaactcagcatccagggccatttcagactccgcctcctgggggtcgttctccatctttaagccgtcgcctcgctttttgcattttcctttgtctactacatcccagacttcaaccttcacgatgtcatccgtggtcttgtagctccagtggatgctggtgacctggatctcctgtgtgggggatgtactcctccacgaacggccggccctgcaggcggtgccacagcgctgtcttgcccgtgttcctgtctccccggatcactatcttcatgttgtactgcacccccttggcgaagcgcctctgcaacgcctggttcatggactgcagcccggcggggatgttcttgtcccggcccggggcctggtccgaccccaccagcttcttcagggcggaaaacatcttcccgctcggacgtcccagcccgggcgcggccggcgagctcagcggcggcggggaaggggtgcgactggcaccatgtnnnnnnnnnnnnnnnnnnnnnnnnnnnnnnnnnnnnnnnnnnnnnnnnnnnnnnnnnnnncggcggagcgcagccccgagcggcgactcgggaacctcagccgcggctgctccgctccggcccccgcggcctccggcgcgaccgctctccaggagtcagcgccgccatcttgcctcgtgccgaattcgccacccaggcctcgctaccttggcttgttaggcgacgaagtatgaactttggaggtgggaggga

SEQ ID NO: 125981 - DNA, 877 bp, Homo Sapiens
gagtgacgagaatcgtttgcataaaatagcatttaaaaaaagttaatatgtttaaggtaaaaaagtcaccaatgtaaaaataaaaactttagttttagtgactaaaataaaagcagataaataatcttcttcacagggaaaaaatacttgagggaaaaaacaatggtataacatgtgtaaagcaggaaatttaaatatcagcttagttcctcattgccaacatggcatttatatcccagatgagatttcgtaattgatccataatttgtttcagctgttgattcttctgtttgagttttttatttacttcagcaatttctcgcctctcttcactagcaaaacgaggtgggccagcccgatcatcattctttgagccatcttcttccacatatggaataagttgctcgactggaatgggatccatcccaccacagttttcattgcatttgtcatataccaatctcagcttcctgaagagaactgaaagttggcgaagattatcctgtagctttgttaaccggtcttgatatgttccagtgtggtaagtgacaccatttggcagctgcatgttcctcaggagctggaagatctccatggtgcggtacacgatgtcctgcactgtctcctgcccgatgcggcacagcgacgccgtgttgacttcccgggcggcctgctgagcctggggcccggcgaagggcccgggcgccatccccgacgcggccaacggaggggtggacatggcgcggctgcagcttcaggccggaaggggccagacagcaggtgtcaggggtctgcccggaattgggaggctgtggggcctcagcgttggaaccagcttgagagaccccccgcggcccgatttcaaaacagcgccgcg

SEQ ID NO: 125982 - DNA, 731 bp, Homo Sapiens
ttttcacatttaaaaacctattttattgggtttatctggacattgttgttgtcgttgttttaagttccaggcagccaagcagccatggatggattactcttaaaacctgatcataaaatattgtccacatgggcaaaggcactaatcaaaactgtgaaaggaaaggtttgaattaaggaaaaagttcaatgagacacaagggatttttcattgcaaagtttctctaattttgtatcccaggctgacccataaaggaacaaaatattctgccttgatgacaacatgtgatttagcgtagtctgtattacagaatggccacagcttgaagatggcagaatggtttccccagagtctggagcagaacttgtagttttgtctacacacaatgacccattgaccattttttcctgaggaattgctttttttgttgttgttatgtgaaaaagctttgcccagtctgctagttcttaggtctgttttttgtcactgtccacatagagttcttggaaaacaatacgggctaaccccaagtttggttgtgaatttcttccataataacccacacgtcttgttttacatgtaagttgcttgctgtgtccttctctccttgccctccctatgagtcacccacttaggttgggagcttctagataacgacgccccttccaggaccagcatccgtcccttttccaaccgcacagtcctgcctggactgacgaaggaaaccttat

SEQ ID NO: 125983 - DNA, 1166 bp, Homo Sapiens
  misc_feature (1007)..(1007): n is a, c, g, or t
  misc_feature (1030)..(1030): n is a, c, g, or t
  misc_feature (1055)..(1055): n is a, c, g, or t
tttagtacttacgtattgggagagctgtaagacacaggaatcccaatacgtaagtactaaagagataaagaaaactcctttcactcatctattcattatataggaaagagcaaaaagacagtcaaaaccatctgcttcgagcagcagcacagcccagcaatacaggcataccaacaaaccgaaagcaaacactcaggaaagagcctcttggcccttctcaaaggtagacttctctcagactggatcttgcccctaatgtagagaccaaagcattataacttcagagactggtactcttgagggagttgagaggtaaggtctaagagacccaaataacaagactgttatcaggtaactaactactccactatgtacaatacatacagcaataagaaaacgccactccatccctgcagcactttaaacatagcactgaggacccaggtagggggatattttaaggtctgttagcagtttaaaacgttgcaacactggcacaatatgttacctattctttgtttttaattacagggtaacatggtaaactccaacacaaaggtgggaaccgagagtgcaaaaggaataaagaaaacagaaccagtatttcacaagagcgcggagcaatgcagaagcagcagctaatgctttgcagagtctcgagggtaaaattcgctgagggtgctctgagggattctcttcagcatttctttggggaagattcggagtagctgccagccaatgtccaaagtctcaaagacagtgcgattttcgtaaggaccctgagcaatgaagttcctctcaaacttctgcagaaattccaagtagagaagatcatctgaggtaagggcttcttctccaacgacagctttcatggcttgcacatcctttccaatagcatagcacgcatatagctggttagatacatcggcatgatccttcctggtcatcccttctccaatagcagacttcattaaccgtgatagtgagggcagcacattgataggtgngataaatctgtctgttgtgcagnctgtctgtccacatagatctgcccnctctgtatgtagccagtcagtcttgggatggggtaggattcatcattaggcatggtagaattaggaattgagatccgaccgttctcccttcactcccccacgcgtcatata

SEQ ID NO: 125984 - DNA, 1151 bp, Homo Sapiens
  misc_feature (85)..(108): n is a, c, g, or t
  misc_feature (147)..(147): n is a, c, g, or t
  misc_feature (233)..(268): n is a, c, g, or t
tggcaccacaggttcttttttgtggggaacaccgcttttgtcccccctgttgggctttatcataataggggggccccgggccccnnnnnnnnnnnnnnnnnnnnnnnnttttttctaaggggccgaaggcgccccccacacaagggnatcttgggtaactgatggggggcatgggccccccgactttagttatggagggaataagaggggacagaatagggaaagcgggttcnnnnnnnnnnnnnnnnnnnnnnnnnnnnnnnnnnnngtggtgtgcccatttaatttaacatttattttcattttatatccagatgtcacattttctacattaaaatataatcatgctgactcccccaacccccagccctcagagaaaaaagtgaagaactttacacaacatgaaagatggaatgcacggggtagggaagttgctattgcacccaagtaacaaagaacacagagagaccaacaggacgcatggcagaactgcatagaagatcgctcagggctcacgtcaggaaggcgcaggaattcagaaaactctaaagcttggaaatgctatcgtttgtgccacaaagattaccctgaaaaggtagagagaggtcaaaaagcagaaccaaattggggattttcaaaggctgctctctaacagagtttaaaatatccgtaaacataagtgcttctgctccctccccttgccttcagcatctggtaaacactttagaaacttaaaccactgttagcatgtcagaatgtagaaaggctgtaggtttttctttcttctcatcttgtaccccaaacaacaactctactggcaattgtaatcatgtgactcctctgcttggaaacccagtaaggatcaccaagacaaggggtctcactgctaccagacagataccagctgtgcaaaaagttgcaggattctgtgtattatttggagagggagagctgtaagacacaggaatcccaatacgtaagtactaaagagaaaaagaaaactcctttcactcatctattcattatataggaaagagcaaaaagacagtcaaaaccatctgcttcgagcagcagcacagcccagcaatacaggcataccaacaaccgaaagcgacaccctcgtgccgattcaacccagcctcgtacttccg

SEQ ID NO: 125985 - DNA, 2032 bp, Homo Sapiens
  misc_feature (1918)..(1952): n is a, c, g, or t
cagtgtcttgtcttgcgctcagagtactcgccagactgcagcctacacagtggtcgtgtccagatcgattgtttgattcagagagtctttagcagagagcgtgtactgctcagagaagccgcacttgagagtgactcgtaagcagtcacgtattctctagagatgcaagagaacgctcttctcaggaaagctccaggttgaggtgagcaggtacttggtgccacactcgggccccaagatcccattgtagctgacggtgcgggcacagagcaggaggcggcagacgtactcctcagcggtgttgttggtgatgtgggcaaagacgtcaaagtcactgcccatgttcatgctctggcccacacggatccgcatggccatccctgtctcctccttctcggccagtttgttcaggtggttcgcccttgtgaaggcctccctctcctctgaggacccctctgggtatttgtaggtgtgggtgatatcctcccgctcgtctcggcccacgctcttagtgctgatcttcagcccaacgatcagggaacggttgatggatttgtgcacagacccatcgtcctgctggatccagtctaccacgtcggcattgacctccgcaaagacaaagggcgcatcgtacttggtgctcaggtcgccctccttgatggcacgaactggaactgggccacagcagtacgtcccttcgctcttctcctggggcgttgggtccagggcctgccagccctcgtaccccggctgcaggtccggcctggtcatccacgactccacccagcagtggaagttccagatcatctcgctcttgtcaccctggatctccccaaactcattgcggaagtactcgatgagaaggttgctgttctggtcatgggccgagttgtagttggtcacgacgcgggtagggatgcctaggcacctcagcactgtgcaggccacggcggcgaagacccagcactggccatacttgacgcgctggcagccgtggttcttccagcgccgcaggatgtccacgctgccgatccaggacatggggctgacgccgtccccgtagttgttgtcccagcgtcccagcagcacaccctggtcatcgttgcagttgaccatgccactcaccacccggcccacgtagacggggctgctgcggcgggagcagtcacggccggcgttcttcaggaacttggggttgacatctagaaggatcaggcagatgtctaggatcccatcttcaaactgcccaaaattccaaggtatgttcttgatgaacttggccgagccctggtagataaagccctgctgggtgaggacatactcctgccgctcctcttccgagtccaggtacacagcatccgctgggcaccaggcgttgaagagcaaaatgaagtggcccagcacaaagctggatccctggtagccagtggaggcctccaggctgaggcgatacaggccgatgggggcgttggccggggtggtgagctgcagcgagagggtgcagtcttgctggtccaccacggtggctgtccagtcaccctcctccacagcatctcttagtggaaaacgggccttggtcccggcctcctggctaggggctgggccggtcacgacactgaaggtgagactgtctacactggcctcgtagttgcggccctcaaagtgcagggtcagccagaagggctggccccgtcgcaccaccagcttctcccggcacaggtcggccgtgtggtggtctcggccattggtctccagctccagatcacacctctctaagaccagctcctcggccatggtcgggcgggggcggtggctccttccactggcggcgagaccctccaagtgcgaccactggcggctggcactccccggccgtaatggccgaattcccgggcatatgtccggtaccgtcgactgnnnnnnnnnnnnnnnnnnnnnnnnnnnnnnnnnnncgccgcttcctcgctcaatagctcgctgcgctcggtcgttcgactgcacagcgcagggccatatgaggtatatagtcctt

SEQ ID NO: 125986 - DNA, 690 bp, Homo Sapiens
  misc_feature (613)..(647): n is a, c, g, or t
tcccctctctacctccttgtcttggctgagtctttttttgataaaggccccagacagcctctccgacagtctcaggtcaggctggggttataaatggagcagtggactcagagtcagaggcccagactctgctcttgggccttcacattacccagccttgctgataaccacgaggccactggtttggaggggctgcctcctctctctaagcctcagtctccttatcctggaagcagcgcccacaacagtttcccatggtgattaaatggtttggaggccccgtgagccccagcaagtgtgggaggcacccagcacatagtaggtgcttcgcaatggtgaggttgagggggagggctattaagcttgggctgctgggatgtggaggggaccttgggcctatcactgtccccacccagctctggctgtcccaagggccctggagctgggtgcagtcatgggaagaggtacgggatgcagtctagggagctggattccctgatccagccaaggggcatgctgtcccttttttgcctgctccaaggagctatgaagtagatcaaaccccggccgtaatggccgaattcccgggcatatgtccggtaccgtcgactgnnnnnnnnnnnnnnnnnnnnnnnnnnnnnnnnnnncgccgcttcctcgctcacctgactcgctgcgctcgtcaggttt

SEQ ID NO: 125987 - DNA, 2251 bp, Homo Sapiens
  misc_feature (115)..(154): n is a, c, g, or t
tttccccccgggccttttttattgggggagaatccaaggcccttagttcttgcaccaggatttccttaggaaaccagtaatggcccatgttcactttactttctggggcccgcgnnnnnnnnnnnnnnnnnnnnnnnnnnnnnnnnnnnnnnnnggccggccggacatttttcatattttccccggattgtgtatcccaggtgaaaaaataaactattttatttcagtgtttgctccttgcggttcagaagcacatctactgcctggttggaacccaaggcttttataaaaccgtagagaaatagagctctatgtatagagaaaatatacatgttgattaattgtgtgactctttcctgtgcaaagcagaaagttctaaatgcaacagcatgattctctccaagtccttccctgggatttggggggccctggaggctgtgatctcacctccaatagagaatccccaattcttccagcccaagggaggcccagtcatgtagaaagagcaggagataaagtcaaagctgacaactcatgggttccccaagcttcctccggggcaggggctatgtttgggggccttagccctgcaaagaaggggtagctggggtgccaaccttgttggttagtgaccagcactggcagctaaggctgttgggaagtctaggcattgcagcgggcaggctcatgggtagagcaggggtgtccagggctcttctcccctagaactggggtctgaagggtggtacctgggcataggaaggaaccaggacagggctggggacagaaggtggtcacagtcatggtttcactctcagaaatatcctgggcctatggcttaaggcttcgtggagcagggagtggaccttgtggttatttacaaggctgggccatataaaagcattgcaaacatggagtggagaggatccttggagatgagctggttcaatcactcctctgaccaacaaggaaacaaaggcccagagaggagaaggcagtgcctggccagacgtgggacctgaacccagccagggctctgactcccagtcccccagtcccctctctacctccttgtcttggctgagtctttttttgataaaggccccagacagcctctccgacagtctcaggtcaggctggggttataaatggagcagtggactcagagtcagaggcccagactctgctcttgggccttcacattacccagccttgctaataaccacgaggccactggtgtggagggggctgcctcctctctctaagcctcagtctccttatcctggaagcagcgcccacaacagtttcccatggtgattaaatgggttggaggccccgtgagccccagcaagtgtgggaggcacccagcacatagtaggtgcttcacaatggtgaggttgagggggagggctattaagcttgggctgctgggatgtggaggggaccttgggcctatcactgtccccacccagctctggctgtcccaagggcccctggagctgggtgcagtcatgggaagaggtacgggatgcagtctagggagctggattccctgatccagccaaggggcatgctgtcccttttttgcctgctccaaggagctatgaagtagatcaaacaatatggtgggtggtcaatggctttccaaagggcatctgggcaggagagggaatgtaggtctttcctctctcaccccagccccagtcagccaaggtcagggctcccactgtttctggcacagagcattcctcacagcaaagggggtgagtggggacccacaggctcaggaggctgagatgggccaggggcacattccatttccgagagcccccataggctgcccaccctgccctggggtctggggcccaagaaggggcatattttgctcactagcttgggataaggattgggatcaaggtgggggctctcagcaggctgggagcaggggtcccttaggcggggccaatgatgacattccggaagcccttcacagccttcagcttgtcgctctcgaagttcaccaccagcttgtggaggcccatgtggagcggcagcaggtccattctcaccttaacttcctcccctgcctccacggggtctgggatctccaccgtcttctgctcctcagtcaggccggccccctccacagtgaaggtgcagccttccagggccacagggagcggtttctgcagggacacctcagccaccagcttgcgtttctgcttgagctccccaaggatccggatcttga

SEQ ID NO: 125988 - DNA, 1065 bp, Homo Sapiens
  misc_feature (57)..(57): n is a, c, g, or t
  misc_feature (69)..(69): n is a, c, g, or t
  misc_feature (127)..(127): n is a, c, g, or t
atcatgtccccacccagctctgctgtcccaaggccctgggagctggtgcagtcatgngaagaggtacgngatgcagtctagggagctggattccctgatccagccaaggggcatgctgtcccttttntgcctgctccaaggagctatgaagtagatcaaacaatatggtgggtggtcaatggctttccaaagggcatctgggcaggagagggaatgtaggtctttcctctctcaccccagccccagtcagccaaggtcaggccggccccctccacagtgaaggtgcagccttccagggccacagggagcgggttctgcagggacacctcagccaccagcttgcgtttctgcttgggctccccaaggatccggatcttgatttctggattctccaggtagaggtccctctcagccagcaggtagctgttgataactggctccacgaggagggcctgcaccttgttgaggttggattccgtaaggcagtcacggtatttctcatagaggatgcaaagaggaacgctcttttcagagaaaggctccaggttgaggttgagcaggtacttggtgccacactcgggccccaagatcccattgtagctgacggtgcgggcacagagcaggaggcggcagacgtactcctcagcggtgttgttggtgatgtgggcaaagacgtcaaagtcactgcccatgttcatgctctggcccacacggatccgcatggccatccctgtctcctccttctcggccagtttgttcaggtggttcgcccttgtgaaggcctccctctcctctgaggacccctctgggtatttgtaggtgtgggtgatatcctcccgctcgtctcggcccacgctcttagtgctgatcttcagcccaacgatcagggaacggttgatggatttgtgcacagacccatcgtcctgctggatccagtctaccacgtcggcattgacctccgcaaagacaaagggcgcatcgtacttggtgctcaggtcgccctccttgatggcacgaactggaactcctcgtgccgaattcggcgcgccgtcgacttcatactct

SEQ ID NO: 125989 - DNA, 925 bp, Homo Sapiens
ttcgctactgtgtggtgtggacactttaccaactgactttgagaacaatctgaattaagcagcctttttggtgggtaagtaaaacacgctgaagagtacaaaagaaaaagcccacagcctcctggactgatagtcctctttgccccagagactcaaggagaggggctggaagtggtgatcatttttcttcttctttacagatctagtcatgacaggcctgcaataatcgtggcctaggctcacataactggttgatacatggcagacccaactgcctctgcccccaaattcagaagtctactgatactatgttttaaacaaagtgatttaagcactttcctgctccaaagtattgagatgttaaaattaaacctcaggtctagaaattaagaccctccctaccacgaatttcaagagcagaagtcaacatgacacacagtagaaatatatattccactttattagttagaaaaaatcatttaagccacatggtggccacaatgtccataacttgagcaggctttggcatcccaccacccccttcagaccaatacacactatgttggaggaacgactttaaaatgtaaaatgagaaatgggcactgaacactccatcctcactcccaacagcccacccacacacctcttcaactgctatccaaacatggaggagctcttgtggaagagaggctcaacaccaaataattgagctaagacattcaagactaaaggaaccccagacagatgtttaggaagtagggttgaaaatatcaccatctcccaacagctgaagttgggacatctaagagatgtcagagccatactgctgaggaaagcatagcatacaccagaccccggggtaagggcgagatcaacctatctcatagccataagcaatccactcacacctgtgcattaaacaggc

SEQ ID NO: 125990 - DNA, 1571 bp, Homo Sapiens
  misc_feature (53)..(65): n is a, c, g, or t
ggtgttttctcaactttattgtggacaggagaagggtaagtagacttgaaggnnnnnnnnnnnnnaatgaagaaacaatttatcctgtgtttgataccagatgagactgtaagggtcacatactccttaagcctacacatcaattccaggtgaagtgcttcaggcttggctcattctgacacctaagaagggccctctaggccacggttgggaagactgtttttgccttagcgccgtgcaggtttgggcattatataaacttttacaggcttgctgaagggaatggtgccctcgatgctggtttccacctgtggtgacatctcaccaccctccatccaggggcattttggaatgcgagcactggagttgtaggccagcagcagcctcacttccacctggcatgcctctgtccaagcggtgtgggagagataaacctgagtgatgagccggtgccgccctgggccaggattccggaagtctgcaggcttggggtgaatcatctgagcctggccatctggatataagacctggaccttaacagtgttctgaggatcctgcacatgctccagggttgcatcaacatccagggcaaccaccaacccagaggtaaaccgcaaagggttgtctgactcgcccgctggctcgatgatggtggctgaggctttgtggatctgctctggaagcgggagatgcagaaaggcactctgtcgcagcatggtctgtagaattttgaccacttctgcaggtttggatgtcatgagtcggggcataaggtcaaggagtttgtccacaaagctgtcctgcaagtggggcaaatcagcgatgaaatacctctgaaaaaagtctacttcctgtaaaatttttcacacatcccaaataaggggtcaagtcctcgtgtagttcgtgctgttactaaaagttgcaaagctttggcctgcagcctcatgtgatgtataatcaccacctgcttattctccacaccactgtacatgaattccattttgtaggtctcttccataatctgtttcgctgctgctgaggccaaatcactctgcttcaaatacaaaggggcagcttacattccacaacttttcctgcaaggccttgatgagaagtagttgacagcgaagataggtggcagagaaatcagctactcctgccaattcagattgaagttctccaagtctttgcagatccctgatggtgaattccagcagctcctgggctccctgagggtccaagtgctgaagactatacactctttcaaggctctgctgcaggaactgctgggaaggatcctcttgaggtatgatgctgggagaaacagctgatgacaccagttttctacctggtaacctcaaggcaggaacaagatgagaaagactgtctcggaggtaggcatagtgcctgaaggtgtgatctgagaacaatgctggcattgttggacaggttttagcagcattgaaaataagtaccaaaactgcaatataagctggatcatccatgtctggttcagctgtgtcaaaaaatgggtgggtgctcagaagctctggcaccaagggaagcaccag

SEQ ID NO: 125991 - DNA, 842 bp, Homo Sapiens
catgcttacaacatgtaatgcaagttataaaagagcacaaaagaacacgttcagtttacggttgttggtgcatttcctttcacatacagtgacacagagggagttcataaagttagaaaacaaggatgaccaaagaagcagctgagtgttctagacaaaccaacgataggagggagtgggggaggacgaacaatttaagcagcagagaagctcccagcaaacaggaacagtctacaaagatcagacagcaaacaacatcccgaagaagagaagcacattttatggcacaggccattcccattgtcttgatggatctcttggaaccacactccattctgcttacacttgctagagaaagttcaggtgatcaaagtctcagaaacactccttacttggatttttcctacttagtcttacggtgtgccttctcaagccatgcaaattcagggccagacagtcgtactgcagcaataaatcctcttccttcacgtcagctattcttaaaaccatgtctagacaagccagcccattgctgaaactttgattttgcccttcctcttgttgaattcttggttcaccaaagtctgtaatttttgttccattaagctgccacaggacggcagccaagaactgagtgccttttccaaaacaagcagagcaagttaggtttgcgttttttccaatttccacttcctttatttcattttgtgcaggggctccgattactggaaacagagaaaagcttgctcatccttgaccgtgaaggacctggtcgccgtcacactataattggctccattttcattgtgtataaatttacaggtgtaatcacctgcgtcctc

SEQ ID NO: 125992 - DNA, 693 bp, Homo Sapiens
  misc_feature (88)..(147): n is a, c, g, or t
  misc_feature (658)..(658): n is a, c, g, or t
attgacttcggttattcatttaatagttttgtcttgtaggtgaggtcactttggcaataaattaaaaatgcagatttgtgaagtgacnnnnnnnnnnnnnnnnnnnnnnnnnnnnnnnnnnnnnnnnnnnnnnnnnnnnnnnnnnnngataaaaatcaagaacactgtgaaacaaataatatacaaacttttattcaaagttaattcaagaaagacatgttttggtcatttttaaagtgagattaattgaagatctcagaaaaactgtatctgatcaacacacatggctactcacagaaagttctctcttctgttaatagcagctaaatttatacacacagaaaaaattccgaagaccatgcaaattcaattgaattccatacattcattatattcatcaaaaacctgcagtaatgttcatgccaaagtgttaatttaagaaaaaaattaaaaatacacaccaaaacatgaccaagattaaactaaagaaaataataaataagcataatttatattgtattttaaaaagtttggcatcacacatattcaagtgtgttacaccaggtccattcctcagaagtggcatttaaagtgttaagcattgttaaatatcaaaaaatacaactctgttttacaatgtagtactggcataattcanagtactgtgccaattataaatagtataatcaagtt

SEQ ID NO: 125993 - DNA, 1075 bp, Homo Sapiens
  misc_feature (271)..(332): n is a, c, g, or t
  misc_feature (716)..(716): n is a, c, g, or t
  misc_feature (774)..(774): n is a, c, g, or t
  misc_feature (1043)..(1043): n is a, c, g, or t
  misc_feature (1047)..(1047): n is a, c, g, or t
  misc_feature (1064)..(1064): n is a, c, g, or t
aacaaataatatacaaacttttattcaaagttaattcaagaaagacatgttttggtcatttttaaagtgagattaattgaagatctcagaaaaactgtatctgatcaacacacatggctactcacagaaagttctctcttctgttaatagcagctaaatttatacacacagaaaaaattccgaagaccatgcaaattcaattgaattccatacattcattatattcatcaaaaacctgcagtaatgttcatgccaaagtgttaatttaagnnnnnnnnnnnnnnnnnnnnnnnnnnnnnnnnnnnnnnnnnnnnnnnnnnnnnnnnnnnnnngcataatttatattgtattttaaaaagtttggcatcacacatattcaagtgtgttacaccaggtccattcctcagaagtggcatttaaagtgttaagcattgttaaatatcaaaaaatacaactctgttttacaatgtagtactggcataattcaaagtactgtgccaattataaatagtataatcaagtttcaaacatcttttcaaacatatttaaaggaaagcatatagacacacatttatatgcacataatttattatattcatgtaatcaaagttattttataaaagcaaacagtgtatccctcaactagtttgtatacttacgtagattttaatatctgttcaaagattttcagttcctggtatacagatttttagaangacataaagatacaatttaattttacaagaacacacattacttcatcctccttcacanaaataatctgtagtcattcaaggtttgataagaactagtcctttatgaaagcaactgttgtctaaagactacagattaagtcctgcagtccaagtttcttatgaaaattcagtcagctgctgctcattgcagaaaaagcctacacgggtgcttctaccaaaaataatcttcagtatctgagggctataaggcagacgatcgtatcttctgctgagacttaagtgagctacagtggagagtgctagatctcagtcactcacaatacttgntganggtgttctcatgtaaantatgctgaaag

SEQ ID NO: 125994 - DNA, 667 bp, Homo Sapiens
cacattccttacattcatagggttttattccagtgtgagttcttacatgttgagtaaggtgagttgatctagtgaaggctttcccacattccgtacatttgtgtggttttattccagtgtgaatttgaatgtgaacattaaaggatgaggaatttctaaaggatcttccacattctttacattcaaaggacttctctcctttatgagtttttgcatgtgcagaaagttgagaaaaattagtgaaggatttcccacagttcttagtcttttcggatttctttccagtatgaactgctacacactgctttaagtgtgaggaagttgtgatggctctctcacattcctgaaattcacagagtttctctccaatgtggattcccatgtgattatcaaggcttgcaaaatacttaaagccttttccacattccttacatttgtagggttgtcttccattgagaatttcaagatgcacagcaaggcctggagttaaggtgaagacttttccacatggattaaatttggaaagttcttgtccaatagaggcttccttgtgcacactgatgctgtcttttccataacaattaccctcaaaagtgttccctccattctgagctctcatgtgtgtcttaaggcaaaactgttcactgaagacctctccacaattctc

SEQ ID NO: 125995 - DNA, 721 bp, Homo Sapiens
  misc_feature (695)..(695): n is a, c, g, or t
cagtcttcaatgccagtttattaagttacatctattaaatatattaacacatacaacatttcatttacagagattagaattcatacactagtacccaaagacatgggatgcataccagttaagtacgtatccaacaacatacaatatgcattttaccttgcggttgatgttttaacataaaacataaaatcaatgaaagcacatggggtttgtcactaaaaccacataaacacctacacttcttcaatctgtacacccctgaaacaaaaaaaggggaacattacatgctttaatgactttaagaataaaatcatttgatgaagttcagctactttatttacttggcactgtgtgtcttgttcctcctgaatgtatacactgtgagagtaggacttgcctgtcgcattccttctcagctctccagtatccaggcaagtgctgccacgtgacagatgctcaaaacaaaaatgatttacgaatgaagttgaaagactgctgggcttattgttaagatatctaaattctacttttagcatccaactagctactgtctggcactggccacgaagggtgacagggtgtggatgtgatggctccctctgagcctgggtttcttcatctttgaaatgatataacttggaataaactcggcagatactgtcatttctaaaattccatgacatttctctattggncaagatcttaggggtattttgtgttg

SEQ ID NO: 125996 - DNA, 1002 bp, Homo Sapiens
  misc_feature (766)..(868): n is a, c, g, or t
  misc_feature (900)..(900): n is a, c, g, or t
  misc_feature (905)..(905): n is a, c, g, or t
aaacaagtaagccaaagcacaaagaaatgtcatgctatgtatatatccggttattttagctttataaatgagtttagttctgcaattattggggattcattgcaatggtctctgaaactttgagtcctatgtccatttgtaaacatagagctagttgggtgcatttttggagagaatagatgttttcttctcaaacggctgcactcagatgttgtcaagcagagcaagattaccagctgctgaggacaagtccaagttgcaactgagtggagaatccatctaagagtacagaatactttcccatttagagggtgttcttcctgagtaatttagcctctatttcaggatccaggcacggcagatgatccccgcacatgaaatcataagtgcaaccagtgatggttacttttcctctctaaatgaggcagccacccctgccaaatggacgggtctccctgtgctctaaggctgctgctggtattgcccttccgtggctgtgtagaaatcatccaggacgctctgtaagtagtcaaacgttggtctctcttctgccttttctttccagcacattttcataatgtcatagagctcatctgggcagttctccacacggggcatcctgtagccctgggacagggcggtcatcacgtcggcattagttctccctgggtagggaatttttcccataggtgacaatttcgtataggaggattccaaggaccacacatcagacttaatagtgaaacatccaaagcggacgcgtggnnnnnnnnnnnnnnnnnnnnnnnnnnnnnnnnnnnnnnnnnnnnnnnnnnnnnnnnnnnnnnnnnnnnnnnnnnnnnnnnnnnnnnnnnnnnnnnnnnnnnnntcctggggggaaaatggtattccgtccgcggnctagnttaaaagtcccggagctgtagaacccgcccccggggcccttctataggaggccaaaaacccgggggaatggggtctccggggggaattttgacggtt

SEQ ID NO: 125997 - DNA, 1761 bp, Homo Sapiens
  misc_feature (1)..(1): n is a, c, g, or t
  misc_feature (107)..(141): n is a, c, g, or t
ncatgtttttattgtttgattaacaaactggttgggggaagggcaagaataagacatgcgggggaaataccagctttgattagtcagaaactcctgttatcagtacnnnnnnnnnnnnnnnnnnnnnnnnnnnnnnnnnnnctaggctcaaggaagcagccgcccttgcaagagggctcaaggcacctgggaggctgagaagaggccaacctggccatgggcgtggctgcatggacagctcttccctcctgcccttccccagatgcccttccctcctgccccgaggggcacactccctctccccaattacaggtgctacaaaactgccttgaataccaccgccaaggcactgccagagatgaaatgggccctgagcagagcctcaggctctccctcccccgtagcccaggcctggagaaaggagggccttgttccccaggccccaggtgggcacagattccagagctgcctcggggaaagcctcttaggggaggcccaggctctgctccctggggaggcagaggccgtgggacctacacacaggcacacacagccctggctttggtcagtactgagtgtgggcagaggggccgcagccctgtccagccccacgatgttgactgagaggtgctatcccagacggtccttgttggagctgccatggcaggctgggccctaattggggtagcacaagcagcatcccgtgcctgccgcctccacgctgggcttggcaccgggccccaggagcccatcagtgacagagtgctccatgaggatgtcctcccaccccgggtgatgtacagcagcgtcagcagcacccccaggaactggggaagccagatgcccaggaggatgcccgcccatgatggtgtagttgttccatgaaccagatgatcacggcgttggtgcagccccgcacgtagatgacatcctgcacactgaaacgctccttgtcgatagttttgtagccacacatggtgttgacaacttctgtcgtgttcctgatgcagcaggtgtagggcaccccacaggccaggggtccaggggcactgcagtcgtggtactgattcttgctccaatctcggtagtcctccccgccacagcacttgaactttttctgaacaaagtccatgatgtttttgaagtccagatcatcatagtagttctcaattcctcttcgaatgttgtcgttcaggaagtcaatggtctggttccggaaggtcaaggccaccacgccaccaatgagctccatgatgaggcagatcccaaggatgtacatgaatgcttggagaaggtacaggttgtcacggagggacgccagcacaccaatgaaggagaccatgaacatgacgacgcccaggaggatgaggatgatggctggagccaggaaggcactttcaagggttttatatttctgccgctcaacctctgcatagatgcccacagacaggaccagggccccaatcagccagaacacggtggaatagatgataagtgaaaacttgagccagaggtaggagaagcgcgcgcagtagcgcacctgctccgagtccccgcgcggcatcctgggcgctccccgcgcgggttacgggggctccggggctctccggctcggtccctcagccagcgctcgtggccccacctgcggctgccgggctaccagccccgccaccggcgtctctccgatccagggaattccggaccggtaccagccgcgcatgttcaacttttgcttgattgtatttcttttttggtattttg

SEQ ID NO: 125998 - DNA, 687 bp, Homo Sapiens
  misc_feature (397)..(397): n is a, c, g, or t
cacacatctgccaagagagttaaaacaaatatagatgttaaataaaaggcccaggtaccaaagagcaaaatttaatgaaagccagaactgttaagtatggattcctgttgagaaaaatgtcagtctctttcagagttttcccaatgctctatttttaagaaaagtgtagtaaaaatacataatacaagttaacttttttcttgcttgtgttttcctttcatttctccattgatgaaaaagcacatttcgccagagtcttggaccccctcatagcatagaccctcatttctagcacaaacaagtctctttttatccgctcatgttacttgtgggctcagtagctggagaggcatcttactaggccaaaggcaaaaagtctttgaagcatgttgatgtntaaagggttatttccaactcttccaagatgcagactccctaatggtgggtcacatcggattctgcagtggtaggctgaaggctgagaaaaatcttgtatgagggcaggggctgagagacatcagctggcagtagttaaaagcaatcatccatcttgagggtccggtttcatgaaccatgaccacattgacacgcgagagactgaacaacaacacttgagtcaaaaaagtgaagagtttgattttggaaggattctttgctatggctgaaggcaggagagtggagagacat

SEQ ID NO: 125999 - DNA, 966 bp, Homo Sapiens
  misc_feature (848)..(883): n is a, c, g, or t
  misc_feature (885)..(926): n is a, c, g, or t
tttttaaccaccattgtctacacctttttaaaaattaagtttgttactaaaagtccaatgtcattcacttgtatttatgatcatcaaatggtaattagggcaacatatgtaaatgcatgcctctgaatcagattcatgcagtgttaattatctgaataatttatgacattctcccaggttatttgaatggtatctttggagggcttactcaaatgaacccacaatacctccactattacagcttataggaaattacaatccactttacaggcctcaaaggttcattctgtggcccaaagcccatggaggggaagggatctaaaggtgctcatgtcaagttattttacttgttttttactgtctacccaatgtaaaatgaattttcttcacagcctttactttaggctaaaaatagacagttttcttgtattgactttaactttagaggggacagtcgtccctggaaaaagaagtagatttactgtccctaaccattaaattcccagtctttcaaataatgtgcgggcggggggtgctgggtgtgacagggtgcagtgaataagatgcctatgtacaagacagtggaatagttcacctcaaaggtttacaagataacatttgtaagacttgagtgacagaggcaaattttagcagtttctcaagactcttggagttgagcagatttgagaagggaaatcagaatcgccgagccttgccatctgtcagtggttttggtctgtcccaagatgttctcaatcatgtgcttcctgttgaacatctaacaaataccatacgggcccggccgtaatggccgaattcccgggcatatgtccggtaccgtcgactgnnnnnnnnnnnnnnnnnnnnnnnnnnnnnnnnnnnngnnnnnnnnnnnnnnnnnnnnnnnnnnnnnnnnnnnnnnnnnncaaagagctagcgccctaataagtgatgaacaaggttttt

SEQ ID NO: 126000 - DNA, 915 bp, Homo Sapiens
aatataaaacaatataatcacaataccagaatatggaactctacagtttatttcctatgggttactgcaggtatcaattttcctcgactgtgctattcacaactttgttaagtccaaaaatatgaaaccaaagtggtaggaaacttaagacttagcactttcactaaatggcatacatcgaagggcatcaattcaagagcaaaaatggttgaactcaccatacctacctatgtggtcattccagccttagagccgtccaggttactgagctccctgtaggaaaggccaggcctgaaagccaaggcgttttggatattctactgtgggccatgagtaaaaggggattttcaaagagaaaatttttttcagtcgagcaggaaggcctggtgccaggaggctttactgagaggaagcacttagatttaacaattatagacacaccattaggggagttaaaaatgtacagcagtgacatgttctactccaatcacttgtgctacggctaccaaacatgtacaaaagacttctcgggtagttccagctgtggccatagccagttaggaccttgagtgggacctagatctagatcgggagggcgatctggaagcagacctggatctagacttggaccgagatcgggtttttgaagctgactttgatctggagcgtgattctgatggaaggtttggtttcgatttggaattggatctcgacctggaccgggtctcctgattggtgccagcattctcactctctcctcgaccttccctctggctggattcagacttggcatgttcccgctcctttgacacggagcgggatggagatctggactgggagcggtcagtgtcttccttcttcttcttcttgctgctgcccgcctaatgaccactctgcgttgataccactgcctcc

SEQ ID NO: 126001 - DNA, 1342 bp, Homo Sapiens
  misc_feature (23)..(23): n is a, c, g, or t
  misc_feature (276)..(321): n is a, c, g, or t
ggagatctgactggggaggcgtncagtgtctcccttctctttcttctggcggctgccgcccttgctgtctcgcttgctgcctcgctttctgctcctctcactcttgctgcggctgcgactgcgactgcggctctcctctctgcttctctttcctgcccttcctcttgtacatgctcttgctgcggctcctgctacggctcctgctgccccctttgctcctgctccggctccgactctggcggaggctcttctcctggctcctgcccctgctcacannnnnnnnnnnnnnnnnnnnnnnnnnnnnnnnnnnnnnnnnnnnnngacttttgctcttacttttatgcctgctaggactccggctcttgggtttcccgacattgtcattgttttggatcttctcttcagcttggtctttgctcttgctgcggctcttgccagcgctatggctgcggctgcggctcttttccttgctggggctcctgcttttctctttcttgctccggctccgactctggctccggctccggctcttgctccgggagcgggagcccgacctggaccgagatctactcttagaatgactgcttttgctgctgccacttcggcttctgctcttacgggaatgtctgcttcgagagcgagaccttgaatgactccggcttctggagtaggaccggcgtcgtctggaacctggcttgtcttcaactaatctgatttttctcccattgacttcagttccatccaacttttccaaagctcttttcatatcagaataagatacaaattcaatcaccccttcatttttgcgtcccttgtgagcatctgcataagtcacttctcctgcctgacgcatataatcctttaggtcttgccagctgcaccgacttgacaaattctccacaataagtctgtactctgtgcgagtaggagggccatatttatctcggccacttcttctataaccatatccactgcgtccagaaccgtaactgccatctcgccgtgggccgcgggcatgctcaacaattactcgctcaccacaaaggtctttgccattcagttcataaacagcatcatctgcatcacgcagatcatcaaactccacaaaaccatatccgttcttcagatccacctccaggatcttcccgtagcccttaaagaagcgctccacatcgcgctcccgggcctggtagctcaggcggccgatgtacacccgcggcatcccggcaacggcagtgatggctggccccggccccagccccccttaggcggcggcgggcaaagcgagagcacggcggcaacgcggcgtcgccctcggccgattaaacccagcctctacctg

SEQ ID NO: 126002 - DNA, 851 bp, Homo Sapiens
  misc_feature (326)..(385): n is a, c, g, or t
cctcacagactgcgcccgtaagagcagaagccgaagtggcagcagcaaaagcagtcattctaagagtagatctcggtccaggtcgggctcccgctcccggagcaagagccggagccggagccagagtcggagccggagcaagaaagagaaaagcaggagccccagcaaggacaagagccgcagccgcagccatagcgctggcaagagccgcagcaagagcaaagaccaagctgaagagaagatccaaaacaatgacaatgtcgggaaacccaagagccggagtcctagcaggcataaaagtaagagcaaaagtcggagcaggagtnnnnnnnnnnnnnnnnnnnnnnnnnnnnnnnnnnnnnnnnnnnnnnnnnnnnnnnnnnnnaagagcctccgccagagtcggagccggagcaggagcaaagcgggcagcaggagccggagcaggagccgcagcaagagcaaggacaagaggaagggcaggaagagaagcagagaggagagccgcagtcgcagtcgcagccgcagcaagagtgagaggagcagaaagcgaggcagcaagcgagacagcaaggcgggcagcagcaagaagaagaagaaggaagacactgaccgctcccagtccagatctccatcccgctccgtgtcaaaggagcgggaacatgccaagtctgaatccagccagagggaaggtcgaggagagagtgagaatgctggcaccaatcaggagacccggtccaggtcgagatccaattccaaatcgaaaccaaaccttccatcagaatcacgctccagatcaaagtcagcttcaaaaacccgatctcggtccaagtctagatccaggtctgctt

SEQ ID NO: 126003 - DNA, 1323 bp, Homo Sapiens
  misc_feature (50)..(125): n is a, c, g, or t
acagaactaaactgaaatttattaacattccactcttacatttcttatcnnnnnnnnnnnnnnnnnnnnnnnnnnnnnnnnnnnnnnnnnnnnnnnnnnnnnnnnnnnnnnnnnnnnnnnnnnnntatggatcccagcattaacagctgaacagagaatgtgatttttaaattcttggcggatgataaagttgtgtagaaactgaacacttacaaattatttaaaacctggaatcactgaccagaaattacacagttggatcatgggagaacagcagaaaggggttattgagggaacctacactgttctagctgcaccccatgcccttctcagaggaaagcctggcattgattagatactgggccagactaatactggcagcagagccagtgatagtaacctgcctaccagaggagccttccactgggttggcaattttgatctgggccccggacatctggcggatctcattaatgttggcgccttggcgcccgattatgcagccaattaagttatttggaatggtgagttcatgggtggtttgagtagatgcatccaaacttgcccaatagcctttcacctctggagagctggagtcaattccggcgaatccggtcccgccgtgcatcatggcaaagtgagactgttgtcttgccacctggttcagcttggccagatcgagcggagaaatggtgtgttgtccttgaatcgagtaggcatctagaggtggtccctccaggtcatgggtggcatgggggtagcccgcagcgtcgctgcaccgatcttggccgcccgcgcagatgactggggagctggccggcatgggctggtacggaatggtcatgactctcccttgcggagactgggagagcgtctccagcatgaccaggcaaatctgcttgacacactcggtgacagactgcggcacgccagcgatggtgatggcccgctcggtggagttgggcagcatatcccccgccacctggacctgcgcccccgtactctcgcggatctctttgatcttacacccgcctttcccaatcagggagccgcactgggtggccggcaccaccagcctcagggtgaccgggggcctgctggccgcggtactgttggtcatggagctgttgatatcttcctccagcttgtcgatgatcatagcgaaagccttaaagatggcattggtggggccggtcagagtgatgattctctccggacaacccacgcgtccgcgacgcgtgggtcgacgatatcccgggaattccggacctgtaccagcctgctttgtttgaaaacactggttctatattcacactcgctggt

SEQ ID NO: 126004 - DNA, 867 bp, Homo Sapiens
  misc_feature (88)..(162): n is a, c, g, or t
aaccaatccgttttttaattcttaaattcttgacattacagaactaaactgaaatttattaacattccactcttacatttcttatcgnnnnnnnnnnnnnnnnnnnnnnnnnnnnnnnnnnnnnnnnnnnnnnnnnnnnnnnnnnnnnnnnnnnnnnnnnnntatggatcccagcattaacaggtgagcagagaatgtgatttttgaattcttagcggatgataaagttgtgtagaaactggacacttgcaaattatttaaaacctggaatcactgaccagaaattacacagttggatcatgggagaacagcagaaaggggttattgagggaacctacactgttctagctgcaccccatgcccttctcagaggaaagcctggcattgattagatactgggccagactaatactggcagcagagccagtgatagtaacctgcctaccagaggagccttccactgggttggcaattttgatctgggccccggacatctggcggatctcattaatgttggcgccttggcgcccgattatgcagccaattaagttatttggaatggtgagttcatgggtggtttgagtagatgcatccaaacttgcccaatagcctttcacctctggagagctggagtcaattccggcgaatccgggtcccgccgtgcatcatggcaaagtgagactgttgtcttgccacctggttcagcttggccagatcgagcggagaaatggtgtgttgtccttgaatcgagtaggcatctagaggtggtccctccaggtcatgggtggcatgggggtacccccagcgtcgctgcaccgatcttgccgcccgcgggatgactggggggccaagttttactcatcgggg

SEQ ID NO: 126005 - DNA, 988 bp, Homo Sapiens
aaaaagcaggctggtacaggtccggaattcccgggatatcgtcgacccacgcgtcgcggacgcgtgggttctgaagtaagaaagtgtgagtcatccaactgttcttttttcgagattatttggctattctgggtaccttgagaatatgaatgtagggttaacttggcaaggtctgtaaataagacaactgggattttaatagagattacattgaatcttttggccatcctaatacaaagtcttctgatccaaaaagatggaatgtcttcccattgatttagatcttgctttctttcagcagtgttttgtagattttattgtacaggtgttaatactttgttagatatatccgtaagtgttttattctctaatgctattataaatgaaatcattgtctccatttgagatcgtttagaagtacaatgtttttcgtatattggggcacatggcttttactaatagaaaaatcatatgtatacatgcttgtttactaagttttaggcacttggtcaatgctgttgattttctgtttgtaacatttgctcgttggtcatcacttccttttctgattggaaaattattgtagcagttctgctgagcatgtactttgaagtactttatcttctagggaaacctgaaattcttaagcagctcactctgggactcagctgtctgtgctttactctgctctgatagagcagtttaccagatgtgcatgtggccatctgagtggaacagctgtgcagttgagatgaattgctgttagaggtgttgtcctggaactgtctggttgcaggagcaatggtgccttccagtgcatctgatgagattctaactgaatatgtgaatatctggtatccaagctagatttcagtagaaaccgcagggaaagctgtctgctcatttagaatgttggagggctctgtttgaagtttgcatttctctttgaacagatgctccattgcaaaataaaaggtttgaagatttc

SEQ ID NO: 126006 - DNA, 799 bp, Homo Sapiens
tgcgactacgctgcggcctcccgcccgctcccgctcgctcccgcggccctcgctcgcctcgcgccggcagttttgggcctacacctcccctccccccgccagccgccaaagacttgaccacgtaacgagcccaactcccccgaacgccgcccgccgctcgccatggatgccggtgtgactgaaagtggactaaatgtgactctcaccattcggcttcttatgcacggaaaggaagtaggaagcatcattgggaagaaaggggagtcggttaagaggatccgcgaggagagtggcgcgcggatcaacatctcggaggggaattgtccggagagaatcatcactctgaccggccccaccaatgccatctttaaggctttcgctatgatcatcgacaagctggaggaagatatcaacagctccatgaccaacagtaccgcggccagcaggcccccggtcaccctgaggctggtggtgccggccacccagtgcggctccctgattgggaaaggcgggtgtaagatcaaagagatccgccgagagtacggggggcgcaggtccaggtggcgggggatatgctgcccaactccaccgagcgggccatcaccatcgctggcgtgccgcagtctgtcaccgagtgtgtcaagcagatttgcctggtcatgctggagacgctctcccagtctccgcaaggggagagtcatgaccattccgtaccagcccatgcccgggcagcctcccagtcatctgcggcggcggggccaagatcggtggcagcgacgctgcggggctaccccccatg

SEQ ID NO: 126007 - DNA, 499 bp, Homo Sapiens
  misc_feature (118)..(152): n is a, c, g, or t
  misc_feature (488)..(488): n is a, c, g, or t
ttttaaccaatccgttttttaattcttaaattcttgacattacagaactaaactgaaatttattaacattccactcttacatttcttatcgacaaacagaaataaaattcatgagccnnnnnnnnnnnnnnnnnnnnnnnnnnnnnnnnnnngcttataaaactaaatatggatcccagcattaacagctgaacagagaatgtgatttttaaattcttagcggatgataaagttgtgtagaaactgaacacttacaaattatttaaaacctggaatcactgaccagaaattacacagttggatcatgggagaacagcagaaaggggttattgagggaacctacactgttctagctgcaccccatgcccttctcagaggaaagcctggcattgattagatactgggccagactaatactggcagcagagccagtgatagtaacctgcctaccagaggagccttccactgggttggcaattttgatctgngccccggacat

SEQ ID NO: 126008 - DNA, 585 bp, Homo Sapiens
  misc_feature (97)..(159): n is a, c, g, or t
taaccaatccgttttttaattcttaaattcttgacattacagaactaaactgaaatttattaacattccactcttacatttcttatcgacaaacagnnnnnnnnnnnnnnnnnnnnnnnnnnnnnnnnnnnnnnnnnnnnnnnnnnnnnnnnnnnnnnntaaatatggatcccagcattaacagctgaacagagaatgtgatttttaaattcttggcggatgataaagttgtgtagaaactgaacacttacaaattatttaaaacctggaatcactgaccagaaattacacagttggatcatgggagaacagcagaaaggggttattgagggaacctacactgttctagctgcaccccatgcccttctcagaggaaagcctggcattgattagatactgggccagactaatactggcagcagagccagtgatagtaacctgcctaccagaggagccttccactgggttggcaattttgatctgggccccggacatctggcggatctcattaatgtttgcgccttggcgcccgattatgcagccaattaagttatttggaatggtgagatcatgggtggtttgagg

SEQ ID NO: 126009 - DNA, 941 bp, Homo Sapiens
  misc_feature (237)..(237): n is a, c, g, or t
gtccacgtgttttcaaccttaactcatcggtgaaagtcgttttcctaaatgggtcaaacgggggcccccacatagtctctgccgagcccctggttcccaacctctcccgaccacatgctggtcggtcaaacggccttgaacctccttgggtggtgtcccccccaaactgttgcgcggcgaaaatatcgggaaacggcctacctggagctatctccctcccccttggggtccctctgngtatacacccttgaacagaaaacagcgtacccaggaaacatctagcacggccagatttcccccttgtcccggccccgcaagaacgctccggactgtctctatttcacaggattcaccttgttgagttctacagctttgtgttctttattgcctctcccttgggctaagggagggaccagcaccatgtccttctggagacccggaaccccccagcaggccagggaggcaaggcctgggccgccaggaagccatgcttgaacactaggttgggaggggaacaccccagcaccttggtcctattgaggcttgaagtgcctgcttgatcctgaccaaggggccaagtggaagcctgtgctggttgtggggaagtgccaggctcacatggtccagtaggcatagacgagcgtcaggaggataaagatggccacagagagcagcatgttcttccggttctcttgccgaagaaacttcagttccttctcgtagttggaggctttgttcattaggctgtttttctccttctccagggacctcctggcctctgggctcagctcccggctgtggagtctggagttcacggcctccaggtctctccgacactgggacagcttctcctctagcccatcgatctctagagcgacgcccagattctcccgcttctttttagtcatgttacttgccgggatccccacctcgtgccgaat

SEQ ID NO: 126010 - DNA, 2049 bp, Homo Sapiens
  misc_feature (29)..(29): n is a, c, g, or t
  misc_feature (33)..(33): n is a, c, g, or t
  misc_feature (372)..(372): n is a, c, g, or t
  misc_feature (396)..(396): n is a, c, g, or t
  misc_feature (585)..(599): n is a, c, g, or t
  misc_feature (834)..(835): n is a, c, g, or t
  misc_feature (837)..(838): n is a, c, g, or t
tgtgttttgtttgtttaccaagtacaaantctntgtgcacaagaactggcggccgatggtaggagaggataatttttgctggggggagccccagtgattcttatatatgtgacatctttcgtgtggtcacacatccgtaattgttgggtctgtgcggaggaggaatgctgggagggaggcggggcgcggccggggtttgttggtgtgccttgcattcgtgctgcttgtggattattttcgtatgtggagtgggcggctcttcatagtttggttgaagagatctacctcctgccgaggagagaggcgctcgtcggtggagtgcggtcatgggggaggcattgattatgggaaggtgttgttgaggaggacaangccaaaccccgtctcgcgtttgcnccacagacccgccacgggagaccagggtgcatgattctaaagctgtcgtggtcggggggggagtattctctccccgggtgtattggtgattattgtgttaacacattgaatgtttctcctcgttatttatggaaacaaatatataattaagccccgtttttctcctccattgggcggtggggggcggannnnnnnnnnnnnnnactccacgaggtgtgtggtgtgaacagctatcttcgcgcggcgcgcccagagggggccccgttcagaagaaagtgtgtaaaggcggggatatagggacagctttctcctgtggggtgggtgtagcaacacgcctctctttcacgggaggggggcgcggctggcgtttgatttggtattatagcaacacatagtagaatagtctgtgggtgtgggtagcgtcgttggcttcgctgnntnntgtttttttgacttgaaaacagtttatttaatttatacaaataactactaaatacaaaaagtagattaaaacaaaatagttatttttttctggcagagtttaaatgcacgtaatggataattctgaagaaaatgcattttccccgtagcgttcaggactaaaattctactgaaatctttgcttctaaatcagtaatatattcggtggtgtcacgtgggtaatggctaaatacgttctgcatatgaactgaaaaaaagttacagtctacacacatacaaatgtgaagcacttaaaatgtgattttaactgataataaaagaaaatgtccattttagagtatagtgttaaaaacatttctgtaataaaatcataagaccacataaaaataagctttaacatatgcacaaagcagttttgtaaaaactactaagtgcacaagtaataaataatttgcaaagttgtgtataaacaattcctaatgttcggcatcattgtaaacatcagcacatgtgtaaaatgcagcaaagtctgacattacattttgttttgccaaattgaattcctattatccaaagacagaccagtggagtacgcagccaacattttggcaagttgggtctttaaaattaagagtaacagtgcaagtaaggaatgcaaagaattcctagtgcaataaagaagagaagcacaggcaatattgctgattaaaaattcaccacctccttgagtttcccgtggggagtgtctaggagacttgtgaaagctatgcaaagccactgacttaatgcccagatctcttttaggatttctctgtgttcctccagtccctacctttgcaacagtgtctgtccaacattagtctctgcagtgtgaacagttcgtgaaatgcccagttcacagtcatcgagcgaggttagggtggttttgatgtctccccaacacatggctgggtacgacgtctgccttgtcaaagcagccatttggggagggagacagatggattccattctgacaaccagtcaggccagcattaggtcccagctggacaatgacaacaacgtcaaatcttccttcttgacactatgaaaatgtcaacagtcagttttcaatttgtcgagggaattatcaattttggtcaaagtctttttgatacgcagtgctgtgagtcttgcggatggatttgatcccgggaatccggaccggtccagcct

SEQ ID NO: 126011 - DNA, 703 bp, Homo Sapiens
  misc_feature (74)..(74): n is a, c, g, or t
  misc_feature (85)..(85): n is a, c, g, or t
caagccgattgatcacattcttcagctctagcagtgcaaaggcttcactgaaaaagaacattacaaattttttntgaaagaaatntggggaatccactgaagacctacatttcccggaaggttaacagcccccttctcagttttcctggtaaagtgtttttatattggtagaataccttctgtcacactctatatttttcttatctcaagtagaaaaaatttttgcccttttgcttgggactgttaacagccctggtagtggaaaagtagaaggaaatgattctgtgaattttctgttatataaattttagccagtttaggacttttgaatgaggggccatacagccaaggatttaggatttcagctcaggaaagaaaactgcataggtgtttaattgtgtcctagccacttattagctggggtaactttgagcaagttttatacatatccttcccatgagtttttcatttctaatactggctgtgtaatacagtatgtttcataggcttgctgtaataatcgatggggtgtatctaatagtgtttattttactgtaactgggccacagttaggaagttctcaattaaaattagctgtcattattcctagtattaatatggtgatgaacagctaaagagcatttaaataattatcattaatatggataaattttgaccatacctgaataaatatttataatat

SEQ ID NO: 126012 - DNA, 745 bp, Homo Sapiens
tgtgagcatggggctgtattttaatacaagaaagacattgctctagaacatggctcgcctttgcttcagggcctagcagtttattttagccataagggtaagggagcaggtcagaaatgacttttagtgtaatcctatctgtaattaaaaatacaaatgctgtcataagatcaaatgttatcaaaaatcagtatttaaaattaaatttacccccaaatttctttcaaaaaagttgtaatgttctttttcagtgaagcctttgcactgctagagctgaagaatgtgatcaatcggcttgttgaataatcccgcacagtaggtattccgctgaagccaactctagctgggggctcgagagcgaaagacacagatggggccctgccgcccctcgaagagtcggatgggcgcgcccgtccccggtgcatcaagaggctggcccggccaggggcgaggggctcgcaccgaaccccgcgcacctcgccgcgggcggggctgggccgtagtcggctcgatttaaggctggtatccaaggctgcggccggtcaagcgaggcgaggcgaggcgaggcgacgtgagcgagggtgcttagggagaacagccgctggcagctcaatgctgggtggctaacgctcgacggtgcctggcagcaacccggccgacactccgacgcggatcccgagctgcgtcgcggacaatgctgtgggcccgtcccggactacgactcccgacgggctctgcgaccgct

SEQ ID NO: 126013 - DNA, 1705 bp, Homo Sapiens
  misc_feature (362)..(384): n is a, c, g, or t
ggacagcaaaccttgctcacataaagtagaaaacagatacaataaaacatggcttgaaaaatgaccagagtatgcacctgtagtactgtacactaaataaaatacacaaggcagcaatacttaggggccagaaacactgcttactacaagtcagttacggaatcataatttacagtaaaaatgggcacgtcccaaggctcaatttttctttttcttttgtcatttacagtagaataaatattttgttgctattgctacactttaatttacattctaacctattaaatgcagaaagctagtgtaaagcatatagattaagtgtaggtcccatacgtatgacagtttgttcaagactagtaggnnnnnnnnnnnnnnnnnnnnnnnaacttattaaatggctagtgggaaagatttgtgcttgtgatcagctcttaacttcaatttttacatcaaaacgtccctgaaaacggtctttctcactgtacccaatgttctcaccgtacgccttacactctatgcgaatttcagtgtccatggtaagattggtgaactgtacggccagcaggggctgcaggtatttgggctgcaggagtttgccatagtacggataatactgcagaggaaaaccaggggagttgcccagtccaaaatactccacatttccaactttatccttatcttcatctcgcttgccagtgcactgaacgggaaggacatttgggttatacttcatcactgggtaagtctccaaggactcattcttgggaggcttaggtttgaagcctagaactcggttgagctttataataatgcacggtttgccctctttgtagccataagtttcatcatttaatccagagcaatttcccagccattcaagcttgaatctgcagacctttcgctctcctcgttcatgattaaagtctcctcgttctttcggttcactgggcacatcgccacaatcttcaaaaatcatgtcatccctctgggctgaatctttgtacttttccaggaacctaactatgttcagtacatatgcctcatagctcttgggatcattaggacgaaaggaaatttcagtcttctggatctgaggaatctgtgttaatcctggcggggccactcggtcctgatatgtgggcttaaattcactgatggtgagcagcatcacttggatggttccgatgaagatgccagccaggcagccataaaatattacgtagaatagaaggatcttaaaccaactgccaccggtcctgcccagaaactccttcttctctgagttccagatgaatttcttccagctgccctcctccttggctttcccgcgggccatggcgatggcgggtcagcagctgccgcggtccggagggtgggtggctgcggcgcgcgccactggcgtcctctgcgccgctcggcttctccggcctggctctctgcaggcaggacgcgccgctggggcggagggagggacggcgcaggctgcgcggctccgagccccgcacctattggtgggcgcgcagccgctcgcgggctttctttggtccgccgagcgctcctctagcccttggggggtcgggggctccgcgaacccgtagctgccgctcccgctgccactggggacgtgtgctgggcccccgcctccccctcgtgccgaattcgccacccaggcctcgctaccttaggaccgctatagttactggca

SEQ ID NO: 126014 - DNA, 966 bp, Homo Sapiens
tagttctcatttttttctaagaaaaaagcaacaagaaaataattcagagtttatacaaaacatctttacattattttttttccaaaaagactagtatttacacaaatggcaacagaaacaaaaacaaaaacccttccgactgccacctggaaggggctggctgttctgctccctctcccacctggcactggggtgggcagctggccaggaggcagtgtggaggtggatggtgtgagggccagctccttccatggctgctctgggagtgcctgcaaggcgcactcaagtggcagtctgttagcagccgtgctggcaaggaactggggtcaaagtgcacagcgggctggcccagccccaggcagcctcttcctctttccaggccccagcccaagactgggacagcagcaggagctgggttgggtgggggttacccacctgtgctagggcccagaaaaggagcaggccacctggtcttatacccgcttaggtctccaccctgggcctctgtttccccaccaggccaaaggatgccaaaggtaaggagagaacacgctgggggggtgggtgtgaaactcccagctctgcatggcaaacaggcacttggtcatcttatctccctcgactccccacgacggcatccgcctgtaggaggtctcctgttcccgaggcatatgcaacttacacattaattacgctctactttcggatgcatagatgcccatgaatccacccgcagggattttgcctgtgagcttgccgtctgttgcctcctcttacgtgccaaactttactattgtcggccccgcccttccaggtcacttggtagggccgaccctgccattgtattacgctccccatgccatgtgggcctttctttctcccccacttttggagtgtggtgcttatgccttctgttttctcgcctcaccccctctgcctcttgatgttctgctccttcttcgcccg

SEQ ID NO: 126015 - DNA, 716 bp, Homo Sapiens
gtcgctctgtgtttttgttttgccagagtgaaaaactttattaacaacaggtttcaacgagaaagcaaatgaatacccctagaaacatggacagcatctcccccagcagcaggcaggggaagggaggcaggaggggtaagcctagggtgttccctaggaaagggccaggttccctctatccagctgggggcaccgagacggcctcattcagggaagtccaggatggcagctgaaggcagcaggtttagcagccaaagcccaggcctagtggatagacagggtccaaaatgtgacccttctaggctggtatcaccatgggggcgtcatgggctgaggattctgcagataggacatcaccacggcagagatggacagcatgaagctactcatcatttgcttcgtgtcctccgagctccgagagttggcaaagctgatgaaggagcagtagacagcgacccaagcacaccacttcagcttaagcatgaggccgcacatgctgaagatcatgcccagcaggttcatgtagtccggcgtcgggtcgtccaaggccgggttacattcgctcggcgggggcttgtacctcagcactttgttcggcctccgtgggtccgacatattgttagtggacatagcgagtcgaaggccagatcacgcctcttccgctgcaggaatcgcagcttccggcgtgcaagctgagggcggattttagagtaaca

SEQ ID NO: 126016 - DNA, 1049 bp, Homo Sapiens
  misc_feature (463)..(505): n is a, c, g, or t
  misc_feature (620)..(620): n is a, c, g, or t
  misc_feature (761)..(761): n is a, c, g, or t
  misc_feature (785)..(785): n is a, c, g, or t
  misc_feature (796)..(796): n is a, c, g, or t
  misc_feature (821)..(821): n is a, c, g, or t
  misc_feature (831)..(831): n is a, c, g, or t
  misc_feature (875)..(875): n is a, c, g, or t
  misc_feature (893)..(893): n is a, c, g, or t
  misc_feature (928)..(928): n is a, c, g, or t
  misc_feature (930)..(930): n is a, c, g, or t
  misc_feature (958)..(958): n is a, c, g, or t
  misc_feature (964)..(964): n is a, c, g, or t
  misc_feature (966)..(966): n is a, c, g, or t
  misc_feature (971)..(971): n is a, c, g, or t
  misc_feature (975)..(975): n is a, c, g, or t
  misc_feature (990)..(990): n is a, c, g, or t
ttttcgcactgaagacaggtttattgacactcctgcttcggatcgagctacatggggtaaggagggacagttgtggagagcaggagggccccggggttctggggagcagcagagagggagacccagggttgctggtgccactgtgagcacaggcctgcaccacacgccttcccaggaaggcctcccctcacccagccaggccctcctgctcccttcccacatgcagggtgggacgggcctgtgcatggcccccagatgaggacccaagctcctgcaggggcggtggccttcagtcaagacagctgggaggcagcagatccgtgattaggctgggacgctggctcccaggctcgggtggtggtgcagcggcctctccagccccagcccccaggaccattcagactggtggtgtcatggatgaggagcacctctgcctggcccagacatgcttggagcttaggannnnnnnnnnnnnnnnnnnnnnnnnnnnnnnnnnnnnnnnnnnagcctcatacgagtctggctggcacaaggctgagcaggagcccggggctcacagtggccgaggcagggctaggaccaggcccaggtgggcgggcagcactcagctgctgtggtanatgcggaggcgctgggcgatgtcctggcggcacagcgggcaggtgcgcagtggctggcagcactgctggcagcagcagacgtggccacagttgaggaagatcatctgggcctcccgttccaggcacacgacacactctganggctgcacctccagctctgcaggnggagcggatgngctcacagactcaggaggctcctgngggggcgtangggtgacgactcaccattggtggttcagctctggctggatctgnctgcatcagcagttctgnactctccgaggattcgtgctgcaggcagctctganancccactttggcaggtccctggctcattngctcanangtcantganagcggtggtggcaanatggcagtatgtcaacgaactctccagaggcacactgggtcctctgcgattctggccag

SEQ ID NO: 126017 - DNA, 549 bp, Homo Sapiens
aaatgttaaaagttttaaatcaacaatgagtctgactttttctggtttgggaagcaagactctaaaatgttgggagagattctttctgatctgatggctactgaagaacacatttctcctctttcttggccatcttgcctttgttttgctccagagttcgctccaaatgctcatcttcttcttcggcctgcttctcctgcgcgtccaggtccctgacgagcgcatcgctgttgttcaccagggccaccagctcatctagcagaagctgttcgcgtcgcttctgggcctcggtcttctgccagtcttcaatggctagcattgccctcaattcccggttcagcagctcataccgtcgttctaaatcatgttctttttccagaagagagagctgattcattctccttattaaggcatttttcttattaactaacataaaccattcctgcatcatagcttcttcttcttctgtgttccttcctgtgtccatgagatagcgaaggcgcttctccaccagcgcggcacgggtgtcaatttgcttttgctcattct

SEQ ID NO: 126018 - DNA, 543 bp, Homo Sapiens
ttttgaggttgcctgctcctttaccttcctaggtttacatggtaccggagccagcagcctggtgagcccgcaggagcctgcagacctgaatcagggtttctggggattgggcaggagatgacaggcagcttccagctgatcccagggctgcagcgggcatgtgcagtggcccataaatacctttacataaatacgggctgggcgacttccagtcccagggcctagcaccaaaaagcctgcctggaggacagtggccctgtgcctgcacctgcgcctgcacccacactggcgcccacacctgtcctcagtccaactcagagccgcggggagagcgggacttcctcagcccaggcccagagcgtgcccctgggttctgcagagccaggccaggaggcgcctctcttccagcggccatgcgaggcttccctcctcaaggccacaccagcctccaagagcgacaggttgctgggctgtccacagccctccacggccctcaaaggaagggcagtaccaggagctctgggcccgtgaagtgtccttctc

SEQ ID NO: 126019 - DNA, 576 bp, Homo Sapiens
tttttttatcaatcatatcataccaaagtttattgattacatcaaacaaaaatttctgtaatggaaaaggcaagttgcagtcataaaagatggcattcacattcattttagaaagcaacaacgtagatgtaaaaaactgcttaagtgaaaaatgtaatattgcagtcccattttgcaagctgaaaaatgattttgtcaacacgcataaaatctgcacatttatatactgcatgttattaaaaaattccatcactaaattattacgaattttgcaaagttaggcttacatttatactgttgctggtgtatgtgtaagtagatatggaatgaatgttttcagtttagtaggtaacatcctcaaacaatggacagcggttgtgaaaattacaaagacattttgatagctcaaaattattcaaattataggtagatgatcttattatatttttttccctttctctgtcacaaatagggtgattacattgagtgctaggaatactgcacggtctatttcaagttattcgatctgctaaccccacactggccagtttttagctcttcagtaaaatatctttt

SEQ ID NO: 126020 - DNA, 747 bp, Homo Sapiens
agaggagggtctgggctagtttattttctctctggaggggtcttcagggagagcagtcccggctgctcaagcgggtgggaaggagcggccgctcttgctgaaaggtggctgggagaggtcctggtcagagtcggagtcagagtcccaggaggggagtggagggctcaggcactggtgccccttgtggcctcttaggctcgaggccttgggacaggcccccgagcacaaagtgaggctgtctatggagttctgcagcacgtgcacagcagaccatatatcactcagttccttctggaggtcatccttccagcagccactggctccctgcggtatctcttcagtctccggacaggcggctgtctcatgaccctgctgcttcatcttggtcaggattttgcggcatttcacctgcgttttctgcattttctgaatgttcaccaagttctctgagatctcatcctcctgcgcttggagcttctgatagatgaaggtcacctcctcccgcaccagttccagctcctcccacaggaacttcttgctgtcccggatctcctgggccagcagctgcaggcagcgagtggtgcgggcccgctgcatctcctcactgtcacgcagggtcttctccagcccctgaaggccttgggtcagggccccatacagctcctgccggccctgctccatggcccacttgtgctcctccttctctctcctggcggctgtggggctcagcactcttcaagctgctga

SEQ ID NO: 126021 - DNA, 1367 bp, Homo Sapiens
  misc_feature (1313)..(1313): n is a, c, g, or t
agaggagggtctgggctagtttattttctctctggaggggtcttcagggagagcagtcccggctgctcaagcgggtgggaaggagcggccgctcttgctgaaaggtggctgggagaggtcctggtcagagtcggagtcagagtcccaggaggggagtggagggctcaggcactggtgccccttgtggcctcttaggctcgaggccttgggacaggcccccgagcacaaagtgaggctgtctatggagttctgcagcacgtgcacagcagacctgcaagaagacaaggagctgggggcgctgggagactccacactgctcagggtgtagacagcagtacagctaaggttgggggccgtggtggggtgagtcctagggggtgagggaagtctggactcaggtgggctccaggttctggtggtcactgccagatcccgttgggggaacgggttcagaggagggtcaggggtcagactgcaggctgggcatcaccatatatcactcagttccttctggaggtcatccttccagcagccactggctccctgcggtatctcttcagtctccggacaggcggctgtctcatgaccctgctgcttcatcttggtcaggattttgcggcatttcacctgcgttttctgcattttctgaatgttcaccaagttctctgagatctcatcctcctgcgcttggagcttctgatagatgaaggtcacctcctcccgcaccagttccagctcctcccacaggaacttcttgctgtcccggatctcctgggccagcagctgcaggcagcgagtggtgcgggcccgctgcatctcctcactgtcacgcagggtcttctccagcccctgaaggccttgggtcagggccccatacagctcctgccggccctgctccatgccccacttgtgctcctccttctctccctggcggcctgtggggctcagcacctcttcaagctgctgaatcttgatttgctgcaagcagctctccttctccaacatggtcactgagtggttcaggaactcgaaagccttggtctgggcctgtaactggctcttgagtgactcaagttcacatcgcaggagcttctgggagtcgggaatcatcacaatggtcttggctttgactttggaagagctggtctccaagggcttcacctgttcatgctctcccatcagggaccacgaagccagtcctcagctgtgacgctgaagtttgatcccgcggggacaccatcgtcctcgtgccgaattcgccacccaggcctcgctaccttaggaccgttatagttactgccgatgcaggtttnttaagaaaaaaccccttgcgggggtctgttgtacaaaagcttgtgtcaattttc

SEQ ID NO: 126022 - DNA, 1894 bp, Homo Sapiens
  misc_feature (255)..(315): n is a, c, g, or t
atttaaataaggagaattctttcatatggaaagagctagtacaatcacatatttgaaaggagaaacaataggtactgaaccggagggaaagggcgagggtgagtgtgccagcaccggcctggtgaatccacgattcgatttcccatccaaggtaagtttcccaaaataccgtataaacaagctgcacattacacctctagccatcgtctgccctttcaaatatctggtctacatggaaagacaaagaggaaaggnnnnnnnnnnnnnnnnnnnnnnnnnnnnnnnnnnnnnnnnnnnnnnnnnnnnnnnnnnnnnccccaaatccttttttactacacaaggcatgaggtcaaaagcttgagtacagtgtcccctttagatcacgggagaaaggcgtccacacagagccttagcaggaatttccactctgaggcttcagaacatgctgaagatggggctctgagggtgccactaccatcctggaggccaccaagtggggtggaaacagtgaagagcaggtctcacatgcccgaagaccaccagccaactacacattggtggccctggtggagcatggctgggcgacagcgtccatccccaacactgagccactcctgtcctggatgacttcctgcttaggtccgtcacatttcagaagagagctggctttctggaagcctacgtttcccattcatcacagaacacgacagagtgcacacatcctggtatccttggtcttcaaaggccatttccagcagaccctctaacccaggcttgttctgcaggaagtgaaaagggacaaatgaagatttgaggggcagcctgcagctacttggcacaggggaaccaaatggcaagggagaaggctccaccagagctgccatgctgccgtagcaggccagaccacagcatggctgtgcacctgtgtgtgctcagcttccagaagctgtcactgaccatcccgaaggcagatccagaagataggagggtgacagcacgggctggagagcactgatgtcaacgtttaacaaggttccccagtgtccctagaagtggctggaaggaccacagctttggaactgaactgattttcttgaatgtggaaataaagtcatcttttggttttcccccttaaggaacctagagccagagtgtctatgaattccaagtttgaaaacaatatgaatgtttaaaattttacaaaaaacgctgtggggagaagccaacagttaagaaaaccaaaccaaatgcagctggcattgaagtccccagtgggtagatgggcatctgagatgtatacccacactctggacttcatcccactctagtggatggtggacaataccgcaaggccactggtggctgagcaacgagccgcatccccagtgaccaaggcagagctgccagcgtcaggagggcaactttaacaggcaaaagtgagtgggttctgaccccccaatccctacctcagcagcaggaaagggaagtgctggtctccacctgttcccactaaggccccgtggtatcctggcagaagcctctgcatgtatctgcgctctgaggatgggggtttgaaaacaaaataagaccctacgtcctactaccttgagcttggctctaaaaccacgggaaaggaagagatatattgcaccttaaaacatctctgcactaagaactgcatttcattagaccaaggaggggttggggcgctgggaggcctgaggcctgccctcagccccccaagtctcatttaaaacctgcatctcagcgaagagactgcagctcaggtcacacagaggtggtgactgcaccgaacttcacatgcaatttcctggcctttcctcacagaattaattcagacattatatataaatagagcagtgaaacatttact

SEQ ID NO: 126023 - DNA, 520 bp, Homo Sapiens
  misc_feature (275)..(318): n is a, c, g, or t
ttttttatctttttaaactttttttatttaaataaggagaattctttcatatggaaagagctagtacaatcacatatttgaaaggagaaacaataggtactgaaccggagggaaagggcgagggtgagtgtgccagcaccggcctggtgaatccacgattcgatttcccatccaaggtaagtttcccaaaataccgtataaacaagctgcacattacacctctagccatcgtctgccctttcaaatatctggtctacatggaaagacaaagaggnnnnnnnnnnnnnnnnnnnnnnnnnnnnnnnnnnnnnnnnnnnncctctcaggaaccaaacaaaacccccaaatccttttttactacacaaggcatgaggtcaaaagcttgagtacagtgtcccctttagatcacgggagaaaggcgtccacacagagccttagcaggaatttccactctgaggcttcagaacatgctgaagatggggctctgagggtgccactaccatcctggaggccaccaagt

SEQ ID NO: 126024 - DNA, 682 bp, Homo Sapiens
  misc_feature (259)..(311): n is a, c, g, or t
  misc_feature (368)..(452): n is a, c, g, or t
tctttttaaactttttttatttaaataaggagaattctttcatatggaaagagctagtacaatcacatatttgaaaggagaaacaataggtactgaaccggaggtaaagggcgagggtgagtgtgccagcaccggcctggtgaatccacgattcgatttcccatccaaggtaagtttcccaaaataccgtataaacaagctgcacattacacctctagccatcgtctgccctttcaaatatctggtctacatggaaagnnnnnnnnnnnnnnnnnnnnnnnnnnnnnnnnnnnnnnnnnnnnnnnnnnnnncctctcaggaaccaaacaaaacccccaaatccttttttagtacacaaggcatggggnnnnnnnnnnnnnnnnnnnnnnnnnnnnnnnnnnnnnnnnnnnnnnnnnnnnnnnnnnnnnnnnnnnnnnnnnnnnnnnnnnnnnagaccagatatttgaaagggcagacgatggctagaggtgtaatgtgcagcttgtttatacggtattttgggaaacttaccttggatgggaaatcgaatcgtggattcaccaggccggtgctggcacactcaccctcgccctttccctccggttcagtacctattgtttctcctttcaaatatgtgattgtactagctctttccatatgaaagaattctccttatttaaat

SEQ ID NO: 126025 - DNA, 520 bp, Homo Sapiens
  misc_feature (235)..(322): n is a, c, g, or t
atttaaataaggagaattctttcatatggaaagagctagtacaatcacatatttgaaaggagaaacaataggtactgaaccggagggaaagggcgagggtgagtgtgccagcaccggcctggtgaatccacgattcgatttcccatccaaggtaagtttcccaaaataccgtataaacaagctgcacattacacctctagccatcgtctgccctttcaaatatctggtctacatnnnnnnnnnnnnnnnnnnnnnnnnnnnnnnnnnnnnnnnnnnnnnnnnnnnnnnnnnnnnnnnnnnnnnnnnnnnnnnnnnnnnnnnntccttttttactacacaaggcatgaggtcaaaagcttgagtacagtgtcccctttagatcacgggagaaaggcgtccacacagagccttagcaggaatttccactctgaggcttcagaacatgctgaagatggggctctgagggtgccactaccatcctggaggccaccaagtggggtggaaacagtgaagagcaggt

SEQ ID NO: 126026 - DNA, 387 bp, Homo Sapiens
  misc_feature (235)..(322): n is a, c, g, or t
atttaaataaggagaattctttcatttggaaagagctagtccaatcccatttttgaaaggagaaacaataggtcctgaaccggagggaaagggcgagggtgagtgtgccagccccggcctggtgaatccacgattcgatttcccatccaaggtaagtttcccaaaataccgtataaacaagctgcacattacacctctagccatcgtctgccctttcaaatatctggtctacatnnnnnnnnnnnnnnnnnnnnnnnnnnnnnnnnnnnnnnnnnnnnnnnnnnnnnnnnnnnnnnnnnnnnnnnnnnnnnnnnnnnnnnnntccttttttactacacaaggcatgaggtcaaaagcttgagtacagtgtcccctttagatcacggg

SEQ ID NO: 126027 - DNA, 1592 bp, Homo Sapiens
  misc_feature (941)..(978): n is a, c, g, or t
  misc_feature (1061)..(1098): n is a, c, g, or t
tttaaaagtcttaaagatttattaatccttaatttatactaatgaatttgaataattattacaattcacttcaagcaaattcaaatcctagaataacaaatttgaattgaaaaaagtaaattatacccattcaatgtactgtcattcttttaatgatgtttcagaacaaagaaaatgtcacagagttatatgcggtttttatctggtatggggaacaagaaacagttaccaacagaaaatatttccacagccccaaaatagcttacttacaaatatttgcaaaattcattctcatagtactcatgtagttttgtacttgaattgacagtctagagatgaaaaattaaaattgagcttttttattagaaagacaacagtacataatttaccccttgctaaaggtattcaataaaaaagtggagatatttttattcccaggtaattgtcacatacagtctttcttctctacttctgcttcattctctttgtgtcactttagtatgtgtacctcctgggtgctctctgtacattttttctcctctatacaagtctgtgccatggcttctgctgtcatttcttctgctttgctcttcaccaggatttcgctgtgcccgtttccttgtctccctttgcttgtaactaccaggacttctgctccggcttctccggctcctttcctccctgccgtggcttctgctgctcccctcctttctttcagagcctctcttctctgggctatgtttatgggttctggactttttgtcagaatcagaatggctccatttgctgtcctccctagaactctcgtgttttaagaaacctgggcttttccttggctttttcccggttatggtgactgctagaaagttcttcatgaagctttctcttcttagacttgtccttctcttcagaatcactgttgttatgccctgaacacttgnnnnnnnnnnnnnnnnnnnnnnnnnnnnnnnnnnnnnnattgttactctcatcttcctcctcctcctcctcttcctctactgagacttcagaaagcagtagtgagagtgagagtaacaatnnnnnnnnnnnnnnnnnnnnnnnnnnnnnnnnnnnnnncaagtgttcagggcataacaacagtgattctgaagagaaggacaagtctaagaagagaaagcttcatgaagaactttctagcagtcaccataaccgggaaaaagccaaggaaaagcccaggttcttaaaacacgagagttctagggaggacagcaaatggagccattctgattctgacaaaaagtccagaacccataaacatagcccagagaagagaggctctgaaagaaaggaggggagcagcagaagccacggcagggaggaaaggagccggagaagccggagcagaagtcctggtagttacaagcaaagggagacaaggaaacgggcacagcgaaatcctggtgaagagcaaagcagaagaaatgacagcagaagccatggcacagacttgtatagaggagaaaaaatgtacagagagcacccaggaggtacacatactaaagtgacacaaagagacttcagaaagcagtagtgagagtgagagtaacaat

SEQ ID NO: 126028 - DNA, 918 bp, Homo Sapiens
gctgaagaccagctggctactttgggtatgtcaatcctatcctttcaatcttcacctaatggaagtgaagttaagatcataaagaaattctatttaggcagaattaaggactcaggagaacatccacgtagaaatcatccacgtagaaccaagagcttgccaacactgaaaaacctgacacaaagcctgttaagcagcaaatggcagacatttctttctctacattaaaactgattttcaacatgaaaagcagatttaaaagggaacatttagggtaaccacacttaatgcattcttgatccagtgactatctcaaaacaggaaaagatttttaagtaagttgaccatttggaaaccacttggtatgtcaaggtcatctcgtagaaaagcccaagttcttatgatctctgaagagctctcaaaagcagtcacagtcccaggaggctggtcctctaagaatcattttgggactcttcggagttcattcatcagccaaagagcaccagtgagcaaagccaaggagcctgactggtgagtggcggccagaggagttgggacatacatcagcagcgtgctgatgcccaagcccacctgtgtatacgccaaagccagcagagtcactgctgccatcttggtccttctaggaaggggaattctccgagagaggaagtagagcactgtaatggcagtgactgaagtgattcccagaatccggtgattcaactgcaccatggtgggattctcaaaaacattcctcaggatgggggagaaggtaaagaggtcctccgggatccaggattctcccattttgggaaaggagttaataaccagcccagcatctagccctgccaccaaaagccctgagaaggccgtaaggaacaccagacctgctggtccatgagccaatcgtctcactgt

SEQ ID NO: 126029 - DNA, 1497 bp, Homo Sapiens
aggtagcgaggcctgggtggcgaattcggcacgaggcgcactcgcgtccctgcgccgtgcctgcctcgcgctccctgttacggcgttcgtccccgggcctggcgcccgcgtccggcccggctccgcggcggcctggtccgatggctcctcagcggagggccgcaaccaaggcgcccgagggcaacggagcggccgagcgccggaaccggagcagcaccaagaaggaccgagccccgcgggaggtgcagaggctgtggcagaggccgtggctaaggaccgcgggcctgggggctggctttgtgctcaccgcactcctgctctggagcagcttgggggccgacgacggggtcgcagaggtcctggcccgccgtggcgaggtcgtggcagggagattcatcgaggtgccctgctctgaggactacgacagtcaccgcaggttcgaaggctgcactccccgaaagtgcggcagaggtgtcaccgatgtcgtcatcaccagggaggaagcggagcggattcgcagcgtagctgaaaaggggctctccctgggaggatctgacggaggggcatccattctggacttgcactcaggggccctgtctgtcgggaagcactttgtgaacctgtacagatacttcggggataaaatacagaacatcttctcagaggaggacttccggttataccgggaggtgcggcagaaggtccagctcaccattgctgaggcttttggcatcagcgcatcctcgctgcatctgaccaagcccaccttcttctcccgcataaacagcacggaagcgcggacggcgcacgacgagtactggcatgcgcacgtggacaaggtgacctacggctccttcgactacacctcgctgctgtacctctccaactacctggaggacttcggcggagggcggttcatgttcatggaggagggtgccaacaagacggtggagccgagagctggatgtttttgtttccggatgatgtcttgtgggttccaagaagttaatggaccgagagccagtgaagctgctggtgcgaaggctggagtcaggtgtcctccggggactcaccacccgtccgagaggggagagacacatgcgattctggaagctgagagcattgcttattgttgattccttggttgccgtgctgagtcctgctttaaggaagcaggtcgcgtctccttcttcacctcggggtccgagaacctacaccgcgtggagaaggtccactggggcacccgttacgccatcaccatcgccttcagctgcaaccccgaccatggcatcgaggacccagcgttcccgtagccagcagccgggccaaggtaacttcaggagggcccgtgtggaggcagccgcgccagtcgtgcacccacccccacgtccacccgctcctgttgcacagagtgccttaggaattctctgattttgatttgctgacgtgttaatcttttcatctgtgagtaaatgaagggaaccagcttttcacttc

SEQ ID NO: 126030 - DNA, 1040 bp, Homo Sapiens
  misc_feature (345)..(345): n is a, c, g, or t
tcccagcctgaccatcagtttaatgccagggcaaagggggaggaggagacctaccctcgacccagcagaaggcccatgggagccggcacagcgacgccaagagcctccttggtgaggacactcggaccctggccctcgggatgctggccgctgacagggccaagcctggtgtggtggggccgtggcccgcgttgatttgtgggccagcagcattgggggtgcacgcagggctcgtgggaacggcagatgttcacctccacctgaatccagccgagctcccacccaccccaaaggaccccgttgctgcctccagagccgccactcacggacccttctccaaagctngctgcggtttgctgatgccgagaccccgaacagaagctgctgggccccacgtttgtccccatttatggctgatgctttagccagtctttgatgggccggggggttgctgaacctggacgagtcccggggggttgctgaacctgggtggatgattcccgtccattcacagatggggacttgtgccccgtcctgctgggtccctttcctggcctccacctcaggctcccaggcctacagcccaagcacacatgatgctggaaaagtgaaaagctggttcccttcatttactcacagatgaaaagattaacacgtcagcaaatcaaaatcagagaattcctaaggcactctgtgcaacaagagcgggtggacgtgggggtgggtgcacgactggcgcggctgcctccacacgggccctcctgaagttaccttggcccggctgctggctacgggaacgctgggtcctcgatgccatggtcggggttgcagctgaaggcgatggtaatggcgtaacgggtgccccagtggaccttctccacgcggtgtaggttctcggaccccgaggtgaagaaggagacgcgaccaggcaggctggagaaattgcccctctgggaactgcttctgcaggaaggaggagctggagaaacaaacgcagcaatgctcaagggccctgtggcggaggaggggccccccggggc

SEQ ID NO: 126031 - DNA, 857 bp, Homo Sapiens
gctgggtcccttcatttactcacagatgaaaagattaacacgtcagcaaatcaaaatcagagaattcctaaggcactctgtgccaacaggagcgggtggacgtgggggtgggtgcacgactggcgcggctgcctccacacgggccctcctgaagttaccttggcccggctgctggctacgggaacgctgggtcctcgatgccatggtcggggttgcagctgaaggcgatggtgatggcgtaacgggtgccccagtggaccttctccacgcggtgtaggttctcggaccccgaggtgaagaaggagacgcgaccagctctcggctccaccgtcttgttggcaccctcctccatgaacatgaaccgccctccgccgaagtcctccaggtagttggagaggtacagcagcgaggtgtagtcgaaggagccgtaggtcaccttgtccacgtgcgcatgccagtactcgtcgtgcgccgtccgcgcttccgtgctgtttatgcgggagaagaaggtgggcttggtcagatgcagcgaggatgcgctgatgccaaaagcctcagcaatggtgagctggaccttctgccgcacctcccggtataaccggaagtcctcctctgagaagatgttctgtattttatccccgaagtatctgtacaggttcacaaagtgcttcccgacagacagggcccctgagtgcaagtccagaatggatgcccctccgtcagatcctcccagggagagccccttttcagctacgctgcgaatccgctccgcttcctccctggtgatgacgacatcgggtgacacctctgccgcactttcggggagtgcagccttcgaacctgcggtgactgaatcc

SEQ ID NO: 126032 - DNA, 993 bp, Homo Sapiens
  misc_feature (749)..(749): n is a, c, g, or t
  misc_feature (838)..(839): n is a, c, g, or t
  misc_feature (895)..(895): n is a, c, g, or t
  misc_feature (925)..(925): n is a, c, g, or t
tacaaaccgtagtaaacattttatttacaaatttaaggcgtcctaagtgcctttgagccacgacctctggggcgagtcagagaaacagtttagtcaaacacctcacagtcgaaccagcctgcttccggagagaagtgttcggctggctagcaggacactgagactcccctctgctttgggcagtgtccgctgcagccagtcggagcagcgtggggcgaagcgtgaatgtcgggaggtaggctccacgctgcgtctcctgccctaccaagtcgccaacatacagtaagcacaaaacccagcccatggttgggaggctgcacgcaaggcccggatcccctccgccctagtacagtctataagcagccaagcgcgccttgggctggctcggggcttttgggagcgctgctggctgtgggctgtgttgcagggagaagctccgaggcgccgccgccgccaaggctgctggcgcaacccgcactggtgctgctgctactaagactgctggcgctgctgaagctgaaactattgccgccgccgccgctgctcccaccactcccagcactgctggcggtaatgagggcgccagtgaccggggccttaataactgttgtttggtgcagagaacgctcactcccctcagtccgctccgtgtcgctgggggccatgtccagggactcggagtcgctgctctcgctctcagcctcgccttcagaacggctggggctcctctcgtcctggctcgccatccngcagccggggctccacctgatggcttctcgccagcctccttgtccttgtccttttgggctgggctcctttggagtgcgcactcatccgnncggtctggacacacttcactgtgcgtcgtgaggccacatcgcgcagtgcttcggtnggctggcactactctgatccaaacttctcnagcttctctgcagtggaaaacaccggacagacctctttgtcttcgcgattgtctctgacagatagacg

SEQ ID NO: 126033 - DNA, 1407 bp, Homo Sapiens
gcacctattggacttcttcaaatcctcaacttgagacaggtttattagttaattagtgatttcacagtatcctttcgcaggccgatccccactccaaccgttccctcagcaaccccaggggtgtcagacggggcaccctcccactgtcttctccagccagccttaaaaaccccagagacgccagcctgggaacgatctcagtatggaatctgaagtcgccttgtcagcacagacacctctggggtccccagaagacctgtggcaaagttctctaaaccgaacctggagaggggaaggttttcaagcaggaaccacataaattcacctaaaactcacgcctacacccctctgtgataaaagatttctgtttcttctgttggagactgaattttctcttcaagactacagtactgtatctgtccaatctgtggaaatatactaaaagaaaatggcaccatcagtcccattgccaggacagtacaagacagtttcaaaatccacaatgaccctgggtttttcctgaaatactgggtccttttaaaaaagtaggtgaagacttcaggaatcagagctgaggtcccaaacagcactattctggatgctagcgtttctctaacagcctttgtcccagcaattctggaatgacccaggacattgccttccttgtccatgaccgcaatccccttaatggattcaagacttcgggacatgtagacattcattccactggcttgcaccgaggaagatcacaggtaagagtcttttaatccaagggccagtcaggccatacttcatctggacaaactgagggattactcctaagaaagttgaagaagcaacggctcccgccattagtaatgatctttctagtggcttacaagtgtaacttctgtttccattgatgctgttgaacgctgccatgtaggcacagaggaaaacctgaggtaaaatcacggacttgatccctttcagtggcgtcattgacaaaaataccgtgggcgccatgaaaggcaggaacgctgcaggtcgaaaaagcttggggatcaggttgctgctgtcgggatgcactgttgcaagactccgcttccaagcttcctgtatcctttggtccgccgaggcagggctggaaacatcttcatttgtgcacaatagttgcctcgagttttctatactttcaactgaaatgaacacatttgtaggatctaataattctgtccattgaagaaatcgtcgaataaaggattggcgctcggtgatccagaagcgcacgttgggctcaatgaaggcggggacggcgtctctgcgtcctaggagccgcccaggttgcgtttcctcctcctgttccagggacattttgcgctggttagagtggccgccgccgccaggccgcgcgtggagcctcgtgcc

SEQ ID NO: 126034 - DNA, 176 bp, Homo Sapiens
gtgttctttcttcaaatcctcaacttgagacaggtttattagttaattagtgatttcacagtatcctttcgcaggccgatccccactccaaccgttccctcagcaaccccaggggtgtcagacggggcacccttctgtcgtcttctcgcagccgtatagtagtagtaggcggccgc

SEQ ID NO: 126035 - DNA, 1272 bp, Homo Sapiens
tttctatttaatagtgtctgacatttattaaaaataaggaaaaaacctttgtacaggtagtgtattagagcagggaagggagcagggcttactgtgttgaacaaaaggcacccatcagagagacagctgcaaattcagaagaaaacaggattctaggcaaaactaactggtccacaggagaaaatgagagattcgatttggttgccaggcacacttaagccctggcagctatgtggcaggaacacaagaggtctctggggatggggaggaaatgggtctcgctgaaggtgacaggctccttgggggacggccagctgtctggatcactgtccaggggctgtgtccagctcggatacctccgaggtgagtccacatcactaggagccacagtctgttggtgagatgcggtggatggcgatggcagtggtagcgtaggtctgtgggcagaatgatgtagttggctggcagtctggaggagtggaggtgggttggcagcagcggctgtgggtggtctgtccagtatgtaacaggagcccagcttgcacctgaagtgcaggacagcgtccaaatgtgcatggaggggctgggctggcaaaagagggcggaggcagcgcgctctagagtgcggcccaggagctgcagcaggagcctggagcgctattcctggaacaaaggcaagcactacgcgggaggggacaggagcgcaggggacatcgcggcggctcgagggggagggaggcgcggagggagggcgcctgtggagaccctagcggtggccactggcacagcgaactcttcccagagcacccgcccccaggcccaagggtctcccggcctagaagtcctcgtcctcctcccatccaaagacccgcttcatctcggccaggaagccccggtaatcattgagcagggggctctccttcctgatgtaggggatcacccactgcagggctggccccgtgaggcgggtgatgaggaacgtcaccttcagggcgtcgttggagaacgtgttctcgtccacgaacatgtaggagcacgtctgcacgatgaactccgggagtcggtcggtatctccgtcaaacgtctcgggaaagggaatcgggttcctccagcgacgcgccgcgggccggaggggcccggccaggagggccttcatcagctgcacccgaccgtccatcgtgccgcgcgcgctccgcggagtttcgctgggttgcgtgggggtcagcgctaaggcctcgtgccgattcccacccgcctcgctacctagccgtt

SEQ ID NO: 126036 - DNA, 1274 bp, Homo Sapiens
ataggctaggttcgaggctgcgtgttgaattcggcacgaggtttttttcttttcaataatgtctgacatttattgaaaataaggaaaagactttctccaggtagtgtattagagcagagcagaatgcaggggttactgtgttgaacaaaaggcacacatcagagagacagttgcaaactcagaatactgcgttatgggcaaaactaactggtccacaagagaaaatgagagactcgatttggctgccaggaacacctgggcctaggcaagaacacaagaggtttctgggggtggggaggaaataggtctcgctgaaggtgacagatcccttggggggcggccagctgtctggatcactgtccagggactgtggccagcccagatacctccgaggtgagtccagatcactaggagcagcagtctgtcggtgggatgcgatggatggcgatggctgtggcagcgcaggtctgtgggcagaatgatgtagtcgtctggcagtctggtggggaggagagggcttggcagcggcggcagtgggtggtctgtccagtgtgtaacaggagcccagcttgcagctggagcgcaggacagcgtccaaatgtacatgggaggggctggctggctggaaggagagggcggcggctcgctccagagtgaggcccaggggcggcagcaggagcctggagcgctattcctggaacaaaggcaagcactacgcgggagggaacaggagcgcaggggacatcgcggcggctcgagggggagggaggcgcggagggagggcgccggtggcgaccctggcggcggccagtaacacagcggaccctccccagagcacccgcccccaggcccgagggtctcccggcctagaagtcctcgtcctcctcccatccaaagactcgcttcatctcggccagaaagccccggtaatcattgaggagggggctctccttcttgatgtaggggatcacccactgcagggcgggccctgtgaggcgggtgatgaggaacgtcaccttcagggcgtcgctggagaacgtgttctcgtccacgaacatgtaggagcccgtctgcacgatgaactccgggagtcggtcggtatcgccgtcaaacgtctcgggaaagggaatcgggttcctccagcgacgcgtcgcaggccggatcggcaaggccaggagggcctttatcagctgcacccgaccgtccatcgctgctcctcgcttcgctggacgtcaatgggctccacccggctctgcagaggtcagtacacgagg

SEQ ID NO: 126037 - DNA, 802 bp, Homo Sapiens
cgaagcgaggagcagcgatggacggtcgggtgcagctgataaaggcctcctggccttgccgatccggcctgcgacgcgtcgctggaggaacccgattccctttcccgagacgtttgacggcgataccgaccgactcccggagttcatcgtgcagacgggctcctacatgttcgtggacgagaacacgttctccagcgacgccctgaaggtgacgttcctcatcacccgcctcacagggcccgccctgcagtgggtgatcccctacatcaagaaggagagccccctcctcaatgattaccggggctttctggccgagatgaagcgagtctttggatgggaggaggacgaggacttctaggccgggagaccctcgggcctgggggcgggtgctctggggagggtccgctgtgttactggccgccgccagggtcgccaccggcgccctccctccgcgcctccctccccctcgagccgccgcgatgtcccctgcgctcctgttccctcccgcgtagtgcttgcctttgttccaggaatagcgctccaggctcctgctgccgcccctgggcctcactctggagcgagccgccgccctctccttccagccagccagcccctcccatgtacatttggacgctgtcctgcgctccagctgcaagctgggctcctgttacacactggacagacacccactgccgccgctggcaagcctctcctccccaccagactgtcagacgactacatcattctgccacagactgcgctgcacagcatcgcatcatcgatccacgacagatgtgctcta

SEQ ID NO: 126038 - DNA, 669 bp, Homo Sapiens
acacagacatagatcaatagtttatttatccacattatcttttaatccttaattcatacacataaatactgtggtactgtggatgtaatatcagtgcagattattaattacctggctttttaaagttattatataacattttcagattttattaatctcacttttaatgactaaatgagtgaacaaacaatatcaagtgaatgggaaatcttttttccaaatgatgttaataactcctcactcattttcttatttattcattatgtgctgggcagtctcctcagttgtcctttggttttgggaatgtcctcactcaatacttccctttcacattcagtcctgattcacaagcaggcctgtgcatgttatattgcagggtcaagctgaaaaggcaaggtttcttcaactggcttgagagctatgaggtaggctgtttcttctttcgctttgtcctattgtgggttctctggtgcccaataaggtgtgagctctgggtgaaggcctttccacatttgttgcatgcatatgggcgctccccggtgtgagtcctctgatgtctgatgaggtgggagctctggcggaaggcttttccacagtcctgacacttgtagggcttagcgccagtgtgagtcctcaggtgctgggagatggctgagcgatcattgaagg

SEQ ID NO: 126039 - DNA, 921 bp, Homo Sapiens
  misc_feature (84)..(118): n is a, c, g, or t
agactgattaactcactatagggcgctagctcggtgtagccgaacgaccgagcgcagcgaagtagtgagcgaggaagcggccgnnnnnnnnnnnnnnnnnnnnnnnnnnnnnnnnnnncagtcgacggtaccggacatatgcccgggaattcggccattacggccggggtaataaagtaaatgatttcctccactttgcatggaggggtgtaaggaaagcctattttatctgtgcctgggagaactgtgcctattttcagtcttttagaggaaatttcaactcaaaatttttaagtgtgaaaggtttactggtgtcacataaacattagcagtgagaccaaataatgaaacattgctttataccttagtgctttccagttcactgttacctctagtcatggtagatgacaattttcctccctcatcttttgtagcaaagaagcaaattaagagccttttgcaagttagattaggggactgaaaaatccagggagataacctgattcttctatactatgactggagtaaagctgccaagagttaggttgaatttggagccttttaaaagttggttccataagtgagaaggggggctaacatgtgaccactgtgcccctgagaatccatgagatggaaaagtacagacaagaaggcacttaacgctgttctcagttggaaaatgtcagccctccacacctgtttggatgtgaagtgcattattaattttaatgacaaaatgaaactgctaattagtttaaatgtaatgtttaaatggtattgaatttcctattgcctgattaaatatatctgtaattgtaacatcattgtctctgagagctttaactacttccttattttatgcaatcattttaaagattgtggctatatctaatttaaatttgctgatgattgaattctaat

SEQ ID NO: 126040 - DNA, 859 bp, Homo Sapiens
ggtagattacagaaagaaggtttatttttgtatgtgcagttaggcactgactgaggcatttagacaccattaattataaagtgcattgaatataagttttgatccctttcaaaggaataattcaataaacctcatatttcattcttggaatcagtcaactcaaaaacatgcatagatgaagacttactaagtgctaataacagtcttttattatttatattcctgcaatagtaatagcaacatactgtacttgcatatatcacattttatccaaggacctcaaagtcattctatcaagcagcacggtgttggaaactcaagattccacagcatgttaggtatacttacttatggaataggaaatagattcccaccaatagagcccaaataaaagaccaaagagacaagcctatatatttctcgtggtttataagtttctgaatttccaaatttgccactggtattttaacctacctacaatgttgactctacgtaaaattgatttttacatgtcaggaataagatgaggatcaacgaacaaatgcacagtctgtcttttctatagttcaatagtccatctttgaatagcacataatggaatgtcagaagtggttttttaataatgtatgtttacacttcattgatttataacaatcatggctatggttcttgggtagaggagaatgttttatactggaatgacatacatatgtaggtaaaatatgatagatctatatattttagcacatctacatttaacacaaaagcaaaagtgcccccggccgtaatggccgaattttccacgtggctagtactgttccccgggtacgctgttcgagcgtgagtaacttttcgtata

SEQ ID NO: 126041 - DNA, 688 bp, Homo Sapiens
ttttataactttaaattatatatcatttattgaaatataaagatcttcatttacacgttttaaaacaaaaacatgaacaggggcattcgtaatacattttgtattggtagaccctatcaagttagtttttctcacacattcaccacaccattgttttgggaacatgtaagtatctttctttttattatttctaaaatataaattttggacattcaaaagtgcaacagttaatgtgcctgtggggattatcacagttaaaaaaatataaacgaaggcagtgatacagcttgtcataaatgttttggcagtattctccaagtctatatagaaatacatatatacatattgatgtataacatcattttatcttatgtccctcttcacaaaaataggaccattttgtacagattggcagaccacattttaaggacatcactaatcgtttaaaaagtcacaaatagtgtttctcaggccggctttgattgtcatcataaaaatagaaagtaagaaagattggcaaattttcttctggagactttgcaggaggccaaaaggaaacaaatctggaatttgcttgaaaacacacacacacccacaaatgcagtcatatacaaattcaggtgggagcatttgttaggactggaaactgctggactgagaagtttcatccggcctcatgatgtcatgc

SEQ ID NO: 126042 - DNA, 801 bp, Homo Sapiens
  misc_feature (94)..(146): n is a, c, g, or t
caccaatgaacatttattgagtgtccacatgtgcacagctttgaacttggcgatcacagaacgcactggggggagggaagcaagggatcaagannnnnnnnnnnnnnnnnnnnnnnnnnnnnnnnnnnnnnnnnnnnnnnnnnnnngtccccctgggtttataagaaaggtagtccctgctggagccgccagtcgcgtctctgcagagaggagtcatagcaggggtgggagttaaagccaggcaccacggtggcagtggagtgtaatcactggggaaacatgcggattctggggaagtgtccctcctgttcctggctccagccaggccagatggcaccagggggacaggaatcagatgctcaggtgtccaagcagggataaggacaggcaaaataaataaccccccaacccccatcgtcactctgctgcaacacgacacaaaggtttaaagatctgggcccaaagactctgggtcccttcaagcaagctcaggtggaaggaggtttccccaccccccaccaggcctgtctgccccaggttgccctaggatggaggcagttcagaccctgggtcactgaagctgataggaagaactgcgatatcaatggcctaagcctgctgtctgccccagggagccaagggcaagagccaaagggccaatttaaaggacgtggacctggggggccagaggaggcaccacagccgaggggagcccacgccctggccggcagggcacatgggctgaggcagtctgctcctgccagccctgtcttaccctggagcctccctcctgcagggagc

SEQ ID NO: 126043 - DNA, 1265 bp, Homo Sapiens
  misc_feature (606)..(614): n is a, c, g, or t
caccaacttcacttcaatgctttatttttagatgatattaaaaacctcattaggctccctgagggaaaagagtgttaaccactaacagaggcaggggaaaaataaaggaaacagaaagataagctaaattgttaacaaggaaagctcctcagttggtctgaggatgctgtacaagctaaaagaaacttattaccaagaccaggtaaatgacttgaggttggagcttaatcttttaccctcaggctagtaaggactagtcaggtttgtcaaagtggcatatgtctttattatgatttccagatgggatctggtgggaggcgggtgggtagaagggaaggcagagaaacctttaaagattgtaagctaagtgctctatacctttatacaataccaatgtgcttgagtctcccgttaagaggctgaaaactgggcaggcatacgcaagactgggtgcgagattcaatggaatgtcaaatgaaacttagaatttattaatgtatttacataatttataatctttaagcaatggccccataaatatagactacaactttacatatgctaagcaatagatacttgcttttccccaccaaaatacttgggttnnnnnnnnnttgacagcatttataccaccttcttcacttccactcttcttcctttttaaaccattgctagtcattttagaacatatgaaattcagtttattccgggcagcttctctaccatcaccatcttgatcatgagagcttatttaaaaaggtgccaataacgtgtttggtggcacacacatgacaaggtcagaagcaaacccaggatgagctaggcatctgctgctatcattgttaatttactgtacgtatcctaggctaacatgttcaatgaaaagtgctttagagatggcagagatgaaatcatttccatcagtcctataaataacccattttagcttcagacaataattgtcctccctacacttaaactatcctactatatgttaaatgatacaactccctctaacagtggtaacagaaaccaaggaaattataatctccacaaggtctgtttcttttcccttaagaaccacaaaagtgctaattttccctttacaaatgttacataaaatcttgattacaaaactactcaacaacttaatcctaccatccatacaattatatgttccttttcagcagagtccacagcccaacggatgtagttgcttcgtacactagagattcgtgacattatagaagtttacagactggaat

SEQ ID NO: 126044 - DNA, 516 bp, Homo Sapiens
aacataatttatttttatttactttcaaaactatgcatcacaaaaggaaattgacaaatggaataagaaaggggctaaaaaaatctgactggactatgggaattagctaacaaaataatattgtatcttggttcccatttgcttgattagtaatgttgtgtcatcaacaaaaccatcccccagtgaaaagtgatcttaaaggcactccacttcactatgcctgctgagcaggtagcatcatccaaaacatgttgatgtgcgggttgttgacaggattcttttaagcccactccccaggtacatacagaaggttctcttccaccagcttcaccagggacctcacagcagctggattctgtagaactaaggcctgtctgatacagcatcactccatttcaaagaacccatttctgtgtgtgttagagtagggtgggtgatggtgtactaagtcgacctagatgtcgcatctccttcatgcagtaaaagtttattccttgctcgcggcgtggtttgatg

SEQ ID NO: 126045 - DNA, 2049 bp, Homo Sapiens
gtatttgagtattgttttattaaccaaaacacaaaaccaaaatgaaaactggcttagaatataaaattctcatttttcaaagtgaaagtttgaagatactagctaaagttgataacttaaatagtggtaaaagtaaataacttagaattatggcagcaatcacaagaagaaacagaaaacagggggactagggattcggtggtagacttttactttaaaatagagctatgcagcagattctccatgacttggcttacatgcagtatgtcctatggaagtaaaattttcaaatacctccatcaccttcagtaactcatattaataaagtaaaagccaggtatataaaacaagaacccagtatataaacatatacatcaattggatccccaggtaaaccaaaaggagtttttaaaaatatccccaccataccttttaagacaacttttccgctaccctacagtaggaagtaaccacattcaaattagttaagctataaaaaagtaaaaggggccacaagctttattaaaagtaaatgcaacagtaatatgtacagatggcacatggtgccaattttatttgtaaatatagtactccaactcaagtttacaagttacacctttgccacagccttggctaaatcttgaactagtgcagaattcagctgtggtagagtgctgatcttagcatgcttcgatgtggcatacttgttcttgacagtcatgtgctttgtaagtccttgatttaccatgactacattcttagccaggtgctgcataactggaagaagagattcttcagtatatgacaggtaatgttgtagagttggtgtccattcaccattatccagaattttcagtgctaagcaaaaagctcctgctgcaatttgagaaggaggaaagtgcaccatgtcatagtccaacatagttagttccatcaggtatttggccaaagtatgttgctcgacatcaacctctccaatcttagatgctctccgaaggaagtgcaaaggtagaggccgacccagaccaaagtttaaagctcttagaatcttcatttccatctgtctgatttggtgcttagtataagtgttgtcagtcacaaaagcaaagtcaccaatttctggagggtacatttcttcatatttgcttgcaataaacatggcagtgacaccaaccagctgcagcatcttcttgggcacacaattattctgcatgaaccgatcaataatggagacagtcatgtacatggtctcctgcaacaacctgaatttcatttgaacctgtactagccagtcaattaggatggctctcatgtttccagtgacttcccgaccccagtaggtattttggtctgactgcttgctcttcctcaagttgtctcagataagcataaatatctttcacatattcactacaaaggtttggatcagctccatcttctgcatccacatcatttactgcaagaattacatcagagaaagcctgacacaggtcttcttctgcaggggcacatccagatgtttccattgggcttggagaggcagtatcaaccaaaataggctcaggcgaaagtttttcttctttaacaggctcaggttctggctcaggttctggctctggcactggctcagacactggcactggcaccagcataggtaccttttcaagaggttttggtagttttttatcaatgacttttccagtagctgaaggttttgcttccttcttcataggcattttggcctgcagttgttcactgactttgttaccaatgtccccaagagctgttcttggcctcagtccgggcttggaggttgcagcaggggccgtaggaacgcgctttgcgcctgccatgttgatcttcgccttattttcagcattaattttcgagttcctggtgactcggagcgccatggcttcctcttcaccaggcagcagctcagcggggagaagcagaacaccggaggcccgaccagccaaggacctacaaccagcagaaaccaacatccgcctcgtgccgaattcaaccccagcctcgtacctagccctt

SEQ ID NO: 126046 - DNA, 960 bp, Homo Sapiens
atcttaaatctcctccatcattggtaaaaaatccatcccaaaccaatcccatttcggaggccattctcatattgctccataaacctgccagttgaccccaaccaactgcacattcttcttgggcacacaatttattcggcatggaaccgatcaataatgaagacagtcatgtgacatggtctcctgccaacaacctgaatttcatgtgaaacctgtactaccagtcaatttaggatggctctcatgtttcccagtgacttcccgacccagtaggtattttggtctgactgctttgctcttcctcaagttgtctcagataagcataaatatctgttcacatattcactacaaaggtttggatcagctccatcttctgcatccacatcatttactgcaagaattacatcagagaaagcctgacacaggtcttcttctgcaggggcacatccagatgtttccattgggcttggagaggcagtatcaaccaaaataggctcaggcgaaagtttttcttctttaacaggctcaggttctggctcaggttctggctctggcactggctcagacactggcactggcaccagcataggtaccttttcaagaggttttggtagttttttatcaatgacttttccagtagctgaaggttttgcttccttcttcataggcattttggcctgcagttgttcactgactttgttaccaatgtccccaagagctgttcttggcctcagtccgggcttggaggttgcagcaggggccgtaggaacgcgctttgcgcctgccatgttgatcttcgccttattttcagcattaattttcgagttcctggtgactcggagcgccatggcttcctcttcaccaggcagcagctcagcggggagaagcagaacaccggaggcccgaccagccaaggacccctcgtgccgaattcaccacccagcctcgtactagcctatt

SEQ ID NO: 126047 - DNA, 1032 bp, Homo Sapiens
gttttccccattcctgttctggatttgtgggtggccttaggtataaaagggggttgtccagttccccaaaaaggcaaaagtcccccaaattttttgggaggggtacattttctttcataatttgcttggcaataaaccatgggcagtgacacccacccaggtggcagcatttttcttgggcacacaattattctgcatgacccgatcaataatggagacagtccatgtacatggtctcctgcaacaacctgaatttcatttgaccctgtactagccagtcaattaggatggctctcatgtttccagtgacttcccgacccagtaggtatttttggtctgactgcttgctcttcctcaagttgtctcagataagcataaatatctttcacatattcactacaaagggtttggatcagctccatcttctgcatccacatcatttactgcaagaattacatcagagaaagcctgacacaggtcttcttctgcaggggcacatccagatgtttccattgggcttggagaggcagtatcaaccaaaataggctcaggcgaaagtttttcttctttaacaggctcaggttctggctcaggttctggctctggcactggctcagacactggcactggcaccagcataggtaccttttcaagaggttttggtagttttttatcaatgacttttccagtagctgaaggttttgcttccttcttcataggcattttggcctgcagttgttcactgactttgttaccaatgtccccaagagctgttcttggcctcagtccgggcttggaggttgcagcaggggccgtaggaacgcgctttgcgcctgccatgttgatcttcgccttattttcagcattaattttcgagttcctggtgactcggagcgccatggcttcctcttcaccaggcagcagctcagcggggagaagcagaacaccggaggcccgaccagccaaggacctacaaccagcagaaaccaacagcccctcgtgccgaattcgccacccaggcctcgctaccta

SEQ ID NO: 126048 - DNA, 908 bp, Homo Sapiens
tttccatgaatcatctccattcactcactcttaggtttatactttcccctaaaattcccccatgaaacttctaaaattagtttcatgctatgtatttgtttgataggcacagaaggtttacagctgcatggtcagtaagcgatactttggtcatgaatgtatatatacatatatatttgcaatgctgagaaaaagagagactgctgttaaaaatcaaaattctcgtggaatgaagagaagccactgagatttttttcaaccagaatgaaaataaataaaatatcactatctgccaaatcaaaagcttttatgttattccattatgaaagacatttattgagtaatttgcaaatgttaataagccttagaaactaggaaaagctgagtactagtttatgacttacatttaattttttttccagccttttatcctgggtttaaagtaacacagaatctttcagtgtcaacagtgagctggaaattaacctataataacaagttttgagcattttgctcctccaggcaaaatttggtcactcataataaatatattatgaagaagccaatgatgatgtattccataaacttgttatgaaaaactgactccagaaattatgtgactttacttgaataattaccattttacttctctacaataatcattgtgagagcagtgggcattggatggttgaaaagttattccagacaataattaggcagatgtattacaatttaagttgaggctagatcaacttaatcaaaaccttaagaagtaataccatgttatgatatgacaatggtagaacaggaaattatagacacatttgaggctggagttttctgatttccctgattgtcttatgtctgggatggtctaataaatgacataaccaccacacacacctaaa

SEQ ID NO: 126049 - DNA, 1223 bp, Homo Sapiens
  misc_feature (48)..(72): n is a, c, g, or t
  misc_feature (119)..(130): n is a, c, g, or t
  misc_feature (231)..(239): n is a, c, g, or t
  misc_feature (373)..(487): n is a, c, g, or t
  misc_feature (1208)..(1208): n is a, c, g, or t
ttgtatatgcccgggggcggaattagggtgtcactcacaccccttttnnnnnnnnnnnnnnnnnnnnnnnnnaaaatgtgttaagggaattccaccccttctttccaataattggccannnnnnnnnnnnaaatttaaattgagcttgccttggaccccctgggtaaaacccagaaaggcccccgaaacccctttgggattttttaaaacccttcggttccccccgggggnnnnnnnnnggggggaatccaaccctatgccatgcccggggtttcctttggaaccaggttggcccagtttcctttacctctggggcccccgccccaaaaaaagggtttgaaaagtttttgagggccgaggggggccgcaaagnnnnnnnnnnnnnnnnnnnnnnnnnnnnnnnnnnnnnnnnnnnnnnnnnnnnnnnnnnnnnnnnnnnnnnnnnnnnnnnnnnnnnnnnnnnnnnnnnnnnnnnnnnnnnnnnnnncaacacaagtgatctttaattgctttgacagaacaagggtgtaaacagcgttagtctacaggcctaccctttccctttcctcctctgcagctgaggaaatgggcagtcccatcgctagaaccctgttcttagaaattacctggtctcttgctctgacagatgctgagctaatgctgggtcacatatttaacagctagcctaaagccataggctggaacagagttggcaagagcctggctcaggtgtagcgaggagtagagagggaagacaaagggagtatcagacccctcacacgggcctctcctccccaaagatggttccacctgggtgtgttcaggagtcactaccttcacgctccctcctcccccaccccagctcttccagggtatacctaaggggtccagagcaaggaagggggcttgagctgggcccgaggaggtgaggttggctggaatttagggtggctggcagaggagagctggggaggctgcagcctttacagcagacagcaggcacggaatatcagcaggtccttcggctcagtaagcttcagtgagacactctcattggccccaatgaagagcacgccaccacgttgcagagggattggtgtctgggttgtgggtgtgctggctattactgtcccctggtaccatcaggaggatgctggcagagtccagtgccaagaccttgtattcagtgacagagccagggacctccngtcttcatatggtga

SEQ ID NO: 126050 - DNA, 3080 bp, Homo Sapiens
ttttttatctcactagaggtttccaacacactttattttgcagaccactggtttgtagcttttgaggaccaacatctctatcaattcctataaaatgtccaatcactttcagttccgtagcaggctcttccatactgcacaccatgcttatggctggaggtccagttacacatgcatgaaggctgccctgcccactggttcctggaggagggcgcgtccgagttaaagcctcttccaggagcttgaacttcccaggggtcatttcctttggcaagaagtcagtttacatgtgcagctttggtgcctgtgagcagaaagcaccagaaatgggcaggatgtgctgctttttctctcacgaagatgggcacttgaggatccagcgcccttgtgcttaatgacaggaatccctcctcattgcttagtaggttaaaatataaggaagcctccactttacataacacagagaacacctttttagattgcctatttattctagaactacaaaatttaattcaagaaaatataggtcccatgaaagacttaaaagttttataaaactaaaatctagtttttcccgataaattgtactttaggcaaaaccctcccaacgcttctaaaataatactaaaaggggcatctgattatacaagagcaatttaaaaaattaaatatttatttgaataacaagtttaagttcgagctgcaatgttggcaatgcaggtttttaacacagatcacaaaaagcgtgcacaaaaaagtactggcgcaaaggacaaaataatgctaagaattaggccaaacagctgctgattttaagaaaacaaaaggcctgaaatcactgtacaaaatagaaaatgtattaaacactaccatccacagaacagtctttactattgattatatttaaaaattatttgtgtaattatatattgaattgtaaatgagtattatacatgaacctccattcggaaggcaattccttgtagcactatagaacatctaataacattgcaaaaagtatccttttttgctatcgataaaacagttaatggtattactgtaaatatcaggaaggctacaaaaaaagaaataagatttcttttttgtcttcaaagtgttttccatgcaatgaagcacttgctgtgttgaactgaatgcactactggagaatgttctgggtccgagatgctcttgagagacaagactaggcttttcaaatcaaacactcaaaggaatcatgcaaccctcttatgactgggataccgtcatgtgccacttaccaatgctgtctctccagaaaaccattcaagacgcttcaagagacaaatcagacttatatgataaatatacataaaatgaagacaccaactgctatttgacacgactacgggtaatgcctgtgctatgtgaaagcacctttaaaaagcctatgcggcaagagataagtgtctaaagattcaaaatgaatcaacagtattggataacaatataattctcaactcagaagctgcctcaagattaggtgcatcttcagttaatgtaacaggaaaaaaaggcaatggattttattttattaattgtatccacttacaaaccgacctaaggtcaccccgatgtgtagacacaatgagatttttgttgtttatagtctttaattgaagtgataagggaaatagatctatttaaaaacaaaaccaaacagctatttctgtctagattaagaggtggccccgggtgtgggattcacattttgagtggccacttgtggtgcgacctcgatgatccggggtttgtctatgattctggctgtgcggttgcccttctctacaatcccaataatccatgcttggtggccttcaccatatttgggggactttatctctgcacagaaccgagctgcttgctcacgtggtaaacagatcagaaggccgcctgaagtctccgggcaggtcccgtgcatgaggccgaacatgtttccgcaggccttgctcaccgcagccatcttggccagcaccgggaggttgtgaattacaaacgacacctcgttcctctgctgcttggccaggttctgcgcatggcccaaaatcccgaagcccgtgatgtcagtggcggcgtgggcattgaacgtgtgcatgagtcctgcagctgtcctgttgagcctcgccatgttcatcatcgcctcctggtaggccagctctacatcttcttgggtgaccactagtttaatcttattccatttctcagggatatccagccactggtgcacagccactgccacctgtgtccccaggggttttgtcagcaccagcacgtcccctggcactgcattgtctggcatgataaattcattgggttggcagacagtggtagccactcctcccaggacaatccaggggtttagtactgtttggccgcctgttacagacgttcctgcttcctcagctgcgtctttaaaaccttggataatcagaggcatcactttatccctttccctgtcggtcattttattactgactccaaggagcatcagcatattgtcacattccgtgacccccattgcatagaggtcactgaggacattggcacacgctatcctgcccatcatgtaagggtcgtctacgatcgggtaaatgtaatctgtggtttgaaccaaggaaagcccaccgtgcctcaaaggaatgacacaagtatccattccaatgccaagccttggcataacggctcccagaaactgctcatcttcttggaagtggttctcctgtaaagattccagcaatttttgcaggacatcttggggcactttgcagcctgtgcccttcagttcagtgaatctggttagccggaagcttttgtccaattcgtaactttccgggttaaaggactcccgcgtagacatggttcttgggccccgctctcctcacagctcagcccctcccctccctctgcgggttggctgggttctttatggatccaccggctcgctttgcgccctccgcctcctcccgaaaacgggccgcgggccgctcccacaatgcaccgggcgcggccgggctcccttaagcgtcgcctgaataaaaatg

SEQ ID NO: 126051 - DNA, 661 bp, Homo Sapiens
tcgtttctcttgattttattgatcttttaaaaaaataaaaggacatcttctgtggatacaggttaggatgtttctagggtaagaaacccaccatcgcagcgtaattctctgcggaatttcagtagcacttggaaagttctgttttcaacctgaaatttttgctgttcttccagaaaataacttagtaacaaaatgaaggccgtgaagctgcaggcacactccagaaattagtgtgttcttttaactcgtgtcccaaagagacagcagttcctaacatgcagtgatgagtggacacaccgtggtgcgttggaaatcccacgttcacgtctttgacaaggaagcctcctacaatgatcttgtgctttaattttacttgatggtcaccctggttacttcattatgcctttgaatgaagtcctgttcttagtggctgcattaccaaggccatcttgccccaaagacccctcagggtcctgaggcagaattccccccaccccaccaggggactcaggaaaatgaatgatcgcagtttgccaaaagaggtcagatttcccactgacgctggttggtctggaaaattactctgaaaactcgaacgcacctctaggaatctcaatgagaagctaagaagcaggctacagtctcagaggtttatgacacc

SEQ ID NO: 126052 - DNA, 595 bp, Homo Sapiens
cccatacaagatggtttattttatcctacacacagaaaattgcttatgagtatcacattaccgctcttggttatcagttaacaaaggctgctaatgaacagcatcgttatcaagttgggtaagagacgccctgggagtccaggcaaattatgacaacacagcactttgttctgaaatatagctcatctttcatcacacacaaggagggtagcccagtccgagagatttcctggaaagtggaaaggcaaagaatattccgtgatgtgatcccagaaatacagggttaatattacaagggagagaaatgctcacggggccttagcctgatggcaattgtagaatgtcatggctttcctcagcctccaccagtcatgtcttctatgcaacagccatgtacattgtaataataaccacaaaataattgtataagggagaaaaataataactgacattcatggccctctgcaaggcacagcatctgctttctcatttggtccttcgttggttccatcctttgaaggtctgagagcagcaggcccattccatgaacaccaaagcccttcctaccacgccagcccagactgccatttcccct

SEQ ID NO: 126053 - DNA, 1914 bp, Homo Sapiens
  misc_feature (134)..(143): n is a, c, g, or t
  misc_feature (199)..(301): n is a, c, g, or t
  misc_feature (305)..(307): n is a, c, g, or t
  misc_feature (343)..(365): n is a, c, g, or t
  misc_feature (1300)..(1330): n is a, c, g, or t
aaaagaaagaggggttttctccaaaaaaggccccagaggtgaacgttttttcccccctcccgggggtttataaaaagggggccccgggcccttagttttaaaaatggccccccctaagggggcccccttttttnnnnnnnnnnggggggggcggtaaaacttggccccccccgggggtattttttaggggcgccccccnnnnnnnnnnnnnnnnnnnnnnnnnnnnnnnnnnnnnnnnnnnnnnnnnnnnnnnnnnnnnnnnnnnnnnnnnnnnnnnnnnnnnnnnnnnnnnnnnnnnnnntatnnnggtaatacagggacacaatttaatgattctaaggannnnnnnnnnnnnnnnnnnnnnnacaagtcaggtgccataaacattcaaataatccatcttttaaaaagtacgtttacaacatcaaaagaattaagatgaaatataaacctttctacttacaatttttatacagattaaccaaatcacaaataccacaaataaatgttaatgttaaattgtaacaatataatgaataaacattcagattcttaataaaatcttcctttaacattttttaacttaccattatactaaataatctatgcagaattttggggtacaataccaagaaggcaccaacagtacaaagcagatacaaagcagtttcagaactttcttgagtgctctacacgcataaacagcacaagaaaaggcaacaagctttaggtaaacctggtgcaaccctggaggacttgctctggatttccatttgtttctgacccatcatgtcaaggtggatgacgtaagagaaaccacatattcactgttatagcttctcatctgcaccacaggagtatcatgtttcaaacaccagcataacaattttaaagcacaaatgctttaaaaatgtataagcaaaaggattgctcagattttcaaaaccattacatttacgaaaatatttcccttaaacttgggattgctccaaaacattgatttacaaatataaaagtattatggaaggacccaaagcatgtgtgcgtatgtatgtgtgtattaacatactgttaccatactatataaaagttaccaatttaaaaaccatattaacatataagcaaataaagagaaaccagtttcctctgaatggctgaaatattacgtggcatgtggttgggtagtttacttttgtgattccttagagaaaaccactggtgagctacatgtagcttctcaaagctactggttacctctacacccactgcctgtgcccaagagcagaaggaatgagtgtgnnnnnnnnnnnnnnnnnnnnnnnnnnnnnnnatacagtattcttctacccagatgccacaatgtctgcgtatctctgctagctttgaggacctgtgtcaggacagagtcctcatgattagttctttcaattccatcccactggcttgttcagtatttcttttatactaaatgaaaggactggaatgtttcagcaggaattttttgcttacattttagacaccaaaaaagctattagtctgaaagcttatttgaacatacaaatagtggaggtgctgttccgtgtcactaatatgaattaagatgacctaatctgtacatttttacaaatgtaagaagagccaaaatgatgcatctactacacatgatagctagcgcttttcataggtaccttggttaggaccattctctgcccagttacattatgtttggcatgattaataaaaagcacacaacttatggctacaatgattctagaatgaagttagtggtttcatgccaatctgactccacagtaccaggaaggggaatgggaaggagctcacagtctccagatgttagtagccaaggatcggacgcgtgggtcgacgatatcccgggaattccggaccggtcca

SEQ ID NO: 126054 - DNA, 718 bp, Homo Sapiens
  misc_feature (11)..(11): n is a, c, g, or t
  misc_feature (30)..(31): n is a, c, g, or t
aaatgaatttntcctccatgcggctttctnngttaagctggcttttcgtatattgtgtataaaaagatcagattcaggatgatttggtgggattgccaggggctgaccggagtgttgctgggaaggagcctcagctccgctccaggtcctccaccaggtaggactgggactcccttagggcctggaggagcaagtccttgcaggtccagttccaggctggtgtgaaactgaagagcttccgcatcttgcttgggttggtgggctcggcccgcactgcctggtactgctcatccgtcaggaccttcccgtacagagcatccagcagccactcaacgtttgtgaccctcgcgataagcgcagcccggtgctggtctataaagtgcaggcctggcttggctgccgactgaggaggggcctggatcccagctggcgcggctccagagccctggtgcggtggccgcctgcagctgcccggccatctcctgcaggcccatgtcgcgcagcacgttagcggtgagctcggcgccgtaggtctccaggtagaagctgaccagcttgtcggtgaggtccaaggcgtccatggacagcatgcgcgccccgcgggatgcgcccgtagccctcgcgcagcggcaccgacagcagcttcagcttgaacttcttgagctcctcggcggtcaggttctccagcgcatccaggaatggcgtcgcgcgcgcccca

SEQ ID NO: 126055 - DNA, 619 bp, Homo Sapiens
  misc_feature (557)..(558): n is a, c, g, or t
ttttcttgttctctgacaggtttattagctttcatgttaatggatgtttttaaaccctgcaaccctctgtcaacttctttccacatcaagaggccatgagatacagtaatggcctcttaagagtcatgccacataaagatgatgactttgatgtcctggcctgcctcctgtaacaatgtgaggctgttttgggtacatgctgtaataacaacaggactatcacaggaacaatgaagcagagaagcagaaggtgcctacaaagttttacctaaatgtcttgtttgtcaggatggagctgatgcgcccatactggcagaacaattagcacagagtagttctgaaaaggaggaagaattcacaaagcatcagttatgggtgcagggaagtcgccatctgccaatgggcaccagagtgtcactgtactggaaggggaaaaggagtgggctggatgagatccaggggcctctctgcccatgttcaaagtcagtagctgctctgcctgccggcatcacagtgtcaacacattttgtgtgtgtctcactcagtctcacacccanngaaagtaaaaacaattgatgtaggaataaggggaatggatacagaatggtacatgcttatt

SEQ ID NO: 126056 - DNA, 1057 bp, Homo Sapiens
ctaaagctttgggggatccagaggtggcccgggttcatagccccttttggggggtttttgtggggggcttctggcgtggggttttgccagttccaggttccctttttttagaaaggaaatagccctttttgcttgagggttgaggtttgcagtcggcaccccaggaagccctttccgggtgcgggtacttatcccggggctttcaccccaggcccggattatgccactcccacatttggtcacagagcggcatcctctgtgccccgcctgaaccgccatggactttcgtcaccggagctctcacactccgcgttccagccggacggtcatcagagccatcgtccaccattccctggagcactctgaaggagcccgactggcgaggctgtgtgggctcattccgattgtcgtggagcatccggtacacgtccgactcggggggcaccgaggctgtgggctcgttttgaggtgagctaggaatgagaccccgcagctgtccgtgaagcgcatcttgtatattgctagttgaatagagcccaattggcgagttataggaagcgctcactacctgtcttttgtcatcaatgtttgcagctgcaacaaaaggctgggcccttctgttgtgcgcggtaccaatgggtttgaattcctgtggttctgattctaagttgattttgaaaggatgggctttcccatcttcagatacttgtggagaccataagtgagtttctcccctgtcaattttgagacacagctggtgagctgctgctttaatcctgtcctgcgcatcagcatgagtcatggactctgtcccaaagccgtcaatagccaggatgacatctccaggacacaggttggcagctgccgccttgcttcctggtgtaatcctggtgatgaccaaaggctggttgaagtctatgccccctgagagcctgaagccccagggcgcagggcccgggaggatcaccgtctggggcatgccgccttcctcccgcccaccgggctctgagtgtccccgcgcagggcagccactccgcgatcccgggaattccggacc

SEQ ID NO: 126057 - DNA, 1343 bp, Homo Sapiens
  misc_feature (93)..(93): n is a, c, g, or t
  misc_feature (105)..(105): n is a, c, g, or t
  misc_feature (144)..(144): n is a, c, g, or t
  misc_feature (170)..(170): n is a, c, g, or t
  misc_feature (186)..(186): n is a, c, g, or t
  misc_feature (213)..(213): n is a, c, g, or t
  misc_feature (227)..(227): n is a, c, g, or t
  misc_feature (276)..(276): n is a, c, g, or t
  misc_feature (1091)..(1093): n is a, c, g, or t
  misc_feature (1101)..(1101): n is a, c, g, or t
  misc_feature (1109)..(1109): n is a, c, g, or t
  misc_feature (1112)..(1112): n is a, c, g, or t
  misc_feature (1139)..(1139): n is a, c, g, or t
  misc_feature (1163)..(1163): n is a, c, g, or t
  misc_feature (1173)..(1173): n is a, c, g, or t
  misc_feature (1175)..(1175): n is a, c, g, or t
ggaaccccttttccataaaattttcccaggtttctactttccaaaggaccaattggttctaaatggacccctttaccataaataaggtatttntagggggaaaancttacccaccctttttaaggataaaaaggtaccattccnttaaaaggctgtagttcctccaattnataggtaatattttcnttacttcccagtaaatatgtctcaatnaccttgggcctgcntggatgtcaaaaagacaatacctggggggtcatctatgagatctgaacnaatagagggaatctctagggactgtatactctctattttggctttttgaatgaagtacagacaggcttctctgctatcctccaggcagtgtaatagtcaaggaaaagggcaacagtattggatcattccttagacactaatcagctggggaaagagttcattggcaaaagtgtcctcccaagaatggtttacaccaagcagagaggacatgtcactgaatggggaaagggaacccccgtatccacagtcactgtaagcatccagtaggcaggaagatggctttgggcagtggctggatgaaagcagatttgagatacccagctccggaacgaggtcatcttctacaggttcttccttcactgagacaatgaattcagggtgatcattctctgaggggctgagaggtgcttcctcgattttcactaccacattagcttggctctctgtctcagagggtatctctaagactaggggcttggtatatatgtggtcaaaacgaattagttcattaatggcttccagcttggctgatgacgtccccactgacagagaaagggaggctggtaaggaactgggtccttctgggtagacctctgggagctcctccaggctggcaggctctggggaagggcatttgaagaacatgactgggtccaagttgtccagaatgcccaacaggatatcagactctgaatctgaagagtcaataccgccagaatccatggggagatgttctggaggggtgacaactgggcctgcacctgctgcggactcagcagacccggccactggcctcacttcatttcccctggttnnncgctctcntcagcaancanggcatcatcccagcgctgtctaacccntcgtgcgatttctggctcgagggncaattcctanangagtcggtataatcgtatcagtctagctgttctggtgtgaattgtatcgctcaaatcacacacaagagcgggacaaaatgtaagcggggtgctaagatgagcatcccatatgggtggtcatgcgcttcatcggaacgtctgcactgatatatcgcagccggaaagggg

SEQ ID NO: 126058 - DNA, 1678 bp, Homo Sapiens
gttcccgaaatggccaagcttaaaggggcccctaaatatctggagggccaaaccccagggattcccaaaaaagggggggaaggagaaaattattaaaagaagccatttcataaaattccatgttctactttcaagaccatttgttctaattgaccccttaccataaataagtattttaggggaaaacttacccaccttttttaagataaaaagtacaatcttaaaaagctgtagttctcaattatagtaatatttcttacttccagtaatatgtctcaaataccttgggactgctggatgtcaaaaagacaataccctgggggtcatctatgagatctgaacaaatagaggaattctctaggactgtatactctctattttggctttttgaatgaagtacagacaggcttctctgctatcctccaggcagtgtaatagtcaaggaaaagggcaacagtattggatcattccttagacactaatcagctggggaaagagttcattggcaaaagtgtcctcccaagaatggtttacaccaagcagagaggacatgtcactgaatggggaaaggggaacccccgtatccacagtcactgtaagcatccagtaggcaggaagatggctttgggcagtggctggatgaaagcagatttgagatacccagctccggaacgaggtcatcttctacaggttcttccttcactgagacaatgaattcagggtgatcattctctgaggggctgagaggtgcttcctcgattttcactaccacattagcttggctctctgtctcagagggtatctctaagactaggggcttggtatatatgtggtcaaaacgaattagttcattaatggcttccagcttggctgatgacgtccccactgacagagaaagggaggctggtaaggaactgggtccttctgggtagacctctgggagctcctccaggctggcaggctctggggaagggcatttgaagaacatgactgggtccaagttgtccagaatgcccaacaggatatcagactctgaatctgaagagtcaataccgccagaatccatggggagatgttctggaggggtgacaactgggcctgcacctgctgcagaggtgcacgtagtctgagtgctgcggactcagcagacccggccactggcctcacttcattccccttggcttccgcctcctcttcagcaaccagggcatccatccccaagcgctgtcttaactcctggttctcaactacaaggccatgagttttctctcgtaaaagctgattttctagcaaaagtttttggttctcttcttctaaatctaccacttgctgttccagctcactcattcgagccttctttcgatctctggcagtctgagctgctactctgtttttcagtttcctcctcagcgccttctcctcggggctcaggtgcgtgaggcgctgtcgcttgcgcgcctggggcagccccccgctcgctgcctccgggctggcccctctctgggctggcaccatgagcggcagggcctggccggccggggctccggcggcggaggcgggctgccccgacagaagcagaactttaggggtcccgtcggccgggttcggcgcggctgccaccaccaccatagcggacgcgtgggtcgacgatatcccgggaattccggaccggtaccac

SEQ ID NO: 126059 - DNA, 1912 bp, Homo Sapiens
  misc_feature (106)..(106): n is a, c, g, or t
  misc_feature (1772)..(1806): n is a, c, g, or t
  misc_feature (1810)..(1852): n is a, c, g, or t
ttaaattttcccaagggttttagggaagggtgcctagcatatactaaatgcttataatgcatcgtctctttgaatcttaacctttagagataccattatccaactntacagatgaggaaataagtgattatatataacccctgggttacccagcttaccagtggcagagttgaaaatagggagtttcagtctagaaaatgctcttaattcccataataagggcaagagaatctcgatatgtgatggtgtgtccttgtttaacatttataagatggtgtagcaaatagtggttagggttctagctcttccacttactagctgtgatattggtcagttaggctcaagaatctgtctcagaaagacagtaactgctcaaattatagcttatatcacttatggcagtccagaattaaagcaggcagtaattaaggtggaaaagccttcagtcactttaaaaagcgttaggctcacttcagttggattaattcctaccacagcacacagataaacatctggagagaaaacaagacttacggccctagaagaaatcaaacaaggatgctgcattgtaccttttaattgcatgggtagttttaaataaatggagaaagcacctttcagaagctacactagcaggaaaaaattccatcaagcatttacatagtaaatttctataatttcacaaaagattcttgatcttacttgaagtatacatgagggaaagagccccctcagcaggtgttcccgttgcttacagaagcaaactaaaggacctaaaactggaggcaagccaggatgccaaaaagggggaagagaaatgataaagaaccattcataaattccatgtctacttcaagacatttgtctaatgacccttacataataagtattttagggaaaactaccacccttttaagataaaagtacaatcttaaaagctgtagttctcaattatagtaatatttcttacttccagtaatatgtctcaataccttggactgctggatgtcaaaagacaatacctgggggtcatctatgagatctgaacaaatagaggaattctctaggactgtatactctctattttggctttttgaatgaagtacagacaggcttctctgctatcctccaggcagtgtaatagtcaaggaaaagggcaacagtattggatcattccttagacactaatcagctggggaaagagttcattggcaaaagtgtcctcccaagaatggtttacaccaagcagagaggacatgtcactgaatggggaaagggaacccccgtatccacagtcactgtaagcatccagtaggcaggaagatggctttgggcagtggctggatgaaagcagatttgagatacccagctccggaacgaggtcatcttctacaggttcttccttcactgagacaatgaattcagggtgatcattctctgaggggctgagaggtgcttcctcgattttcactaccacattagcttggctctctgtctcagagggtatctctaagactaggggcttggtatatatgtggtcaaaacgaattagttcattaatggcttccagcttggctgatgacgtccccactgacagagaaagggaggctggtaaggaactgggtccttctgggtagacctctgggagctcctccaggctggcaggctctggggaagggcatttgaagaacatgactgggtccaagttgtccagaatgccccccggccgtaatggccgaattcccgggcatatgtccggtaccgtcgactgnnnnnnnnnnnnnnnnnnnnnnnnnnnnnnnnnnncggnnnnnnnnnnnnnnnnnnnnnnnnnnnnnnnnnnnnnnnnnnnactaacacgctagcgccctatagtgagtcgatacagttttttcttccgtgtttttttgtg

SEQ ID NO: 126060 - DNA, 662 bp, Homo Sapiens
gcacgaggcctctctgtgggaagctcatggggcattggggcaagaggctgtgtggcctcctggggccggggccgggttctgcttccagccttgttcttccctcaggcgtgggagagcctcacaggagaggccatggagagtagaaggggtgagttaggggaccggccacctcccactttcttaagtcatctttaggaccttgaggtggatggcgaagtggaacccggttacatcttagagcctcacagctcgaggaattacccactcaagtgtccatttcctttcagatttcagggtctgtggcctctcctcaggggtctgtgtgtgggttcacagagtgacactcactgaaagctggttctgcccctgctgtctggtggacctcatgaggtcaaatcaaggacgcaagaagggcggagcaggaagaggggaggcagagcagagaaggggacgggccgccggtccagcagcagtgcgcacccgcgggggcgccgcagcccgtgtggctccgtttgacagcacgtgcaccccgagctcagagcctgcccaggggaactcgggggtgggtgggttgaggggctcacctgacaacagttgctacttaaagtagtactcaccattccaaccatatttttaacagccttcggccagcagattataag

SEQ ID NO: 126061 - DNA, 1141 bp, Homo Sapiens
  misc_feature (608)..(646): n is a, c, g, or t
  misc_feature (863)..(899): n is a, c, g, or t
tttcttctagtgagggtttattttaatcatcagtaaaataaacagcagacgaaaaaaagattagtaattaaaacggagtgtttccattctttactctttaagcattatccatgcacttctcactgagctcacccatttgttgaaaaaggagacaaagccatatcccttagactttcctgttgccatgtcttttaccactcgggcatctctgaaatcagaaacaatcagaagtttaggtttgcaaactatcctctggatatcaaataagaatttcacacacaactcattctcatgtttcaccttcattaaagtgaacctttaatgcaaattcaccttttattctacaaaatttatcatgtattaggaaatgaggcttaattttatagacatgcaaatcaataacttaagtatatatgtatatttatattgtacagaaattgcctctctcttcaaaaaactttttaaacttttaaatattaagcatggtgaaagcagctactcacatgaactacttaaccacttataaagttcacaggacattagatgaatggctttctttaaccatgcaatttataacttatttgacactatattctacctaatcattnnnnnnnnnnnnnnnnnnnnnnnnnnnnnnnnnnnnnnngttgtatacttccctaaactaattaaactatttaattttttcagatcaatttatacccccctttttgtctaaattttgagaacttgacattttcagaaatgttaaatcattgaagaaaaatactagacacacacaagttttaagctagacaagaaaagattttacactgaattttataatagcattcatataaaattgattggaactacaagatatnnnnnnnnnnnnnnnnnnnnnnnnnnnnnnnnnnnnncacgccaacatttatccactgtgaaccgtagcttgtagttagccagggcaattctgtccattcttcagagacactgatattcttccaaatggtgcaaaagcagcttttatatcttcagttgtaatttctgggctgagatcaccaacaaagacatggaaatgatcttgtgaacactgtgtgctgacaacggtactactgcttgtatctttcttttgactgctaggggttgttgcccaattccc

SEQ ID NO: 126062 - DNA, 650 bp, Homo Sapiens
  misc_feature (1)..(1): n is a, c, g, or t
  misc_feature (575)..(584): n is a, c, g, or t
ntctttttttatttcaaagattgcttcttatattgaagctcatattaaagcaacagtacaatgttcataaaatataagtgtgatgccgtaacattttcttacatgtcagaatactgatatttatatgtatactaaaataagaactttaaaattgtacaaatagatacattaaaaatgacatagaaatagggcgtctctcactgaaacaagacagttatatctggcacgtattagtttaagatgaaagtagaagcaaaaagatttacaagaatcagcagtaacaagattgatgctcaagagacataattgtacattgtattgtacatacattgtatgggtttaagctggctgaatattatatatttcaagtttaaaaatgcactacatatagagtgtccagagtttaaggcgaaattacagctcagaactgttgtcctttctaattttgtggaagcttctttgacaacttaaaaaagaagaaagacttggatgttcataacacataaacaatttcccttcattgtcagttcagcgttagacttctccttcacttaaatattttgtatgccaagtgnnnnnnnnnnctagcgaagttgataaacaacttcaatatttgcctttttgtgagaaaaggtatttcaccctcgtgc

SEQ ID NO: 126063 - DNA, 988 bp, Homo Sapiens
  misc_feature (739)..(739): n is a, c, g, or t
  misc_feature (755)..(755): n is a, c, g, or t
  misc_feature (786)..(786): n is a, c, g, or t
  misc_feature (797)..(797): n is a, c, g, or t
  misc_feature (806)..(807): n is a, c, g, or t
  misc_feature (829)..(831): n is a, c, g, or t
  misc_feature (855)..(856): n is a, c, g, or t
  misc_feature (858)..(858): n is a, c, g, or t
  misc_feature (860)..(860): n is a, c, g, or t
  misc_feature (932)..(932): n is a, c, g, or t
ttacattttaaataaatagtttatttattcaaaatagttttcttaccttattcacagtttcaagtttgaaatgaaaaaaaggggtagtacctgttcttgatcaactgtcatataaagtcaaaagtgaatcctttcagaacatgcattaaatacagcaaattgcacaacagctcgtctttgaaaaatcctgcactgaagcttatgaagaacacaccttttttctggacaatttaaaaggaaacactgtagatgtacaggaggtctccttaacccacttgaacctgtaatgtcatctggataaaagttctcttgaccaaagtaacattttatccaaaataatcatatcttagacccgtgtagcttgacatacttcaaaaatacgtgaaagtgtaactgcatcacagcaggtctgttaataccgaggtactacatacttctcaaagacataaatagtggaagctttaagtttgattctgatgttagcacttcaagtgaagaagccacagaactcaaccgtaatttgtctgtcacttaaaataactctgtgtttccactgatatacctgttttacatggatatttccctattatttaatgaaacaaagcaccgaatgaacaaaccggctccgtgtttgaaggcactgacagcgtgtctgggacacggctctgtgcagtcactgaacggcattgctgctcgctgcactgccggcggcaagctggccagcaggtggacgatacgnttgatcctttcaaaangagtcgcggtttatttgcagttgctctcaanactgggaatanatgtgctgnntggttttgagaatgtgtcatcnnncgatgtatgctggtttctttttanntnanatagagttaatgactgaagaaaaaaatgcaccgagaccaattactgggagttcatcactctccgatgaacangagacacacactgcacggtccatcctagtggcatctcttactctctgatactgagg

SEQ ID NO: 126064 - DNA, 742 bp, Homo Sapiens
  misc_feature (68)..(127): n is a, c, g, or t
  misc_feature (627)..(627): n is a, c, g, or t
ttgtttttctttgcttattttaatatcatttggttaatagagaagagggttatacttaagtgttgtannnnnnnnnnnnnnnnnnnnnnnnnnnnnnnnnnnnnnnnnnnnnnnnnnnnnnnnnnnnttcatgtaacaggcatggtgagagcaatgagccgtggttgactgcaggtgactggctcgccaccacactcctgtcactgccatcctcctcttatctcatcaagagacagtgctaaggtttacactgatgtctgcttacacagttgttttctttctttctcgtgaaggatttgttgcttgttttggtttggttctaggttggtgatgaacaccttaggaaacaacaccgggtgctggcagatcttcattacagcaaggccgcaaagctgtttcagctgctgaaagatgctccctgcgaactgcttagagtacagctagagagagtagcatttgctgaatttcagatgaccagtcagaatagcaatgttggaaagttgaaaacactatctggggctcttgatataatggtgagaactgagcacgcattccagctttatccagaaggagctgggaggaggccgaggaacgtgcggatatcgcagaatctcaagtcgaacgaantccgcgctaagactcgagacttcacctccagcaggatggtggtccacgagagtgaagagtgagccagcccttctggagcaggacagaagatatgcaaaatgtatattttcttgat

SEQ ID NO: 126065 - DNA, 475 bp, Homo Sapiens
  misc_feature (401)..(401): n is a, c, g, or t
  misc_feature (422)..(422): n is a, c, g, or t
tttgaaacaaagcaaagtttattgcatgtgaaaaagagtcacatggacattaagtatcaatggtcaggaatcaagaaaatatacattttgcatatcttctgtcctgctccagaagggctggctcactcttcactctcgtggaccaccatcctgctggaggtgaagtctcgagtcttagcgcggagcttgttgacttgagattctgcgatatccgcacgttcctcggcctcctccagctcatgctgagcctttcggaatttggtgagatgagcattggcttgttcatcagcctcctccgcctgcctcttgtaggacttgactttcacttgcagtttatccaccagatcctgcaatctcagcacattcttcctgtcctcttcactctaagaatgagaaagtgngaatgtcactggagaggaggngcagatttcacaccgcatgggcagctttctgggccaaagtgttccttcgtgcc

SEQ ID NO: 126066 - DNA, 1210 bp, Homo Sapiens
tggtgttcactgtgcgccccgcgtatcttatctcgcgcgcgtgttccagaaggtgtgtccaacgggcgtagaaaagaagggcgggtaagttacccgcctttccttgggttgccacactgtccgtcatgaaactcccgaaagggtggaaaccctgtttggggggccaaggccttcggggtccaaccggggttccaccaaccggtgtggtgttggaaaaaatcccgccgcgaggagcttaggagaggccaccccctttttttttggcccatttaaaagggaaaccactgtagatgtacaggagggtctcctttccgccacttggaacctgtaatgtcatctggataaaagttctcttggccaaagtaacattttatccaaaataatcatatcttagaccccgtgtagcttgacatacttcaaaaatacgtgaaagtgtaactgcatcacagcaggtctgttaataccgaggtactacatacttctcaaagacataaatagtggaagctttaagtttgattctgatgttagcacttcaagtgaagaagccacagaactcaaccgtaatttgtctgtcacttaaaataactctgtgtttccactgatatacctgttttaaatggatatttccctattatttaatgaaacaaagcaccgaatgaacaaaccggctccgtgttgaaggcactgacagcgtgtctgggacatggctctgtgcagtcactgaacggcattgctagctcgctgcactgccggcggcaagctggcccagcaggtggacgataacgttgattctttccagaagagtcgcggttttatttgcagttgctctcaaaagctgggagtaaatgtgcttgttggttttgagaattgtgtcatcttcgatgttattgcttgttttctttttagttgaagatagcagtttaatggactgaaggagaagaaatgacaaccgagactcaaatatactgaggagtttcatcacttcttctcgattgagactaggagaagcatcagcagctgcagcggcgtcaccactcttaggctggccaaattcttctataagctccttctggataagctggaatgcgtgctcagttctcaccattatatcaagagccccagatagtgttttcaactttccaacattgctattctgactggtcatctgaaattcagcaaatgctacatcccgggaattccggaccggtcc

SEQ ID NO: 126067 - DNA, 1797 bp, Homo Sapiens
  misc_feature (1677)..(1711): n is a, c, g, or t
tttttcaactttcactttaattttctttagttgcttagttgtacattttgagaaggcaaatccattggaacttggggaggcttagaacataaatcagtattagaagtaaagggaacacacagctaaaagttttactttaatcacaaattcacaactagagatatcatttgcatatcttagaacgctaaagacctgttaaaattttttaaccaatcagcaaaaatatgtgccccacagatttctaatgttcataatttagaatttatcacatataatatttattaatagtttatttgcaaaattattattcttaaaacacttctttccaacacatttacaatgttcatgtgttttaaagaaaaaaaccaccctcatttaaaaatgtactactgactttaatgtgtggttataccagtgccaccaaattagaaaagaaaaagaaacatacagctgtattggatatgtagttactactacaaataatgacaacacacgtcctatacaaagatcatattcacgcttttctaccacttctcagtcattgtcagaaccatttggaggtaagaaaaccaatgcatcattgaaaatatgcccaaatgccctaaggcggtataccccatacatcatcacatgcatctgatttggagtcagtccattaaaagtaacagccatatctgaacaacagccttctactacctggttggggtgataagtcattgcctctttaatagaaagccccaacagatttggtattaaatacatcttttccatcagcatcttctgcattttctgcaaatactccagcatatttcaggcaaactgctagctgtttatcttcagatatcttccaaatcatccctccctgttcaggacacttttctgggatattgagaaggctgttaagtcttttcattgattctacacttaagacaattcctccttccatacccacatattcaaggtctccagattttatagtgtggcctagatagaaaggctgtgatggatccttttttaacaaaaaatactttaggttttcaatgatagcaaacgtagtggggcgtgcaaggaagaaccagttgtattggtctctatacttatcaaaggcgtatttgtaagcttttctcatcattaaccacatgtcatttgtgtccatattaattgactcaaacactttaacattttcagaactgaagaactctgctttgtcacagtgtttggtccaagtctcctttactgcagcccaaagactcacatctttgggttttacaaggataatacagtatactcgaaagctcttactgagctccatgcgctcatcctctgaaattttcaagatatcttctttgttaggagcttgtaggtgatgatgctcatggtggtgcattctatttccatgaccaatcctaatgtgtcctagcatagtgatcaaagcacagaaaatgcttccaagcatcacacccttcaaaaaggagctgctttcagaaagcatttttcccgcgtctagaacggcttggggacaggaaagcgcagccgcgcacgggtttcctctcacgttggcgcaccactccgttacgctcctgaccaggctgttctagctgcaggcggtgttctctcgttggtctcgctaaaggtaatggccgaattcccgggcatatgtccggtaccgtcgactgnnnnnnnnnnnnnnnnnnnnnnnnnnnnnnnnnnncggccgcttcctcgctcactactcgctgcgctcgtcgttcggctataacggacgctagcgccctatagtgatctatacaagtactt

SEQ ID NO: 126068 - DNA, 759 bp, Homo Sapiens
tttcaaattaacaaactgtaattgttttcccaaagatacatttttttcatacacatccatcatacactgtaaccaaaaaaagcagtgtacatgaaataagagaaaataaattaaaaatccatagcataggtaaggaggctctagtctggagcacagctgagtttccagcaatataaggaggctcgaaagtttcttttataagaatgcctgctagcaagggttccagcaaggtggttggttggtctgtaagtcagtcttgagtacttgaaacagttctgtgtttgttttttttccttagcgtttagaatagccatcattgtcctgcaataggcagagctatcacgtccaggaaaaatgagggagggaaccacagaggcagcgtgagatccaaatacagcattcaaaggtaattggtccagtggtgcctggggagggaggaagggtgatactccagggttagccgtcttcttttgggggtgtgtaccagccgtttttttcgtggatctgcaccaaggacttgtaggactgctgtgctcttgtcagactgtattgagatttgttggctccaaactgcactcgtgctttccccttcaccagtgtggcactgatctgcatgatcactgactctatggagtaggcactgctccagccctgtttggtgagaagttccatgcagatggcccctccgcccagacataccctcagagaggactggagacacatcctgacaatggtgggtcaacggaaagtatctttaag

SEQ ID NO: 126069 - DNA, 1080 bp, Homo Sapiens
ttttcactgtgtaattcctttattttctgcatattagtgctttaccaacactacaaccataaagaacacaattccaagtactgtactttttagtttggggagatcacagtctacagactcatttacttatattaaacaagattaacctcattcaaaacttactgcagtttataaattcacataaatacagaaatggatgcaattaaacaacttcaggatcttatttttaaaattcttagataattttttctgcaggctataattacctgctccagtcaccaatggttattgttcaatttaactacatcaattataaacctcttatatccttaaagaaaattttaagtgaaaattacaatttcttaccaaaaggtttagggttttccaaatttcaaatatttgcttccccctcccccctttccagtcaaacatttcaaataaactaaaaataaccacatctcacctgcaacattcaataatagcaatcacttgatgtataaaattttaactatgcccccagttattttaagacacaaaaaaatggctgcctaccaatctgtcttcacaagttagaaatactacatttaagatttaacatgagggtttcaagtttcctccagtttaggcatttatacctttgtgcttgttttgtttcaggatgttactatagcattgatattggataacccatatttatatactttaaaatgcaatcatttgaaacactaaaaattacatttatggtggagctttggaaattttagaaagcaaccagtgttcttagatgtgtttatcagcctcatttctagagctctttctactaaagtgaaactgagaacttcgtactttagttgtatcctgaaatcaaaaaaaatccctctgcaccaacaggagcctacatgagaatacccttttgcatctgctttaagtaaaatgtttgttaagagttttactttgaatagttcatttttttatagtcttacacttctcatacatctttggtaaaagctccattatacaatatggccaaagtgtgaaggaccaatactgtccaactataccatgatatcccgctcaatt

SEQ ID NO: 126070 - DNA, 1037 bp, Homo Sapiens
  misc_feature (775)..(783): n is a, c, g, or t
tttgaattttctcaatattcaatatatattgaagtggaaatttttaaacctagtgtttcctgaagcatttaacataccaatttcattattcccctcacgaatctagtccatttaaatgtcgatgttcaagggtagggggtttataacttaagtaattaaatttctttaaatatcttgatgtaactttataaatttaacataaccagtgttcttaagtttataaatactcatcctaaaaagcaggactttcctgggttcctaaatagttcttgaaatttaataagctgataaatatgatgactattagttctctgaaacatttcaaaacttacaaacttggctgaatccacttccggtgttctgcttaaaatcataagcttaaaatcagctactcaattacccgttttaaatggggattggaaggccaatctgttagatactctgatacgcctaattctccttaacatgacaaatgtgtgaaataccagatttccgtatgccccagcgcattagcactcactttgctccagggccaccctgtgtaactgtggcacttttggggccaaaaacgacaagggggctaaaggcgccttgttgctgcactgaggagcaatgcccctctctggagcagtcaagcccactggtgccacttctgcttttgcaccccacgtacccctccagtgggggggtctcagtcccggtcttcaaactgcatcaccaaactcctgctcgccttccgccatccacgcagctttgtcactggctttttgttgcnnnnnnnnnctgcgttcttttgtggttcctctcgccaggccccacatcttgtagctacttagtggcacctccttggatgccaggatgctgcatcctgggccatgctgatgagaagagtcacagggggccagagggcaacccttagtggccaccttccttgtggtccagaaatcctgcctcagcagtgccggctgatgagtgtctctcctctgcttgtatccttccagtgacagtgagctcagcactatttttttattacgata

SEQ ID NO: 126071 - DNA, 721 bp, Homo Sapiens
  misc_feature (707)..(707): n is a, c, g, or t
gtgggtggggtgcaggtggcgtttattttcatggatttatacacactgggaaaagcctctgcgcccatgcccacgccctcctccctccccccggcgctgggtcccctcatatgaaagggaagtaacaccgaggagcacacggagatatagggtgtggggctgggggggccagcgctggggccaaaagtctgggtccccagcctcccacacgcagcccctcgggccccttgggtgtgtcaataaataacccaggtccaggctggtgtgggcctcactcctcgctgtccagcttcaggctgatgctccgtgctttgccccgtgccagggtggtgggtggtgttcccgggccctcacgctccgcctggctggggcccctcgagcgaagcagctggctctgtttgcgcaggaagtccacgggggcagccacaccatagctgctcttgcccaaggcagctctcgggggtcccgaggaggcatgcgagtgcgagcccgcttccagctggcccaggtgggccacatagccgtctgacaggaactggcactgcgcctgtagcttccgcacggcacggcccacgatgtaggtctggctcggggacagccccagcgccgcgtatacagccacatcttttgggagacccataaccggccacgatgttcagttctacctcctgcgccaggctctgcagaaacattgccttctggcgtantgggtcgtgggtga

SEQ ID NO: 126072 - DNA, 344 bp, Homo Sapiens
tttgagtcaatatgaatttttattaacacacatttgtcaaagtctgtacaaaccaaaacattcctgtgttttaaaatgtccattattacaaacatacaaagaaacaaaaggtgttaccaaaagttagctactcaatttcatggtaaaacagtgtcatgatttttaaaaatcaaaatttcaagactgaggtttcttctttccctttttggaacttatggaaagttagaaaacgtgtgaatttgctttatattaaatgccaagaccttaaaaaaagatttagtataaaactaagtatgtttttatattgtcatacatcatgtaacagaatttcagtccttaaaatt

SEQ ID NO: 126073 - DNA, 1327 bp, Homo Sapiens
  misc_feature (54)..(54): n is a, c, g, or t
  misc_feature (56)..(56): n is a, c, g, or t
  misc_feature (122)..(123): n is a, c, g, or t
  misc_feature (140)..(140): n is a, c, g, or t
  misc_feature (177)..(178): n is a, c, g, or t
  misc_feature (232)..(232): n is a, c, g, or t
  misc_feature (269)..(269): n is a, c, g, or t
tccactgtcaggactaatggtttcatatgcaagttgaccaaaatttattgtatntngctgtgttcatcacttgggaggtcaactaaattacattgccagagcctgtaccagttatgcacatnnactaaaatgtgacattntagtgtcatgataatgcagtatgaccttatacacttnntgcattcttaaggaaagcacattaagctttaatatagaaatatttaggtacacnttgtgctcaagtaataataaaacatttgttctttttngatctcatacattctctcctcaggtatggcccatctcctgtacgcttggagcgacctttggctacgtggctggccttgttatttcaccactctggatatactggaatagaaagcaacttacatacaagaacaattaactggagcaaagggagatatttctttgtgcagattctgtaagggctgggcagaaatgtgtatggtcaaagccaagcagttccatttacagctctgttttttacgtagttacaacatgatgtgattgtagctttttaaactatgaaacccctgagagattgtaccttctagttgaaataaagtatttataatagattgtggcttcagatgctgcttactgcttcttaaacctttaaggaacattcttaatacactttatagaattctgaggacaggttttgttttctttcaagttttgaactgcttcattacctataaaaggtctgggtatagctgtagcatttcatttgctttctgagagaaatggacagtttccttggccactgaagatgtttctcacgtaattaaacaacagtttatacatcttgatcctattcttttttttacagtgtgtttctttggagttaaaatggctatgatagcctcatcaaaaacagtcttcaatcccttctgggttaaagctgaacattccacatagcagcatgctcctatcacatatttactgggtatctactatatgtcaagcactgtttaggtcctggggatatgtcagtgaactgaacgaaagagcagagtccctgctgtgtggcgtccacatgtgctgacatctgctgggtaagaggcacaggggagggaatacagagcagatggttgcaaatgctgtggggaaaaagcagagtgagggaggcggggagtgctgaggacaatggtagtgggggtccggggaggcttctcaatggggaagtttgagcagtgagggatacctaggggaagagctccaggcagatagatcctgatgcaggagcatgcctggagcagtcaaggaacaagatcacactgaggatgtggtatttgagcagaga

SEQ ID NO: 126074 - DNA, 540 bp, Homo Sapiens
cagtgtgtttctttggagttaaaatggctatgatagcctcatcaaaaacagtcttcaatcccttctgggttaaagctgaacattccacatagcagcatgctcctatctgggagggagaaaaaaaatcacaaatatataagatcatgtttatacaattggcatgacataaacacatcattatgaagaaaattataaaatacagctatgcaaaaagaatacattcatcatccatgttcataaccccagaggggattttaaaatactagtatatgtccttccagactttctatgaaaaattatttcactcaccacatatttactgggtatctactatatgtcaagcactgtttaggtcctggggatatgtcagtgaactgaacgaaagagcagagtccctgctgtgtggcgtccacatgtgctgacatctgctgggtaagaggcacaggggagggaatacagagcagatggttgcaaatgctgtggggaaaaagcagagtgagggaggcggcgagtgctgaggacaatggtagtgggggtccg

SEQ ID NO: 126075 - DNA, 1329 bp, Homo Sapiens
tttctggtgctgcttgtctgtgttgcttcggtgttttgttggtcgtccttcgtctgtggtgtgttcttggttgttggtgcatgggtgtgtgtctgttgcggtggcggcttgtgttttgttttgttgagcaccgcgttgcgtggagatagttgttcgtcgttgtgtctgacgttgtagcatctggtttgcgtttgtgtggctgacttttgtctctcttggtgggtccggttgttctgagcgtgggagccctcggtttgcgagcggttctgtgccccttgttgtgtggttgacgcaccgcggggggatggctgtgtcgatgccggcagcgtttcgtgtcggcccgagttactcggcgcccagtgggggatgtgtgcttcgtggccaggatcttcgtgaagtggtgtggccgcgaattgtgttgttgttgcgaagcgtcatccgtgtccctttgcagccgtcgtgttcggtgaccgtgtggttgaccaccctgtgagcgggcatctgtgagccgtgtgtatacctttgttaagccgccggtgtgaggtttgtgaccctttcgtaggtggacatggaaggtgtgatgaattagatgtcggcttccagatgctgcgtggctgccttcgtgaaaccctgtaaggaaccatgtgcggaagacaccgtggagaggagttctggaggaccaggttttgtttttctctccaagtttggaactgccttcattacctataaaggtctggggtatagctgtagcattgtcattgtgctttcttgagatgaaatggacacgtttccttggccactgaagatgtttctcacgtaagtaaccacacgtttatacatcgtgatcctattctgttttgttacagtgtgtttctttggagttaaaatggctatgatagcctcatcaaaaacagtcttcaatcccttctgggttaaagctgaacattccacatagcagcatgctcctatctcttttgctagtttctgtccttgttccacacatataggtttttctttcatatcatgtcaagtcttgctaaatttttggggtcatctcggagatcaatcttgagttcctattaatgaaaaggttacatttgggtgcgtattcctttaagttccggtacccactcctctttcacattgttgaaatgaggctggatttaccaccgagaagcatataaggaagacatcgttcattgggtaagataaaggcctcagacggtcatagtcttcctgtccggccgtgtcatagagtcctaggaggtactgcttgcccccccggccgtaatggccgaattcccgggcatatgtccggtacctcgactg

SEQ ID NO: 126076 - DNA, 1187 bp, Homo Sapiens
  misc_feature (80)..(114): n is a, c, g, or t
  misc_feature (303)..(321): n is a, c, g, or t
tgataaatcactatagggcgctagctcgttttgcagccgaacgacgagcgcagcgaagtagtgagcgaggaagcggccgnnnnnnnnnnnnnnnnnnnnnnnnnnnnnnnnnnncagtcgacggtaccggacatatgcccgggaattcggccattacggccgggcacctagaatgtaagttaaacaaaataccggcttccagagaccccttttctccagccatattacatcaggctagaagtaattaatgttgatttatttcatctacaagcagttggtccctaagtgaaaggctctgcttgnnnnnnnnnnnnnnnnnnngttggaggaaaattttcatgttcttctgtgaagcttatttggtacactggagccatttctaatctttctctggggggaacaggccacagaactgtgttagaggtgaaccatcttaattactagttctattacctaattcagcttccttgtttggtctgctgtggatctgccttattgcatatgccatgcatcagataatggatgcatcagataatggtgttagacaaagcttcattgtgaacaacctaatgcattttagagaaacaatctcatcacattttttctagcctttcctacatttaaacttgctgttgcccaaattataattttttaaatgtctttggtgggcttctgttaattcacatgacttgagcttatagctatgtctactgcacagattgggtaatggaacactaaacttttatacttgaaaatgacagccttaaatgctcatatcagtcacaaatctaggatgtactgtcttgttgtatgtgagctttgtagagatttttaaaaatataagcatcaccttcccattgaagagtggagagagtctactggatgactggccaggaactttctctctgaatcggacatttggatgtcttctttcttccaagaaatggtggttcacattaaagtatcatggccttatgtatgctcaaatggaatcttatgtaactttcttatttaattttggtctgcttatttttagataaaattgaaaggaattgtataaatcaattaacatattagctgagttgtccaacacatggtataaacgaattacaacagtaaactattacacatttccaacttgaacggacgcgtgggcggacgcgtgggtcgacgatatcccgggaatt

SEQ ID NO: 126077 - DNA, 1059 bp, Homo Sapiens
ttttctattataaatactttatttcaactagaaggtacaatctctcaggggtttcatagtttaaaaagctacaatcacatcatgttgtaactacgtaaaaaacagagctgtaaatggaactgcttggctttgaccatacacatttctgcccagcccttacagaatctgcacaaagaaatatctccctttgctccagttaattgttcttgtatgtaagttgctttctattccagtatatccagagtggtgaaataacaaggccagccacgtagccaaaggtcgctccaagcgtacaggagatgggccataccttgcagtacggttgtcaggattaagttactcatttcacagtaccaagccccctgcagggtacatggagagatctataagtgctacgttttctttctactgtcatctgccatggtctttcccaatccagtggaataggaagtgctccaagccatgctcctacaaagctagaaattgtagtgatctggagactattctcccatatggatgtaactccatttctactgaacactcttagccatgctttgaggtttggtcctaacaaacataagcaaggcacagtagtaaaagtagacaaaataactgcaaataaaaatgtttccaatgccaactctatcagtggtgctccatacagaacaaaaattacatgaaaggagaaacaagacataagaaagtagatacagcatttcaaaaatccagttaccttgtgtgataatgaacttcttttagaggatgtatttggtttcactactaaatatagtactagattgacagcagttacaaaaccagaacagatgcacaaccatgtcaagtgtgtttccaatattgagaagttctccaagaagagtgatggaatgaagacacttaggataattgaaaatatgcataaaagatgggtatacagtagtctcttgatatcgttatctttcatggtgttttcttggatggctagctaactctccctcccgcggaagggaagcggggaactactgcctcctaccatcaggtacgacgggcggcccaggcccc

SEQ ID NO: 126078 - DNA, 931 bp, Homo Sapiens
ccaagaggaataaactgttgtttaattacgtgaaaaacatcttcaggggccaaggaaactgtccttttctctcaaaaagcaaatgaaatgctacggctatacccagaccttttataggtaatgaagcagttcaaaacttgaaagaaaacaaaacctgtcctcaaaattctataaagggtattaagaatgttccttaaaggtttaaaaagcagaaagcagcatctgaagccacaatctattataaatactttatttcaactagaaggtacaatctctcaggggtttcatagtttaaaaagctacaatcacatcatgttgtaactacgtaaaaaacagagctgtaaatggaactgcttggctttgaccatacacatttctgcccagcccttacagaatctgcacaaagaaatatctccctttgctccagttaattgttcttgtatgtaagttgctttctattccagtatatccagagtggtgaaataacaaggccagccacgtagccaaaggtcgctccaagcgtacaggagatgggccatacctgccatggtctttcccaatccagtggaataggaagtgctccaagccatgctcctacaaagctagaaattgtagtgatctggagactattctcccatatggatgtaactccatttctactgaacactcttagccatgctttgaggtttggtcctaacaaacataagcaaggcacagtagtaaaagtagacaaaataactgcaaataaaaatgtttccaatgccaactctatcagtggtgctccatacagaacaaaaattacatgaaaggagaaacaagacataagaaagtagatacagcatttcaaaaatccagttacctaactctccctcccgcggaagggaagcggggaactactgcctcctaccatcaggtacgacgggcggccgca

SEQ ID NO: 126079 - DNA, 1339 bp, Homo Sapiens
  misc_feature (1278)..(1289): n is a, c, g, or t
gctggtaccggtccggaattcctgggatatcgtcgacccacgcgtccgtcaagatgtataaactgttgtttaattacgtgagaaacatcttcagtggccaagaactgtccatttctctcagaaagcaaatgaaatgctacagctatacccagaccttttataggtaatgaagcagttcaaaacttgaaagaaaacaaaacctgtcctcagaattctataaagtgtattaagaatgttccttaaaggtttaagaagcagtaagcagcatctgaagccacaatctattataaatactttatttcaactagaaggtacaatctctcaggggtttcatagtttaaaaagctacaatcacatcatgttgtaactacgtaaaaaacagagctgtaaatggaactgcttggctttgaccatacacatttctgcccagcccttacagaatctgcacaaagaaatatctccctttgctccagttaattgttcttgtatgtaagttgctttctattccagtatatccagagtggtgaaataacaaggccagccacgtagccaaaggtcgctccaagcgtacaggagatgggccatacctgaggagagaatgtatgagatcaaaaaagaacaaatgttttattattacttgagcacaagtgtaacctaaatatttctatattaaagcttaatgtgctttcttaaagaatgccaaaagtgtaataaggtcataactgcatttatcatgaacactaaaaatgtacacattttatttaatgtgcattaaactgtaacaaggcttctggcaattgtagatttagtttgacgctccccaaagtgcatgagacacatgctaaaattacaaattaaaattttgggtcagactttgccataatgatagactcaatttagctctctgaactagttggtaaattttgttttttaattcccactttggctgtgtacatcaaatgaaatgagaagtgtgtatgctgaccaaaccacaagaaactttctttaagttgtgttaaagaggaaagacctagaatccaagcgtgttacatgaaaattgtaacagagcagctgcttccacctttcagatatagatgttggaaccacagcagaagttatagagcgacaacttatatacacacctagaatgtaagttaaacaaaataccggcttccagagaccccttttctccagccatattacatcaggctagaagtaattaatgttgatttatttcatctacaagcagttggtccctaagtgaaaggctctgcttgnnnnnnnnnnnngaaataatagttggaggaattttcatgtcttctgtgagcatattagacac

SEQ ID NO: 126080 - DNA, 1188 bp, Homo Sapiens
  misc_feature (935)..(1039): n is a, c, g, or t
tctgattgaaaatgatttattaaagtccaattagtatgcttttcatttcaaataatccatatagcctccagaaaaatatgcacatgtgtaaaagtccacgttcatttctttcacttccaatataaagtattctgtattttgtataaagtatgtgcaaacacctttctgctaatcgggtccccacattcttttcactacaggtactttacaagtctgccctctgctcaaacactaaccgtgcactgacatcctccttcctagacagccattcatctcccggacttctttctctcagacatcctcctgacctcccctgacctgcttcaccactgtgttacctcactggttacttgttacagcaaactgatgcaactactagtctacctggacaacatattaaacaggtatcacctaatagggtggcagcctatcggggtgattcctggcgagtacacagtaaccaaccacatagtgacacactcaacccatttgctacagatggacccacactaattgatatgacaatcctttattcactcggcacatttggtttctttgcattttcttccattttacattgcaggtgtggctaccaagagctggataacgagtccctcaaacaaagtttggaattgcgagatatattggggtaccttgattcttgagacagttgaattcttctagttgatcttgttgtattaaaaagtcactctcaactgaagtgaccactgcatttcttttgtaaaaaggtcatttgactggcttttcctcacaactgccacccatgcagtacaaaagcaggaaatcccttttcatgaaaggtgtaagtacaagatgatatttcacatttttttaaaaaaagaatccttcatgggaatatatcctaataatcaattatatggagacagttttatgtacaccaaatttctgcaacnnnnnnnnnnnnnnnnnnnnnnnnnnnnnnnnnnnnnnnnnnnnnnnnnnnnnnnnnnnnnnnnnnnnnnnnnnnnnnnnnnnnnnnnnnnnnnnnnnnnnnnnnttatgtttttgtaaaatttttaatgccataagaaaatgtggcaattttgcaatgaaaaagatctacttataaaactgtttacagtatgactccaattatgtaaaaaaagtatacaatacacatataggcatacatgggggttgcttttt

SEQ ID NO: 126081 - DNA, 1467 bp, Homo Sapiens
  misc_feature (102)..(102): n is a, c, g, or t
  misc_feature (155)..(155): n is a, c, g, or t
  misc_feature (179)..(179): n is a, c, g, or t
  misc_feature (204)..(204): n is a, c, g, or t
  misc_feature (206)..(207): n is a, c, g, or t
  misc_feature (243)..(634): n is a, c, g, or t
  misc_feature (667)..(696): n is a, c, g, or t
  misc_feature (1430)..(1430): n is a, c, g, or t
cgctgacgagactaccgactggtactacgctgacttgaaagcccagctcccgaggagaagcgacagttcgtagcgcaggtcgaacagaggccacgaggactncaggggacgctgtatctatagtctgtcggttcgcactctgacttagctgattntgtgatctcgtcagggggcgagcntatgaaaaacgccagcaacgcgccntnntacgttcctggcctttgctgccctttgctcacatgnnnnnnnnnnnnnnnnnnnnnnnnnnnnnnnnnnnnnnnnnnnnnnnnnnnnnnnnnnnnnnnnnnnnnnnnnnnnnnnnnnnnnnnnnnnnnnnnnnnnnnnnnnnnnnnnnnnnnnnnnnnnnnnnnnnnnnnnnnnnnnnnnnnnnnnnnnnnnnnnnnnnnnnnnnnnnnnnnnnnnnnnnnnnnnnnnnnnnnnnnnnnnnnnnnnnnnnnnnnnnnnnnnnnnnnnnnnnnnnnnnnnnnnnnnnnnnnnnnnnnnnnnnnnnnnnnnnnnnnnnnnnnnnnnnnnnnnnnnnnnnnnnnnnnnnnnnnnnnnnnnnnnnnnnnnnnnnnnnnnnnnnnnnnnnnnnnnnnnnnnnnnnnnnnnnnnnnnnnnnnnnnnnnnnnnnaagaattcggcacgagggccgcggctgtaggcnnnnnnnnnnnnnnnnnnnnnnnnnnnnnnaaaaattttatttagaagcctacttgtagaagttagcataattttacagattattagaaaaattcttttctttctgcaaacagttataataggttaggaataatagattagaaatgtactacattacaaaacagtggcctataactatctgtacatttactgtgcaccttaaggaaaagaatttgacagtgtgctgtacttacactgcaggtaacatatttttattctatcacacaaaactgaccagtggtagtgcttgaatttatgaatggccattaaacagaacatttaaactcagatgtatatttagcatgctaaaaagtgaaaaaaatttcaactgaagttctgtggctcatcagttcaaatgtttcatggcattttttttctttaagtgaaaaattttgatactgtaaaacagttttacataataaatgcaaaaagataacattttctaaatttttagaaagaatattcacattcattttgtcatgggtttcacgtggctcttctaaatatattaatcatattaataagacactggtcctatacaatttcaacagtccatcttcaattaaaaactaacaaaaataaacagtatgtaaagagtaacaaaaagtaaattaaatatactaaactcacacaacaggtagaataaaatgaaaccaaattacataatggcaggttatacattttaaagaatctctttccacttagtcaaataagatagaattganatgtaaacttactgatttctgtgggattttcccactg

SEQ ID NO: 126082 - DNA, 582 bp, Homo Sapiens
  misc_feature (546)..(546): n is a, c, g, or t
  misc_feature (562)..(562): n is a, c, g, or t
aagtttgggagctctttttattacactgagaaatctcagaaacgtacaaagcccatgaaagtagatgcatttcagaaaataagataaaacatttgcatacatacatattaatgacattttagttttgaattaaaaatattcatgattttgcattgaagcatcctgcctgtgaattaagtacattctgaaatactgggaaaagatttcatatatcctgtacttgaacctaaattcctataaatggctgagttatattctctttctagagattaagttcacaatttgatttgtagactaatggttttattgattcaaagtatctttaaagagcagaaataggaaacaagcatacaccacacacacccctttagtttaagtgatatatcagatcaaagttgaattaatataataatctttagtgcttttaattgtattgtttgttttcagtagaccaatgaaaatacatagatccaactgcagaagaggttaggtaatgccggaatgattctctatcatatcggtgttttatttccaattatacagatnaataagtgatgttganatccatgctatttctatcct

SEQ ID NO: 126083 - DNA, 734 bp, Homo Sapiens
  misc_feature (113)..(122): n is a, c, g, or t
  misc_feature (688)..(688): n is a, c, g, or t
gaaggtcatcattcttgtttttaattggggaagagcataaagcaatcttgcttagattattacaaaacacaatccaacacaagatcaaatggtcagaaaagcttcaagcattnnnnnnnnnnttttaagtgggactttggcacattttcagcccagggcaaataaaagtgcaagtctgtggtttgtctgttttttaaataagattataacttacatttttcatcaaaactaacacaattaatgaagcttttaacctgtactaaggtattaaaccattatatttaaaccattaattaaaatgattaacacccacttagattcatgaaagctagctgtagaaatatttgaaggggctataacattgggggaaaatggcaggccaataatgtgctgtaactattgaaaacatttaattggctatatattgacattttattagctttgtctttgttttaaagattcctagcaattaatgagtttccagaattagataaaaatactgtttcttagcagagaattattaactacagatttttcagggtgcatccacttgccactgtatacagatgtactgtttttgtcatgactgatgtatgcctacagaacttatgttgctacaaatgtagcaggagttcagttagatcgggcagaaaaatcaaaggggcttcacattcattacctcaaccanaaaaaactaaggagttcactaaaacagtatgtccttgtgacaggaa

SEQ ID NO: 126084 - DNA, 1188 bp, Homo Sapiens
  misc_feature (930)..(931): n is a, c, g, or t
  misc_feature (943)..(943): n is a, c, g, or t
  misc_feature (997)..(997): n is a, c, g, or t
  misc_feature (1094)..(1094): n is a, c, g, or t
  misc_feature (1131)..(1131): n is a, c, g, or t
  misc_feature (1165)..(1165): n is a, c, g, or t
ctaagaattaaatgctccaggctagaagtctcacactgcacctctgcccccagcctgttggccagtacttgccacatcccctcccccaccacactgcaatgcatggagacaggagaattggatacattacaaatttctacccaatggcatttcataagagaaaaaaatgtaaatacaaaaatgttttaatagaatagaatatatacatttttggaataaagaacaatcctccaaaaaggacagctggtggtctttcaccaatgggcacatttctgtgacattttctctgtttttccattttatccttgacctatgaacattttatacagatggtccaaagaacaccatgtggggaccactgctctaatcaggtgatgaaaacggccccaagaacagagcacagtctctttagcaaagacccagcagggccagggtgaccatgttctcaccatcaacgtgcagacatccacctgcagcatcctcacatcccaacatcaaacagtggctctttatagcttgattctaatgccctttgatcttcataatcattgtaaagttctctggccccaagatctaacatcgccactctagctacatcctgcaactgttcatctctcctgcctcctcatccctctaaacttctcttcacaacctcatgtttccttcttgctttaccttcctgctcagcctggaccttacagtcaccttcttcttgtaatgtgctcctgaactcgttcttccctgccttcaaccacacccacctggaaaatctccataccccattgatgacttgcctcgcaactgcccaagggctgctgaatgatactggaaagaatcacaacatggatctggtagttccactaaataatctcaccatccaactctaggatagacttcacttctgttcagcaatatttttaagcatcacannataattccaaanccatattgctagaacaactgactttaaactcttacatatctcaaagccccccanaccccatcctagggatttcagagtccagagttgagttctctcaactcactttcatctcacccctagatcactggtacttgaccctcctcctctcctntcccatgttaataggagaagcatcttctcctttccangctactttctcactttgtgctcatttgctcgtgncgattcttggctcgagggcaatt

SEQ ID NO: 126085 - DNA, 716 bp, Homo Sapiens
  misc_feature (181)..(224): n is a, c, g, or t
  misc_feature (636)..(636): n is a, c, g, or t
  misc_feature (645)..(645): n is a, c, g, or t
  misc_feature (681)..(681): n is a, c, g, or t
agaaaatagtgtgatattttattattaaaatgctgctgaaaagtttatacatatgtgtctggccatatatatcttctgtcattacttaaggcaaaagaaagaacaaaacctcaaaataataacctaaggaaccattaaaccctgtgtgcctctgaagatcaaggaaaagcctaggaaaggnnnnnnnnnnnnnnnnnnnnnnnnnnnnnnnnnnnnnnnnnnnnctataaatagcaagtatatttttctcatggaactctatgaagattctataacttcttttcacgtagaaatgagatatcatgtaagatgtactaaatcacttttaatcataatcccctgtaaaagctaaagctattcatttaacaggaactcttcttttccttaagatgtcacaagactgtcatgttgtggcacatattgctagcaggagacaattggaaatatgaacagatacttgaattcatattatagacagacaaaaccagcatggatgccacacatcagttcctttgcagtttcatggagagcctatttgtggttgctcaggtggggtcatacattgcttgcagaaattgcctgattatagatctatgaaaaatgaattgggaatgaaatctttccaagacacctctngtgtagcanagaaatgttgcttcatgtgtgctaagttcagatcantatatttcacatatttatatatagagaattgcttt

SEQ ID NO: 126086 - DNA, 662 bp, Homo Sapiens
  misc_feature (233)..(296): n is a, c, g, or t
  misc_feature (461)..(526): n is a, c, g, or t
tcaggtttttgtttttacttttgtcccgccgagtactatgtattaccagccccccaccccacagatcagttttcctagtctttgggaaacgggttgtgttttttttcctttgccgtgttggatttccggtcccggctgacacctcccttcgtgtgtgcgcccctccccacccctgcctttgtttcggtgccctgtgtccgctctctcatgtggggatgtttgtgctgcagacnnnnnnnnnnnnnnnnnnnnnnnnnnnnnnnnnnnnnnnnnnnnnnnnnnnnnnnnnnnnnnnngatggaatgtagtgtttacattaaagccgccgttttcatgaccaatcctatgtcatttctactttgactaatacccaaaccctaaacctcttcacggtttcacttttaagacttaatctttgctgaagaagaccagtcacagccatttcaaataaagaggaggcnnnnnnnnnnnnnnnnnnnnnnnnnnnnnnnnnnnnnnnnnnnnnnnnnnnnnnnnnnnnnnnnnngcccacgggtctttgtaagcctttctattcccaatcggtgaggtttctgtgatatcttacacactgccagtctacttctctgactaatggaaaattcctgtgtagctcaataaaagagaatgtttgtctgtaaaaa

SEQ ID NO: 126087 - DNA, 1645 bp, Homo Sapiens
  misc_feature (71)..(176): n is a, c, g, or t
  misc_feature (209)..(211): n is a, c, g, or t
  misc_feature (213)..(213): n is a, c, g, or t
  misc_feature (260)..(260): n is a, c, g, or t
  misc_feature (268)..(294): n is a, c, g, or t
  misc_feature (296)..(296): n is a, c, g, or t
  misc_feature (298)..(309): n is a, c, g, or t
  misc_feature (312)..(314): n is a, c, g, or t
  misc_feature (316)..(321): n is a, c, g, or t
  misc_feature (323)..(323): n is a, c, g, or t
  misc_feature (325)..(329): n is a, c, g, or t
  misc_feature (1515)..(1549): n is a, c, g, or t
aaatccccaccaggccccctttttgttttcttatggcccccggggggttttctccttttgtgggaagaaannnnnnnnnnnnnnnnnnnnnnnnnnnnnnnnnnnnnnnnnnnnnnnnnnnnnnnnnnnnnnnnnnnnnnnnnnnnnnnnnnnnnnnnnnnnnnnnnnnnnnnnnncaagggggcccgaaggcggcccccacaaagagnnntnttttggggttgggggttggggttttttaccttgggtgggggttggtnttgtttgnnnnnnnnnnnnnnnnnnnnnnnnnnngntnnnnnnnnnnnnttnnntnnnnnntntnnnnntttaacatatcacaactaagcatttattatactgtttaagaagggaagcaattgcagtagtatttcagaagctttatctttctttaaatgcaatatatgctcataaactctaaacagtattttaaaatatacaatctctccaaaagaaaatattcaactaaagatagataacttttagtataagcaaaatgtcacaagattttaaaattaaagtcatcagatttttcacagcacattgtacagaaaatttgcaagcttcctgtacagagcagtataatctttactcttgagcaagtcgttcaataacacgccggtaatcttccactagttcctgaaaactctcttccagctgttcatgttgcatgcttatttctatttggttcatctggtttgtcagttcttctggtctgagacattttctcatcttagcaagatctctctgctttttcttatatgggctaattagtcttcttttaatatccagtctgtagcttctgtattgttcggcatcactcatgtcagttaccagtagtcgaagaatttcataaacccttctagcgtgttgcttatttattttgaacttctgttgtgcctctatcgccatatcttcattgaatccttgcattaatttttcccgggaaaaacagggcaaatcttgacaaagcttcacaagcacaaagtctcgtaatttcacatagcttttggatggatcttccgctgtaatatcaagaactgtaggaaattcagtgtagtatctatgaactgtttcaagaagttgagcaccatggccttgaccttgaaatggagtcaaaatcagcatctgacttacacgtggccgggttttgtctgggtacacatagtaattatagactgtcatgtagcctacggtcgcaaagagcgtagctccatccttattatacttctcaaatagctagaaaggtagtgccatcgtttcatcagtccagcgtcaataaagcgtaggcaggtgttcagagtagaagccagcagtcggagagaagggttgctgaaggcctgttgcagtgagtagttgctcggagaaggcgcgtcgtagcagtgtgcagtgtcaggccgttagtatatcgtgaaagggtaaagtgtttctgcctcgctgttgcccggccgtaatggccgaattcccgggcatatgtccggtaccgtcgactgnnnnnnnnnnnnnnnnnnnnnnnnnnnnnnnnnnncggccgcttcctcgctcactactcgctgcgctcgtccgtttcgataacaacggcgaatttggtcgtctcctatttatgggtagtaatacgtgtggt

SEQ ID NO: 126088 - DNA, 2423 bp, Homo Sapiens
  misc_feature (617)..(631): n is a, c, g, or t
tttttttcaatgtttcaccactttaatagaatattctaactattctgtacaaattgaaaacactgtattcagttacaaatgtgttctaaggttaggccgagcactctccacaggcctggtcagtgcggacacggccatccccggctgccggagagcgccgtcacccacttgaaaaccccacccaccagccgccaagcggtcacaccaaacccaggaccttcagacaggatgaatggtggggccccgcaatggggctactgagaaagcaggacttgacgctcatacgctccactgaaacgcaggacttcccagcccagtccctcagtggagaagactgccgaagcccggctccggcagcagggtggcgcctgcgtcatgaggacgggctcgcatcttcagccctggtggcagggagcggcgtttcttccgcacaggccttgcgcctgctaggaagtggcacatcttcctgctcagggcaccaaggtggttcagaaacgttaaggacgagccacagcgaaaagccgcagtcctcacaggcaagaagggataaataaatatgaggtgacccgcagcagctctcacctgggctggtgtgtcacaaccctgacccacccctnnnnnnnnnnnnnnntcaagaagcaacatcctaaggagaacagggccctactctacacagccctttttgagatgatcggcatacagcaggtgatgcaggctgcacactcagcagattcagcggctggaaacagcaagtgggtttcttcggatgaaagggaagaattcagtccaactgcaggaggggtgggagaggttccagatcctgggaaccacatcaccagacctcggccctttttgccaagtgacccccaccccaccctgatgtggtctacagggccctcccacagggaaaggcccagggaagtccagagctacaggcaccaaggctgcagagggtgctggacgaaacctcctatttctgaaatgcatttcagttgccactgtacaagttaagcaaaataataaggaaaaaggaaaagtgaaagtgaaaatcatgcacttgaaaacgagttagatggagtaagctctgtccacgggattgtgctgcggcaaggaccgaggccccgcccacaggcctggagtcccgacagccggtctgccaggcacccgcctccgcttcctactgctgcttgcattccgccggctggctgggttccttcttggggttaatttccgcatcatcctcgtcttctccctcctcgtcaccttctaattcctcctcttctccttcttcaccttcttcaaaattgtcatcatcttctatggcctccccagtgaagtacagcacagcccgcgggactatccgctcacggaaaaagtgtccaatttcaaaatcagaggctaatgtgaattcagaatcttcatccagtgattctccatccccggatgctttcaatggattgaagaagttgaaaaaggactcattgggtacttgtttcgtaattgttctaacagtgcctcgacccttatgcttctgctttttcttgatggttttgacagtaacattctttcctttcttccagtcaatagtacacccgtcacagtccacaatctcaggaccttcaaaggaaaagggatcagccttatctggttctgatttcatcttgtaggtttttgtcaggactgagttggtaaagtagtcgttgggttcaaagtggaactctaacacaaaagacataggctgtccagggtcagaaaatttcactttaatatcctgcaggtgtttcaagattggttcatcatattcctggactaattcactcagcatgtccacatttctgaagatggtaaaccagaactctggaattcctttgggatctggctcttcagccgttgccgctgctttttctgtgacgactactttacttttcatgtctccagccaatttctcttcctcttcattttcactgtgccattccgattccgcatctgttggttcaacatcgccggtgataaattctcttctcttgtcaaagagaggctggtatagcgctgcatactttctttccaagtcatgtacctcttcatagaacttggcttctatgtgagcacatctcacctgaagttgtttcaatgcattaattcttctttttactgctttaggtaaagtttcgatgtagctggaaggggtgtgagggacattgtcaagtcgctcctgtaaagctgccagaactcgaggattctgcatcacctgatctgtgagcttttctgtgttacttgcatttttagcagcttccacggaatctgaaggaaccccatctgaaaaactgtgatctgccatctgaatgtttttatccccttaaaaacgggaagcctgaacgctccggcgcgcccggccgtgtaaccgccacagcccccgcaaacgg

SEQ ID NO: 126089 - DNA, 971 bp, Homo Sapiens
cccttatgcttctgctttttcttgatggttttgacagtaacattctttcctttcttccagtcaatagtacacccgtcacagtccacaatctcaggaccttcaaaggaaaagggatcagccttatctggttctgatttcatcttgtaggtttttgtcaggactgagttggtaaagtagtcgttgggttcaaagtggaactctaacacaaaagacataggctgtccagggtcagaaaatttcactttaatatcctgcaggtgtttcaagattggttcatcatattcctggactaattcactcagcatgtccacatttctgaagatggtaaaccagaactctggaattcctttgggatctggctcttcagccgttgccgctgctttttctgtgacgactactttacttttcatgtctccagccaatttctcttcctcttcattttcactgtgccattccgattccgcatctgttggttcaacatcgccggtgataaattctcttctcttgtcaaagagaggctggtatagcgctgcatactttctttccaagtcatgtacctcttcatagaacttggcttctatgtgagcacatctcacctgaagttgtttcaatgcattaattcttctttttactgctttaggtaaagtttcgatgtagctggaaggggtgtgagggacattgtcaagtcgctcctgtaaagctgccagaactcgaggattctgcatcacctgatctgtgagcttttctgtgttacttgcatttttagcagcttccacggaatctgaaggaaccccatctgaaaaactgtgatctgccatctgaatgtttttatcccctcacgcctcctgcggcagtggcggcgaccctagcttcgctcgctttggggctgcgccgccgtggcctccaacaacgccggctcccattggccgaggctcctagctcctctctccgcgagcaagacaggctgcccc

SEQ ID NO: 126090 - DNA, 1012 bp, Homo Sapiens
acaaacgtacatacaaagtttggatttttattgaaatcttgttaggtatcaaacaaattctgctttcttcagataaaaatattctctcagatgtctccagataactgctaagtctaaattggtccttcaatgtcttatttttattgtcctcgtgaaatgttcatatacagttaagatgttcccaaaaggatttttatcgtgtaaaggagcgtacatgacgacctctaccactgcctccactaacaaactttcctcttgagcctccactgccgctatttgcactagcccaggaaggtccaagtcccccacgacctctagaagcacggtcccgaggacttgggcggtaacctgtagaactaaggggtcgtaatggtggaagagggcctctgttaaaattgctctggcctccacgactttcattgtaatttcctcgaggagtattctgagcactccaactggagcctcttgttccttcccgacgactgtagtttccttttgaagcaggtggtgtgaaaaacctattctgactgtggaaagcaccccgtcctcctctattgcctgaaaacccaccacgggaagaaatcttctgtgatactttgagtggccgttttggtggaggtattccatcttgaggaaccacttctttactttcagcagcaacaaagtcatccacatgcatagatggtggtctacttgtgttctgttttctctgacgaaaatatcatgaggtcgtataccctgtccaaatcctcccctgccccttcctcttggtggtggcacaacatgagctcttttggcaggttcaatgtattcagattttccacttgacgttataaaggtctcatgcttgtgcttcccaagtttgaatcccttagaagtcttggttctttctggagatgatggttctgacaaaatgagcgctctaattctgagtgcaattcaagtcactacagctttttcagagagtttcattaagtcaacttttaccaattcagatctgtatccatctctt

SEQ ID NO: 126091 - DNA, 1339 bp, Homo Sapiens
  misc_feature (525)..(597): n is a, c, g, or t
  misc_feature (835)..(835): n is a, c, g, or t
cagggtgatgtatgtacatgtgtgcctgccagacacgacaaaatctaacagtgttgtctccagttacatcgagtcagatgccgggagagaggggtgtgggttgctggattacaagggcaggctgccttcttataaaattcttctgcatgaatttttccaatgagcactgattcattagaagagagttatttgtttttgaaaatggagtgagactgatttcatggcagatgtccttggggcttctggatgtaaacacccattccatcaaaatcctgcatttggctgaaaccttccttgtccgttgcttatgttgatgaaggttggaaggggtctggaattcctctggaggtgggactactttgaggctgttggggtttggtgagacatagtattgtggcctctctcttatgttgtgtttcaaagctgggtttggcttcttagaagccgtgagacagcaggctggactctcctaaggtgtcaatgtcatggaagttaataacaggtggggtgtggggacgaggctgnnnnnnnnnnnnnnnnnnnnnnnnnnnnnnnnnnnnnnnnnnnnnnnnnnnnnnnnnnnnnnnnnnnnnnnnnacagcagccgtcaagcaggcagcagccctgggcttgtgcacacggctggatgtcagatgcgtccgtccaggcactcctggctgcagtcatggtctcagctgtggagatgcccttattctcctgggtgctgccatgtcgagggccctacagcttgctttcaaatggttcagcagaaagtgtctttaacacctgtggagttagtgcgtgcacattgctggctcagcgtaacccatcacgngaccggaggagaggagagcggggaagaggagagcagcttcaggccgtggtgtctcccacgtctgtgttcttatttgcagctcagggtttgcattcccaggtagaacaggtgtcgtacacttggacctgatgtttctgagttgccgggtgacacaggatctgtctttcttcaagaagtcagggttgcttttagatttcattatatcatatccggacaccgtggcactgtcaggggacttctcccccagtgcttccgttgcagccttgagctgctccttcaacctgctgatgtcacagtcagccttagccttcgcgatgctgagctctgtgtagatgtctttgtacttgtcacttgcgtacttcttgtcccgcagtgccgtctgcagctcatccttgagggagctaatctcctgtttcaggtactgtatttccgattcctttacccgcaataagacctctagttcataggcatccttgccctgtgcaaggggtgaccccagtggcc

SEQ ID NO: 126092 - DNA, 1245 bp, Homo Sapiens
  misc_feature (39)..(39): n is a, c, g, or t
  misc_feature (200)..(200): n is a, c, g, or t
  misc_feature (211)..(211): n is a, c, g, or t
  misc_feature (245)..(245): n is a, c, g, or t
  misc_feature (261)..(261): n is a, c, g, or t
  misc_feature (272)..(272): n is a, c, g, or t
  misc_feature (481)..(500): n is a, c, g, or t
attgcgtacatcaccggacgttactgtcgatatagatcnttagattgcctgagccagatcgcacagcaggatgtcttcagtgatgcgacgcatgcggacagatacgcagtacagtcaagacatttaacgagtcgcatgcgaaggtaagctgatgtgactcagcagttgaaggacagctcaagctgcaacggaagcactgngggagaagtcncctgacagtgccacggtgtccggatatgatatantgaaatctaaaagcanccctgacttcntgaagaaagacagatcctgttcacccggcaactcagaaacatcaggtccaggagtctgaaggaagccctgacggtgcaagaacggttgaagctctttgaatccagggacttgaagaaagactaggtgtgtcccatccaagttgagcacgcgccttccccagcttgcagcagcacaccccaagcgctgcttttcacctgtacctttgttnnnnnnnnnnnnnnnnnnnngctgttgttgtcatcgttaactgtgggcatggaatgcgtgaggctggcttctgggttgtccacaccactctctgctgtgttgacttcctgttgtcttcatcaaagcttttttccgtggtattctaaaattaggccagcagtgggggctgggagggcatctgtgttagtcctttcctggctgtgacccgccacactcactgtcagtattaaggcccagcagcctgttgataagctaccctgtctcaccatgtgctggtgtggaaacggggcccagccagcacgcctcaaggtagatggaatccccactggtcagagaaaaagctatgcggacactccagcttggcctgggtcacagcactgactcctcacccgctagtctggctgttaagaggagaaagtgcactgccttccagcccaggaggaggacagcattttgtatttgttccactgatgcagcttagaaccacacccctgagagtcgtggcaaacctttcacaacctggaaaatgttgaaagcaaccattcctatttttgtttgttttttattaaatcttgcactagcggaagcccaaagtgagaagaaaaagccttgtcggccgccctcggcccctcaagaaagctttctaaaaccatttcgtttgggcgccgcgggcccccgtaggtaaggtgaacatgggccataagctggtttcccaaggaaaaaccctggcccatgacctaggggcgttggcattcctcccccaat

SEQ ID NO: 126093 - DNA, 1905 bp, Homo Sapiens
gcactgtcaggggacttctcccccagtgcttccgttgcagccttgagctgctccttcaacctgctgatgtcacagtcagccttagccttcgcgatgctgagctctgtgtagatgtctttgtacttgtcacttgcgtacttcttgtcccgcagtgccgtctgcagctcatccttgagggagctaatctcctgtttcaggtactgtatttccgattcctttacccgcaataagacaggtactggcgccgcagggcctcaacatccgagttgacgctgctgatctgggaccgctggctcttctccagctcccgctccatttcctcccggtgggcgttcttcatggcttcgatggctgagatggtggccgctgtctcctcggctaggaggcggtctttctcttctcgaagtttctctagctcccgctggtgctgcctctggagatcttcaatcttcttctggtgcgtttcttccattgctgcaaaccctcgctcgcacgtggcctgcaagcacgtagccctcacgggcgctctgctcccggcccagggccaccctcagctggtcctgcaggagccggttctgctccagaaggtctgaggcctccttctggctctgctccagctccttctcgagcagagaggtcagctcgtgtgtggagagccggtcacccccatcttcagaagacaggtggacgggggcgatgggcacctggcttctctttcccggagaggtgtggtttcccacctgatgcccaccgctgctcattctcccacgtggacgttatgcgttttgaggtcgctcataggcagccctgggctccggtccaccttccatgcggcagggctgcatcctcagtgcctggcccgtctgtggcgtcgagcatcccgaagcgcttgcggcgctcctcccgcctccgtgcacgctcccgctccagctccccaggctccgcctcagggcgcaggggctcgtgggtgtcagcaggccccacgccgcccacccgctcctgagccagggcctgctggatgggacggaactcagcccagtcaaaggtcttggagcggccctctcgcctccgctcccgtgcgcggctcctcttctgctcagggtccggctcccccagctctgcctcttgcttctcagtaggcctcgggcaggtctcaaaagagcagctgctcttgtttttttcctctggcaacgagctggtcacatccggggcagtggtcgggtgcacgtgcttcatgatggtctggatccagttccgccgaatcccagatgtcatggccgacagggtaaactcgccctcctttgtatgtatctggaagccatagtttctctgaactggatactctgtgacatcgtaacatgcggacaagtcaatttctccatccaagtcggctgcctcctcagccactgaatccctgtagtatctcaggctttgatcggcgaggacaaaccagtgtttcttccactggccgtcctcatactgcttagtcagccagcctttcttgaaattcagcaggtcgggcgtcacggagggctccgtggacctcctgtccagtgacttggctcttcggtgtggagacaggggggaagccgaggcgtctgggagaggagctgggggggcttcattggtgaagtcccgcttcctagggaacgccctcttctcgctgcggccctggcgtgtgtcgctggatggtgagggccccactgcattggtctccatgtgctctgccttctcaatgtccaaggcctcaaacttttcaatcacctgggacctcctgtggttgggggtgctggggctgggaggggagagcggcggggggcagctgctgttcttcagccttcaagtcctgtttggtcttctcggacgcgtgggtcgacgatatcccgggaattccggaccggtcca

SEQ ID NO: 126094 - DNA, 1428 bp, Homo Sapiens
  misc_feature (567)..(586): n is a, c, g, or t
ggggaaggattttattaaaaaacaacccaaaattaggaatggttgctttcaaccattttccaggttgtgaaaggtttgcccacgactctcaggggtgtgggttctaagctgcatcagtggaacaaatacaaaaatgctgtcctcctcctgggctggaagggcagtgcactttctcctcttaacagccagactagcgggtgaggagtcagtgctgtgacccaggccaagctggagtgtccgcatagctttttctctgaccagtggggattccatctaccttgaggcgtgctggctgggccccgtttccacaccagcacatggtgagacagggtagcttatcaacaggctgctgggccttaatactgacagtgagtgtggcgggtcacagccaggaaaggactaacacagatgccctcccagcccccactgctggcctaattttagaataccacggaaaaaagctttgatgaagacaacaggaagtcaacacagcagagagtggtgtggacaacccagaagccagcctcacgcattccatgcccacagttaacgatgacaacaacagcnnnnnnnnnnnnnnnnnnnnaacaaaggtacaggtgaaaagcagcgcttggggtgtgctgctgcaagctggggaaggcgcgtgctcaacttggatgggacacacctagtctttcttcaagtccctggattcaaagagcttcaaccgttcttgcaccgtcaggccttccttcagactctcctgcatgggccgggaagcgggtgcatttcaggtatcccacgagacctgctcaattacgggggttgggaccggagttttatgagttgccggggggacacaaggatctgtctttcttcaagaagtcaggggttgcttttggatttcagtatatcatatccggacaccgtggcactgtcaggggacttctcccccagtgcttccgttgcagccttgagctgctccttcaacctgctgatgtcacagtcagccttagccttcgcgatgctgagctctgtgtagatgtctttgtacttgtcacttgcgtacttcttgtcccgcagtgccgtctgcagctcatccttgagggagctaatctcctgtttcaggtactgtatttccgattcctttacccgcaataagacctctagttcataggcatccttgccctgtgcaaggggtgacccagtggcctccccaccgccgtccccagtcagcagcgtccgcaaccgtgtgatctctgcagccaggcggttgttcagctcctggttgtgggcattgagctcctggttctcacgctggcactgccgcagggcctgccgctcggcctccagcgcctgggccagatgggcattctcccaggcacttctgcgagtactgctgatctgggcctcgtgccgaaatcgccacccaggcctcgcgtcttt

SEQ ID NO: 126095 - DNA, 991 bp, Homo Sapiens
ttttccttttctttctccttaaaactaaaccctttagtgacatttggcaatgagtggagagctgagctgatttctttcctgaaaatatcaatattctagtttctaaccagcagaccaacactgttcacattagctgaggacactgacaggaaatcacaggccctactgatctggcacccgtagacttggtgctggggtcccgtccacagatcaccctgactcagaaccggaaacacactgggccggacgctgtgctccactccttttgcctatgcacggttctgtcctggacgggtgcacatagcaaacaattgtgccattgttcagtttttagaaaaggataattttctaccaaacaaaagaagaaagaaaatccccctttagtttatgtaatttgttagtttatggagttccatgcgctcaaaagcttgtgatgctcgaacccggaatggtaactggtacaacattttctttctgtttttaaatttgctaggggaaggacggttaacattttaacagaaaaataccgcaagttaatgcatgtgaaaaactcagaaagtcaaaggaaaacaaacacaagaacaacacttaaaacgtcccataaaccatcgcaatattaaaacaccacagaatggccgacgggggctcacggtgtgctctgaatgagggtgggtggtgctgaggggtgctgtcctccactggcaggcggctcaccaccctgtacaaggaagattttgcatactttttagagttctgttccaagggtaagtgcttcacccagggtaaggggccattaacagtctctgctgggttaggaaaatggcgtgggattcacaaaggtgttaagctgttaacggtatcactgtccacttgctgagagcagatttggcaaagggttttctctgtaggtcttgtgtcagtttgagggtctgctttgcccacttccccttcctcagtgatccttcagcctggcacccagctctgagatgag

SEQ ID NO: 126096 - DNA, 746 bp, Homo Sapiens
ccgtgggatgtattttttaatgagaacacattgttatactctgagtacgtggcattcttgcttgatagaaacatttacaaggacacatacacatttatatccaaacatcaaatgaagtagatattttaaatgaccagttcgcacaagaaataaaatatattatacaaaacatgggttatatccacagtcattagttctccttttctacacaaaacagcaataaattaaatcacattatatgcaaatagttagttgtacattagaacaataaacagtatgtaacgtgtgcagcttttacttttacttttctaccagactcatgatagatttgtactgtttggtagtcctgtatttaaatcaacaatgaataatgtgacccagaagacaggggtcacagaattggtctgtcacaaggtctatcccatgtcctcttggtttcaattatccaccatgcacagggaacaaagctcagattcccaggacccaacacaaaggtctgcaacgaacaaactcacagcaactccatgctgttcaggggctacttcattgttgtcttataagatgttgaagattttcagatcttggcaataaataatgaagaggccaccctgtttccaaatctgaatttgcctcttttttagccatctctgtccaactatcatgcaccgtgacagctttgttctcctagcaaataagaaatattttggtagcctatgttgtgatttacacttggtaagtaggccctt

SEQ ID NO: 126097 - DNA, 745 bp, Homo Sapiens
tttaatgggagccaaaatgtttagagaaagcttctgggtgtgcctttcagattttgaacaagctgccttgtctaaacatcaatttctactactctgtagccttaaaatgtgctctatttagatccacaggacccttctactggtgatatgaaaaacagaatacagaaattaagagaatcactttttactcaacaattaggggaagtaagtcaaagccctcctcttgcgacagcagatttcctgcgggccacctgttcagcgccttgataggggatagggtgatcaaagcactcacgaaaacagttcattcaggtatggaatgtcagaattcctttggccattttctcctgactctttgctaggtcccctggtttccttggcagcacttcttggatggaggacagggtccaccaacttctcaagacattgagtcttgagacacaagaaaccacagacttcaaccctgaagggcctaactctgtccatatgtctgtcctttgaatacttcctgtccctgcctaaaaggaaacccaaattgtttctaggatactggtgaagttgtagtgaggggcttaatgcagttaataatctaaaagccagcagaaaaccaaaatgcctcagccttaaatggttgtttcttttttattttccataatgaatagactcacaggcattttacccccttattagtaaaattgtgaagagaaagaagatgacacacttttggacgctgtattttatgtat

SEQ ID NO: 126098 - DNA, 1943 bp, Homo Sapiens
gagaagggcagtaaatacatttgttcaaagttataaaacaacggcattccgttctaactgggactatttacagtgggagatggtacatactgttgaggctgtagtgggaggaagaggtgggccaccgctggacactcttgggccgaggggcaagggtggacatagcattggcatggcagcaagagacttggctgagggcaggggtggaaggatgtctactgctgaagaccaaatcccttgccactctgtcggttgctactaagtcaaacgcaaacagaaacaggaaaagacagcaggagcacagaggccagcatctccctttccttatgccatggagccaggtgccaggcgtgggctggtccatctccctcctcagcctctgccaaagggctgctccagtgctcccctcagtggaactcctcagccaggcgctctgaaaccaaccacagtccactgaagttgaccaccctaccgagacagaccaaggctcacaggtgaaaacccctttcaacaaaattccttccaggtaggaatcagaatatgatgcgtttcccatctgccgggttctgctccatgggacagtagggacacttcagctttcctccattaatgagcttattgagtgcatctcgggagataacatggccacagatgagcttgatgggagggttggaatctgacgtctgctggcggaggatggggcaagcgaacacggagtggtaccagcacttcatgcctagttcaatctcaatcggtaactcgtccttgtgattccagaccccagtgcactgccgctgctcaatcacagccttgatgttcatcaacacaggcagcgccacacagccagaggcaaagctgacgctaaggggggactccacagaaagccccagcagggaacaggcgtcccgggtaaaggtctcacagatctctgcccagtggctgctgtccagcaggtggcagtagggtgacttctccaagcccagccgcaggtacaccaggttgcccatcatcacctggatctcccgctggtgcagccgagcaaagggctggaagtgccgagcatagctgagggcctccagctgcttcgcggggcctcctgccaagaggcggatgaagtgcagtcggtgcagcttgaactccagggagctgttgagttccagcaggcgctgcctgtgggagacggcccattccaacgcaggacccaggtcttgttcgtgcagggcttccaggattcgattcaactctaggaaaggctgcttgaaatccaagtccacattcagcgttgattcctggcacagctcctcggccacgctgagcatgccctgctgatacaggtgttccacgatggccatctgcaggatctgctgctgctgttcccgcgcgtcccacaccgcatctgacacaacaccacagatctcagagtcgaagttcctgtcaatggctttgcccactcgggatacactgctgtgaatgtccttatggtccgaagccagtttctgcaccgtatctttgatcttccggcagcactgtgacatcaccagagagagggtggctgagagaggggtcccctggagggctgcgctggccagctcagcccgcagctggcccacgtagtgcagcagctcctccaggctccgctcacagtgctgcccgtaggtcaggaacttctgcaggaccttgtccagctctctctccacgcacgcacactgctccatggtggcctcagcctgctcacttccgacccagcgcggtcgcacgaggactggacgtttgagtccgagcaactccccccggctgaggcggctcttcgggggctgggccgggacctatgagtctgggactccagctcccggcccagggccgacaactcgccccgcagccccggccccggcttcccctcgtgccggaattcaccacccacgcctcgtacctagcctatattg

SEQ ID NO: 126099 - DNA, 502 bp, Homo Sapiens
tttttttgtgagaatagcttttaatttaaaacaattgaagcaataaatcatccatctctctttccatctcaggcaaataatctcccaaaacatttgatacagtttaacaacaactgtgactagtgcaaaataaaataaatacaaactctttcaggagccaacatcaaaacctgctggacaggtgggcacaggaacagactcagcctctgccaaggctgagacaagcggcacatcaagagtggcaggatttgtgcagtgtttcaacacacccagctttgaacagactcaacaatacctggggaggggaaaccacaagaggattttgcctacaatgaaacaaatatgcccaacaccctcaagtggctaatatccttggtacctagaagatgctagaagagcaaaggtagcagctcccaggcaaagctgaagacaggcagtttggggctcatttgcttttgtcttttaattgggatcatacatatatatattggtttttcggcag

SEQ ID NO: 126100 - DNA, 702 bp, Homo Sapiens
  misc_feature (679)..(680): n is a, c, g, or t
ttttttttaataacgaaaaagctttactagtgttttaaccgtgtacaaaacactgtagcaataagagaaaggcccgtgctatctgtgtttaaacaaaatgcagtggctgcggggcttccaggcagggctggggaacaggccgggcgcccgccttgggcgcatctccgcctcttaggggtaagaggctcagagcctaccccttaggcctagttggatgcgggtcggtcctgcccaaggccccagtgaggggagccgaggctaggaaggggcaagttttatgtgtttgggagggggtgtctcttcccggcctctgcgtcttccccctggagcgtcagtatggtcaggctctggtgacccagccgctttgcctcccgactttgggaagagtagcaaggagaggtcctggcaagtacaccctgggtgacaaacggctatgagagttcccaggtgatttctcgagcagcttcagtttaccggagcccagccaggagagagaattttagcacaggaaacgcaatcgcgtgtccaagctcctagaatacccaggactgagaaccaaagcaacagacttttcgcagggagccacactgcctcgccacctcttctttaacccctcacttggcagctccaggagttggctgctgaagacagagtacaggagggcatttcgttgacgtannaaagtacaagcccttccggggc

SEQ ID NO: 126101 - DNA, 813 bp, Homo Sapiens
  misc_feature (813)..(813): n is a, c, g, or t
ttttaggatctgtttctggaaagctttttattgttgctccaagtttaagaattttcactgatggcagaaaaccaacacttttagacaatctcccgcatagccctgcccagcttctgaatcttggtcttgacagacatgtcaacatatttctcgccaatgcgcacaatcattccacccaagattgacggatcagtcttagcctccaatttcaatacttggccttgacttaggaagctcttgaggacagtttttaattcagagagtgtggcttcttctaaaggagatgcagaggtcactgtgcaaggtacctctccgcgatggacactcatcatggtagaaaaggcagaaacgactccttgggtattgcttaatcgaccattttcagcaagcaaattgatcaggttggtagtgaggggagagaacctctcttttgctgtgatgtcatttaggcttttcactttaatggaacgcttcacatagggattcaaaacagaagcagccactttgggttccttcaggatttgtgctactctcaacaactccttttctacttgctccagcttattctgttttgatgcagcagaataaagagctgtggcatagcgaccttcaataccgtatacctgaacaggaggcctcacaagcttggcaaatggtctgaccacagaggtactgaagcatcgcacctgccgggagagcccggacactgctggggcagccatcttctcccgggcggctgtaggtcaaacccgagtgggaagccccggccgtaatggccgaattcccgggcatatgtccggtaccgtcgactgn

SEQ ID NO: 126102 - DNA, 1306 bp, Homo Sapiens
  misc_feature (225)..(255): n is a, c, g, or t
  misc_feature (335)..(398): n is a, c, g, or t
  misc_feature (401)..(540): n is a, c, g, or t
ctctcccccctctttttctcccactggggagcaaaacaaggaggggcggcaaagaattatccaaatgtggggggcatcccccggggggcgcgcctttccaaggtttaaacacaacacaaatatggccgaaggggatctcccttggtggggggggtgtttgaaaaaaagggagtttgcccccccgcccgcggttgttttttttgtcggggggcaggggccatcaannnnnnnnnnnnnnnnnnnnnnnnnnnnnnncaaacagatatatattcccttttattcctctcccatggggcacgccggcgcccccacaaaaacttttttgataacctttnnnnnnnnnnnnnnnnnnnnnnnnnnnnnnnnnnnnnnnnnnnnnnnnnnnnnnnnnnnnnnnnccnnnnnnnnnnnnnnnnnnnnnnnnnnnnnnnnnnnnnnnnnnnnnnnnnnnnnnnnnnnnnnnnnnnnnnnnnnnnnnnnnnnnnnnnnnnnnnnnnnnnnnnnnnnnnnnnnnnnnnnnnnnnnnnnnnnnnnnnnnnnttatgatctgttctggaagctttttattgttggctccaagtttaagaattttcactgatggcagaaaaccaacacttttagacaatctcccgcatagccctgcccagcttctgaatcttggtcttgacagacatgtcaacatatttctcgccaatgcgcacaatcattccacccaagattgacggatcagtcttagcctccaatttcaatacttggccttgacttaggaagctcttgaggacagtttttaattcagagagtgtggcttcttctaaaggagatgcagaggtcactgtgcaaggtacctctccgcgatggacactcatcatggtagaaaaggcagaaacgactccttgggtattgcttaatcgaccattttcagcaagcaaattgatcaggttggtagtgaggggagagaacctctcttttgctgtgatgtcatttaggcttttcactttaatggaacgcttcacatagggattcaaaacagaagcagccactttgggttccttcaggatttgtgctactctcaacaactccttttctacttgctccagcttattctgttttgatgcagcagaataaagagctgtggcatagcgaccttcaataccgtatacctgaacaggaggcctcacaagcttggcaaatggtctgaccacagaggtactgaagcatcgcacctgccgggagagcccggacactgctgggcagccatcttctccctcgtgccgaattcaccacccagcctcgtacctagccttta

SEQ ID NO: 126103 - DNA, 677 bp, Homo Sapiens
ttttttgtgtacaaaatacttatgtatttatgaatccatgaccaaattaaatatgaaaccttatataaaaagaggtgtggtttttgtctcccgccccccaacctcccctcctcctgtgaatcagctctgagtgacaggaaaccagggctgtgctcctgctgggactccttccttcctccctcccctctgttttcaggcttggcctcctgggggtgtttcctgaatccgactccccagagtttaaagagctaggttcctggggactgggattcatacctccttcccctctctctcctgcctgctcctccctctggggacagggacaccaatgttggcctggctcacccacagcctcccaggagagttctctgggctgccgggttgcatctggttccgacagctctcggggaatgggcggtgggtccctgaagttggggggccggccctgtttctcagggaatcccgtggtcactctcctatggcttcctacagccctgggtcgaccttcgctttctctgccccggccttccctgcatccccaccagggtacccaggttgctcagcgcttcaggcacctaggagacctatttcccgttccccttgccctggaggaccgctctccctttcgtccacagcttccgggagggccaggtgtgcccccacgctgtccatcttcc

SEQ ID NO: 126104 - DNA, 1448 bp, Homo Sapiens
ttgcatttaaaaatatattcatttattcatatatatattcactttacaatactgcattttaacatacataaaaatctaaagcgtttttaagaatttttcaaagtcctgtactgatgctttggcaatctcttcacaaaatatttcatcaggaatagatactagtttgtccaaagagatgtagttaggttttgctggatcatactgtgctcttcctaaataggtaagaaacaagtgtctttctttgaccttaaacagccttgtattaaatacctgtgggaacttgacaatgatgtggtggggaatgctcatcacattgtgcacaaaatcaaacgtctcggtaagtttcattttatttgcagttaacatctttgggattctggtgatcatatgttgaatttcgttatgtttaaaaccaagttcaagacgataaaccttcatattttctttcacgggttccagacttccagttagcagccttgggagacgaactaccagatctctagtcttcttcacactaagttcaagttctttctgaaaaaatcccaatctgttatccagtctttccactgaaaagttcagcaaaaatggtgcttttctgaccatctgtgcaacatctgctttactgaaattttttgaatgcagataagccaccctggtcttcagattttcaaggtcttcagagaaaattgcatgattttttgtcaggaatgctcccagttggttatcctctatacccacatctttaagaaacagaagcatttgcttaatgtctttttcaaaatccagtctcagaaggaggtttgctgcttctggatgtttttctatcttggacaaatccacgcctagaagaaccaacttctgcagagtctcagaatgatccacatagtctcgaagtgtgaatgaagctggtggcaatggagggtctgcaataatctgaatagcctcttcctctgaaattggctgcattggagacaatggaggcaattcatccagttcttctagaaacagctcagaatcaaagctggatatattttgtgtcttctgtgactgttcattcatggaaggaagcagactgctttgggcagaattattctcctgactacttgagctagtagactgggaactattccataaggaggaagtcctgtaagtcttaaatccccactggagaaagcaattgtcagaggatatctgaggctgagcagaaaagccatgtaacagtgttcttgctggtctagtaaaacgttttgtgagttgtgcagcattaatgaggctcctcaacttaactgagttaaaccatctgggtatctgttgggctgacaaagccatttttcttagtctgtggcgaggcctgcttcccgtagcgggtgaccccgggaccgaccaactcgctgggccgcacgtcccgtcccgccgcgccgcacgccggctcctcagccggccctccc

SEQ ID NO: 126105 - DNA, 1640 bp, Homo Sapiens
ctgctaaaacttggaatttaatgaattttactcactacagttatactcattttacattaaagtaaaaaagaaaatagccaggagagtaattcatctccagaaagcagtttaaagttattgtttttattatttttatttgctaccaatatttttattgtaagaaatacaaaaggtattacaaatatacaaactatttgctctttttgcctcattcaatttagctttcacataagtgaacacattggacagtgatatttcaacaccaattttgaaaaaaacaatgaacttcatcatctgacaataaatacctacattttcattctagcacccagtaagacatccagtttccaaaggattattggtatgcaaccctctgaattttctgacatgttacctttgccactgcaacagaaacaccactgcagttctccctttcccaataagtcagagtaaggggcaggtaagaatggctatctgacttcagaaaccctgggtcacaaagcatcccttacttgagctacttttaaaaccagatttttaatgatagggtacttaaagttttggtggtccttgaatgacatattttacgttacatatttaccctacttttctattctcctcctcagataggaagggtatagataaactggctatattttcatctgcctcttgggaaaggagcaagagcattcagctcagagcattctgaagacagtagccttagagataagctttctttctttcttcttcttttgcttcaagagggctttctgtgtgtaatggagggatggttgctagagtgagacagcccttcccctcttgctatgtctataccatacctgaggccatttttcttagagggcaaaaacgttagaataggtaggaaggttcttgctttcagagagctgtgctgcacccacagggtggacccgacaggccactgtggtaactctcaatctgtgtacagagaaaagagaagcaacatctgatacaaagtcacctgccaacattcttataagactgtgtcccaggcagtgaatttccacactgcttcttgggtctgcagaactcaaagcaccaaaacagagcattctgtagcaatataagcaaacggaataagaataattatgcacctttaaggaacatgcacccttataagtctgtaccctgatatgaaaatagcagaatgaatttcaagtatgaagaaatacagtaaaagtgtggcctgtagatggagagaaaacagcagcctggaatgtggtttatattcttgattagtttttctcttggtaccacagccaaaactgaatgctctgtacaatgacttggtttaaaaatcaagatgcatacaaagatgctagaggcatttctaatgggtgccatgagcacagtctgtgcccagcatcaggaaccatctctagatgaatgtggctaggtcaagttgggagtggtggccaggcctagacaggcacacctgtggtccatgatgtggaggaagatggagagcaccatgtggacaagccaggatggtagcagggaacactttagtggtagaaaggaagagatacaggggacagagatgtggaggtgtggggatgttggtcatcttgggctggttcacacagcctagatgagtatcc

SEQ ID NO: 126106 - DNA, 549 bp, Homo Sapiens
ctctggcactgtctgaaatgctttataaatattaactcaatcctcccatcaacctcatggggaaggtatcatgactacccctcatttcacaaataaggaaactgaggcacagagaagtcaagtagtttgtccaaggttgcacagcttcaaaagcacaactacacactttgcccaaggtctgattctgtgtatctgtgcatctgaggagcttttccagaattttctttcaaggggatcaacttaaacaggaccactatttggtctcacatgtagaaatgacccagcatctgcactacccccactcctgcctgacaatctgattggggaggcaaagatcctgacctcaggcgttccctaatcagacaagggacagataccaacaagccagagacaaagacgggtaaataagaggccagtgctcagggaaggcttccaggggggcagacaggacaaggctgggcctgactcctctcattcccaggatggtaaggacactggggtggccttggcttgcggtcctgggccacgatgaggtcctcggaggcgctt

SEQ ID NO: 126107 - DNA, 673 bp, Homo Sapiens
  misc_feature (435)..(462): n is a, c, g, or t
ttttttaatttaaatccactttttattctttcacagattttaacaattatacacaacttttaacataaaggtagtgaaatctcaaggataaggaggcaatatatatggcctcttctattcgttattcaggatggaaggaaattttcaaagtacagtgtgtgagattcaacactggaaaaatacatatgaaacttgtttaattggctccacttaggaccagacacagcacaataaatacagaactgcatcatctttttaaaagatcattgtaattttaacacattcttactaaagaaatacatactatcagtgaccgatctgaaactctgtaacaggtgaagggagacttacgatgaatatctgagcataggttcgctagcatcttcacactcatacataaacattcttaaagggaataagaatgatttcaaattnnnnnnnnnnnnnnnnnnnnnnnnnnnnttttggtcaaactttcttcatcataccattcattgctatcacaatcctagtttgctggtaggtttaagaaaggaatagaaagtttttgaaatccttttaatttctaccagtcttagggcctcttgagtaggccactttggaagcaaactgattaaacagcaccatcaatccgtactcaacaacattgcatatttctgtcaatgttctcaag

SEQ ID NO: 126108 - DNA, 437 bp, Homo Sapiens
  misc_feature (191)..(218): n is a, c, g, or t
  misc_feature (286)..(298): n is a, c, g, or t
gcatcatctttttaaaagatcattgtaattttaacacattcttactaagaaaatacatactatcagtgaccgatctgaaactctgtaacaggtgaagggagacttacgatgaatatctgagcataggttcgctagcatcttcacactcatacataaacattcttaaagggaataagaatgatttcaaattnnnnnnnnnnnnnnnnnnnnnnnnnnnntttggtcaaactttcttcatcataccattcattgctatcacaatcctagtttgctggtaggtttaagnnnnnnnnnnnnngtttttgaaatccttttaatttctaccagtcttagggcctcttgagtaggccactttggaagcaaactgattaaacagcaccatcaagtccgtatctcaacaaaccattgcataatttctgtcaatgttctcaaaggtt

SEQ ID NO: 126109 - DNA, 888 bp, Homo Sapiens
  misc_feature (54)..(81): n is a, c, g, or t
gtaaggcttgggcccccttcgagggaatattctagagcgggccgcccctttttnnnnnnnnnnnnnnnnnnnnnnnnnnnntctgaagaagcatttattagcatgcagggcccatgctagaggctccttatttccagggcaaggccagcgagacagagcccattgctcaggacgcagcccagattgcaaagagaggacagcccatggtagcggaagaaattctggcggagagcactgtacttggggtccttctctcgcagctggcggtagggatcgggaccctggtggctgcctggtacctccccacccaggcctcgctccttctccacggtttgcagggcccacatggcagctgtggtgcggggttccagccagcgggcgttgacagtggccagcgtaaggctcaggaacagcaggtaaagctggctggcctcccagaatgtgagctgagcccaagcatgctgtgaagccaagatgcagaggttgatgaaggcacagcccatggagatgtggaagtagaaggggaagagtttgctctgcactagtccgaaggtatgtcggggaaggcttcggaaaagcaggaagcctgagacgaaggtcacccacatttgcatgccccaggcacctgacaagaccagtagatggaccatcttaatcaggcctcctaggttcccgccttcctccatcttgcagtccgttaggaaccgggacctcaatccgcagcacccggattccgagaacagaggcgtcggggccaaatgggctgaatctggtacctcactcccacgcccccgggtggacagcgaccctcctcggccgcgtcccctcgtgggtttcccccggccgtaatggccgaattcccgggcatatgtccggtaccgtcgactg

SEQ ID NO: 126110 - DNA, 899 bp, Homo Sapiens
ccggaaggaggcatttataagcctgcaggggcccatgtagaagggttccttattttccaggggcagggccagcgagaccagaagcccattgttcaggacgcagcccagattgccaaagagaggacagccccatgtagcgggaagaaattctggcggagaagcactgtacttggggtctttctctcgcagctggcggtagggatcgggacccctgtgggctgcctggtacctcccccacccaggcctcgctccttctccacggtttgcagggcccacatggcagctgtggtgcggggttccagccagcgggcgttgacagtggccagcgtaaggctcaggaacagcaggtaaagctggctggcctcccagaatgtgagctgagcccaagcatgctgtgaagccaagatgcagaggttgatgaaggcacagcccatggagatgtggaagtagaaggggaagagtttgctctgcactagtccgaaggtatgtcggggaaggcttcggaaaagcaggaagcctgagacgaaggtcacccacatttgcatgccccaggcacctgacaagaccagtagatggaccatcttaatcaggcctcctaggttcccgccttcctccatcttgcagtcctgggaaggaggcaccgggtggctcagaactttacctttgcctcatgcgtggccttcagaccctgtgagcccgctcggggacagggttacggccaatccagcagagattcgttaggaaccgggacctcaatccgcagcacccggattccgagaacagaggcgtcggggccaaatgggctgaatctggtacctcactcccacgcccccgggtggacagcgaccctcctcggccgcgtcccctcgtgatcccgggaatccggaccggtccagcct

SEQ ID NO: 126111 - DNA, 1544 bp, Homo Sapiens
  misc_feature (206)..(217): n is a, c, g, or t
  misc_feature (416)..(488): n is a, c, g, or t
  misc_feature (1509)..(1509): n is a, c, g, or t
cttttattgtactcacttcgcgataaaattgttgctcgtgagaattatattcgccgtgtgcgcaaactttttgaccgccgctgtaatatgcgtgtgctgtttgaccgacacgtataacgcgtgtcaaaatgttaaatcttttccccttagggacgtttaaataattctctgtggggtttgttgtgtgtccgcacacactagttgtnnnnnnnnnnnngcagagtattagggggtgctcgtctctccccaagagttgccgcgtgggttacccgattgttttccccgtcacgcgaccttttttaaaccccgcgccccctcctttctttttatataaaccaccccccctcaattggggcccccttttttcacaaaaaaaactggggaccgccctaaattttggggcccccccggggaannnnnnnnnnnnnnnnnnnnnnnnnnnnnnnnnnnnnnnnnnnnnnnnnnnnnnnnnnnnnnnnnnnnnnnnngagtttccatcactttattttgcaaaaatagaaaactcagcaatatgcgatacagcggggtagaggggagatgtaaacagaggggaggggacagcaccctgaccccccaagagaacacagggagccaatgggaatcttatttggcagctaaatacaaactggggattggaggaagaaaggaggggtcacaggggccctgggctcccccacccaagacccctggaggaaggggtcaattccacggtgtaaacaaaagctaataaataaatagaggcttcctctgggtcagggcgggatcagctaagcagcatcccccctccctgggccaagctgctctggggagtaaagggtggaaggcactagggagagagggatcccctggcccctctgtagtgtaggagggtccctgccccaatggctgagatggagggcaggaggagcccaaggcacatgacagggctgggggagggacttataacggagggcacagggtgaactctgcacccgagccaagaggtgcagaatggacctgcatctatctgtccctttcaccctctgttcctgccccagaaatgcagggcccagcctgcccccaccttgacctggcacaaggacggggcacagaggctagcacacaccctgcaggtgcatcacacagcattaggcaccaagggtaggagcaagaaggtgggctcagcccttctcctttgtcccctttttggtctctagtgttcctgtttgctctcagagagccaagcacctggcagaggaaggggctgtggaatggcagggtcttcctcttgccctgggaagtctaggacccatggggcagtgctgagattttagagtccaaacccaggctcatccctttgccctctctcctggtgggagcagggcaggcccccgggactggcgagggagccggttagatcaggaaggggatgaacacagaggcaccgacgcgtggtcgacgatatcccgggattccggaccgtaccagcctgctttttttaccactgtncatagtactatagctctccctccctctcccccccg

SEQ ID NO: 126112 - DNA, 1292 bp, Homo Sapiens
  misc_feature (839)..(879): n is a, c, g, or t
atttttctcctgcaattctaaatgccagaagacagtggaacaatatctagagtgttaagggaaaataattttgagccaagaattatatactctgccaagttatcatttctttacaaaggaaacctggaagacattcttagatatacaggggttaggaaagtatatcaaccaagaactttccctgaaaattttgctgaaggatttacctgcagctaacagagaacctgaattaaaataagaatagggaggcaattgtatgaaagaacctgatggtatgcattaaaactagttaaggagcattaagtttaaattgttatgtatagggcattaaaactaaatacaaaaatagaaacataagctgggtgtaaaatttcagtttacgtttaaactggaagggcataccacatgttcaatatattggacaaatactgttttatttttagcatgtagtattgtagatacaaatacgcatgttcttaagctaaacctaagtaaaagggctttgtcactgtagatttgacaaataacattctaaatgtcaaatctgacaattggaaaacagtacagttttatttcccttatttttaagtatagcaggaaaaaaataacaagtttgtccatgttactactgatactgtaaagaaacttccaaatcactgggtttgggaggggggtggatacatcctcattttctgtacatgatgcatggggaaaaacagtagttactgcatcatatagttccaagtaaatcatatagttccaagtaaatttgacatggaaataagtgttaactacaaaaatagaatatatacattccaatgtttggaaaagaagtggtnnnnnnnnnnnnnnnnnnnnnnnnnnnnnnnnnnnnnnnnntagattgacagtacagatgacctataaactggttaaatagccctattacaattgaaattgggtcaaaaatcaatctctaacctgagatacatttgtataaaacaaatgatcaaagagtttaaagataatggaaactataaatcatagaaatagcaacatttttcttaaaatctaaacataagacattttatgtaaaacatacaatataggatgtaacatttaacaaactatatggtaaataatatgacattaatatataaaatatatgttccagatcttgatgtgggtgatagttttacttatgtacatcgatatacatctatttaaaaacatgtacatttaaattgttgcattttatgtatttaaaatttattgagtaatccttctgtatgtattattaaagagaatatagc

SEQ ID NO: 126113 - DNA, 1089 bp, Homo Sapiens
  misc_feature (751)..(751): n is a, c, g, or t
  misc_feature (839)..(839): n is a, c, g, or t
  misc_feature (844)..(844): n is a, c, g, or t
  misc_feature (859)..(859): n is a, c, g, or t
  misc_feature (898)..(898): n is a, c, g, or t
  misc_feature (909)..(909): n is a, c, g, or t
  misc_feature (917)..(917): n is a, c, g, or t
  misc_feature (930)..(931): n is a, c, g, or t
  misc_feature (941)..(941): n is a, c, g, or t
  misc_feature (983)..(983): n is a, c, g, or t
  misc_feature (998)..(998): n is a, c, g, or t
  misc_feature (1008)..(1008): n is a, c, g, or t
  misc_feature (1016)..(1017): n is a, c, g, or t
  misc_feature (1020)..(1020): n is a, c, g, or t
  misc_feature (1032)..(1032): n is a, c, g, or t
tttgcattctgaagtcgtttttattcgataactaacaccataataaccagagttccatctgagaggagaggagagtgagaaggggccagaaccctttggtggctgagaagcctcctcaaggctatgttggggcagtagggaggcagagaggtgaagatcttagggaagcccctgacccagcctaggctgctgcccacagggcaggaggaaagcccaggaggggagacaagacctccctgttgcaaccaggaggctgagcaaggcactggtgtttacagcccacagcttcacccgggaggggcgagggctcctgccctgcgagagcctttaggtgtacagttggggaaagggcagttcagctgttggctggagccagttctccgggctccaggtggtgccagaggcctccatgaggtggaaagtgtaggcctggcgcgagcggtcagagaggttctgcttgctcttgtgtaccacttctccatggatgaggaccagggcccctctctgcactggggtgggcacaaagaggctgttatcccgggctggctctgacccaaggaagctggtaccaggcgctgagccaacaggggcccggaccatccttcttgacacaccactggtgtgggagccagggatgaaccagagacagccgttctccagcgtggcatcctccactgcgatccacacgcccagcacccggcccaagggctccgtgtacaggaaggaggcgtcctgatgaggggagacttanagatgtacatgctctgcacaccacgggcatctggagacccagacttctggcaaggtctgcactttgaggagtgtgtgatgctcttganacggngtcgtgggcgtgcanagcgtggccatttttgtgatggattctcgggagggacangaatttccttnctcatcanaacgctttctcanngagatcgatnctgtcacactgctcaagaatatctgtgctgcctgggctcganctgctctcctcctgngtggagatcngtgcgganntgngagacatcattncagcatatctcgcatccttgttgcaggcacactctcgcagcagatcttcagaccagg

SEQ ID NO: 126114 - DNA, 770 bp, Homo Sapiens
ttatgcattctgaagtcgtttttattcgataactaacaccataataaccagagttccatctgagaggagaggagagtgagaaggggccagaaccctttgggtggctgagaagcctcctcaaggctatgttggggcagtagggaggcagagaggtgaagatcttagggaagcccctgacccagcctaggctgctgcccacagggcaggaggaaagcccaggaggggagacaagacctccctgttgcaaccaggaggctgagcaaggcactggtgtttacagcccacagcttcacccgggaggggcgagggctcctgccctgcgagagcctttaggtgtacagttggggaaagggcagttcagctgttggctggagcctgcagaggatagaggagaaacaaccttgaggtgcagggtcactgttcccagcctccaggggactgtcgggcacacacacccaccctgtcacctaccagttctccgggctccaggtggtgccagaggcctccatgaggtggaaagtgtaggcctggcgcgagcggtcagagaggttctgcttgctcttgtgtaccacttctccatggatgaggaccagggccctggtgtgggagccagggatgaaccagagacagccgttctccagcgtggcatcctccactgcgatccacacgcccagcacccggcccaggggctccgtgtacaggaaggaggcgtcctgatgaggggagacttcaccgccaaagtgaggttgcttaaagatgtacatgctctg

SEQ ID NO: 126115 - DNA, 813 bp, Homo Sapiens
cggtggtccagaggcctccatgaggtggaaagtgtaggcctgcgcgacggtcagagaggttctgcttgctcttgtgtaccacttctccatggatgaggaccagggcccctctctgcactggggtgggcacaaagaggctgttatcccgggctggctctgacccaaggaagctggtaccaggcgctgagccaacaggggcccggaccatccttcttgacacaccactggtgtgggagccagggatgaaccagagacagccgttctccagcgtggcatcctccactgcgatccacacgcccagcacccggcccaggggctccgtgtacaggaaggaggcgtcctgatgaggggagacttcaccgccaaagtgaggttgcttaaagatgtacatgctctgcaccaccacgggcatctggaggcccagacttctggccaaggtctgcaccttgaaggagtgtgtgatgctcttgaagacggggtcgtgggcgtgcagagcgtggccaattttgttgatggatttctccggagggaccaggaaatttcctttctcatcaaaaacgcctttctcaaagaagaatcgaatcttgtcaccactgctcaagaaatagtctgtgctgccctgggctcgaagctgctcctcttcctgggtggagaattctgtgcggcagtggagaggaacatccatttcagccactatctcgccaatcctttgttgcatggccacacactcttccgcagacaagaatccttccagcaccaggaatccatcctgttggaacttctggagctgcgaggggctcaggcaggccatgg

SEQ ID NO: 126116 - DNA, 1464 bp, Homo Sapiens
  misc_feature (72)..(102): n is a, c, g, or t
tttaacgacggccagtgccatgctcaaaataccctcactaaagggaataagcttgcggccgcctgctcaggnnnnnnnnnnnnnnnnnnnnnnnnnnnnnnngaaggagtgatgagagctttgttagcacccagcagacaggccaatgggtgggttgacaggccaatggtggggtgtttgggcaggcagcaggggacaagtgggcaggtgaacatggctcaggcaggtaggcagagagtaagcagggaagatgtagttgggggctgccctgtgaggggtgtggcatccctccagccgctgcctgctggggcctcggtctgtggcttagaactcggtgtccaccacgcggaaagctggcctgcctgagtcaggcatcgacgaagaccgaaggctggcctccttttgtagctgaatctcctttagtgcaaatatggaagtagtgtcaggaagtttgtggatccgctcccccagactgaggaagaatggatgtttcatggcatcctctgcggagatccgatttcgaccctcaaactgcaacagcttggtgaggaggtcggccccgtcgctatcaagtcggggtgcgtggctcaaaagggcctcggctcggtacttggggtagttgtatgtcttgaactcctcgttggacaggatgcctggccacgtctcctcagttggggttcctaagatacggaagatgaagtgtagctgttcctccaccgtggagcccggaaagaggggacggcctgtggccatctcatagaagatgcagcccacaccccacatgtcaatctgagtggagtagtccgtggacccaagcaggatgtcagggggccggtaccacagtgtcaccacctcattggagtatgtctttgttgggattgacttggctcgggccaggccaaagtcagccagcttgagctctcccctctcgttgatgagcaggttctggggcttgaggtctcggtgtagcaccttctgccggtggcagtaggccaggccacggagcagctggaacaggaacagtttcacgttgtgcatgttgatgatgttcccacagtcatccaggtactgcttcaggtccttgtccaggtactcaaagacaagggtgagggacttctccgtgtggataatgtcatgtagcgtaacgatgttggcgtgtttgaggtccttgagcagggacacttcccggatggcggtgcagggtgccccctcttcatgttccagtctgatctccttgagtgccacaaggttgtctgtgagcttgcttttgcctttgtagacggtggcataggtaccctcgcccagtttgtccagcttaatgtaggtctccagtttcccaaagccaatctcagataggctgacacgacggaggcggcggctgaggggcttgtcaaagatggggctattgagggtcagcttctccaggtagccctcaggcagccggatgtcagctggtagtgatag

SEQ ID NO: 126117 - DNA, 1031 bp, Homo Sapiens
ggcgtcttcgtgtctctctgtgctcgagtctctctatctgggtctcgtggtgttgtcttcctcctgcatgcttccctatcactctctggtttgttgtggtccaggttcccaatatggtgcttggtccccagtcctgctaatagtgctgtggagcatggtcttccattgcaccgtactgtcctgttgggagtgtccacaatgccatgtggttgtgtgccccaccccctgtgcttgtgatttcagctgatttttgccactgtgtaataatttccttttagtctcagtttataaagataattttaatttataattaatacaatgaagtgataacatactaataaataggcccacacactatgagtgcagtgtgggtcaggcaggaatagcaggcagaggatgcctcagactcaaggcattgtcaccatgttgtctgagtcgagatccccagcctgggctatgctctggacccctggctgtccgtggggtagtggtcctgggggctggtatgatggggtggtagacctggcctcagtgtgggaggctggcacggccatgctgtccaccggcaactaccaagacagagacagacagaccaagtgaaggagtgatgagagctttgttagcacccagcagacaggccaatgggtgggttgacaggccaatggtggggtgtttgggcaggcagcaggggacaagtgggcaggtgaacatggctcaggcaggtaggcagagagtaagcagggaagatgtagttgggggctgccctgtgaggggtgtggcatccctccagccgctgcctgctggggcctcggtctgtggcttagaactcggtgtccaccacgcggaaagctggcctgcctgagtcaggcatcgacgaagaccgaaggctggcctccttttgtagctgaatctcctttagtgcaaatatggaagtagtgtcaggaagtttgtggatccgctcccccagactgaggaagaatggatgtttcatggcatcctctgcggagatccgatttcgaccctcaaactgc

SEQ ID NO: 126118 - DNA, 916 bp, Homo Sapiens
tttaaatgtaagatatttattaaataaaaaggttacactatgatttttatacactgttgaaaacaatgacttttatttacttaaagccagcagtagttcccattactctcataatgttatagttaaggcttgatttagttccagaaaataaatagggtaaatttttaatatttccctagctctgtctgctatagggaatttcagagtatgaaggtaagatgaagcagatatataagaacatttttagataatgacaatttttccttaaaatttggtgaaaatttagtttcttctcaaaattctgtacttctatccataaaagtaaatttctattttagtagctctgtaagaactaggccagagaagagtattacccataatagtaaatagcaaatactttggcaagtctgaattagagtacaagtgaagacattcacaaacacactttttacatctcctggatgtggtacgggctgtatgttagaattaaagcatcacaactatctgattgtagggtgctggtgggcaatgcaatcaatcaacacgtctaccccaacagatgtggagacgcatggaaaaaatacatcaaccaaagtggtcagggagaacaaaacacagaaaacaccataaaactgaagacattatctcttcttgtctgaaaaaaggggttccctggagcacagaaagtatttatcaggggagtgcttctattctgttatcacaggagggcttgatgcagattctggccattcatacacatctaggcagacagggaatcatattcactcccgccattgttcttttctttaacgatatgttggccttgtcttcagggttcatgagtatcggaaagccattttattaggcatatacgtattctgtaacttgaatagcaatgttcatagaaacttcctga

SEQ ID NO: 126119 - DNA, 740 bp, Homo Sapiens
  misc_feature (491)..(491): n is a, c, g, or t
cttatcaaccaacacttttaattgcaaaaagtaaaaaccttcattacaataaactttaatttacatacattcttcacatggtggaagtctttaccagtttgtagtatcctgcacttgaacacatactaaaagctcaagccattcagagccgctgtggctgtgacagctgcctgcctccctctgctccctgggaccatccagggccaccacaccctgctcccggaaggagagctgcagctgaccctggcacctgtccccgatgatggcgggagcactgcgctgagtccctgtcttgcctgtgactcctccttccccgaccctcggcattggttactgacccttccccagggtggaggtgaaggaagggaagactgcagccaacatttttctgagggtaaaactgtggaaagaagtatggagggaagcctgtctggataagatggggctttctgggaatgtcatgtgtctgctggctcctgtcacctccctgngaagggtccacagtgctggggggttgcagtgtgaagaatgggatgctactgtgagtaagggtggctgcacaggtgagcccactgccccaaggagctgctgtggggagcgatggtgtcaatgaagcctggcacagagaagatgtcccaactccccagtttctgtctgaaactcagacctcggctgggttcctttctccacacagtgcttgccgccatggctcattcttggattgatggctgctgcctgcc

SEQ ID NO: 126120 - DNA, 891 bp, Homo Sapiens
agggaggtcaataatgtcttttaaagccagaagtcacattttaccaatatgcatttatcataattggtgcttaggctgtatattcaagcctgttgtcttaacattttgtataaaaaagaacaacagaaattatctgtcatttgagaagtggcttgacaatcatttgagctttgaaagcagtcactgtggtgtaatatgaatgctgtcctagtggtcatagtaccaagggcacgtgtctccccttggtataactgatttcctttttagtcctctactgctaaataagttaattttgcattttgcaggaaaggaaacattgattgctaaatctttttgctgctgtgttttgggtgttttcatgtttacttgttttatattgaatctgttttaagtatgagaggcttatagtgccctccattgtaaatccatagtcatctttttaagcttattgtgtttaagaaagtagctatgtgttaaacagaggtgatggcagcccttccctagcacactggtggaagagaccccttaagaacctgaccccagtgaatgaagctgatgcacagggagcaccaaaggaccttcgttaagtgataattgtcctggcctctcagccatgaccgttatgaggaaatatcccccattcgaacttaacagatgcctcctctccaaagagaattaaaatcgtagcttgtacagatcaagagaatatactgggcagaatgaagtatgtttgtttatttttctttaaaaataaaggattttggaactctggagagtaagaatatagtatagagtttgcctcaacacatgtgagggccaaataacctgctagctaggcagtaataaactctgttacagaagagaaaaagggccgggcacagtggcttattc

SEQ ID NO: 126121 - DNA, 790 bp, Homo Sapiens
tttttgggcgtgcagggccaactttaatacgggccggcctgtctgggggtcgaggtggccgctccctttgtccttgtggctttccacgggcaggggcggtcccagcgagatcgtctcataaccaaaccagccctgtgcacgagaagtcacgccatgccccacagcctccagtcctggctgctggtggctcggggacccgcagggcaggagggtcccgggtctcgcagttccatgagccccagccgcggggacccccatggacaaacttccggggctgcacctgccggagcagcgtctcccaagcatcggaggtcctttctcagcagggctgagccctagtggacagagccgtgagtggcaaggcgggagtcagggctctcggagtcgtcaattcagcaagaaagcccctggcccgccaccttcaaactggaggtgggtgtctagggtgcggaggcagaggcacagagaggttcagcacatgctggtctcctggggatccccccaccagcagggaagctgaggtgcgccgggaagccaggccaagggagggaccccttaacggaagcctgcaccagctaatgggagcagcgaggagcaagaggaagcgcggggaccccaaggtctggaggtgtcttcctcacagacgagcgcgagccacgcggggctgggactgcaggggaacagcaccagaggcgttgggcctgggcctcggccaaccggggggagcccagaagcggcagaagctgggctcggtcgagagttaatccaggactgagagcagggccaatgg

SEQ ID NO: 126122 - DNA, 708 bp, Homo Sapiens
  misc_feature (625)..(625): n is a, c, g, or t
tttgcttctacagttttgttttgaaatggtgttagataaaataagggaataaatagagaatgggtaagaggcaggacctctagcgcctgtcacactgccagagggagttctaaggaagaatcttcagggggccgatcctcattctgctgggaggtcttcaccatcccacagccctcttcattgtccgtgcggaaggggaggcttgagggggaccaggaagggtggaagtcttcattttcaggctcctcagggttacaatcttcgggcaatagagcttctagggtgggtgttttccccacctctgatttacagagggcagctgggtctgtggagctacaagccacgagtgaggtaacagggagagagaagacattcagatccttctcctttgggaaagaggctgagccttcttccgtaccaggctctcctttcactcccaagactggcctctgctccacttgataatagaccaggggcccactgttcaagtaggatgggctgttcaccgttgaggcagttgggtggtctgagttctcggtaaaacacaggacagaggagcctgggggcagctgagcctggatgagaatgggggctgtaaggcctgggcacagctcttcggggacangcagaggctcctctaggatgcacacacccaggctctcgatgctcgagtccaggctggcactagagccgctggaatcttcttct

SEQ ID NO: 126123 - DNA, 557 bp, Homo Sapiens
catctttatcattattttattttagtaataagaaactggggctcagaaagtttaggtaacacagtaggaaatgatgaaactgaaacaagaaatcatgtctatttgattgcttttttcctgtaaagacagtcattaatgctcttcaccaaatgttttcatttcttctgacacatgccaagatcgcacttccccatccttttgaagttacttgcagccatgataattgccctggcccaatgcaatgtgaacaggtaaaagacatattttacttctgggccaaagcttcaagaaccagtgcatattttgttgtcttctctctctctaatgcagataacagaagtcccatgagcctgggtcccacaaagagacatggagtgtagcatccagcaatgtcgttataaacttgtagtgggaattaacaatacacatttgttgttataaactaagatttggttataaaccactaagcataacctagccactgctgactgattaattcacaaagtggctatatcactttgtgtttttaagtggcaataatttaactcagttctcta

SEQ ID NO: 126124 - DNA, 1175 bp, Homo Sapiens
  misc_feature (1046)..(1046): n is a, c, g, or t
gctctctgaagctccctgccccaggtcacgccgccggttccagatgaatccagagtgggggcaggccttcgtgcacgtggccgtggccggtggcctctgtgccgtggctgtgttcacgggcattttcgacagtgtttccgtgcaagtgggctatgagcactacgccgaggcgcccgtggccggcctccctgccttcctggccatgccgttcaactcactcgtgaacatggcctacacgctgctggggctgtcgtggctgcacaggggcggcgcgatggggctgggtccccgctacctgaaggacgtgttcgcagccatggccctgctctatggccccgtgcagtggctgcgcctgtggacgcagtggcgccgtgcctcggtgctggaccagtggctcacactgcccatctttgcatggcccgtggcctggtgcctctacctagaccgcggctgggggccctggctgttcctctctcttgagtgcgtctccctggccagttatggcctcgctctgctgcatccccagggcttcgaggtcgcactgggtgctcacgtggtggccgctgtggggcaggcgctgcgcacccacaggcactatggcagcaccacctcggctacctacttagctttgggggtgctctcttgcctgggctttgtggtcctcaagctgtgtgaccatcagctcgcacggtggcgtctcttccagtgcctcacaggccacttctggtccaaggtctgtgacgtgctccagttccactttgcgtttttgtttctgacgcatttcaacactcacccaagattccatccctctggcgggaagacgcgttgaacccagggaagaacctgctgaaaaccgatgacccccagcattgaaatggactctgagatggcagcgtggtgccagtgtcagacatcctgtgtgtgatgatatgcactgatcacacaagactgccctttcctgagaagctgcgggcttcggtgtggaggggtggagtgctgtgatctcgacaacttactttcaaagacataaagcacagatctccgcnacaggggatgtgtgtgttcctgatgtaatttgcataacttttctgtagtttgaaatgtttccaaataaatattggcaaggggagtggaaatgacaccaagaagcccctcatgctcatggttggacagag

SEQ ID NO: 126125 - DNA, 914 bp, Homo Sapiens
ttttcggagatttgaatttcccccagcgaggcgagtgaggcgaaatacccgtatggtgatagctggccttttcgcgccaatactgaaaaaggcagaacgttcctccgctggcgccagccaatcagcaggactcctgccttccttcggggcaaggtcgcagcatctgcctcggaaatcacgaaatcacggggcttctttctgctggctcagccgggaggcccagagtgttctgcagaggctgcgtattgaaggctgctctctgaagctccctgccccaggtcacgccgccggttccagatgaatccagagtgggggcaggccttcgtgcacgtggccgtggccggtggcctctgtgccgtggctgtgttcacgggcattttcgacagtgtttccgtgcaagtgggctatgagcactacgccgaggcgcccgtggccggcctccctgccttcctggccatgccgttcaactcactcgtgaacatggcctacacgctgctggggctgtcgtggctgcacaggggcggcgcgatggggctgggtccccgctacctgaaggacgtgttcgcagccatggccctgctctatggccccgtgcagtggctgcgcctgtggacgcagtggcgccggtgccgcggtgctggaccagtggctcacactgcccatctttgcatggccccgtggcctggtgcctctacctagaccgcggctggcgggccctggctgttcctcttctctttgagtggcgtctcccctggcgcatttatgggccctcgctctgctgcatccccaggggcttcgagggtcgcactggggggctcccgtggtgggccccgggggggccaagcacctgcacacccccagggaaatatggaggcaccaccttgggctaccctacttaactttggggggggccc

SEQ ID NO: 126126 - DNA, 665 bp, Homo Sapiens
  misc_feature (98)..(98): n is a, c, g, or t
  misc_feature (492)..(500): n is a, c, g, or t
aaggccacctgggctgccaactggaggcagggctgataatccgggcgtcatgtccaggttgttgtttactgtcctagccttaaggctaaaggactggngagagacccaggaaggtagggctcagactcaaaaggcatgattctaaggcttttgccttattctaaagcattgtgtattactaaacagagtcgtcctgttccccgccccccctaccccagaaggaaattggcaggccataaaatatgattgtaggaggaatacacccatgtactcagccccagggccaaggagcacagaaacagaagatgttcagcaaaaaggagtgaacctgagcccctggagaagctgatcaggaaaatatgctattgcttgggaagaggctcaaaaactgtgcagctgagaatagagcgtatggactgactactagattatcaaggagttattgttaattttgtgttacaaatattgttagttttgtgtgataatgatacnnnnnnnnngtttcttattattcttatctggtaggggtgcatgctgaaatgatataatggttgcatttgctttcaaataacaaagaaaaagttcagaggcagtgaaagttataaaataagatgggtgaacccccagtggtacttaggggttctccttatgtatgtttgtaaatt

SEQ ID NO: 126127 - DNA, 603 bp, Homo Sapiens
tggaatggtagatgctcatttatgtaaaatcataataaatgttacacaaactgttagaataaaaaaataccttttttgagggggaggaggtccccagcctgctgctgggtagtgagagggggttagcaccattagggcgcagggggcgggagctccgccacagcccgtggtgggcactgaggtctgtcggtcggtctgtgcatcctggcgcagtcagcggcgggcaacccgctgatggcctcgggagggggcgccgtggctgggcggagagcacgagcggcagcactgggtgcggatggtgggcagctggcagcggcccagtaggcgcagcgtctcgcagaacccgaaggacaggcggtcccgctcacagcggggaggctcgacgggctcacaatcctcggtgccacacggccgggagctctcaggccaggcctcgtggccacactggtcactgtcttcctcgggcagccctgtctgggtgttgacacacttgaccaggcgccgctggacaccaccaccacagggggctgagcactggccccagggccccaccacccactgcgtgcaggggtgggtgttgcagggccgggtggtgttgggtct

SEQ ID NO: 126128 - DNA, 1495 bp, Homo Sapiens
  misc_feature (410)..(423): n is a, c, g, or t
  misc_feature (1481)..(1481): n is a, c, g, or t
gcaggagcaccgtgcccagccaagattgattttcttactctccaaagcgtcagcattttgaagtttcttttatgaaagtgggggcaagaatcagggtgaaaatgagtgtaaacaaagcccatcctgtggtcagcacccactggaggtggccagcagagtggcctcagatgttcctgcacctggcccaggagcccaggacagaggtcaaatctaggccccttggtctggctggattcatcaggcaagattcgaaaacaagaaaacctctagaacaagaaacaatcatgtctgcagcagatacggcactgtggccctatggccatggcaatcgtgagcaccaagagaatgagtaacagaaatatctccaatacaaagacatgcatctcctggacagtggacagtcgctgggnnnnnnnnnnnnnnttcaaggctcacacaacctaacagccttaaatatctgaagaaacagaatcacgacattaagtcagcagagggagaggtaggctgaagcagcaggaggccaattttatatcccacagatttttttaaaaatgactccccagcaaggggtggggagaaagccactgatttaggagagttcttggctcagccaaccactgcggttatctacacgttttacaaaggcacggaagtagagaggggctgcactcacgaccctccccagggcccgcacagccagacacggtgggttcttcctttttcccttctggccttggtggaattcctaccacggtggcctctgcctttgggacaatgccttcatgctcatccccgggtcaaggatggagtctgttaccattttccaggggaaattccaaggaccagccccgcctcattacgttcaccccacaggaaggtgatctggaaagcctgtaaacacgtactctgggtggctgagtggtgtcaccaagctgcttttgtgcagggctgaagcacagacaagagggcaggcagctggccggaggcctgaagtggggagagatccccgcaggcctgcaggagccagggagaacctccaactggatctaaactgtgggacagcccaggcgtgcccctcttcacatggctcccaggctccctcaaagcccttcccaggccctgcaggaagagagggagggtgaggagaggcagggagggcagaggtcgcctgaaagcctgggctccgaactcctcagcagagctttaaagtgcattctttccacgaggaggtaccctcggccgggcttcctgagtgctggagagagtgcttgcccctgcagctccctgcagaggtagccagagaagagcaaggactgaggctgggccaaactctcactgcaggctcagaatggcccccagcccagccacacctccacccagcccagatctgggtagattctttgctgtctgatctgcgagatgcctagaaacagctctgagggctgaccaccacagagtgccctcgtggagaattcgccacncaggctcgctctta

SEQ ID NO: 126129 - DNA, 578 bp, Homo Sapiens
  misc_feature (428)..(468): n is a, c, g, or t
  misc_feature (555)..(555): n is a, c, g, or t
ttttttttctgccactccagtttattgaaatgagtaaatttatagctttatttgcatacagaaaagtgcatgagaaaataagtatgtacaaaacagttgtgtggctgatcatgactttcaaaaattcaactacctagaaatagttacctccagtttagcacatttaggtatttggacatttaaagtactatttcaagtctgtgtttatagtgactgagtaggaagctgatagaaaattatgccatatatgatcaactattaccattaaacataaaaccacaggactttctacttggggctaatcaatagagggtcatgtggcccctgtcttgtttagcttctgagcatcaccctcttcttccccctcaaggtaacattggatgtggctgattaactcccacaagaacctgagcattaagggtcaagannnnnnnnnnnnnnnnnnnnnnnnnnnnnnnnnnnnnnnnnttattttgacaataataaacccttcagaactgtgctcacaacaggactgaaaatgaactgggaacgtttccaagttgtgaggagaanaatattgcagacattagattttc

SEQ ID NO: 126130 - DNA, 664 bp, Homo Sapiens
atggaattttcagcatgtttaaacttaatttttagaacaaaatccaaaagcttaaaatcagatatcttataatgtgtcacaattaagtatggagagttctgtcatttttgaggaaaatctttcataattcttaaaatgcagatatttacaacatttttaaatacagacatatacaacatggcatatttaaatgtacaaaatagttgaaattatattttatcacagaacattccaaaattcaaactaatttttaaaagtccacaaacactgatagcatttggaaaaaaatagcaacaagtttatcaataaccatgccatatgtttagtaactaacttacttatacacaacacataatttacatgtcaaatccacaaatctaaaagatatatgactaatctatttaactcacgctagaatctaaatactattttataattcataggtttaaatacatgtttcacagtaatctatgaaacaggaatataaactatgaaaacatatttaactgacttcttaagagacgaggaaatgtcaaaaatagcaaatcaggcattttttcccctgaaattaaagttcttatgaataccttcataaacaccaaaggaagaaaatagaacaactcagatactacaacttaatttttaccttctcaaacttctgttt

SEQ ID NO: 126131 - DNA, 940 bp, Homo Sapiens
ttgtcacttaattactatgtttaattcactgaacgcaagattagattgaggcatatgccaaaaacgctattgcaatgctttaaaggacagtaaaaatgttgtcatagtaacattatctttagatattgctgaacacaagactttccctgaggtgtaaacatcaaataacttgaacagctttacacatcagccccattaaacagtttattacaacactacatctattgtaatcaaagtgatgctgtttacagacattatcatataaacatttttaacaagaacaaactactacaaaaacaagcatttacttgactttttttccaattgcttgcacatcataatggccaaatgtatataaccagtaataaagttgcaaaagctataactttttaaatcacacaggtttccttcaaataaaacagttaagcaacataaaaaataaaagtagagctactggttaccatttatgcagatttgctttattcagatctattcctgttcattttatccatgaatccttacaggttcagttcaatcacaagaagcaaactgctggacaagcgtcatttttcccccatgaagactgttttgtcttggaaggtgatcctcttccttcagcttctaacgatgacgatattcgcgctctcggtcacgctctcggtcacggtctcggtcacgatcccggtgcctctctcgttctctgcttctctctctgtaataatcgtcatgacggtctctactacgggatttatgacgtcgactcttttctcgtgatctactatggtccctctctcttgatcgttcacgtcttgatccagaaccataagacttggactcaattccatgaaggcaatcttgcaaagaactaataagaactttgcaacgatcatcagcagatactttggattgtttaattaaagaaatgcagttacagtgtctc

SEQ ID NO: 126132 - DNA, 679 bp, Homo Sapiens
  misc_feature (154)..(212): n is a, c, g, or t
tcctcctcccagaaagacacgtgctgagctcatgaaggcaatcgattttgagtactatggttacctagatgaagatgatggtgttattgtgcctttggaacaggaatatgaaaagaaactcagagccgagttagtggaaaagtggaaagcagannnnnnnnnnnnnnnnnnnnnnnnnnnnnnnnnnnnnnnnnnnnnnnnnnnnnnnnnnntcaacatctatgcagtcaccgaggaggagtcggacgaggaaggcagccaggagaaaggaggggacgacagccagcagaagttcattgctcacgtccctgttccctcgcagcaagagattgaggaggcactggtgcgaaggaagaaaatggaactcctccagaagtatgcaagcgagaccctgcaggcccaaagtgaagaagccagaaggctcctggggtattaggacccagctggggctctccttggagttcttccatcccccagtggtacctcaggacccagggctgcagacacaggctggtgctgcaagggctcctgccccattctcagccttccttccctctccttgtctcatgttgaccggagggtaggggtctgtccctggtcttcctggtaggttttgtacacatattttgctactgtgtggatccatttatttttattgtggagtgtatacaacaggttg

SEQ ID NO: 126133 - DNA, 1245 bp, Homo Sapiens
  misc_feature (478)..(516): n is a, c, g, or t
gccagttcgcaacctgttgtatacactccacaataaaaataaatggatccacacagtagcaaaatatgtgtacaaaacctaccaggaagaccagggacagacccctaccctccggtcaacatgagacaaggagagggaaggaaggctgagaatggggcaggagcccttgcagcaccagcctgtgtctgcagccctgggtcctgaggtaccactgggggatggaagaactccaaggagagccccagctgggtcctaataccccaggagccttctggcttcttcactttgggcctgcagggtctcgcttgcatacttctggaggagttccattttcttccttcgcaccagtgcctcctcaatctcttgctgcgagggaacagggacgtgagcaatgaacttctgctggctgtcgtcccctcctttctcctggctgccttcctcgtccgactcctcctcggtgactgcatagatgttgatnnnnnnnnnnnnnnnnnnnnnnnnnnnnnnnnnnnnnnntgccagccgagcctctctctctgctttccacttttccactaactcggctctgagtttcttttcatattcctgttccaaaggcacaataacaccatcatcttcatctaggtaaccatagtactcaaaatcgattgccttcatgagctcagcacgtgtctttctgggaggaggaagaggttctttttcaaacagctctctaacaccaggcaaatcttttgctgctccaaagtacttgtaacctcggtttcctgggacttcttttccttcatgatccagcattttagggccaacttttccataatcaggacctcccagctcctttatccggacctcccagtgtcctttctcccttagcagcttgttaatttcatcattcaggtcacgaattcgaaattcacctaaaccagcattctgaatctgagccacttttttagagatctctccaatgatctgtcgtctccacttctcagctttaggcagttcagtacattctgaggccagaaagggtcttcgttccttcacttttccctcttccagctgagcctggcgaaatcttgctaaggccgtcatggccttttctgcatttcgggccatggtgtcgctaagggcgccgtcctggagccccgcggcccctgtccaagaaactccacaggcccagaagacgccgacgctcacaggaaccggacgcgtgggtcgacgatatcccgggaattccggaccggtaccagc

SEQ ID NO: 126134 - DNA, 1528 bp, Homo Sapiens
ttgccacttccaagagtgtgtttataaaaaaacagcaacggagtacagtgctgaccccacagagtcttccaggccagcaggagcagcaggccccgattcccggctccctgtggcccagggtgcgtgagtctgggactcctggccctccaggcccctcctctcccagagaccctgatgcagcttgtgggctggaccctggagcccagctgcaccctggtgggtcccaggcggctgagcagagggctcggacagtgtgcgtctggcctcggggtcctcccatctgctcctgggccatcgggggccttgtggctcagcccaccagcgggccacagccgcaagcctcatctttatcatcccagctcccagaggtgccgtgggcgcgagtccctgccctcgagcccggggagggtccagctgagccccctgcaggggacaccaggggcctgtgtctgagaccagtgacagaaggggcttcctgcttcccgggctgagtgagagctgggggagccggacagagtggtatttggaagccgggaggagtccctctgcccatcctccagccatcggcttccacctgccctccccaggtcatgccctgccgtggtctgggctactgggccggctgcacgccagaccccgcagtggccccgttctcctggggggtcttggagatgtggaggaaggtggtcctcatggcccggtggcaggtgtccacgagcgcagggacgtccgccgcagtgaggccgctggtggggatggcttccagcaccttgcactgtgactgttcctgaagtgaagaacttcttcttggtgttgtagaaggaggagaaggaagagtacaccacgggggacgatgggcacctgtgcctggactgccaggtagaaggcgcccttcttaaaaggcagcaggtccccattgtcgttgcgagtaccctcgggatagatccacactttgaggttctccctgaccatgcgctcgcccaggtcggccatcactgtcatggcagtgctagagcgctgccggttgatgaagaagacgcccccgaggtacatgatgaggcccacgggccccaggaagagcagctcccgcttggcgatctgcacgcagcgctccggaaggacctccatgaggcccatcatgtccaggatgctctggtggttggagacgatgacacagggacgggcctcctgcagcctgcgcgggtcccgcacctcgaagcggagcccgtaaaagtacttgaagcttcgcacgaaccagccgatgatgctcatgttctccaccgtccggccgccgtggcgcagcaggcagacgagcgaggccacggcggacaccgtgaagcacagcgcgcagtacagggcgaccttggcgtagaactcggccgcgcggctcagctgcaccagcagcagcagcaacagcagcgccgcggccagacacggccacagctccatggcccggcccggcgcccgacggcgccgccagctcgctcccgctcccgctcccgatatcccgggaattccggaccggtcc

SEQ ID NO: 126135 - DNA, 1169 bp, Homo Sapiens
  misc_feature (27)..(27): n is a, c, g, or t
  misc_feature (118)..(118): n is a, c, g, or t
  misc_feature (160)..(160): n is a, c, g, or t
  misc_feature (172)..(746): n is a, c, g, or t
  misc_feature (788)..(806): n is a, c, g, or t
caatggtctaccggtgatcagacgtantaccgataagccagcgtcggcttacggggtgtgcaacacccagctggcgaagactacaccgaaatggatctacagcgtgagcttgagagcnccacgttcccgaaggagaaggcggacagtatccgtaagcgcnaggtcgaaacannnnnnnnnnnnnnnnnnnnnnnnnnnnnnnnnnnnnnnnnnnnnnnnnnnnnnnnnnnnnnnnnnnnnnnnnnnnnnnnnnnnnnnnnnnnnnnnnnnnnnnnnnnnnnnnnnnnnnnnnnnnnnnnnnnnnnnnnnnnnnnnnnnnnnnnnnnnnnnnnnnnnnnnnnnnnnnnnnnnnnnnnnnnnnnnnnnnnnnnnnnnnnnnnnnnnnnnnnnnnnnnnnnnnnnnnnnnnnnnnnnnnnnnnnnnnnnnnnnnnnnnnnnnnnnnnnnnnnnnnnnnnnnnnnnnnnnnnnnnnnnnnnnnnnnnnnnnnnnnnnnnnnnnnnnnnnnnnnnnnnnnnnnnnnnnnnnnnnnnnnnnnnnnnnnnnnnnnnnnnnnnnnnnnnnnnnnnnnnnnnnnnnnnnnnnnnnnnnnnnnnnnnnnnnnnnnnnnnnnnnnnnnnnnnnnnnnnnnnnnnnnnnnnnnnnnnnnnnnnnnnnnnnnnnnnnnnnnnnnnnnnnnnnnnnnnnnnnnnnnnnnnnnnnnnnnnnnnnnnnnnnnnnnnnnnnnnnnnnnnnnnnnnnnnnnnnnaagaattcggcacgagggttggagcggccgcggctgtaggcnnnnnnnnnnnnnnnnnnncactctgcaaatggagaaaacaagctttattataatgatttgagattttgtgcatggtaaagagatacacatgaatcctgtttctcctatgtttcaagacagaattaattgaaagtttcattgtagactaaagcatccaaaatactgtggtacgtatgtagctacgaacatacaaacactttgatgcacagcgttcattcttttctttaaataggcagtcaacattttgattcataaaagaacaaatgacgagaatatatcagtatcaatgtcagagagtgcaagacttagtgttctatacataaaacatatgaaacagacctataaagatggaatgtacaaaatctaaaaagaaaacaaggc

SEQ ID NO: 126136 - DNA, 2789 bp, Homo Sapiens
  misc_feature (156)..(158): n is a, c, g, or t
tcttccgcctggcgctgccgcgcatccgcaaggggagcaggctgcagtactggctgcacaccagccagaaaatccaccgcgccctcaacacggagccaccagaggggtcgaaggaggagacggcagaggcggagcccagcggccccgaggtggagnnncagcagcagcagcaggaccagccaacggctccggagggctggaaacgggcgcgccgggccgtggacaaggagcgccgcgtgcgcttcctgctggagcccgccgtggttgtggcacccgaagcggacgcggaggcggaggctgcgccgcgagagggccccgtctggctgtgctcctacggccgcccgcccgccgcaaggcccacgggggccccccagcccggggagctgcaggagctggagcgccgcatcgaagtcgcgcgtgagcggctccgccaggccctggtgcggcgcggccagctcctggcacagctcggggacagcgcacgtcaccggcctcggcgcttgcttcaggccagagcggcccccgcggaggccccaccacactctggccgaccggggagccaggaatgaggcggcagccgggccgtttgggctcaagacacacacacagcgcagtgagccgctgtcaacagacagtttattctatatacaaacacaattttgtacactgcaattaaatagaatggaatgagcgctcctccgcattcctccccgagtgactggtttggccgccggcccactccatccccgagtgggactggaccacggccctggctgctgccactgatgttggcgcctgcaccccacgtccctatgcccgaggcgcaagctctgctctcccggggaccccaggcctggcgcacacgcggggagggcggggccatggagaaggcactgcagggagcaccaggcagagccgggctgaggccggccggcactagggcgcgaggccccaccccaagccggcctctcctccacacctccgccttgttcagagacctgcaccatgggaccccactccatcctcaggacggttcactgcagacctaccaagacccctccagaaccttccgcggaaccccaccccctctccttgctgaccagctcaaacacctcactagcgggtacaagcctcgggcgcgacctcacaccagggggaggaaagccgccttccgggcaaaccccacgaaaccctgaaagcccccgacacaggctgggcagtcccagaggaaggaggtggctggcctcccccacccccacgggctcgggaaggtcaggcccagccagcaggggtcagaggcggctcagctgtgcggctcaggaccccacctccgagggcgcctccgttggggccatggaggccgggctaggcccgcctaccgcagcccccaggggagttgtgtcagaagctgcggagtcactcggggggacactgtcctggggggcgtgggggaggcccccagcagggcccagcgggctggctggacgccgctccaggagggaggcgctcaggccggacaggaaggaggcgtctgtgatgatggcagcggtctctgccatccaacccaggtcaccaccggcagctgctgccactgaggctgccgcggccaccagggagctgggcgccgctgccacaggcccgggactcccgctggccccgggcgagacggggcccagggcggggggctggccggcagagtcaggggctgtagccggggcgcccgagttgttgttcatgtcatcgggcagcgccgtgggggtcccggggcccagtggcggcgcgctgaagcagcatctcctgggatgcggacttgctgcaggaatggcaggcagctcgtagtggtggaagaagtagatcatggaatgctggatgaagagccaggaggtgaccagggccaggctgctatactgcccattgaagcggtagtgataggcatagaaggcgaagtggtagagatagaagaaccgcagccaatgccgcttgctggtgctggtgtggcagcagatggcgtcatactggtccgcgagccacacgatgaggatgatgtagaaggcggtggtggtgtcgttgaagaactccgacatgatggcctccatcccgacgagggccaggatgacggtcagcaggggcgctgcggggaaggcgatggccatgttcatctccagcatctgcagcaggtccacgatgaagacgaagatctggtggtgtgagtaccgcagcagcatggacacgctcagcgtgaagatgaccatgatggcgaaggcggccaggtaggacgtccgcgccatccacatgctcacaaagcggtagtgctcgcccgacaccacattccgcaggaagcccttgttctcctcgttctcggccaggcccttcacgctggacatgaggatgtcatcgtagcccaggaactcatccagcagcaggcggctgaagcggtccccgaagcactggtcccgcgtggggtccagggtgaccaccatgacggggatgctcaggcgctggcgggtggcctgcgacaggcgaaggaagccatactctagtgagtactccacgatgtactcgtcctgcggccacactttggtgggcgtctcggggaaggggaactcctggctgtcattcagggcctctgtgctactcggcggcttgaacaccttgggctcgatgtccagctcaaacttgatggagctgttcccaaacatctccatggtcagctcttcctcctcctcatcttccatgtccaggttgctgcctggttccacggccaggcccgggaagctcccgcggccgca

SEQ ID NO: 126137 - DNA, 1897 bp, Homo Sapiens
  misc_feature (90)..(115): n is a, c, g, or t
  misc_feature (138)..(200): n is a, c, g, or t
  misc_feature (231)..(264): n is a, c, g, or t
  misc_feature (463)..(520): n is a, c, g, or t
  misc_feature (606)..(616): n is a, c, g, or t
  misc_feature (627)..(667): n is a, c, g, or t
  misc_feature (724)..(782): n is a, c, g, or t
  misc_feature (1355)..(1355): n is a, c, g, or t
ttatatgttttaatggtgttgttcgacggggtggggaaaaagaagaaggggggcgtcgcgtcaagaaaaaaacggtattgagtacgtacnnnnnnnnnnnnnnnnnnnnnnnnnnggaaaagtggatggaaaaacggnnnnnnnnnnnnnnnnnnnnnnnnnnnnnnnnnnnnnnnnnnnnnnnnnnnnnnnnnnnnnnnaggaaccgtcgtagcggggcactacgaagtnnnnnnnnnnnnnnnnnnnnnnnnnnnnnnnnnngatacaaataaaggtgttgtccgtctgctcgcaagtgtggggtggaaaaagagaggctatgacacaaaggaggtggacaaaggaagcttggaaaaaaggaggagttggttgacgcaatttgtaggaacaagtgggaagaagaaggagaaaaaaggaggggggggtgtgggacaacaaaaaatgcggtgttacacgacannnnnnnnnnnnnnnnnnnnnnnnnnnnnnnnnnnnnnnnnnnnnnnnnnnnnnnnnnggttggttcaagcggtggtgggattggaaacatcactcacaccatgtggttggtataaagaatggcgagtggcgggggggtggggnnnnnnnnnnncaaaggtggtnnnnnnnnnnnnnnnnnnnnnnnnnnnnnnnnnnnnnnnnntcaaaaaagagcgttgttaggtgtgtggagagatcatgacgctcagatgagcggacnnnnnnnnnnnnnnnnnnnnnnnnnnnnnnnnnnnnnnnnnnnnnnnnnnnnnnnnnnncggaagggtgaggaatataagagagggagggcacataaaaatgggagcgtaacgcgggggtcaaataaataggggaacgggaacaggtgcaacggaaagcaaaggaggccacgatgggattagcgcaatgtacaagtccagggagaacgttgtcgtataagggcgggggcggaaggtactcatagggttgattcagtcagccgtaatgtaggcatggtgccgtaagtgaagaatgtaatataggatgggtgagagtaaacgcggcaaacagggaccaggatcagacgggaagaatggccaggatgaagagggaagacgaagaggacatacggaccatccgcgatcgtcgcaaagcggtaagactggcgggacaccacattgcgcgggagagcccttgttctcttgtttctcggccggccgtttcacgctgggcatgaggatgtcatcgtagcccagagaactcgtccagcagcagtcggctgaagcggtccccgaagcactggtcccgcgtggagtctgcgggtgggtgaatcaggtagcggggagccccgcccaggccaccccctgggcccntgccccagctggctccattgctgaggcctggcctgcttcctggccctgcccattcttaggaaacccatccaggaccccagccctgggaagcgtgcttggggcggggcagaccccagtgcttcctgcacagcccccggccccgcaccagcaggaggagacccgagggaggaggggaggccccgccatggagctccccaagcccagcagctcagactcacccagggtgaccaccatgacggggatgctcaggcgctggcgggtggcctgcgacaggcgaaggaagccatactctagtgagtactccacgatgtactcgtcctgcggccacactttggtgggcgtctcggggaaggggaactcctggctgtcattcagggcctctgtgctactcggcggcttgaacaccttgggctcgatgtccagctcaaacttgatggagctgttcccaaacatctccatggtcagctcttcctcctcctcatcttccatgtccaggttgctgcctggttccacggccaggcccgggaagctcccgcggccgc

SEQ ID NO: 126138 - DNA, 1676 bp, Homo Sapiens
  misc_feature (1411)..(1517): n is a, c, g, or t
ttcaagccgtaaatgccattaagggccttttattcgtattcatcacatcggagatcatctcttcctaggaagcttttaaaaaatccccaggttggattagggcactccctctgggtccctggcaatttcctccaggttagggatcccaaggggtcgctgccttcctgggtctctggcctggcccttggggcacacagtcatcaagaagtgctggggggaagtgagctctttatttagacatagctctgctgagtggaaagtgggcaccagccccattaatgcttgctggctggtggcttccaagcacgccccactgccaaggctcagctctgcagttctgccactgcaggtccctagcacagcccccagggtccttaaaagtcatcatcatcacagatgtcaaggtacacgtcgaaagcctctctgttgcagtttccatcaggagtgaagacatatttgtggaaggtcccatctacgcagatggcaatgacagagttgacgttcttggaagtattgcgaccgaaggcgcagatgcaagctgactcagcaggcacagtgaagctcgccaggctccactgagagtccacgtactgcccaatcataggccccaccttgcccacgcgagccagcgcggagcggcggttgaggcgggtatccttgagagcaaagatatggacagtacccttatcactggaagcgcagaggaaggaggagtcgtggctgaagttaatgcagtagagggtggcagggtcagtgcctcggcgcagctccaccagtttctccttggattgtgtgtcaaagaggcgaataagggtacccttctgggaggctgaggccactacagtgcctggctggtttagagacacacaggctatgtcactctgatgtgcattgatcgtgaatggagcagacgaggtgccaggctttgtgctcgccaggtccacaagttgcagactcccacacttgtgtcccgggaacactagcagttgcttctccaggctggggcagaggtcacagagccccttggggttgtcccgggtatcaaactcaacagctttcggggattgtcggggaaggagtacacatagatgcggttcttcagcacgatcacgatcgttgtcatggcgcatgcgcacagtaagcactggcttggtgaaggtgaactccagcaccagcgttctccttggagtccttgccctcccagggcatcgtcccagatcagcactgtctgggcaggtggttgggttgtcggggccaaggtttagggtaaggggcagccctggtgacacaggatccacccctgcttcccagggacctcaacctacttgcttagcctttcaataaacaaccagtgagatcctcgcacagcacgagcacttgtggatatgatccctgagaggagtgttctagnnnnnnnnnnnnnnnnnnnnnnnnnnnnnnnnnnnnnnnnnnnnnnnnnnnnnnnnnnnnnnnnnnnnnnnnnnnnnnnnnnnnnnnnnnnnnnnnnnnnnnnnnnnctgtaacttcccctcggtaactatttctgcctccagggtcctagtccatgcaccctggagatttccgtgaggaatcctagggctctgtgactcacctagggcaactcctgccttgtccagatgggatcatcaagaaaaacccttaaagtaagatggcac

SEQ ID NO: 126139 - DNA, 1026 bp, Homo Sapiens
  misc_feature (54)..(56): n is a, c, g, or t
  misc_feature (59)..(59): n is a, c, g, or t
  misc_feature (145)..(145): n is a, c, g, or t
cgttgaggcgggtatccttgagagcaaaagatatgaccagtccccttttccccnnnganagccagagaaggaggagtcgtggctgaagttaatgcagtagagggtggcagggtcagtgcctcggcgcagctccacccaggttctnccttgattgtgtgtcaaagaggcgaataaagggtccccttctgggagggctgaggccactacagtgcctggctggtttagagacacacaggctatgtcactctgatgtgcattgatcgtgaatggagcagacgaggtgccaggctttgtgctcgccaggtccacaagttgcagactcccacacttgtgtcccgggaacactagcagttgcttctccaggctggggcagaggtcacagagccccttggggttgtcccgggtatcaaactcaaacagctttcggggattgtcggggaaggagtacacatagatgcggttcttcagcacgatcacgatcttgtcatggcgcatgcgcacagaaagcactggcttggtgaaggtgaactccagcaccagcttctccttggagtccttgccctcccgggcatcgtcccagatcagcactgagatctctgagaacttgggactactaccaccgcccaccaaggccagaaggttggagcggtgcagcatctccaccaagcccatgctgcccacctgctcgtggtccagatgccccttctccatcaagggctccacgttgtagatgcgcacacctgtctccatggcgcagcaaaagcagctttggtcttggttgaaacgcaggctggtcactcctcgaagtggctgttgagtcatggtgcaggattgttcctcctgggatcgtgctccagcttcctgccgccttcaccggcctgacctccgcgtgtccctgacccgggccccagctgtcggtgccgcccgcggcccggttttctgacctcccgggccttggagcccggctcgggtgtttacatcaggccctcctcgtgccgaattcacacccagcctcgctacctagcc

SEQ ID NO: 126140 - DNA, 1052 bp, Homo Sapiens
  misc_feature (178)..(178): n is a, c, g, or t
tggaaggattcattgtggttcttttccacagttgtgttggattcattgctgcctatgtgtatccaaataccagtacttgtctgcccagtggaataccgaagtgatgtaaactccttcgtgacagaatgtgagccctcagaacttttccagcttcagacttactcacttccaccctttntaaaggcagtcttgagacaggaaagagtgagcttgtaccctttccagatccacagcattgcactgtcaccctttgcatctttaattggcccatttggaggcttctttgctagtggattcaaaagagccttcaaaatcaaggattttgcaaataccattcctggacatggtgggataatggacagatttgattgtcagtatttgatggcaacttttgtacatgtgtacatcacaagttttataaggggcccaaatcccagcaaagtgctacagcagttgttggtgcttcaacctgaacagcagttaaatatatataaaaccctgaagactcatctcattgagaaaggaatcctacaacccaccttgaaggtataactggatccagagagggaaggactgacaagaaggaattattcagaaaaacactgacagatgttttataaattgtacagaaaaatagttaaaaatgcaataggttgaagttttggagatatgtttctctctgaaattactgtgaatatttaacaaacacttacttgatctatgttatgaaataagtagcaaattgccagcaaaatgtcttgtaccttttctaaagtgtattttctgatgtgaacttccttccccttacttgctaggtttcataatttaaaagactggtatttaaaagagtcaaacactataaaatgagtaagttgacgatgttttaagattgcacctggcagtgtgcctttttgcacaaatatttacttttgcacttggagctgcttttaattttagcaaaatgttttatgcaaggcacaataggaagtcagttctcctgcacttcctcctcatgtagtctggagtactttctaaagggcttagttggattt

SEQ ID NO: 126141 - DNA, 1462 bp, Homo Sapiens
  misc_feature (916)..(931): n is a, c, g, or t
ttttgctgatttaaacaaaaatatttactcttttcattagcaaaacattatttaaaatatatctatttctcccctctgaacatttaactaggaacactgggcaatttttgaaggtttagtgctgattgtttaatacaataaatatggctgtggagagcacacagcagcagtagcttacatacgtccacggataagaaatttactctcatctggttagtgtccagtccaccaaaggaaaggtttggcattcgtgtgcttttttttcgtgtaggaatcaattctgcttgattttcattcttggaagaaaaaataatcagctgatatcctcaaattttatgacatgatgcaaaggagcaaggggacaaagatgacctatggtcaaaaagctggactgggatcaggtctccaggcagatcttccttcttgcgaggtgagtctacaaagggctgcactagaagccaggagtgaggcattggggacacgggggtgggttgctcccactcgggcaagcatctcctgctctgctgcagccacaaccccgactcactaccctacagaaccatggaagccagttcacagggaaacagggaaaagtgaagcacatgacgaagagatggcccaggccacaggtcaccgtttgaagctgcctcctgagctactgtcctctgttgagataatatgcggaggatccgtacactgtgttcttcacagcagaattcttccttgttgctcttgaaaagtttttgcgaggtcgtgaccttccaaacaattttatcagaagtagtctgatgcctgctctttctaacaaaccaatcatggcaaaaatttcaggctccctcccctgaattttgaaactacctaaaagcagaatgttttcccctggcaaatggttacttctttgaaaagtagacaatcnnnnnnnnnnnnnnnnaaatccaactaagccctttagaaagtactccagactacatgaggaggaagtgcaggagaactgacttcctattgtgccttgcataaaacattttgctaaaattaaaagcagctccaagtgcaaaagtaaatatttgtgcaaaaaggcacactgccaggtgcaatcttaaaacatcgtcaacttactcattttatagtgtttgactcttttaaataccagtcttttaaattatgaaacctagcaagtaaggggaaggaagttcacatcagaaaatacactttagaaaaggtacaagacattttgctggcaatttgctacttatttcataacatagatcaagtaagtgtttgttaaatattcacagtaatttcagagagaaacatatctccaaaacttcaacctattgcatttttaactatttttctgtacaatttataaaacatctgtcagtgtttttctgaataattccttcttgtcagtccttccctctcatgtagtctggagtactttctaaagggcttagttggattt

SEQ ID NO: 126142 - DNA, 775 bp, Homo Sapiens
  misc_feature (700)..(709): n is a, c, g, or t
cataaaaaataaatcttttaattgctttgtaattggcacagatggtgtaattcaaactcacatttttatttaatagactctgaaatatcacactgtagctctcactgaaataatacaggaatcataatgtttaagtttacaaaagtacatttggcagcatcatgatgttttgaaagttacctgtaaaatcaaagactggggcttcaaaaaataagagaaaaagccatctggaaaataaaaaacaagccatactgaagccatttgtcatgactattagagaatggtgtttttgggttttttgaggatcttgctactttattaatgatccagaagagttgcacaattctggcttgtaaatacagtggggaagctgtaactatgcctggaaagtgctcctcaggacaaggaatgtcaaagccaggctttgttgaaaccatgtgcctgaaaaggctttgaaggaatctttcgtttcttaggagtaatgagattcactgggttttgatttaaaaaatcaccctaaagaggattatagtggaggagataatcattaaattctcatcactgtaggtcccagaggaaaaacgcaaagtcctgtctcttcaggatgatgtcagaaaggcccaagtcctccttatgttatcctttaatttcagggataaaacagagtggcagtgacacaagctctcactaccaaattaannnnnnnnnnaagagacaggctgtctctaaaaaagttggggggtattatctgcatattaaaaggttggcggccgca

SEQ ID NO: 126143 - DNA, 691 bp, Homo Sapiens
  misc_feature (48)..(64): n is a, c, g, or t
taatagggaaacagcatcttttaatgttttattgttcacttgcaaaannnnnnnnnnnnnnnnntacatgtatagcatgtatagaggagccccacagcttgagtcagagaaagctaacagaaaggcacatatggaggcatgtcttttcatacaatattcagttaagccaacattcaggccatggcaagtgacagttaggacaaggacaatatagcacacctgtgttcacgattccaaagagctaactcagaggcaactcttaggtctgccgagaatggaggtcatcttgggagaaaatatcacatctacttaataggcctgtcaggccatcagagaatatactgaaatctggaaaaagacaccagggcaaggtgaaagccagtccttgacttgacagctagtttgttcttctccccttttattttaagacttgaggcctttgctgattaaaagaagcaaataacagtgccgactgtggccctgcaggattttggtcagctacatgacagaagtttgtaacagactaaatattttcaaaagtttgtaaacactgtgatgatggtgaggaaagcatagaaagaacatttgctatttctctctcattgaaaaaacagaggcatagatctttggcttgccacatgtggtatctctatcctgacgtttaccaaaatggtaaaaatagaggcacaat

SEQ ID NO: 126144 - DNA, 1674 bp, Homo Sapiens
  misc_feature (487)..(536): n is a, c, g, or t
ttcaaacctcctgtagagagccatatacaaaagaataagaaaattcttaaatctgcaaaagatttgcctcctgatgcacttatcattgaatacagagggaagtttatgctgagagaacagtttgaagcaaatgggtatttctttaaaagaccatacccttttgtgttattctactctaaatttcatgggctagaaatgtgtgttgatgcaaggacttttgggaatgaggctcgattcatcaggcggtcttgtacacccaatgcagaggtgaggcatgaaattcaagatggaaccatacatctttatatttattctatacacagtattccaaagggaactgaaattactattgcctttgattttgactatggaaattgtaagtacaaggtggactgtgcatgcctcaaagaaaacccagagtgccctgttctaaaacgtagttctgaatccatggaaaatatcaatagtggttatgagaccagacggnnnnnnnnnnnnnnnnnnnnnnnnnnnnnnnnnnnnnnnnnnnnnnnnnntcagaatattactttggattgtgaaggaacgaccaacaaaatgaagagcccagaaactaaacaaagaaagctttctccactgagactatcagtatcaaataatcaggaaccagattttattgatgatatagaagaaaaaactcctattagtaatgaagtagaaatggaatcagaggagcagattgcagacaaggaaacaggaagatgacaacgagaagaaagaaaaatggaagccattttgctagcttttgccagacttgaaaagagagagaaaagaagagaacaagctttggaaaaggatcagcacagccaaaactgaagttaaaactgaatgtaaagatacacagattgtcagtgatgctgaagttattcaggaaccaagcaaaagaagaaaatgctagcaagccaacccctgccaaagtaaatagaactaaacagagaaaaagtttttctcggagtaggactcacattggacagcagcgtcggagacacagaactgtcagcatgtgttcagatatccagccatcttctcctgatatagaagttacttcacaacaaaatgatattgaaaatactgtacttacaatagaaccagaaactgaaactgcactagcagaaataattactgaaactgaagttccagcacttaataaatgtcctaccaagtaccccaaaacaaagaaggtatgattctaatgaatgtaagaactgtttttctaacagtttcttatattaattatattgttgttttaaaaattggatttttaagacctcataataataagaggcagtttttatacttgcagattttaaaactaagaatgagaattccaaaactgtaaaattaatataaatgtttgcattactgtgaagataaagttacattcagtttatcaggacttttatggtattgcaattcatgatttctttaaataagtttgtctactttatgtacaaaatatatacttctctgaaactggttttagatgtgttatcctttatatttttataaatttcattgtataggtagattataagaattaaatgtgaagaaattgatttccacagaatgtactatgaaaatttgtaagaaagagtagttttaggtgtaattattaataaaaatctctgaaacact

SEQ ID NO: 126145 - DNA, 1053 bp, Homo Sapiens
  misc_feature (167)..(167): n is a, c, g, or t
  misc_feature (193)..(371): n is a, c, g, or t
  misc_feature (402)..(418): n is a, c, g, or t
  misc_feature (427)..(427): n is a, c, g, or t
  misc_feature (459)..(459): n is a, c, g, or t
tacgtctgctttgtgctttgtcactgtctcctctttccccgatcttggtaccgttacgccttgatgagtgtacgttcccgcacggaagaccggcgcagcggtcatgacgagaagcgagagcgccaatacgcaacgcccttccccggcgttgccgatcataatgcagntgcacgacagtttcccgactgaaaannnnnnnnnnnnnnnnnnnnnnnnnnnnnnnnnnnnnnnnnnnnnnnnnnnnnnnnnnnnnnnnnnnnnnnnnnnnnnnnnnnnnnnnnnnnnnnnnnnnnnnnnnnnnnnnnnnnnnnnnnnnnnnnnnnnnnnnnnnnnnnnnnnnnnnnnnnnnnnnnnnnnnnnnnnnnnnnnnnaagaattcggcacgaggcgcggctgtaggcnnnnnnnnnnnnnnnnntgccagacntgaaaagagagagaaaagaagagaacaagctntggaaaggatcagcacagccaaaactgaagttaaaactgaatgtaaagatacacagattgtcagtgatgctgaagttattcaggaacaagcaaaagaagaaaatgctagcaagccaacccctgccaaagtaaatagaactaaacagagaaaaagtttttctcggagtaggactcacattggacagcagcgtcggagacacagaactgtcagcatgtgttcagatatccagccatcttctcctgatatagaagttacttcacaacaaaatgatattgaaaatactgtacttacaatagaaccagaaactgaaactgcactagcagaaataattactgaaactgaagttccagcacttaataaatgtcctaccaagtaccccaaaacaaagaagcacttggttaatgaatggttaagtgagaagaatgagaagacaggaaaaccttcagatggcctttcagaaaggcctctacgcataactacagatcctgaagtgttagctacacaactcaattctttaccaggtctcacttacagcccccatgtatactccactcctaagcattatattagatttacttcaccattcctttcag

SEQ ID NO: 126146 - DNA, 1578 bp, Homo Sapiens
gtctttaacagggaggaggaaccactggtgtatattaatttaggacacaggatcattataggggtagggccagctggtgttaatggcatgcaggcatatgtgatgccaaccatgagggctggaagaaccagaagcccaagaagaatatgaccgcatctattctgctgcttgaagtcagaactgctgatggagataaaggcacgaaagtgtacgtattccggattagcaacccaggaacccatcacttcctgaggactctaaactgtgctgtcattttgtttttatatgcattaaaatatttgttttaaactgctgtagatgtttgtgttcaaacaggttaaattgatcagcaaactcaataaaaagtaagatgtataattattaaagttttccatcaaaaaataatttaaatgattatggaataacataatatttagagcagggcagataaatcagttgaacctgcttattttttatttattgtactctttttcctgttgctgttcttttctgcaggagggaagacccctgatcctaaaatgaatgctaggacttacatggatgtaatgcgagaacaacacttgactaaagaagaacgagaaattaggcaacagctagcagaaaaagctaaagctggagaactaaaagtcgtcaatggagcagcagcgtcccagcctccatcaaaacgaaaacggcgttgggatcaaacagctgatcagactcctggtgccactcccaaaaaactatcaagttgggatcaggcagagacccctgggcatactccttccttaagatgggatgagacaccaggtcgtgcaaagggaagcgagactcctggagcaaccccaggctcaaaaatatgggatcctacacctagccacacaccagcgggagctgctactcctggacgaggtgatacaccaggccatgcgacaccaggccatggaggcgcaacttccagtgctcgtaaaaacagatgggatgaaacccccaaaacagagagagatactcctgggcatggaagtggatgggctgagactcctcgaacagatcgaggtggagattctattggtgaaacaccgactcctggagccagtaaaagaaaatcacggtgggatgaaacaccagctagtcagatgggtggaagcactccagttctgacccctggaaagacaccaattggcacaccagccatgaacatggctacccctactccaggtcacataatgagtatgactcctgaacagcttcaggcttggcggtgggaaagagaaattgatgagagaaatcgcccactttctgatgaggaattagatgctatgttcccagaaggatataaggtacttcctcctccagctggttatgttcctattcgaactccagctcgaaagctgacagctactccaacacctttgggtggtatgactggtttccacatgcaaactgaagatcgaactatgaaaagtgttaatgaccagccatctggaaatcttccatttttaaaacctgatgatattcaatactttgataaactattggttgatgttgatgaatcaacacttagtccagaagagcaaa

SEQ ID NO: 126147 - DNA, 565 bp, Homo Sapiens
ttttagagtccagtccatggcagttttattgggggttctcccttcccatattttagctggagttgggaatggggaagagaagaagggtgggacaagagagtgagactagaatataaatatccgtaaacagcatctgagcattagtctttaacagggaggaggaaccactggtgtatattaatttaggacacaggatcattataggggtagggccagctggtgttaatggcatgcaggcatatgtgatgccaaccatgagggctggaagaaccagaagccaaagaagaatatgaccgcatctattctaaagctactgtggtggtttctcatgcttcagagtctcgtaagtctcctggttcctggtgctcaggcccgtgtaaacaccatctgatttctcatagctggttatagctgcctttcgcacttggatcttcagtcgacagtagaggagggtgaggacaattccatacagaaacaggatggcatccaggatatagcagagctgaggctctcccagggccgctgcttgttcaaccaaaaggagtaagaacaagaccactgctgg

SEQ ID NO: 126148 - DNA, 821 bp, Homo Sapiens
  misc_feature (99)..(99): n is a, c, g, or t
  misc_feature (138)..(138): n is a, c, g, or t
  misc_feature (241)..(241): n is a, c, g, or t
gtggctaggtgtaggatccccatattttggagcctggggttgcttccagaagtctcggttcccctttgcacgaaccggtgtctcatcccatcttaaggnaaggagtatgcccaggggtctctgcctgatcccaactgnatagttttttgggagtggcaccaggagtctgatcagctgtttgatcccaacgccgttttcgttttgatggaggctgggacgctgctgctccattgacgacttntagttctccagctttagctttttctgctagctgttgcctaatttctcgttcttctttagtcaagtgttgttctcgcattacatccatgtaagtcctagcattcattttaggatcaggggttttccctccatctgcaaaaggatcaagacgctctggggaaattatcatggtccgcctatgctttttgtattcatcttcccggtctgcaatctttggaggtctgtgctcagcaaatggatcatactgttctgttgactgtggtatatcattaagcaatgccacaggggcatgatatcctggcttcttctgaccaagcaaactcgtagatgatgaatagtcatcgtcatcatcttcaagttcagttgcagcaattgatgtcacgtatccagcaaatctgctgtcacttccaccataaatttcctggtcataataacctgtagaatcgaggcccactccttgagcttcatcaagagctgccttcttgccttgaatttctcgaatctgtgcttcaatatcttcgtgagtcttggcgatcttcgccattttgtccactcgaacacatcccgggaattccggaccg

SEQ ID NO: 126149 - DNA, 497 bp, Homo Sapiens
tttttcttaaaaaaaatcattttattgatcctttaccatacaaaatttattcaaattacacccatttgaagtggtaagatcacagctagagaacaggtcaccctgtaagaaatctatttacaaaatccatcataaaagcttttgggtgttttggggtacattatattacatattttcttttttaaactagcatacaacacaaagctaaactgattagtagtttgcctactcccaattttgggagaaatacttcctttttacaaaatcacgtaccccgtaggaaaagaaattcccacaccctgacaattgccacccgacttactctgcaagccatcttccttcatatccctccttctcatacacacgagttgtcatgcacacactgaattcttattttctttttcctgaaagcttaagctttaaatactgcaattttatttacagatctacacgtacaacaaaaatgaaaacaagagccacaacaaagaacagaaaac

SEQ ID NO: 126150 - DNA, 1586 bp, Homo Sapiens
  misc_feature (218)..(231): n is a, c, g, or t
  misc_feature (990)..(1048): n is a, c, g, or t
gggatttccacaatatgcaaagtggtggtggggtcaagacagatgacaccagcactttaaactctttgtgtgggtatgcgtgggtgtatgtttgggaagaaaaacaaaggtgcagactatcttcctttttttcttcttcagcctccatccctggcctcctcccctcacacacactggacttggtacaaaatgtcggtgtggtcctagatgaagcattnnnnnnnnnnnnnnagagggagctttgtgttaagtgcctactggaaatgcactgtggggttttttcctgtatgggaaaccatttatgccaagcttttccccatttcccatatttatctcatctggttagctgcctctgcttccagctttgtgtaattctctttgccagctgcacaaagctgattttttccaaagtctaaagactgagctcacctggctagattgttgtgtgttttgttgaattttttcataatgtaatgccgtatttattgtttttaaaatgaaaggaatactaataagtcttaaaagttccttcatgcataagatttttttccagttactgggcttaactggtgtacattaattagatgtccatactgtattttgtttgcattaagtaattttctttttgacttagtatccggcacaccaagtggggttagtactacagtatttgcgttactttaagtactaagtatgcaggtttcctggtaccattgagttgctgctattaaagctcacacacgaaatggctaaaagttacaagtgtgcaaattatgactgcgtgagccttagaaaataaaatgtataaagggcaacacatgagctgtcaaacagtgttaggagtgtgtttatatgtacagagttgtgcatagcaatcgttttatttaagttgatatgtagtctactcacattttcattatttagcaattttgtacaaaaatagcaattaatttgtaaacactgccagaatactttctagctgctttgtannnnnnnnnnnnnnnnnnnnnnnnnnnnnnnnnnnnnnnnnnnnnnnnnnnnnnnnnnncatttttgttgtacgtgtagatctgtaaataaaattgcagtatttaaagcttaagctttcaggaaaaagaaaataagaattcactgtgtgcatgacaactcgtgtgtatgagaacgagggatatgaaggaagatggcttgcagagtaagtcgggtggcaattgtcagggtgtgggaatttcttttcctaccgggtacctgattttgtaaaaaggaagtatttctccccaaaattgggaagaaggcaaactacctaatcagtttaacttttgtggtggtatgcctagttttaaaaaagaaaattatgtacatattaatgccaaaccggccacgcacacctaataccacaactttccccttttcggccccgccctccggcccctcgaaaaagcttttttctaaaaccatttctctttgggggccccgggggcccccagtaagggtaagctgaaaaccgtggtcctaaagcctgttttccccaagggaaatcccccggagcccatgaaactaagggctcttgggatattctcccaccaaat

SEQ ID NO: 126151 - DNA, 1619 bp, Homo Sapiens
ttttttttgagcagagaacatgctttattgaggagtagatatagaagagcacattctaccacatgtggggaagggtttagcttctgtaaaaggcctttatcccttaagaaaacccctagtgaagttgctttttgataaattttaacagtgacactgaaactggaggggagctgccactgaacatgcttaaaattagctcccccaacccacagtgaatataagtagtgtacagagatgacaagagaaaggcacaaatgaccggagtcagggattgtggtgagggctccacatgaagacagcatgttggaggagaccaagttgggaagggtgacatgtcatacatcaaaagttgccccaagatagcaggttataatgggctagagagaaattagagggaacatctcttccttcacttgaacaacaccaaaaatagaagaccagagaatagaaggatggtgacaaatcccaaaaaggaaatggaggaggagttcgtggaagggcagaagcactttaatcctagagggagggtgaggcactgttgaaaagagaagcaaactttggcaggggtggccattctgccttgctgagtcatgggctgagatacggaagtcactttcaatcattttctacttctcccagggcactcagacaaaatcagtgcaaggtatatggaagtacagatgtactgtatcagactagtggaggtgaaaaggtttctgcagtataattatccagttaatatgcagcatgaaagggaaaagtggacattactttggcacctgcaaatgtaaaaagtgggagtaaagagagaaggaaatatttactagtgagtactttacggtgaggcaaaaagtagtatccgttccctttcaccaagacactgcccactgcccactgcccacaggtgaactcaaatcaaacccagaaccaccaccccttcattcttctctccatctcattcagatcaattatatgctattaccatgactagtccctgggaaactcttcaaaagtatttggctctggttagcccaatacagatcaaaaagaggtctcttaatcaaaatgaagaaatttaaagcaagatggaacccaaagtgaatggaccccctgccaatccacacacactcacaagtgccaccttttccctgcccctccatagaacacacatataaggagtaactggaaaggtcctggtggtggcagccatatttggaggtctggtgaccaggtggcaagcactagtaccacgcttagaagacacaacacaacctcatggggcgagaggacatgaggagagaaccagtgactggacaggtacagtaccataacagaactccttgggtcagtgctgagagacctgcactcaagtctaatacagatcccatccaggcaacctcactgaggccgaaacaacagttcctcagaaccagcgtctgcagtgtacacaaaggtcggagccaggacagtcctgagggggatggccttcccaaaggatactgtacttgccaatcacaagagcaacagagaaatgacagacagatccctagggtacggattcctactgctggggttcgctggctcggaatgacaggtcacatcccgggaattccggaccg

SEQ ID NO: 126152 - DNA, 1899 bp, Homo Sapiens
tttaggcacacaggagtttattttactgttctgtctactttttaatcggttatattaaaaaatgttaagttaaaaaaatatagaaaacccgactgatgcacaaaaacttaaacttacgcaacagataaatgaggagttgattcccacgacatatacaaggattccctgacgtctttctccagagtgtcttaataaagcaagcttcccctactgaactggccaatgctgttgctgttttcaaagcagtaaatattatttgataaaagatgtgaggtaaaaaagctcaaaagctccagtgtcaaactgctataaaatgaagacacatcacagctggaataatttaaatcaaagtgacaatgggatttgacttacaaaagttctatttacacatctattaggtaaagcaaggtacacccacttcaaaacacatctgtatgtgaatgcacatctgagtaccattcagcaagaagttttgaagagaacgtcagtttaataaagctaaatggggagaattgaagtttgcatttgacatggtattaaacaaaaccaaagggctgaaactcatgtttagacaacacaggtcactagtcactaggcaaagaaaacagtccacagcaggtggcacaaataattcctatacaaaacaaatgttgcaaatattctgcttttaggaaacatgaaacaagggctgacatgtcatttacaaacacataatataaaaatgcacagccccattgaacaaaactccagcaaatgttttatagctgacttccctcagacccacccccacaagaggccattctgtgaattactagcatctgccatttcatcttttaaaattaaaagaatgacgggcacatgtgctgtgcagggtggaagagaagtgtcatacaaaaaggggccggagctggccagaaacatttggacaactgtgtctcaaaaacagtgtgttctcgtttcgcttctgtgcctcagtctttaagatacaaaactatctcaggacaccacatcctgggcccagcctgcagagtggtcacttttctgccactgccctcaatatgagggagcactgaaaggctcttgacttagaaccccttcccctttctgtctaaagccgaggagccatctgtggttgcgagcacgcagcacaccaggcctgtccatccccagtgcactgctgggtggtgggaggtccgccgggccagagtgaagtaaggcatttcctgtctcccagcgtcccgttcactttctcagaaacagcttggcaaaatcggcattggacatcttgggtgcctcggtggctgctggggcggcaactgcaggagccgcggcagggccgttctcagcctgaggagctgcagcacttgggcgctgcagggcacgaggcagtagagacagctgcgtccttcccttccccctcgctccgtatgtctgcggcaaaagcatggggccacctggtgccttcctggtctctggcttctctggaactttcctctgaggagggttgctgattgccactttgatgatgttctctttgatagtcatgccgtccatcttcatcacagcctgcgacgcctgggattcattttcatactccacgtaggccaggccctttggtttgccagcccggttggtgaccagcctgaggtccttcacggtgccatgagccttacagatttcttctagttcctctttagtacaggagaaaggcaggcctgagatgaacagcttgtgtttctctagggaagtgctgtacctgaacaccttaaaatcggggtttttgctcttatccacacagggggaaacaaacattggcctcccttctacacttttccggtccatctccagtgcctgaagggctgatttctcttatcccggaaatccggaccggtccagcct

SEQ ID NO: 126153 - DNA, 1135 bp, Homo Sapiens
taaaaaatcacatagaactttattaaataaaccagtagaaaggctcctatttacatccaggttgtcagtttaagctcaagtaatatgcaaggcacaattcttcctttctccagctttagaaaaatcaaccacatggcccagccctgaaggactgaagggagcttgtgcgggatcccgtcatcctggactctccacacagcgtccacgcatggatggccatgggcatgagtctctggatctccctgagggtagcccagcctcggcctggagcacaggggcctgtgatctgagaatctcagatccagaatcaggagctgggaagagaggacttttccaagggtctcctcccccaggccctggggagtcccttctggatgggcaggccctgggctggcggccgccctccatcattggcccaggccgggctctagggccggctgggaagctgtctggggccctgcgcctgatgagctgccatgaaagtggccgcctctcacactggcaggcggtggctcagatctgctgaggttctggagtggcacaggaacaggaggagcaaatgacactgggtctttgtgctgaggcaggacacagcggctttccgaaacacacacacagaaaatatgactcctgctgccatctcaaggacattttcctaaggacagtcctggtgtcctgatggagtgaaagggatcacacgtgggatgtcccagcagggcctaagccaagtccatcagatgtctcaacggcttatgaaacaaaaacagaggactgaagtctgttcacagtggcccatggttgggcagcagccctgggtgagctcctgtgttctccagcctctcgctcacccagggcttggctatcctggcctccaggtgctggttcctgaggcttcccttgcggcagtggcgcagatacagggacactcatgtcccattgctcctcagaagtcctagcagcagccagactaggggcaaagtaagttttcacagggggaaaaaccccaccaaaaaccccctaaagtaactggacaatcctttccctgagaccactacagtaacatcacccacagacaacttctaatagagcacttctaactgctcaaagtcttgagaagggaaagattttagcaagg

SEQ ID NO: 126154 - DNA, 363 bp, Homo Sapiens
atatatatttctagacaataaagatttgtttgtttttcaacttgacttgtgaactatttgtattcagatatttacaagcaaagctgaaatgatgaaccaattgggaaagattactcactgaactaatgctttaaaagccactgaatttcatttaagttgcttttcttttgtaagcccaatattcttttttttcccataaaggataattatttatatgctttagatatttttatgaaggtgaatttcagaccttttcttgtaaaattatctattagctgagaccttttaaatgcaactttttcttttaaagttatttttgagctacttttaacgtataaaattaaacattttcttggtattaat

SEQ ID NO: 126155 - DNA, 1127 bp, Homo Sapiens
gcagcaatacctcctttatttgatccctgtttatgtccacatatgtattgtattatcacagatgcaactgatttatcatagagcactcagaaaacatggaaaagtatttttaaaaatcgaataatcctattcaagtcaaccagtgttaaccccggtgtgcttcctgccagtctgttcctccccatgggagtcacacaaaatgaaaatctcctagaaagagaaattcctctgtcctctgacttcttcacttagtacgctgcgaccttcccatgttgttcaacatcctcaactcggagcgtcactggctggaggtggtctataaatggaattggcttaactatctcttcactgaaaggtggacatttagggagtgtccagttttcagctgtcataaacaactgccttagacggcaaagaattcacaggtcaatcgttcccttcgctttgaacttcttcgcagaccgttcacttgaccgaagctggaatttgctcccgtaaatgtaggaaataaagccatcggtttccacagtgaacacgcagtttagcttggggataactttcaggcggtcttctttggtgataattttgaaaatgtgctttgtttcctgtagaaggattcctgtaatacccacataagaggggcatttggattttgtcactgaaataatagccccgtgaagatctgcctttaagagcttggcctgaatcatctgtggctgcgtgtctggcttgagcccactgcacaggtccctgatgtactgtttccagagttcatggagagggaggaaaaggctgtatctctgctgctctggtttaatgtcaaagagccgcagctccctcctttgcctggcagagaggcctttggctttcttcttcttctccttgcgcttgtggcgggtgaagtactccaggaccaccgccttgcgctgcagctggtcctcgcgggcctgcgggctcatgcggggcgtgctgcgcttcaggaaggccctcacgaaggcctcggcccgctgtgctcctgaaggctggacatcggagtcattcgcctctttctgagacaatgcatggtagatcacactcttcattctcggaccgcttccgcctcgtgccgattgaacccccggcctcat

SEQ ID NO: 126156 - DNA, 626 bp, Homo Sapiens
ttaggctaggtacgaggctgggtttgaattcggcacgaggaagagtgtgatctaccatgcattgtctcagaaagaggcgaatgactccgatgtccagccttcagtgagcacagcgggccgaggccttcgtgagggccttcctgaagcgcagcacgccccgcatgagcccgcaggcccgcgaggaccagctgcagcgcaaggcggtggtcctggagtacttcacccgccacaagcgcaaggagaagaagaagaaagccaaaggcctctctgccaggcaaaggagggagctgcggctctttgacattaaaccagagcagcagagatacagccttttcctccctctccatgaactctggaaacagtacatcagggacctgtgcaagttgggctcaagccagacacgcagccacagatgattcaggccaaagctcttaaaggcagatcttcacggggctattatttcacgtgacaaaatccaaatgcccctcttatgtgggtattccacggaatccttctacagcgaaacacagcaccattttcaacattatcaccaaagaagaccgcctgaaagttatccccaagctaaactgcgtgttcactgtggaaaccgatggctttatttccta

SEQ ID NO: 126157 - DNA, 715 bp, Homo Sapiens
  misc_feature (563)..(563): n is a, c, g, or t
  misc_feature (612)..(612): n is a, c, g, or t
  misc_feature (673)..(673): n is a, c, g, or t
gtccctaaatagcatgcgttcatgacgctggctcactttatttttggccccaggtcaggtctcccaaagggtttcccagcagtcacttcagagtctcctgcagagtcaccatcaagcagacctcttcctcgggaggccgtgtcgccaccccaacccttgacttctggtatcaccatctcctgtcacctgggctccagtctctgtccgatggcctcaacaggacatcaaagcatagctaccagtttgaaggtgccctcaggcttggcaggaaccacgtggacaaaagtcttgtagagcacagcacccttgggcagcctggtgatcagatccacagcctccgtgtttctgggatgaggcacgtagacctccttagtgtagcggactatcccctcttccagggcatacagacatttattcttcccaacacccacctgcaacacacagacctggtcagctggtcagcgaggtggtccgtcccagaattttgggacagacttctcacacagagccgggccctggggctgaaagggtgatcagagagctccatctcaggttccctttcncactggctagcacgtccaaaccttctgcttctttattgactcataacanatgagggaaaagaaagctccaacagccaacatgggccactgctcagtcccagggactgttnactggagccatgtctatgcagctggtcagaagcacactgcac

SEQ ID NO: 126158 - DNA, 1100 bp, Homo Sapiens
  misc_feature (94)..(94): n is a, c, g, or t
  misc_feature (135)..(151): n is a, c, g, or t
taaaaaagggtttttttcccctttcattatatccaatttcccccatcacaaaatttagccatccttggaaaattaaatcccagggtttcctatncacccttttttgtccccttactaaaaatttttcgaaaaaannnnnnnnnnnnnnnnnaacctgtttacaaagggcaactaatatttaaaaataatgtggagagtacagtatcgttatgtctctgtaacaaaagaactgtcctacccctataaaaatgatgccaacttgctgaaactgaaatcccccacctggtatgaacctaactcctggcacactgaattctatttcattaaattcaagctatctttcaaccatctgcaagtaagtttataccaaggaagaagtcttagaataatgaaaaactaataaattgaaattagtttcccaagactaaaataatattttaaatcaccaggtatcttgtcctccaagaactgagggttagaaaggagaaccaagaataccaggccaatgcaacaccagggcaaatcatagtgatctgggagttaggcagacctggtgcaaatcccagcagtcacttgctccttccaccccgtctaggtctctggcatttcaccttacttacagggatgtggtaaggaagaaatgagatcgtgtaggcatgggaatcagcacaatgcttgccatttggtaagcactcaatacatgcaactgttattaccatgcttaggggcaaggagaggtcaacctagaaaaggaaaaaggggggcagcaacggagcaactcacatgggcacctgggtgccagcggaaatggcgctgtgttgcaatgatgttcccagcatgaacatagtgaccttccattttcttaatgccttggcgtctgcctgatgactttccaccgaggtttttggagctaccacccgacttcttggatgcgtatctgacagcaagagctgtagccggagtggggcttagcaaggatgtaacggctgtccgggtcctcagcgccaacaccaccgacgccatgctttcgatcactcacttccggtctcccccggccgtaatggccgaattcccgggcatatgtccggtaccgtcgactg

SEQ ID NO: 126159 - DNA, 926 bp, Homo Sapiens
acgggggggcccagtggccccccggagggcctcccaagcccaggcgcgttgtcccaaccgcgttgttaacgccccctccttgtttttatccgcctccttttgggccacttgtaccaaaaaccgggtacgccttaacctgggcccctcgggggaacctcctagacggccccccctttttgtgttttctatttgtttggtccctaaatagcatgcgttcatgacgctggctcactttatttttggccccaggtcaggtctcccaaagggtttcccagcagtcacttcagagtctcctgcagagtcaccatcaagcagacctcttcctcgggaggccgtgtcgccaccccaacccttgacttctggtatcaccatctcctgtcacctgggctccagtctctgtccgatggcctcaacaggacatcaaagcatagctaccagtttgaaggtgccctcaggcttggcaggaaccacgtggacaaaagtcttgtagagcacagcacccttgggcagcctggtgatcagatccacagcctccgtgtttctgggatgaggcacgtagacctccttagtgtagcggactatcccctcttccagggcatacagacatttattcttcccaacacccacatgggcacctgggtgccagcggaaatggcgctgtgttgcaatgatgttcccagcatgaacatagtgaccttccattttcttaatgccttggcgtctgcctgatgactttccaccgaggtttttggagctaccacccgacttcttggatgcgtatctgacagcaagagctgtagccggagtggggcttagcaaggatgtaacggctgtccgggtcctcagcgccaacaccaccgacgccatgctttcgatcaccctcgtgccgattcacccaccaggcctcgtacctagcctgtaagttc

SEQ ID NO: 126160 - DNA, 947 bp, Homo Sapiens
  misc_feature (140)..(192): n is a, c, g, or t
attgggtgagaaattccaaagccgttgggtcagtatcccagggatttttcttagggaaaaccgtttataccccaagttccccttggccttaatggggcccggcccccccaaaacaaatggtttaaaaaaagcctttttgnnnnnnnnnnnnnnnnnnnnnnnnnnnnnnnnnnnnnnnnnnnnnnnnnnnnngtcccctaaataagcatgcgttcatgacggctggctcactttatttttggcccccaggtccagttctcccaaggggtttccccagcagtcacttcagagtctcctgcagagtcaccatcaagcagacctcttcctcgggaggccgtgtcgccaccccaacccttgacttctggtatcaccatctcctgtcacctggggctccagtctctgtccgatggcctcaacaggacatcaaagcatagctaccagtttgaaggtgccctcaggcttggcaggaaccacgtggacaaaagtcttgtagagcacagcacccttgggcagcctggtgatcagatccacagcctccgtgtttctgggatgaggcacgtagacctccttagtgtagcggactatcccctcttccagggcatacagacatttattcttcccaacacccacatgggcacctgggtgccagcggaaatggcgctgtgttgcaatgatgttcccagcatgaacatagtgaccttccattttcttaatgccttggcgtctgcctgatgactttccaccgaggtttttggagctaccacccgacttcttggatgcgtatctgacagcaagagctgtagccggagtggggcttagcaaggatgtaacggctgtccgggtcctcagcgccaacaccaccgacgccatgctttcgatcactcacttccggtctcccccggccgtaatggccgaattcccgggcatatgtccggtaccgtcgactg

SEQ ID NO: 126161 - DNA, 1410 bp, Homo Sapiens
  misc_feature (22)..(22): n is a, c, g, or t
  misc_feature (37)..(37): n is a, c, g, or t
  misc_feature (53)..(97): n is a, c, g, or t
  misc_feature (112)..(138): n is a, c, g, or t
  misc_feature (1389)..(1389): n is a, c, g, or t
cccccgcgcccggggaggtagngtgttctctttcttngtcttcctctagtggnnnnnnnnnnnnnnnnnnnnnnnnnnnnnnnnnnnnnnnnnnnnnggccgcctctcaggnnnnnnnnnnnnnnnnnnnnnnnnnnnggagttctacacacttttattggaggggcaggcctgatagcaggctcacagctggtgaggctgctgatgtgtgcgcccttccagatgccccaggatccacaggctgtgttgggatgcaccttccccattcccagctgactacagtagtacagaaaaagggcccctctgagtgaggctgcaggcagtgctggccaagcagggctgtgtgactgaacgtggccgctgactcagaacagaggacatcctagggcagcaagcgaggatgggcaagagtattgggcatgccagccaccaccagccaaagctgcttccgtccttactctccgtgccacaataggtagcgtgtgcatgagccttgggcccagggacaaccccctcactctccatcttggttgggttggataagcccatattccactgctttgtccaggcaggctgcagcagcccttgtgacagggctgtggtcacccttagctagcactgacaagatctccatcatctcactctccatcagggtgctggcaatctccctcgaggcctccaccatgttcagcaccaccacagcaccccggtgctgcagctcctggttggagctcagaagcagggcctgcaggatctccagccagtgtgtggtcacttggggaatgcggctgcagagcgtgggccgcatggaggtaagcataggccaagcccccggcagctgcccgctgtagcagctcatacatcctctccactgtacagcaccagcagcttcagtcggtcattgcctgggcttcgaagaggtcctgcacctccttgctcatggccaagttacacatgcactccgtggctgcccggcggatcatctcatgctcctcaaacatgtagccttctatcatgggcacagccttctccttcaggatcttctgccggagcctctcgctgatcccagccaggtttgttagggccatgagcgcctcgaagttctgcaggcctgagcagttgaggtgcaacagggagacgaggggccggaccacctcatagatccgctcgccagggaaggtcatctccgggttggaggtgatggtgagcttggcaagggcctgggctgcctttgtctgccccacgtccgtgccttccagggccagcgggatcagcgccctgccgcctcctgggcaaccacagtgcctcggtcctctacctcttccactaaagccaagaagacctggagagcagctctctgcaggaactggtcagcaccctcgtgccganttcaacaccaggcctcgtact

SEQ ID NO: 126162 - DNA, 2354 bp, Homo Sapiens
  misc_feature (216)..(245): n is a, c, g, or t
  misc_feature (521)..(539): n is a, c, g, or t
taaaattagttatgaaaatttggaaatgagatttactgtgatcatttgtccaaaggacagattttagaaattattacccggttatagacaaaacaaaggaaaatcacaaaagaaatagggacacgaaatttgatattaattttcattttaataatattaacccaataaaggactaaattaacggtcctaagaagcgagaggccgagataggccaannnnnnnnnnnnnnnnnnnnnnnnnnnnnngcagtgcagacagtttaatgctctccacctccatcaccaccaccgaccatcctccacaaggccctcagccccagggcacccttcacactggagccccagagagtgtgcacaaaagcatgccccaactagcatcactttctcacccaatgcccaggacttcgaaggctgccttctcacttctgggacacctacaggcaggaggaagagaaggcttcttctgagagagaagagctgggattccagaggccgcagagtgaacagacggaagaaaggtgnnnnnnnnnnnnnnnnnnngaggtgaacaggacgtgtgtggggaatgacagggacagaagaggtgctagaggcagggggtggaattgggtcagatttctgacttctccaggtgaagggcctctactgggaggcaggctgatggtctggcataactgcagctctgaagaacagcatgaaaagctggcagaatacactcacacctgacacctcctggccaacagcgctactctactcccgtcaacgtggtcacagtgtggcaattgcaagatgactgagcagagcctaggaggcagccttctcaagtgggttcaagccactgctccccattgcccaccccccatcaaaggtgacaccctcctacagccaactgagctgctcctcctcgtagcgctgggggtcgatgaacggccggtcgatagagcggatcatcagctccccacagtacacacactcagcggccaccaactcatccaggtcagccttgagctgttcccggctgggccctgccgtggcagccccaccctcggcctccttggcccgggcagagcccttggctgggggtggagcagcccccagcttcctctgcagctcctccagccgggcctgcttgtaggctggcaggccaggtcgcacagcctgcagcaggcagtcagcatggaacatatggccacagaggaagaggtaaaaagggcggttgagcagggggaagtcgcaggtggcacatttgtcctggggctccacagtgccgtagcggccccgcagctcctgcaggtctcgccggatgcgctgggcactggctgtagcctcttccatctcccgctgcagctcctggatgtggtggttgtaggccttaagtgagctgcagatcgcctccttgaagtggtcgatggtgacgaaatcaggaaagaagggcagcacatcctcaatcttgagcaaggggcagctagccaggcaagccatggctgtctgtacatcttcctcttcctgcaccacgtgccgtgcgatcttcagccacagcttcttgcgcaattcctcatcctcctcaggcaggtctgcacactgcttggccaggtccacatccacctgcagggccaggtccacggcctcctcatacagctctaggaccttgtagacatggacacaagcgggggtggtggccatgctcggcgcagagccgcagcgcatacttgaggtcgtaatgcacccggtgggggctggccccagcctgctccagataggccagtagtgagtccggccggccacgggcatacagtgacagcaggtagttgtggatggcctgctcagtctcccccagcacgttcacgcagaactccatgtagcggatggcctggctcacctgctggacctcaccaccctggctgtagttcaccagggcaggaatgagctgacgagcatccagccggctgcccatctcaatccaggcatctacaagctggcgggggatgtgacggatgaggatgggtgagaacttgtagaagagctgggggtcacggtggcgggcgagcacggccagggcctcctcgtaggcctcgtgctgacagtggtaagccaccacccgctcatagtcctgcatgatcactgcaaagtccaccatgtgttctgtgtccccatgactggcgagcagctcatggatagaggcccggctggcaaagagccactctttgtggcgggggctgctgaggaaggttcgaaagcattccttggtttctcggtagagagtcagggcctctgggtcgccctgcagagccccaagccggctcaggtagagctctgtcagccaggtggtcagcagtgtggcctgggcctcgtgcc

SEQ ID NO: 126163 - DNA, 1829 bp, Homo Sapiens
  misc_feature (49)..(49): n is a, c, g, or t
  misc_feature (56)..(56): n is a, c, g, or t
  misc_feature (69)..(601): n is a, c, g, or t
  misc_feature (619)..(637): n is a, c, g, or t
gccgacagtatccgtaagcgcaaggtcgaacagaaggcgcacgaggagntccaggnggaacgcttgtannnnnnnnnnnnnnnnnnnnnnnnnnnnnnnnnnnnnnnnnnnnnnnnnnnnnnnnnnnnnnnnnnnnnnnnnnnnnnnnnnnnnnnnnnnnnnnnnnnnnnnnnnnnnnnnnnnnnnnnnnnnnnnnnnnnnnnnnnnnnnnnnnnnnnnnnnnnnnnnnnnnnnnnnnnnnnnnnnnnnnnnnnnnnnnnnnnnnnnnnnnnnnnnnnnnnnnnnnnnnnnnnnnnnnnnnnnnnnnnnnnnnnnnnnnnnnnnnnnnnnnnnnnnnnnnnnnnnnnnnnnnnnnnnnnnnnnnnnnnnnnnnnnnnnnnnnnnnnnnnnnnnnnnnnnnnnnnnnnnnnnnnnnnnnnnnnnnnnnnnnnnnnnnnnnnnnnnnnnnnnnnnnnnnnnnnnnnnnnnnnnnnnnnnnnnnnnnnnnnnnnnnnnnnnnnnnnnnnnnnnnnnnnnnnnnnnnnnnnnnnnnnnnnnnnnnnnnnnnnnnnnnnnnnnnnnnnnnnnnnnnnnnnnnnnnnnnnnnnnnnnnnnnnnnnnnaagaattcggcacgaggnnnnnnnnnnnnnnnnnnncacaaaggcagtgtagactttaattcaggttgacaggtgggaagagaactaggatttgcttccaagggtgtccagatgagaagaccatccttcagggaggggcagagagggcaagagggtgcgggtggcctggtggcagaatagggcgaggagcaggggcgtagccacacagtgcaaaattgccagggcttctgccaggttcagcagcaggtccagagcctgctgggccagacatgttgacaacagcaacagcttggacctcaccaggaaatccagtcctagaaccaccccatgaggccaccagaaaataaaccaggcccacaggatattcatccaggggcctggccccatacccaatgccttcttcagccccttggctccaaacaaacccaatggcaacaagacaaagatggcaagacaggctacagtgtgtgtggcctgcaaagccttcagctccgtgctgtatatcagggtgcagagtccaccagaagcaccactggccagggtgacaggcagtgtcagtagggcagccactccccaaattcccacagtgagccccagggtgaggcctgggacctggcctgcacccagtctgtggcccagggaggcatggcaccctagcagcaaagcctgggcaaaggctgagccataccagacacagtagcccaggctacacagggcagagctgcgagtgctacctagccctggggccaagacgggcaccacaatgctgaagagggcactgcccacagccagctgtgccaggacaggccagccagggcagagctgccagcggaagagaggtctgaaaagcatgaagaggacagtgctgctagctaggatacccaggacactggtgaggatgaagaagggcagtgcagagtcatccagcaggttacaggagtggcagggggcagctgcttccaggttggcatcatagtctccatctgggaaggaatcattcacaccataggaagaattccatacatcttcgaagtccagctgacttgagttctcagttgagggggagagctccgccctgtgcagacagttccccatggcaccgtttggttcaggcccgcagacagaagggctgggacggctgtcagcgcctgtgcttccaagataagagccaaggactccccggccgtaatggccgaattcccgggcatatgtccggtaccgtcgactg

SEQ ID NO: 126164 - DNA, 928 bp, Homo Sapiens
  misc_feature (62)..(72): n is a, c, g, or t
  misc_feature (108)..(108): n is a, c, g, or t
aggggcctggcccatacccaatgctttcttcagccccttggctccaaacaaacccaatggcnnnnnnnnnnngttggcaagacaggctacagtgtgtgtggcctgcanagccttcagctccgtgctgtatatcagggtgcagagtccaccagaagcaccactggccagggtgacaggcagtgtcagtagggcagccactccccaaattcccacagtgagccccagggtgaggcctgggacctggcctgcacccagtctgtggcccagggaggcatggcaccctagcagcaaagcctgggcaaaggctgagccataccagacacagtagcccaggctacacagggcagagctgcgagtgctacctagccctggggccaagacgggcaccacaatgctgaagagggcactgcccacagccagctgtgccaggacaggccagccagggcagagctgccagcggaagagaggtctgaaaagcatgaagaggacagtgctgctagctaggatacccaggacactggtgaggatgaagaagggcagtgcagagtcatccagcaggttacaggagtggcagggggcagctgcttccaggttggcaccatagtctccatctgggaaggaatcattcacaccataggaagaatgtccagtacatcttcgaagtccagctgacttgagttctcagttgagggggagagctccgccctgtgcagacagttccccatggcaccgtttggttcaggcccgcagacagaagggctgggacggctgtcagcgcctgtgcttccaagataagagccaaggactaatgagggccatcaggttctgggcagggacagggggcatcaggaagccttaccccacgcccactgcctgcccccggccgtaatggccgaattcccgggcatatgtccggtaccgtcgactg

SEQ ID NO: 126165 - DNA, 457 bp, Homo Sapiens
gcacctcccttatctctgcctcacaagtcacccagcccccctctcttccttccttgtgcttgaagaatctctccttgctggaaagccccctgttttctcaatctccctttccacttcggtaaaatctctacttgctggaaagccccctgttttctcaatctccctttccacttcggtaaaatgcccactttctggtccccacctttttcctgagtgtagtcccaaccagccaaatccaacctcaaaacaggaagacccaaggccagtgacccccataggcctgaggcttgtgcaggcagtgggcgtggggtaaggcttcctgatgccccctgtccctgcccagaacctgatggccctcattagtccttggctcttatcttggaagcacaggcgctgacagccgtcccagcccttctgtctgcgtgcctgaaccgaacggtgtttgggaacagaaagc

SEQ ID NO: 126166 - DNA, 1941 bp, Homo Sapiens
ttctaactactttcactaacacgcctcttttgtgtctcttctgtcctatctcacgtcccctctcattgctatacgttcacccctccactcagttttctgtcccaatggcacaaaaacatctctcccttgggttccttcttcgaaaaccatttgaaaaagcacctgcgaaaaaggagaccctctgtcccatgaaacaccagtcccgcccgggttttgggaccctgcgcccagcacattgggccctttacagcccccgaccgcccgaggctgattaacatcttaataaagctactgtgagggaacccaccgtggttagcttatacttgcgcaggcgaggccttctgaaatcagacagtaagcaaacgggaagtagagccagatcccaaacgtctgtaagaggaactggccgcaaaccacagctgcacaagccagagaacaactccacaccctcacgggaagggaagagacagacacgctcacgccttaccccggagcacgaagtgggagggcagggcgagggcctggggagacactgacccctgaagccagctcgaggagggcacacctgccaggctgacctcgtgtgcttggcgtgaggcaaggccacctgctggaaaccttgttagtcggcctggtttctgtatcaagcaaatttatttgctcaaaacatctttaccatttgaaaacacccaacctcctacaacaaccgagaactccagagctggcatctcgcaccctggtggcttgagcgcgtgcacggctgtgaatggagtaaagagccgaggccgggcgggggccgccacgcatcagggcccccgagggagggaagacgaggggtggaaggccgagggcccaggaggaagcagtggctggtgggagacccggaccccaaacccccaacagaggggacccagcgtggtctgggtgaagacccggcaccagctgcccccaggtgacctccctctgggggccttgttccttctgaggctgcatctcgcacaaatccacaggtgaatggggcgggctgggccacaggaagcctcaccccaggacgggagaacgtgggtggaggccacctgccttggggagtccagaggagcagcagccgtgagagctgtgggggccggattctggcagggcaggggcgtttgtcctgcagggatgggggtcgctgtgtgtccgcctctaggggctgtcaggcggtagctactgcaccagccggtaggtgatgtacctgccagccgtctcactgggccggatgatcttcaccacctgcccacgctttatcccaaagtagcgcgccacagggtcccccgcctggatcctgggcagctggttctctcggagcttatatcgggccagcagctctgtcacctcctccttggtcatgacgacgtgctcagggactagctcgtgctccgtgatgttgatgagcagctcctgctgcagaaactgctccaggatgtacttgggggccatgtcgaccagggactgcttggcggagggtgtcatgccctgctgcaccacgatgagagcccgtgtgatgttctcctcctgcatgcgctggcagtacaccttgatggtcttgatgcccaccttgggctcctctggaaagaacacaaacatctggtcggtggggtcatcgttgtgggccaccagcacggtgaggtccgtgcgccgcggccgcccctcactcggcttgtccccaaattgggctttgaactcctccagggtctggtcaagctcgtcctgggtcaccagatagccacggtcgtggcacagctgcatgatggtcttgcggattttccagagccggtacgtctcctcctcgtcgtccatggcagcctccgccgccgccgccgctcgcaccccttctgcgtgcgcctcgtgccgaattcgccacccaggcctcgctaccttagaaccgttatagttactgcc

SEQ ID NO: 126167 - DNA, 759 bp, Homo Sapiens
agcagagagctggacacggggcttggggctcaggcagtcggcctccggttctccaaggtgaaccaggaagtgggtggtcggggccgtttggtggctgagggcaggggccacattggtgccgcccacaggatgccctcaccgtggtggtggatgacctccgcctgtgctctgtgaagccgtgtgaggacatcgagcggaggttctgcttcgaggtgctgtcacccaccaagagctgcatgctgcaggctgactccgagaagctgcggcaagcctgggtccaggctgtgcaggccagcatcgcctccgcctaccgcgagagccctgacagttgctatagcgagagggtggaccgcacagcatccccgtccacgagcagcatcgactccgccaccgacactcgggagcgtggcgtgaagggcgagagtgtgctgcagcgtgtgcagagtgtggccggcaacagccagtgcggcgactgcggccagccggacccccgctgggccagcatcaacctgggcgtgctgctctgcattgagtgctcccggcatccacaggagcctgggtgtccactgctccaaggtgcggtccctgacgctggactcgtgggagcctgagctgctaaagctgatgtgtgagcttgaaaacagcgctgcgaatcagatctatgaagcccagcgcgaaggttcaggcagcaagggaaaacccaccgccagcagcctcccggcaggaccaggaggcccgggatcaacgacaaatacgtgg

SEQ ID NO: 126168 - DNA, 1003 bp, Homo Sapiens
tttaccagacatgagggactttttattcgtttcacatgtttgtttagctattagacacaaaggggtcaagacttgaagcagtttttgcaagtgaaatcatcttctggcccacccttcatattaccaaggctactggctgttctccaacaggccacagcggttatgtcctcctggtacttgcgtcgcaggtgtcacccttgatggtgcaaggccctgcgtggctattcgggttctcccccttaatggagttgctgtgaggagatgaaccttattgggggacccgcagaggctggctcagaagagactgctcttaagaggttaggaggactaacaggctacggcgtgacaaggtggcctcagcacagtctgtcagcttggggcctaagtgaagttcacaggctgatagggccagggagagcaggccattcaccttccggggccactggctgggctgatcatcagagcccctctggctggtcttggggctgttattcaccttgtcagcagcagagggcagcacagcaaggtgctggagaggaggctgggtgggcacaccaagggctgggtgggagcaggtacagggcgctgtgggcaggaccctttggactcctcaagtctccgactcgtctgtctcttcagtggagccatcactctctccatccacttttcgggaatgatggagaggtctccagggagagccaacccggggaggggtccgggaaggcaggcaactggcctctggactggctgtgaccgagttgaccaggcctgggacctgggccagcctgaagaagggaagaagcctggagggcagcgagaggcctcctgtacagagagcagggcctccatgcccactcttaacactagggtaaacccctgggctgcagcccccaaaggactcagagggagggacacctcaggcctccactggcccccagacccttccctggcagatgtgggatgttacagacaagtggtgttggccccagatgggcctcgtgcc

SEQ ID NO: 126169 - DNA, 673 bp, Homo Sapiens
  misc_feature (410)..(478): n is a, c, g, or t
tttttttataatagaaaggatattttaatgccaaaaacaaaagagaaagctctaagaataggtaatagtccgttaatttaaattaacacttttataaaaacatttgctacattacttttattttacttattttgcccccgatgggtgaagatgttagggatcagcacaggttctctggcctcattggaaaccagagaacttgcccaagcctttcccacagagaagtggagagacctttttttgagggaagaaagggcaaaactgcgacaggacccagaagctctcactggctacttagcacctcacaagtccctttccagccccactggtctcttagtgaaaataatgtatgaggctgcctagttgcgggtcagacaacagactccctgatgccaagtgttcctctgtgnnnnnnnnnnnnnnnnnnnnnnnnnnnnnnnnnnnnnnnnnnnnnnnnnnnnnnnnnnnnnnnnnnnnntgtttattaaaaaatcctgcatctttgagaagcacatttgcagtgagtgggggatttcggccactcatgaaagactgttgcaaagcccctgtcatgtggcttaccccaaaagaggctccttaattgctctatctatccctgctcttcccccagctgacttctgatcatgtgatgaccacttacggctggtggatg

SEQ ID NO: 126170 - DNA, 1042 bp, Homo Sapiens
aacccccgggggggattttggttcccccccttggactttggggttccagggaccctggccccaggcttcgaaccccaggaccaggggtgcattagggccaggctgatgcgctgtagagtagtcgtaggtcatgaggctgaaaccatccagcacgggggccagctgctcaaactccttgtgcgtgaacatgcccagctggtcggtcccgggggtgatggcaggcgggatgaccaggagggccagcagccgggcctggtgcagagcctcggccaagtgggtgagcatgtggatgaggcccacgcgcttctggcttagcagctggttccagacctccaccacgaagccatcgaaatgctggttctttgccacctggaccacggtcttgctcagctcctctatctcatcctcactgtctaagacgttccggaaatcatcgtaagtccagtcctcaaacaggagccgaggcactatgtgcaggcccttggcatgcttcctgacagctcgcatccacccttggtccacgtcgtggaggcccgtgacctcaaacatctcacggccacgtctcttcagctgcagccagacgggtgagatctgtgtgaacttgctcccaaagaccttggtgacatcgtagccatggctgttccatggagtgacatagcccagtacatccccagcaaagtgtctgtcccgggcctttgccgagcagtagctgcgatgctcaagaaccacactctcagctttgaggtccgtcaccaccaaaccccggtcttgcaccggcttatctgaaaactgactcttctccagcagcgtctttgaggcggcttttttggcatctgactttgacagggtagtgtgaacagggctgcaggccagggcaagccagaggaggttgaagagtgtccgcatggtaggtgtgtcacagtagggtccaacctcggggtccagagggctgcatgtcagggaggccggacggccacaaacgcacggccggaagacgctccctcgtgccgaattcaacacccagcctcgtacctagccgtaa

SEQ ID NO: 126171 - DNA, 1049 bp, Homo Sapiens
ccggcgcgctggagcgttttcctggccgtgcgtttgtggccgtccggcctccctgacatgcagatttccacccagaagacagagaaggagccagtggtcatggaatgggctggggtcaaagactgggtgcctgggagctgaggcagccaccgtttcagcctggccagccctctggaccccgaggttggaccctactgtgacacacctaccatgcggacactcttcaacctcctctggcttgccctggcctgcagccctgttcacactaccctgtcaaagtcagatgccaaaaaagccgcctcaaagacgctgctggagaagagtcagttttcagataagccggtgcaagaccggggtttggtggtgacggacctcaaagctgagagtgtggttcttgagcatcgcagctactgctcggcaaaggcccgggacagacactttgctggggatgtactgggctatgtcactccatggaacagccatggctacgatgtcaccaaggtctttgggagcaagttcacacagatctcacccgtctggctgcagctgaagagacgtggccgtgagatgtttgaggtcacgggcctccacgacgtggaccaagggtggatgcgagctgtcaggaagcatgccaagggcctgcacatagtgcctcggctcctgtttgaggactggacttacgatgatttccggaacgtcttagacagtgaggatgagatagaggagctgagcaagaccgtggtccaggtggcaaagaaccagcatttcgatggcttcgtggtggaggtctggaaccagctgctaagccagaagcgcgtgggcctcatccacatgctcaccccacttggccgaggctctgcaccagtgcccgggctgctggggccctcctggtcatcccggcttgccatcaccccccgggaccggaccaagctggggcatgttcaccgcacaaggagtgtgagcagttggcccccgtgctggaatggttccaggctcatgacctaacgactattcctaaagcgcattcaagctggcccttatgaaccctg

SEQ ID NO: 126172 - DNA, 935 bp, Homo Sapiens
gtttgtgtcgaacagcaaacggagtggaggcctgtatttcacacctgctcactcactccatggcttagaaaagaacacgtccaccgcggaggccgcaatgcccacctagagcaggtcgtagaagtagtccaggccctggcccagctcccagatagagaccccaacgcccagctcccgggccagctccagccgcacctgcagggacttcagggttgggtagaagacgacgtgcctcccactgcggctcttcttgtactcgaagaagtgctctgaggcctggctgtcccacaccatccggggcctgtggtccttcagtgtctggatgtacctggccccgacaacaggctcacgggcatccttggaggtcgcgtagtccataccatagaagttgagccccaggaggattttgcttcgccacttggacttcgggtccaggacctggacgcaggctcgaacccaggacaggggtgcattagggccaggctgatgcgctgtagagtagtcgtaggtcatgaggctgaaaccatccagcacgggggccagctgctcaaactccttgtgcgtgaacatgcccagctggtcggtcccgggggtgatggcaggcgggatgaccaggagggccagcagccgggcctggtgcagagcctcggccaagtgggtgagcatgtggatgaggcccacgcgcttctcggcttagcagctggttccagacctccaccacgaagccatcgaaatgctggttctttgccacctggaaccacggtcttgctcagctcctctatctcatcctcactgtctaagacgttccggaaatcatcgtaagtccagtcctcaaacaggacccgaggcactatgtgcaggcgcatggcatgcttcctgacagctcgcatccagcacattggtccacatccgtactgacccgggaccgagctgat

SEQ ID NO: 126173 - DNA, 694 bp, Homo Sapiens
ccccttgagcataaatgttttattgtcacctcagggctctcaggcaggtggggctgttgcatgccagttagagggaagtgcctgacatttcacactttaggaaactgaggcccatgagcggtaagagaatgtcctaaaggcataccgagtcaatagcagagctgggaccacccctcattgctccctctggcctccccatccaccctccagctgctcttccatggctggggtggggtgcaagtggggtccttcataagctgaccttggggccttcccagacgggtgttttgtctcgaaagaaatgctaccctcataattgcctccaccacaataatgttcccacctccacattagagatctactgccctttccacaattcacagtcatatttgggtggtcagcaccacaccaggactgtgccaccacacctgtccctctggagtccacttccagtcactttcctacggcacagggtttttctgcctggctcccggttggggctgagtcggtcgatgagtgaacttcagccctgcaggtccagaccctgcacaacctccttcctcctgcggctcctcctgccatcccacccccacccctactcggccaagttcagaccaggactcttctgttgcgttcttccttcggggtcacatgccccttgccgggctgcgcgctctgtcttgcaacctcttct

SEQ ID NO: 126174 - DNA, 1881 bp, Homo Sapiens
  misc_feature (149)..(158): n is a, c, g, or t
  misc_feature (256)..(275): n is a, c, g, or t
  misc_feature (405)..(405): n is a, c, g, or t
  misc_feature (408)..(409): n is a, c, g, or t
  misc_feature (413)..(489): n is a, c, g, or t
  misc_feature (1831)..(1831): n is a, c, g, or t
ggggaaaaattattgttgccaaagggtgtaccagagagggtgataaccggcggggaatttcaggtgtaatttcaaccttttttgaaggggttttcccttgggcggaaagtttttaagaatttctccactaatttccaaacatttccccnnnnnnnnnnaaaattgggaattaaattccctttggaacccccttggaaacccccggaagacccccggaacccccttcggattttttcagaaattttggtgacccccnnnnnnnnnnnnnnnnnnnnattccagggcgaattcaagccccggttttcttcggaaacaccttggaaacagtttttttccttttcgggcccccgcccgaaagaaaagtttaaaaaaattttttaaaaggctatgggggcgcccaagggnccnnccannnnnnnnnnnnnnnnnnnnnnnnnnnnnnnnnnnnnnnnnnnnnnnnnnnnnnnnnnnnnnnnnnnnnnnnnnnnntagtcataaaaccgattatttaattgaagctataaaaaaggtagtataagtgataaaataattaggaaagaatatttagcatgtttcaaaacatttaaaataggagcagaacattttacaaaaagttgtacaggaaattaaattcttaaactatcagtacaaacatgacattacagagtatcttataaaatacaaagacaaatataaaaggactatgatgctttaagtctgaaaactattggccaaatatttaggtttaaatttacagttcctgggtatgagaatcatattactatatacatctcccaaaccagtaggtagtattttccaattaaccatgtgtggtatcatcttctacaaagtctttggccatctctgctgtgatcacatcaatatgactaaccttatttctgaactttacaccatagaatttgtcagctgactcaagcagttcaggcctaaaagtagttgtaataaactgagcatgtacagcaagttccataatcatatctgacacagcctttctgtgctgagcatccagagcctggtccaatttcatcaaccaagtaaaatggagccgggtcacatttctgaatggcaaaaatcagagcaagggctaccaaggatttctgtccacctgaaagctgttgcatttctctcatttcaccttgttttcctgtaaatgacaccctaattcccactccagtaaactggtcaactgatgggacactgctttgtgagccagaacccctctcactctcaccactcccttctccttcatcttgagactgactgccctccacatctcctttcttcatcaccaaagtagctttgccaccaggtactaacttctggaatacttcactgaagttcttagatacctgtttgaaagttaactgaatagcttcatatttccgaagttcaagtacattcatcagttccatgatcgatttgtaacccctatctaactcttcttgacgctttattaacttttctgttctgctcggagaaatttacaaactgatccaaagcctttttgttaacatggctgtacttctttaattctgtgttgcactgctcaagttttcgaaacaactgtttgaggctcagtgtctggtacttttcaaatgcttcctggggaagtgatccaagttctcgaattttcttcatacactcttctttcttcttcaatagcatgccttgccgatttgtcatcttttccagttctttagtatcatgatttatagcatccatatgttctttttccatatttttccagcgctccatactcttctgaagctccttaattccagcttctgttttatcaatggaaattgtccanatcttctggaatcgtgccataagtggtctttttactcttttatttgatgc

SEQ ID NO: 126175 - DNA, 649 bp, Homo Sapiens
ggtttaaaaacaggagactatttaatccatctaaaaatacaaatcaggaaatggggggaaccataggaaaatcctccacctctaacagagcgaagttactggctttctgcttgctccaagaatcccaaggcttgatgtttggaaggaattatctgttcttcaactactcccagatactcaagacataagttacacacatctggagaagggttctgccctgctgaagctagatgggagctcaatgcatgggagaaaggagcatcaatctagaaaaaaatgatcaaagaacagctgagtgacagtgtggggccatcccaggcaagtgggctcttggtgctctggtgtagccagaacccatacaagctgggctggcctaggaagcccaccagccagcctgtgttcagctacagcttctgtgttcttatttaccatcatcagccctagacgcctccttcaagccccctgctggttggtttcatcattatctcgcctcttccaaatctgaatgtaagcctctgacagtgtgatcatctggggaaggatgtcagtcacctggaggtcttgtaattcataccatttgcctgtcccatgatgaagcacgtggatccggtaggagccctcggagggcttgccgtcatgcacgatgttg

SEQ ID NO: 126176 - DNA, 786 bp, Homo Sapiens
tctggtttaaaaacaggagactatttaatccatctaaaaatacaaatcaggaaatggggggaaccataggaaaatcctccacctctaacagagcgaagttactggctttctgcttgctccaagaatcccaaggcttgatgtttggaaggaattatctgttcttcaactactcccagatactcaagacataagttacacacatctggagaagggttctgccctgctgaagctagatgggagctcaatgcatgggagaaaggagcatcaatctagaaaaaaatgatcaaagaacagctgagtgacagtgtggggccatcccaggcaagtgggctcttggtgctctggtgtagccagaacccatacaagctgggctggcctaggaagcccaccagccagcctgtgttcagctacagcttctgtgttcttatttaccatcatcagccacagcccttgggagcaaagccctagacgcctccttcaagccccctgctggttggtttcatcattatctcgcctcttccaaatctgaatgtaagcctctgacagtgtgatcatctggggaaggatgtcagtcacctggaggtcttgtaattcataccatttgcctgtcccatgatgaagcacgtggatccggtaggagccctcggagggcttgccgtcatgcacgatgttggcaatgaggtcataggtggtattcttgtgtactgcttgtacttcttcagacaagtattctctcagatccacatttgtaatagggaaattgacaatagttggattcttctcaac

SEQ ID NO: 126177 - DNA, 1022 bp, Homo Sapiens
  misc_feature (799)..(799): n is a, c, g, or t
  misc_feature (824)..(825): n is a, c, g, or t
  misc_feature (835)..(835): n is a, c, g, or t
  misc_feature (840)..(841): n is a, c, g, or t
  misc_feature (844)..(844): n is a, c, g, or t
  misc_feature (863)..(863): n is a, c, g, or t
  misc_feature (866)..(866): n is a, c, g, or t
  misc_feature (906)..(906): n is a, c, g, or t
  misc_feature (966)..(966): n is a, c, g, or t
  misc_feature (980)..(980): n is a, c, g, or t
ttttttactgatatctctttaatactttcatcattcaagtttgttcagaacattacaagaggcatgaaagaaaaaataattccatttttaaaactctgtctgtccaaagtataacatatgaaaccatgccattatctcttaggaaacaaaagcattcaaaattaatttggtattaaagttcaagattcagactaacctcaaagtacggcatgtgcagtgtttaagtgcaagaagtattttcattccaattattttacagagatgctggagtgacgtgtgcaatttgaaatattcaaatcctttaaggtttctgaactaagtgtttaaatgaaaactgaaatgctgcatagtttcagtggctttcaatttcctgtttgatctcagaaatatatggatgatctttgccgtgagctacttccatgattgcaatggccttcttcagggctttctcccctgcggctttgtgttccaggcccatgtagagtctccctagcttcaaccacatggaggccacgttgagggagtacaaaggatagtgcttactgtagggcttaatgattttctgtccatattgcagggctccttcccagtcctgcatgtacaagcagacacccatggcctggtacatcatgtgcaacatgtacacgttactgtcctcaaacacagagctcatcttctcctggctgagctcgcagatctccagcagctcactaggggatttatagtgcttgggcctccggaactcttcaatgacgttgcgtgcatatctggacatgtctcggatggcttctgctttggnggatcgctgagctccggatttcacnnttggctatcntgtcnntgnggtaactcctggactccangtnagaaatagatctctaacggtcattctatctcgtgggtaangaatcatatactgtaaactctctccgctgattctgtaagtctactctgcaggtccttgtngtcatgcatggganagttatcacatgacatcagatcctatcaatggaatctcacta

SEQ ID NO: 126178 - DNA, 1083 bp, Homo Sapiens
tttttaatgtttctgaactaagtgtttaaatgaaaactgaaatgctgcatagtttcagtggctttcaatttcctgtttgatctcagaaatatatggatgatctttgccgtgagctacttccatgattgcaatggccttcttcagggctttctcccctgcggctttgtgttccaggcccatgtagagtctccctagcttcaaccacatggaggccacgttgagggagtacaaaggatagtgcttacttgtccttggtggtacactcctggcactcacaggtaaagaaataagaatctcttaaccggtcatttctatcttccgttgggtacaggagatcaatatagctggtaaaaacctcctctccccggcttgatttcctgtacagctctgacttctgccagggtccctttgtaggtcacaatgccattggggcagcagctatgattcatcaatgcaacatcaggaaatatcgctgatcccaaatgagaaagttcttcatcttcaattgtgaagccattacagttaacctgtgcaaagattactccgaggctatcattgtcagggaattcgagatgcttggagtaaaagtgatggagagcagttatgtcactctgaatcaaatccttcttctcattgtctaacttatccagatgtgattcaaactccttcacagctaacaatttttccgaaggtgttctctctgggtggattttctgtttggccagaatccttgctgttagtcttacagtctccgagggattccagttttccccaaaaacaaccatgggagaacattccagcttgtgcatgggccaatcttctttctgacactccacattgcagtaaaatgcctgcttgcatcttccacatttggacaatccttctttcctggtgaagcagtactcgcagtggttgccccgctcgttgaccgtgagcacgtaggcataggccgggcaggagaacagcaagtcccccacctggaagggctgcagagcccgcagcccccggcctttgcccgggctgcagaagcgctccaggccgcagaggccctcggccctcatggtggcggcggggcgcggccgc

SEQ ID NO: 126179 - DNA, 464 bp, Homo Sapiens
agtactacgaggctatcattgtcagggaattcgagatgcttggagtaaaagtgatggagagcagctatgtcactctgaatcaaatccttcttctcattgtctaacttatccagatgtgattcaaactccttcacagctaacaatttttccgaaggtgttctctctgggtggattttctgtttggccagaatccttgctgttagtcttacagtctccgagggattccagttttccccaaaaacaaccatgggagaacattccagcttgtgcatgggccaatcttctttctggtgaagcagtactcgcagtggttgccccgctcgttgaccgtgagcacgtaggcataggccgggcaggagaacagcaagtcccccacctggaagggctgcagagcccgcagcccccggcctttgcccgggctgcagaagcgctccaggccgccgaggccctcggccctcatggtg

SEQ ID NO: 126180 - DNA, 514 bp, Homo Sapiens
agcattcaaaattaatttggtattacagttcaagattcagactaaccctcaaagtacggcatgtgcagtgtttaagtgcaagaagtattttcattccaattattttacagagatgctggagtgacgtgtgcaatttgaaatattcaaatcctttaaggtttctgaactaagtgtttaaatgaaaactgaaatgctgcatagtttcagtggctttcaatttcctgtttgatctcagaaatatatggatgatctttgccgtgagctacttccatgattgcaatggccttcttcagggctttctcccctgcggctttgtgttccaggcccatgtagagtctccctagcttcaaccacatggaggccacgttgagggagtacaaaggatagtgcttactagaacaagagaagagacaacaggccaccatgtcagcggctactgagccgccccacaggctgggtgcagtaagccggaggctgccatgcttagggccaacctctgcccaccagcggccgc

SEQ ID NO: 126181 - DNA, 2283 bp, Homo Sapiens
  misc_feature (860)..(869): n is a, c, g, or t
ttaaggaatatagcctttttattgactactttaagtagaacaaactaaatacatatttaacagttttggttcatttatacagtacattaaataagttatgcacagagttaggtaacaaaaattcctatcagagtaaaatgacaaagcacagaaaaaccagattctaatgcattctgtgggtggtgtcacattcatcatccccctttaaaaaccacgcgtggaggcttcgttttctatttatttacattattggctttcttttgtgagcggagcctttgtagcctcgtcaggaagttggaaagccacgttaaggggactgaaggcctcttggcgcagcagccctttcaatcattcgcctaatgcttattgctgcttctctgccgactccaaggtagggatggggctgtccccaacagacaccagcgcacatgccctatttggtataagcatcactgagtgtacactgggcagccgtaggctcgaccagatggggtctgtgagggaagctccacctcaggggctgtggagggggaggaggggacacaaggcccgcccctcaggcctcctaaccttctcttagctcacgatggaaaaggtcacctgcaccatcatctttggaaatgagcacgtcgatgcccgaggaaagaggcaggtagtcaacgttttggtttcacaagaactacagacactccagagttggaagggccctgcggagccgctggcacagcccccaccgcaatctgggcagggctgctctcgacagctggccatctggcccgtgctggaacagtccatgctccgctggctattcttccgtttggttcagacacgctaccacccagttttctgcaaacagcttnnnnnnnnnntctaaggaagttggtttggtctactgacctgggagccttggaaaccttgtttctagttcagttctgaagaaagcctccaagaagtgttctattttcagtgatttattcaattctacagtttccaggacagatggccatccggtcattctgttttcattttgaagagctcactaccgtacaattccagctgtgctgaaccttcaaacgcacttgttgcgatatcctctagaactacccagaatgatgtctataccctttgcaagcaggtgacaagccgaggcttactaactctgggacagggctgtacaaagtaaagcatgggttttctgtctggaagctgaagatgtcaagttgacactaagcagtgatgaactcctggtgaccttctggcccaaatgggcaaaggaaatccacgctgcagagagcgggcagcagccaaggccaggtgtggacttgtggtggcaagatgtgtcctgtttccagacagacatttctaacccagcactgccctagaaataatctacgcaatcggtgaccccacggtcacccaaccgtgcctgagcggatctgctagagcaccagccctggagctgcagggccccccagtgtggagtgcccccacctcccgaagtggactgcctaggcctaggcttaaacaacttcttgagtcaccttccccactggatgagtcaggcacggtgcaggcaagtggggacaaaaaggacaagcaaagacgtgaaacccagccctcaagaaactctggggacatctggcatctttggtcttctctggtccctgcaatcattcctcacttggccgaccataatgtcccacaactcatcagtgttccttggcgggtggtgctgagcactggtctcaccctagacatgtctggctgatggccagtcacatgttgcatctctttttagtttctaggtttctgaagagcctgcgcttgactgataccttctgtaccaccatgccagctcctctttgccttttatgtcactgcaaatatgaactgtagaggtcagtcctctaagcaggctgaatttccactccccacctggtagctgaggtgctgtcagcagaggctgggaaccacgcaaggaacctggattcgctcctgcgcctctagctgcctaccccgccccaatggtgctcctcctcctgaccagagagttggagaatttcagaaagggattcttgaaatgtgaatagaaggtcctgggcagaggccctcgtgacttctgtgtgaaactgaccagaattaacacagcagaaggtttgcaaactgagcttcagtgtggaatactgcccaggtttgcagatcagcctctgggcagcacgagcagggtggaagagcattacaaagattcagaaaacgaaactgtcacagcaaccacgtgagagg

SEQ ID NO: 126182 - DNA, 695 bp, Homo Sapiens
  misc_feature (561)..(593): n is a, c, g, or t
  misc_feature (624)..(624): n is a, c, g, or t
ttttttttgttcagacatttattgagcacttcttaagggccaggcatggtgtgaggcactgggatgtaacagtgattatgacaaagtccctcaaggagctcacagtctaatggtaaactacagagtaaactgaggcacagagtggtaaatgacttacccaatgaggtagaaacagctaggtatgtgaaaatgtgggagcagagctggagagagggcaaggtacaacttgtcctaagtaaaaccccttggactgactcaacagcaaggctgcatacacaaacattacaaaatctacttgcaaaaacctgaaaggagtttccaattatcaccatgactgaattcatgtttcacaatgaattcagctatttcctgatggcatttctatccttgcccccaaagccactgggcatgccaccagtctgctgggagacagcaattaggtagacagcttaaaaccaagaagtatctgactccaattttagcactgaaaaccatattaaaatactttaattaaatccacaaacataaatgtgtagcacatttatgatacttctacatgtnnnnnnnnnnnnnnnnnnnnnnnnnnnnnnnnnccagaggattctaataagttataggtaccanagagattagagaatttgtctgtcactttccatatatacattattttggctgtacacgggtgaaaagtgtca

SEQ ID NO: 126183 - DNA, 1036 bp, Homo Sapiens
gtcaccccaatttggccctcgaatcggtccctgtggtctccttatgtccactggtgatagaagtcttctctgggacctggaacatccaatctggtttctgctggagctgttaacctccaatgacgatctgcctccatggaaggcactgaatgctatgaaatgtcttgataggtcacatatgcctagtcttgtcattgttctttggtcatctgttaacttctaacagctgctgagcacaaatccgttaattaactcatgccataagcatcttccaattgctgataagtcagaaagttcctcctgtagcttcttttgttggggaactgctccaaaattgctaagatcagatcctatccatctaatatggttcttggatttcttttcaacgaggtcgattccatctaagacattggtgatgtcatacactctccgctttcggactcccagtttcgttgcaaccttgtttaagtcaagaatacccccgggagcagatctgacaagatccataaattttcgagttaaataaaccagcgatacatcaaaacgaggtctcttcacttttagagcttttctcatggacacatattgtacattatcttctaaattaatccttatttttgatggcagcaggccctccacgttgatggggtctcggcaccgacggcgaaccgtctcctccgtcgggtccaggaggagactgggtaacttcctcgccggccgctgctgactcatgctgcccggccgggcgtcctgctcccctcgcaccccacgagctctcccgccctctcgcgctcagctcgagcaccgccccccacgcgccgatttccaagggcccagcacctaaggggtccgcggcttcctccgaggcgccgcccggctaggccgtcccgcccgccagtaaacgcggcacggcctcacgtgcccgggagctcccgacgcagacggaaaaagaggagggagacccgcggatactcaagtcgcccggcccgccctcgtgccgaattcagccacccaggcctcagctacctagccgtat

SEQ ID NO: 126184 - DNA, 1768 bp, Homo Sapiens
  misc_feature (86)..(118): n is a, c, g, or t
tttttagcactgaaaaccatattaaaatactttaattaaatccacaaacataaatgtgtagcacatttatgatacttctacatgtnnnnnnnnnnnnnnnnnnnnnnnnnnnnnnnnnccagaggattctaataagttataggtaccaaagagattagagaatttgtctgtcactttccatatatacattattttggctgtacaagggtgaaaagtgtcactcagacatatttcgtaagtaatctcaacattatacagatatatacaaagacatcacatttaaattcgtgtgtacatctatgcaatgtacaacagtaactgcaaacatgaaccagtgtaaggcaatttcttttgtgatatatgacatactccttgaagggaagggtagagtccacaaagaactgtccatttcagcctgactgtctgtcttcatgacactctgtgatgaagctacttcaggaggcaagatgtctatttcactgacaaaaagcagtgaataattataaaaggagttgttttcaaatgtggaaaccacaattactcagtaatctaagtggtgaactcctcaaagacactactggccatgatgccgctactgagaacgagagcacttcatggataatttattgctctgagaatcaaatttgatgcgtaattctccacgaagatattcccgaaaaactcagtgatacataaattctcaaatgccatcagttgcttacttcaagcaattcttcactttgctgaggattttcttcttcctcagggccttctggatgagtgctctcagatgaagaggtcccgacaccttcagaccttttgttactggtctgaccctgctccacttcacacaaatagacatcgataggtccgttggtgctccttatgtgcactgtgatagagtcttctctgggagctggaacatccaatctggtttctgctggagctttaactgcaatgacgatctgttcatggaaggcctgaatgctatgaatgtcttgataggtcacatatgctagtctttcattttctttgtcatctgttaactcaaacagctgctgagcacaatccttaattaactcatccaaagcatcttccattgctgataagtcagaaagttcctcctgtagcttcttttgttggggaactgctccaaaattgctaagatcagatcctatccatctaatatggttcttggatttcttttcaacgaggtcgattccatctaagacattggtgatgtcatacactctccgctttcggactcccagtttcgttgcaaccttgtttaagtcaagaatacccccgggagcagatttgtcatgatccatatattttcgagttacataaaccagctatacttctaaattaggtctcttcactttttgagtttcagcaggccctccacgttgatggggtctcggcaccgacggcgaaccgtctcctccgtcgggtccaggaggagactgggtaacttcctcgccggccgctgctgactcatgctgcccggccgggcgtcctgctcccctcgcaccccacgagctctcccgccctctcgcgctcagctcgagcaccgccccccacgcgccgatttccaagggcccagcacctaaggggtccgcggcttcctccgaggcgccgcccggctaggccgtcccgcccgccagtaaacgcggcacggcctcacgtgcccgggagctcccgacgcagacggaaaaagaggagggagacccgcggatctcaagtcgcccggcccgccatcttcccg

SEQ ID NO: 126185 - DNA, 1467 bp, Homo Sapiens
  misc_feature (511)..(540): n is a, c, g, or t
taaatactccattcagtactatcttaacacaaatctgcatcagtgaaaagaacctggcaaaatccacctcttgccattcaatttgtcagatggtgaagaccaagaaagaatgttccatcagtttcaattttaaaatacgattgtcaaattgggaaaatgaaataaacacagtaaaataaactgtacaaaggcaaagtagaataacaaaaaatattttactaaaacataagatttacagaagtttccagacaagccatacaaaatggtcacaagctttttttgaaggggggaatctacacttgacagcaatgttattagtgagggctgtgatgtttgtttaatgttcccattttggttccaacaatcaagcttgtccatctacagcgtctaaataaagttagacttggctagagcatattctaaagacctggttagctgcttttaaccaatgcaattagatcaccaaaaaagggggaaaggagcccataaaattaaactacctcccccctcnnnnnnnnnnnnnnnnnnnnnnnnnnnnnnccacccacacccctgcagctaacctgacaactaccttcattcacagtgctttatacttaaaccaggatgggggaaatgaataaaagcagggaggggccactgcttttaaacgtttcacaacaatccagatgatacttctagcctctgctcatgctttatgacagtgaatcaggacaagacatagatttgctaatgtgcatttaatcaccaaaggactgaagatgtctgggcttttttattctgtaatgtttctaagactgtgtccattaaatgcaaacaaagaggaggaagtcttggcagaacaggagaagtgatgcacacttgatgatcgtatcaatttaaatattattcatggcatatagcctagtccatgctctagctgtttctatggcttgggcttcgttggtcttccactgctccgctacatcatttgctaatggatcatctggattgggagcacttaacaaggcctggatcgatagcagaactgtgcggatctgcagtgctggggaccacttatctttcaaaatatctaaacatattcttcccaacttgtctacattaggatgataaattttggtcatgaaacgtactttaggggctgccattgggtattcttctggaaggaatagttcaagtttaaaagtccctccctcaaagggggaatcctgagggccagcaatgaccacatgaaaataacgggcgttgctctcatctggttcggctttgatgccaggaactggttctgccagcaaacgctgggtttccttgatgatcctgcggggcagcccggccatcttgtcagaacccgagttcggcctctggtctcgtctccggctcctctcgcctcacgcacgagtggaagtcccgggctccacttccgggggaccctcgtgccgaattcaccacccagcctcgctacctgcc

SEQ ID NO: 126186 - DNA, 977 bp, Homo Sapiens
aaaaatgttatcgctttggggtgtccccccctctccaaagaaattaaatattgatatgtaaaaattaaactccataatcccccgccccggcccctggcaaggttaaccttggacaattacctttcctttccccagtggttttatactttaaacccaggagtgggggaaatgaataaaagccaggagggggccactgctttaaacgtttgcgcaacaatccaggatgatacttttggcctttgctcatgctttatgccagtgaatcaggacaagacatagatttggtaatgtgcatttaatcacccaaaggactgaagatgtctgggctttttttattctgtaatgtttctaagactgtgtccattaaatgcaaacaaagaggaggaagttttggcagaacaggagaagtgatgcacacttgatgatcgtatcaatttaaatattattcatggcatatagcctagtccatgctctagctgtttctatggcttgggcttcgttggtcttccactgctccgctacatcatttggtaatggatcatctggattgggagcacttaacaaggcctggatcgatagcagaactgtgcggatctgcagtgctggggaccacttatctttcaaaatatctaaacatattcttcccaacttgtctacattaggatgataaattttggtcatgaaacgtactttaggggctgccattgggtattcttctggaaggaatagttcaagtttaaaagtccctccctcaaagggggaatcctgagggccagcaatgaccacatgaaaataacgggcgttgctctcatctggttcggctttgatgccaggaactggttgtgccagcaaacgctgggtttccttgatgatcctgcggggcagcccggccatcttgtcagaacccgagttcggcctctggtctcccccggccgtaatggccgaattcccgggcatatgtccggtaccgtcgactg

SEQ ID NO: 126187 - DNA, 966 bp, Homo Sapiens
caagaaaagcacaagaggaaatattctcctcttttgcactgttattttattttgtttagtccatatattatataaaacataacaggaaaaatgaacgaatttataaaataaattgaggtgtttggatgaaaaaaaatacaagagctttgccttcatgtctacagatctcttaatatattgttggtcttgcaccttagatatcaaataaagatatctagcttgacacaaaagttggtagctgcaaggttaagctgtattagtttgatgatgggccaggaaatgatatattttctaaattttgtccttaaatattggctgtaacaaatgctgatatagcaaaaagtaagcttctattagacagcaagagggaaacttgagtgaatgaatgcaacttacctccaagtcctcttaaaggaggtaaaaaaataaatactgtgttttaccagtgctcccctcaaagcattattctaagcatgcaggagggtatagtgagcagctacaatagtaagatccaacccagaggtaggttcaaggccaagagtaggagagtggttgaggaaatcctcctagggccagtaccatttcatagaatgcccatttgtgctgggagatgagtctatggcctattttcttctgattcaaaaggacattcccaatttcaaccttgctgaaaaacaggcatttttgtacctgctgttaagaacagctaggatacaggataaggctggcataaaattatttagcaagcacatgctagctattccagtttgaaatctaccaaactgtaacatcagggagaaataaaaagttgaagatgaagttgttcctcaagctgagggaacaaaatcttacaaaaggagggattaggcactcgctaaactctatatggagaacatccttctcaagctaggtggaagatgaggaagaatattccaaaagctgaccaggccatttgcggacgcgtgg

SEQ ID NO: 126188 - DNA, 638 bp, Homo Sapiens
cgggggcccatctttgtaacatctttacttccttggagcaaattcccaggaatgggttttcggggtccaagggtatgcacctctagcactacgacaaacgcggccaacacgcttcagggaaacggtgccccagtttgcattctgcttcccctgccctgccctgggggtctgactggtgaaacatgggatggcagagtggtcgggtgtttcagattccacggtgggccggggtcttttcctaccctcgggagccgtctgaatttctcctctgccgagttcctgcgggtgtccttcgcccaccggcccgggggagtgagtagcaggcaccaggtgagcaggcctccgctcgcagcggctacgtgcacgggcaggagcaccgccccacgccccaggtggccgcagggtgaggggaccggagggcgggaggcgcacaatggggggcacgcccgtatctctagcccggccggcagcgggcagcgaggctcagtcctcgccccttctcccagctgctattcggggctcccgaggcgctcagaggggtcgactgcgtccgtggggcaaacccaggggccaggctaagacgccacacacggcaacgaccctcaacgacaacgacccccacgacgccccgcgcccca

SEQ ID NO: 126189 - DNA, 504 bp, Homo Sapiens
aaacattttatttacaaaaaattaatttattttcagaaataaaactcttttaaggtgttgcttgttttgtctccacagatctgctgggaggcagtggaggtgtgcagggacagggcagaggggctgaaggaaaggaggacatcaaagggacagggctgaggcccaaagggatggggtgtggcagactggggatgtaggtggagtgagcctgaggaaggtggctgagatgcggagtagccttccccccataggaccagcaggcacgcccctggccagggaagcacagagagacggccagatggggacaaggagagaaggtgtcacctccttgagataaggctgagatgtacacatgtgctcacacagggccacgagaaggcaggaagtggggatggaaaaaacagagacaccccaagagctgggtaaagggggaggccaaagggaactgaggcaggcccaaggaaggagggagagcaagaaaatggtagactcagacggagttac

SEQ ID NO: 126190 - DNA, 1026 bp, Homo Sapiens
gccttgggtgtttctctcctgccgtcccgtccacacgcttcccgggttcctgcccgcccagggcattgccacagggaagtaccacgccgcggtgctcaccaacagcgctgagtgggaggccgcctgtgtgaaggcgggcaggaagtgtggggacctggtgcacccgctggtctactgccccgagctgcacttcagcgagttcacctcagctgtggcggacatgaagaactcagtggcggaccgagacaacagccccagctcctgtgctggcctttttatcgcctcacacatcggcttcgactggcccggagtctgggtccacctggacattgctgcaccggtgcatgctggtgagcgagccacaggcttcggtgtggccctcctgctggcgctcttcggccgtgcctctgaggaccctctgctgaacctggtgtccccactgggctgtgaggtggatgtcgaggagggggacgtggggagggactccaagagacgcaggcttgtgtgagcctcctgcctcggccctgacaaacggggatcttttacctcactttgcactgattaattttaagcaattgaaagattgcccttcatatgggttttggtttgtctttctggtcgtcagcgtggtggtggaaacagctgaagttttaggagacagcttagggtttggtgcgggccacggggaggggaccgggaagcgctggggcttgtttctgtttgttacttacaggactgagacatcttctgtaaactgctacccctggggccttctgcaccccggggtgaggcctcctgcctgcctggtgccctgtcccagccccaggtcccgtgcagggcacctgcgtggctgacagccaggctcttactccagccggggctgccagcgcatccagccagcccagccctgtgaaagatggagctgacttgctgcaggggacctgatttatagggcaagagaagtcacactctggcctctcagaattcacttgaggttcaattaaatacagtcacaccgccccctca

SEQ ID NO: 126191 - DNA, 752 bp, Homo Sapiens
  misc_feature (126)..(135): n is a, c, g, or t
  misc_feature (407)..(439): n is a, c, g, or t
  misc_feature (734)..(734): n is a, c, g, or t
catacccacatcagttccatttattcttcgtacaaatattttacagttttatttttaaatcatttacacatattcatacaaagaaaaataaatttcaggatggaatcctgggaccatggtagtttnnnnnnnnnntctctctgatcattagctactaaagacaaggcaagaggcttagcagtcatttctgggggttagtgtatctccccatgcaggggacaactgagaagaatccaagctgctccctcatcttccttcgatctagatgggggaaggggattttccaatgctctcccctagaaacatttcaagaagtacagcaaaggcttatggtaacactgaacctatttgctagaaatctggcaagattgcactttctgaaccaattttctataacagttggctcnnnnnnnnnnnnnnnnnnnnnnnnnnnnnnnnngggattgccgcactcaccatacccccttcccacttgctctgtcctcccaccaacgttcctgaatagagcccttgatctcttctgatctagtccctccccgctcccacccagcctcatttcacaagcaaaccttcctcctatgccacacacccagacactctgtagcaattggccctggcagctcctgaggaccgctgcagtgatgacacaggactattgcatcagcatcgtgctcacagggaatcagagctcagccaggagaggtccaagaaatgacagaccatgagcactcctnacaaaactcagctctgct

SEQ ID NO: 126192 - DNA, 1133 bp, Homo Sapiens
ttaataacgaacattcgagccaaaagcggtgaccgaaacctgaattaatccctagcctaaatctcttaggatgccaaaatccccgccaaataagttccttccccaaatcccaactaccattttccatcacgactgttaaacaccggcatccttagctttaataccaactccctataggaccacttgaacaagaaaactgggtaacgcgtaaacttggccccctctaaggattactcttagaccgcccccctttgtttgttgtttttgcactatgaggtttaattggaaacattaaaatggttaactcataatgaattataaaactttgatagttacattgtactatcatttatgaggcatttatttttcattatttacacctgaaagaaacttcatacttgtgtgttctgttccccatctcagagcaagattatgaagagaaggtctaaactacttatataaatcaaaacccaactgggctagaaatgaagtataaagagaactaaatctatacacagctgtgccataagagcattaggtggttttagctcttatctggggtatgaaagcaatttagctcatctcacagaaacaaaagcaggtgctgaatcatgaaaacctcaattatttttagcatgcctcttaatttttctttcccctggtttcttgtcgtctgtgcttgattcttgaacaggtaaccacttgagaggatgccggcgatagatgggccatggaggaagtgtcagcaaacatgaaaaagcaaatccggccataactatatagacagtccacccgaactgttcagccacgtacccgtagataaatccaactattgcagaaaaaagaataattccctgaaacatctgttcagctagcttctggcccttgtaatccatctgcgtgggcagcgagctcagatgctccagcatggctggctgaggaggcgggcagctgagcgcgggtggcaggctgcgaggcgagggcgaccgagacttaaggaccgtgagggctaaggtctggcactgcgcgtcagtagccgggccttctaagcccgggagagcgatggcggcggccccggaagcccccggccgtaatggccgaattcccgggcatatgtccggtaccgtcgactg

SEQ ID NO: 126193 - DNA, 951 bp, Homo Sapiens
gggttttaaatggggaaaaccattaaaaaatgggttaacttccataatggaatttattaaaacctttgaatagttaccattggtactatccatttatggaggccatttatttttcattaatttccacctggaaggaaacttccataccttgggtgttcggtcccccatctcagagcaagattatgaggagaaagtctaaacttacttatataaatcaaaacccaactgggctagaaatgaagtataaagagaactaaatctatacacagctgtgccataagagcattaggtggttttagctcttatctggggtatgaaagcaatttagctcatctcacagaaacaaaagcaggtgctgaatcatgaaaacctcaattatttttagcatgcctcttaatttttctttcccctggtttcttgtcgtctgtgcttgattcttgaacaggtaaccacttgagaggatgccggcgatagatgggccatggaggaagtgtcagcaaacatgaaaaagcaaatccggccataactatatagacagtccacccgaactgttcagccacgtacccgtagataaatccaactattgcagaaaaaagaataattccctgaaacatctgttcagctagcttctggcccttgtaatccatctgcgtgggcagcgagctcagatgctccagcatggctggctgaggaggcgggcagctgagcgcgggtggcaggctgcgaggcgagggcgaccgagacttaaggaccgtgaggggtaaggtctggcactgcgcgtcagtagccgggccttctaagcccgggagagcgatggcggcggccccggaagcggaagtctccgacgggccggtacagcccgtgtccccgccccgcgccatcgctaggcgacgtgcgcttttgccgcgccgtgctgcccgcgagggcagctgaggtggtggtggcggccgc

SEQ ID NO: 126194 - DNA, 675 bp, Homo Sapiens
tcagggtggataaggctgtgctttattacatgcataattacaaatctgtgctaagtgaaaatgtataaagcaatggcgacctgggtttaagccacacagagaaagggctggacaatccattaacccttctgccaatgtccattccattgcttttaacatgattgtttccatttcttacaatttgcatagcacttacttgtcaacttgctttgaattcattgtctcagtttatcctcacaacaaccctgtgaggtaggtagggcaattaacactatccccattttgcagatgggaacactgaggcacagagcggttaagatctcgaggctagttagtagaagcatagggaatagaaatcaggtctcctaactccccagtccacatcttcctttttagactatgttgttccgcatgactagggagtagaataaagcgagcagtgagccatagctctggttcaggctatgcctaggaacaggcgagaataaagctaagaaagcatggctaagggctagcaacactcagataaacaactgctctggacagctcagcaccaaacttcctgcggaaacttgggctctattagctttggttgaagctactttctggatgcctagttactgctgatgtctagacattagcttcagctgaactttcaccaactctcaggcatta

SEQ ID NO: 126195 - DNA, 1320 bp, Homo Sapiens
catgtacacacaagtttgtattttttagagcaaaacaacagttaatgctggcaaagatgtttagttatcagggattccataagctttcagtacactgaaaggcaacattttttgcatgtctacaaattatacatttgtttccacacatgtgccaaattttaccctaacagttaggactttttcaccaaatcgtagacatagatatggaaatcatcatcaaacttgatgaaatacacagagggtttggtttccacttggtgaatgaccatgccgatccttttggagccatcttctttggtatattccacatgcttacctattaggccatctacaactcctcctggctccctctctgttggaggagactcactggattctggcatgatgcggaggtcaccttccttataatcatctagaagctggtacatgtacaagacaggatctttctcataggtaatataaaaccaggctttcatgataggtgcttgagctaagaccatccccctccattcatccttagaaccatgctctccctcaaacatgtgttccactgctttgccaattatggtatttgcaaggttggcatcactaatgtgagatgatgccaccctgtcagaaagaattttaagagacaaaccctttcatctctgtgaagttccagtccatagacacagtcaattccatcatatttcaccagataaagagagggatttataggcacctgatccagaacggttcctttccactgcgtgatgggctcatctccgttccgtgtccatccatgagaaattctgcagcccacgatgttcctgcagggttgggatgaaggtctgcctctctgcttcttttgggagacttttttctttgtcatgtttgcagacccagtggcccgtcctgcagctgccctggtttgttgcccttcggcttcctgtgcgttgggggtcttcatgcctgctcgatgctgcctctgctgtgagcctgtggcgaaggagggtcaacaggcgactcgctgagtgactgcttgcaagagcggggagggtaggatccatagatgaggagcgtgtgtaggagcgcggcgagacaggcaaagagcactgcagcggtgtccccagcgcttcgctcgctggccgtctacctccctgttggtggcggccacccctcagccacgttgggctgccaccagtccctgatgcagtggctgtagtctctgccctttttctgcacaagactacagtgttagtttcctcttagtagtgatgtcttccattctaatcacagagcagatctgcctttcttttcttggggcccctcctgggctcc

SEQ ID NO: 126196 - DNA, 1780 bp, Homo Sapiens
  misc_feature (48)..(59): n is a, c, g, or t
gaagagaaaatctctaataatttattgaccttcagtttcacattgtgnnnnnnnnnnnntaacagttttacaaaacctcaaaatgtagtcatagcaaacaagtacatatgaacatgaacattttccttcaacttatacagagttttgtacgtgaaccacatggtcaatagccaagagagggacattatgcagctctaatcactcttattcaagacaggtgtcaagcccaaagaaaaggggctacacaattataccagaagtggagggctgccctttgttatgtgtttctacagcaaccagcccacaaaataagaagaaccttctctgtcttatgccaaggtttttgtgtgtactgtgctgtgaattgtatttgcttcaaagtgtgggacgtttcacagggtgagaatggtcaagtagtgagaccaaatgcctatatcgattcaaagagtgggagtccagaaagttccctacaggctgggggcccaacccttaccacagctccctctggctcacacacagtaattaatagaggattcaagaacagaccccaactttgaaacagctgcagaaaattcatcctgctttcagaagccatgcagtgacacatacatctctcttggcagatttgcatcataaactacagagctgtaactgctacaatataaacgacactgactatgcccactgggggacaattagacatttgcattgcttagaacacatctaggaaccagggactgactgctggaaagtactgtgattcttttcttccaacagctcatttatttaggcccaactacagcccactcattcatggcatggacggacaaacacaattagtctaaagtactaaggtggagagaaatgttaaggatttatctgtcattagacaatgcaaacacagtcacaatgtaaaaggttgttatcagtcttaacccctattttctaaaatacagcaatgtgagaaacatggacgaaagcagttcgagttgcaaactttggtcttcccctgcacctcaggggaagcacctatttgagactagcactaatacctacgacggcacatgcttagtaaacaagcactccaactagcaaagaatgtattcacaactgatttccaacttctaccggaaaacttctcaataggggccactgcctacaattctttggtgttttgtggccaaatgtgttacttgtgccccaaagagttttttaaaaagagatttgcctacgggtgagcactgaagtatacattgtgccaatgtaattattgtcttggagaccttctagaacttgctaaatcatatagcaagaagagaatgagttcaggcccagtaaatctggtgagttaatttacatctgtgatactgccgtttttcccattaaatgtggttatggcaaagcattcttagggtaataaataaataaataaactttggacaatgcctttacttgtgccctatatacagaactattccatagaattttccaggatttcaagatactacacaaagaaaaaaactgtaaagcaatttggtcctttccaaatttcagcagctgagactgaattaagtaaatcagatgggagtggggagaagggcagaaagcagcctccccttaccctatcagcacaacctaaccccatgaaatcccattaaaagttggtgagtctgagaaaagcgatctccacggtttctctacctctaggatgtcatttaaatttccattttgtcatccttccctgcggacgcgtgggtcgacgatatcccgggaattccgg

SEQ ID NO: 126197 - DNA, 1383 bp, Homo Sapiens
  misc_feature (731)..(731): n is a, c, g, or t
tggctatctggctgttctttaggcttcctctttgtctttgaaattctggagcctcagtcctgtgtgcatggattcatttttaatttattctgcttagaacttggtattctttacacggagaattcatgacttttacaattctggaatcccatttaccacattgagttctggacatcaaggttctccgggcatcactttctatgctgtgtcatcagtgaagcccataaacttacccgttatcagaaaagcgaagatttcgagatcttgttgagacgtacaaaattggacagctgtacatgatcagcaaacacagccatgaacagagtgaccggggagaaggggtggaggtcgtccagaatgagccctttgaggaccctcaccatggcaatgggcagttcaccgagaagcgggtgtatctcaacagcaaactgcctagttgggctagagctgttgtccccaaaatattttatgtgacagagaaggcttggaactattatccctacacaattacagaatacacatgttcctttctgccgaaattctccattcatatagaaaccaagtatgaggacaacaaaggaagcaatgacaccattttcgacaatgaagccaaagacgtggagagagaagtttgctttattgatattgcctgcgatgaaattccagagcgctactacaaagaatctgaggatcctaagcacttcaagtcagagaagacaggacggggacangttgagggaaggctggagagatagtcatcagcctatcatgtgctcctacaagctggtgactgtgaagtttgaggtctgggggcttcagaccagagtggaacaatttgtacacaaggtggtccgagacattctgctgattggacatagacaggcttttgcatgggttgatgagtggtatgatatgacaatggatgatgttcgggaatacgagaaaaacatgcatgaacaaaccaacataaaagtttgcaatcagcattcctcccctgtggatgacatagagagtcatgcccaaacaagtacatgacaatggatgaagtccgagaatttgaacgagccactcaggaagccaccaacaagaaaatcggcattttcccacctgcaatttctatctccagcatccccctgctgccttcttccgtccgcagtgcgccttctagtgctccatccacccctctctccacagacgcacccgaatttctgtccgttcccaaagatcggccccggaaaaagtctgccccagaaactctcacacttccagaccctgagaaaaaagccaccctgaatttacccggcatgcactcttcagataagccatgtcggcccaaatcttgagtaactttatataaatatctcattggggttttatattttc

SEQ ID NO: 126198 - DNA, 477 bp, Homo Sapiens
ttttcaaggtaattaacctagatatttatttgtatcactgctgtgtgactgtcaagtatttgtcattagtttgtacacacacccagccctactctcaaataagacaaagagatgaatatactgcaagtgtgtgtacaccatggggaagggctggaggtgtgtgagcactataggacctataggcagcctgtaattgtcatcacctatggacagagggattaagaactctgtaatcaccaagatccccagaattgttaacaacttgtcttccagatagttttcatcaaagatgctattatttcagtctccttcttttactttttaggtggtccgagacattctgctgattggacatagacaggcttttgcatgggttgatgagtggtatggtaagtcaatttctccaaaataacttgtagaacaacttcatgttgtctcgggctttctgtccatttggcttcaactgctactatgtag

SEQ ID NO: 126199 - DNA, 547 bp, Homo Sapiens
  misc_feature (123)..(123): n is a, c, g, or t
gacaacagctctagcccaactaggcagtttgctgttgagatacacccgcttctcggtgaactgcccattgccatggtgagggtcctcaaagggctcattctggacgacctccaccccttctcnccggtcactctgttcatggctgtgtttgctgatcatgtacagctgtccaattttgtactcgtctacggtgagcggcatgcagatccggtactctttcagcagcatggtcctgccggccgcggacccccggggcgggaagcggggggcgcccccaagaccagcaaggctgctgcccaggcgcagggcagggcgcccggagcccggcgctcggagccggagggcgaagcagcccccgcggcgcgctcagctcctggcttcctcctctccgccccagagcatgtcagggtttgggtctgggtgttcgcagctcccccgcctcctccctcgccgaggccggtcctcccggaacgcggtgttgcaaagtcagggaggcagggagggagacccgctggggaccactctgctcggcagaacagggtggtag

SEQ ID NO: 126200 - DNA, 967 bp, Homo Sapiens
  misc_feature (707)..(707): n is a, c, g, or t
  misc_feature (817)..(817): n is a, c, g, or t
  misc_feature (860)..(860): n is a, c, g, or t
ggggggtctgtttcgaacacaacactgactttaatggggcagccctgagccgtaaccttcaaaccttccgcctcagtaccccgtgcgcgaggagggaggggcgactgctacgggcacatcgtcgatgtcctccctactcctggcgatcccacgcctcaccccttcctctccagctgctgcggtctccgtcgccgaggtgggtcccaggtaagctcccaggaggggcaggggagcccctcagcggcccgggacagattcccccatggctgagggcatggggaactagcctggatggagacgccgccgtcctcggagctgggcggggacctgattctgggggtgtggacagagccaagggaccgccccccaaggcccagcgccgggagatgcaaggccgggcccaaggtgttggacactgctttgggggacaggctaggtctctgcacgtggcttctgggctctggaaagcggtccattctcctgacccggatctccggagtggtaggaggcggctcagtcccgggcctgcgctcctagagttcctgtcccatctcctcccacgctcacccatcccaaggaaggagggcactcgggccccagcaggctcgtgagagcagcgggctccgccctcccaatggtctatccatcggtgggtgggtccggcgcggcgtcggggctctggcgggtacccgggcgtcccgcgcggncccgggccgcgctcaccgctgcttacgctccgctgctggagccgcgggagagtctcgatcgcacattctgagctggaggagaactggggtcgcctgcacgcccggtatcnctggaggcgagcgcggcggcggtccactgagctgacctcctgnggtcgggaactcactcgggctctggataacaatcatgtgcatgcatctgggagcactctgtaggacgggctgctctggctcgctccctcagggtgccacggatagcc

SEQ ID NO: 126201 - DNA, 746 bp, Homo Sapiens
  misc_feature (617)..(656): n is a, c, g, or t
tgtttccatttcccttaggtgtgaagtttgaagaggcaaacagtaattgtgaaagccactactgtgaaaccattctaaggcctgagttcccataggacacactcacataggcaggtacacgttagtcaacaattggaactgcctcttggatcactcagctgtgctttcatggctggatgatggaacactgtgcgaagagagatgggggccaggaagtagcgcttcatgcttagtacatcctccaaattgtctttgctggaggagaaaaccgtactcagccaaaagatcaggacaatatgacttgagtccacaaggacacaaacacctgagtagctgggcagcccttggcagggtctaagccaggaagtaaaaatgatctggcctagatatttaagggaactctaggaagaggcctaggtttttaaaatcctgtctctttgtcttaccataagaggctgagcctctcttcatttttttgaagggccacttgtgttttctgttctgggaacttcattcatttttctactgggttgttgatctttgcagtaatttctaggagctgtttatgtttggaggtaattggtcctttgtccatatatatgagatgtaagtcttannnnnnnnnnnnnnnnnnnnnnnnnnnnnnnnnnnnnnnnattgtaaaataaaacatcaaactgcacagaacagttgaatagcttaatgaataactacagtaaaagctatggtaaccactaaccaaaaaa

SEQ ID NO: 126202 - DNA, 554 bp, Homo Sapiens
  misc_feature (94)..(133): n is a, c, g, or t
  misc_feature (518)..(518): n is a, c, g, or t
tttttttggagtaagtggttaccatagcttttactgtagttattcattaagctattcaactgttctgtgcagtttgatgttttattttacaatnnnnnnnnnnnnnnnnnnnnnnnnnnnnnnnnnnnnnnnntaagacttacatctcatatatatggacaaaggaccaattacctccaaacataaacagctcctagaaattactgcaaagatcaacaacccagtagaaaaatgaatgaagttcccagaacagaaaacacaagtggcccttcaaaaaaatgaagagaggctcagcctcttatggtaagacaaagagacaggattttaaaaacctaggcctcttcctagagttcccttaaatatctaggccagatcatttttacttcctggcttagaccctgccaagggctgcccagctactcaggtgtttgtgtccttgtggactcaagtcatatagtcctgatcatatggctgagtacggttttccctccagcaaagacaatttggaggatgtactngcatgagcgctacgtcatggcccaactctcatcgac

SEQ ID NO: 126203 - DNA, 1322 bp, Homo Sapiens
  misc_feature (41)..(84): n is a, c, g, or t
  misc_feature (88)..(122): n is a, c, g, or t
  misc_feature (723)..(741): n is a, c, g, or t
  misc_feature (1174)..(1174): n is a, c, g, or t
aagatgtatagactcactatagggcgctagctcgtttagtnnnnnnnnnnnnnnnnnnnnnnnnnnnnnnnnnnnnnnnnnnnnccgnnnnnnnnnnnnnnnnnnnnnnnnnnnnnnnnnnncagtcgacggtaccggacatatgcccgggaattcggccattacggccgggggactagggaatactataattagacagctttgcaatgaattaacaaatactgaaaagttggaaatgtgtatatactgaaatctcaccaacttttacctggggtggggtaccaggagaaagggaaccccttttctcctggtaaagggtaaggggggggataatgttttaccacaggtacgaaatagtcactttaacattgagacctctgcctcattgaattcaggttttttaagtacttgaaactcttcagattctccttattttagtttctttttacatttatgaagtagaaagcattgttttgtaaactgttttgaaaataaatagcctagtctcttatcctctttagcgtggattaaaggtgaagttctgcaaatgggagagtgttcacagtagatagctcagattgattgaacacatttgaggaagagactcctgcatgagataccagcatttttacaaatactttttatgtacattctttattttgtcattttgtcaaccctctccccaagcacatcttctttccttttactatgtctatgtagggnnnnnnnnnnnnnnnnnnnttgcacttacgttacactcccaaaatgtgggtaatccgtgtctttcaaaaaacatttctgttttttgttttgttttggtcagtccattgcataagtgacaagtttgggtgcttgtggcacgtatgtatgaagcgggagggggatgagaattgcctgtccttcagtaggctgtaaaagtaatttacatgtaagtaaaaagggaaaatagaatagatgccaaagtcatttattcagtccttagttttcttatgtggcattactgcatctgctagttagtgagaaagcaccctcagcttttactgctcccctccctgcctgccaacacacttgatgtgtgcaaacagccctcaagtatctgtcagatgacctatataaggtattgaataaggtattcttgtcagtttagaaatggactggataaaacttacttggntgtcattattttatctcatttgtcctgttacatgccctatgttaagataattatattgccactaataatcaagatgctaaatgagtattacaactggctaatatcattttttatatacaagggtatgtgtatatttggaattgatatg

SEQ ID NO: 126204 - DNA, 1691 bp, Homo Sapiens
ggcacgaggcggcacgaggaacactaacaaaatgtttggcaagagataacacaatttatttaaatatattccgactcaagatgaaggcaagcggtttacctagaaaggtttacatattttagctatagtttttcattgaaccatttttttgaaatgtcattcttttcattcatgcttcttttatcctctttctttagaagttcacagtgttatataagtgaaaaacaagacagatagaaaccaccctaaacatatggctttatgtacataaaaaattcaataatgttgccataacccctaatacagtgtgatccttatttatttattatccagaataaacttctgtacatattaaattcttcaagtatatctagagcagtgcttgtaaaagtgaggtcccactgctaagttaatggccatctctttgaagatcacttctaccttcaacataattatggtacagttctaatagtttttttaattttacatgtatcatacattctcaaatattccaaaatgctcaaatgagccaaacatatactttgatttacatctagtttaatattccctttatacagcaccagaggttaaaaatggatctgagtaaccaaatattctctttcctttattagttagagtttatcatcatttatttctataacattaaacccaaattgaagatgaagacaccctgggtcaaatgctttcaccttaaataaataaacatttcatccacttcatacttaaataccaagttgttttcctataacatatgtttcttggtaacaactactgaatcaactaagctgaacaccaacttcttatctttgaggactaggcaagtcggataggattctctaggtttgctttaaaacttttaagaaacctggttgccagttcgtcatcaaccactcgactgtcacttgacattgtgactgttatgagctggcgctgctgcagtttggcatttccctcttcatcctcagtgagcttcagcacaggtcggaacctcccaaccgccaaaatgcaggcctgaggagggttaatcactgcagtaaattcgtcgatgccaaacatccccaagttggaaatactaaaagatcctccttggtattcttcaggcaacaattttccatctcttgctttctttgatagagcctttacagagtcagcaatttcctggatacctttagcagcagcatcttttatgattggagtaagtaagcctttatctgttgccacagccactgaaatgtcaataaatggcagttgctttgggccctctccatcccagcttacattaacatctggcatttgtttaagggtaacagctgctgccttgatgataaaatcatttactgatactttaatgtcatctttgaccagatcttgcctaacttttaaaacagctccaaggtcacagtcagcagtagcatatgcatgaggtacagtacttttagattcagttaatctcttggcaatgactcttcgaatattgctggcggggatttcagtgaatgtgcccactgcattgggttgtccaggagttgatactggtgggatcacaggccggggataagatggtccagctgtggcctgtaggggcgaaggtgctgtgggagtggctgtgggggctggagttggtctggactcggtaatcttgcccgtttgtttcaactggacaagagtga

SEQ ID NO: 126205 - DNA, 2471 bp, Homo Sapiens
ttttttttattacaacaagaactttactggtaacacctttttaataggtcaaagtaactgtacagttcattatattcttcctgagaataatttatatcccccaacaaactaaagggagggtatattttttcaaaattaacagaatggatggtgtaactggacatcaaaagaaaaccaaattcctgttttgcttcattctctcctgggaagacagatacaaggaagggttagttaactccagtggctgtaaaatagtcaacatggctttaatctttctttataaattatataaaaatggaaaaaggggatggttctggaacttctcctcaatgcagtttggaggtgctctggtacaaagcatttctgcttccaagagaaataacattgctacaaaaaactggcacattattctgtgaaaaaagacatgagtttttagttgtgttctacagctagttcccgacccaatgcttcacatatccacacgaaagtaaaaggcaggtaagacaaaaagggctgtagttttttctgaaataactcaagtcttcaaaatatagcttttatattctttgtaaagtgggattagcatattgcaactgaagggtgttctaacaaacaaaaattccagtctggataataattctatggtagacaaaagaattctcagcctcttgggtttcctggaattctttgcttcatgctctcctcttccactatgcagctaaggtagtttaggaattaagatgtcaccccttggccatccccctttagaacgtatcttaatgtgaacataaattgttcttcatgatgcttaaaagcttacatataattttcattcttagaaaaacgccacattttggatcctggatttttctgaatatcatgattgaaaaaaacaaaacagaaaatgaacccaaatcaaagtgtggttaaacttatatgagaaagatttttcaaccagatggtcattcaaaaaagttggagctgtaagtgctggcgactgaggacacagggttaattcctcgctgctggtggaaggctagagaacatcttcaaaagagggtagcaagacgtgctcctaggggaggctcagtgtggtctcgtctgcccaagcattttcagtcttgcttggtcaatgacatcgagtaagtttttggcatccacagccagggcgtgagcatcagtcagcatttgctttttgtactcttgctgggagtctggtcatgacaatactgctgggccagtttccatcttgttgatgagctcaccccaggtcagagttcaatagcttctgtgccatcgtccaatctctcggtggttgctggctggtaggaggggaatggtctcatccacagtggccaataatgtcctcagggccaagcggacttccttcaccaatagggacataagtctcctctggtgggctggctggattttactggacatctcgatgacagctttcaccaggcccgtcacattctcgtacaccttatcattcgaccggtccaggttggcagtaggaggtgggctgatttcctggggctgaagcttgacaccctcgttgtagctgtcagcagggctgctgaggctggcaaggcttcccagatgaccgggagctccagggcgaggcggtttctttggtggagctgcaggatctggtttacccacaggctgatatatatgttggtttccaatcggaccctgaagacttccatcctccctgtcaatactgcctcgagagagtctcacatcaggtttcagaaatctttcctctttttccagccagcgctgatcttcttccatttcctgttgctgtcggattagacgctcttccatcagatgggttggcaacacttgcccaatccctcgcaggtccaatactgtagagtcctccacattgggctgccacattgctatctcctgaggtctatgattccatgaatctgtttggtccaaaagagatgcctgacctggatagatgctgccagccatggctgtgattccatgtgaaccagggtagccagaaacctggtaatgattggtttgtaccatgtgctgtgggctgggataaaatccttcgctggacctcggactgggataacccggtctgctgggcttgggcggtgcttcatcagaccctccggagtcccaggacactgtggcctgtcttctggactccatcctcatgcgctcttcttgctgagccttctcttcctccaggattgtgcactgcttgactactcagaagctatctgaagtcccacataacgctgcagccgctgcagcgactgctaggcagcttcttcatcttggctgtttgccatcacataaacccctcagaatgcagccaaagcgagactgtgctagtttcccattccacgcagatgccccagggctcagcagacagtttgaaaccctcgtcctaactgtggcaaacagctcttcctacattcctacaactctagagttctaat

SEQ ID NO: 126206 - DNA, 1431 bp, Homo Sapiens
gggttacaaactagatagaaacctttatttcacaactttatcatcattcacattctaaaaagacacggactgggggacacagctgaaaacagtgggaggccagatgctggcatcttccagacgggagcatagccatggtcactctagccgatgtctcctggggctctcaggcggcaaggaccagatgcaccactactgtccaatcccagttttacttagagccacctccttttttggggccattagtccttatttcatgccagattttcactagcggctccctgttcttccaaatcagttcatgaccgtaagtaacataccatattccaaaaagagctcccccaagatgtgccgcatgatcaaaaaatttccatcccaggatcattcctgctgtatccatggcgataatggctttcagggcattccctgctgtgaacgtgaacatcggaaggaaaataatggcaagcctcccttctgggatcttagtgcagacagctgcgaggactgtcatgatggcaccagatgcaccaagtgatggtccatatcttcctgtggcaactttacccaggtaactgacaaaattggaaataacacctgcagataggtacactgccatgaactgctcttgacccagaatgttcactatgctggaagagaagctccacaaaacatacatatttgctgccatgtgaaataaggagaagtgactgaatgttgacagcaacattggagaacaaaggacctttgaggctggattcgatgtgaaatatctgatcattgtccgctgcagagaaggtactctccataaacagaatacaaggacatttgcagctataatacctgtcacagtccgctggccatcacttaggttattccaccacttgttaatctcctttctgaagtctccttctttttgtggtcttatgctatccaaccaatcagcttttataccatcaaaataactctggaccctggatttcagtgattcatattgccaaatagcagctgatccaaatgcacagcctgtaaacccaacagtaaaaaataaaggttttatgagactccttataggatagggagaaggataaaagactgtttcttccacaggaggaatcaaagcacttctcttgtatgcttcaccacttgtccctgggtctgatcttcgaggttcaaccttcctgggtgcttttctgaatccgcatttttgttgaataaagaagttaaacctgcgtccgaggagctgcggcggggttaggaccgcagtgagctcctcgcagctgcggccgcccaccgacgcaccccacgcctggccgcagccccagcctctctgcgcccagcctcgccacgccatcttcccaacctctgccccaccatggcccgaccttaccaccctcgtgccgaattcaccacccggcctcgctacctgccgtg

SEQ ID NO: 126207 - DNA, 682 bp, Homo Sapiens
  misc_feature (630)..(630): n is a, c, g, or t
  misc_feature (648)..(648): n is a, c, g, or t
tggaagaagtgtttattctacgagcagatgtcatccgcaaagtttatcaatttacaattaggaaggattatgagccaaagagaaagttttacaaaataatacaataagactagcatccaaatcgcatagatttatatgagtgtgaaaaatagggactcactttttcaattatgggaagcgtagtggggggagaaaagcaattgtgttctgtgataaatgagcctttcttagctgagaaatcagttgcttcccattttatgtactcaatttgtgcactttctattctatgctccaaaccatttctttcatcttatgaatagaagaaaattagaattgtactattgaggacatatgaggaatttattcttgaaataaattaactacaatgatgcattgttgcggtactttgatataaaatcagaaagatactgagcttggagaagcataatattgttatcacttacaactaagtttatttgggggaggaaaatatcttgactgattcaccaatgtaaatgcactgaaggcagcacacacctctgatgcgatttgatgtgagttgtcatgttaaatctcagacccggggtattattagggtgcattgcttgcatctaacaacccatgctccangaaacacggtgagagcangaagtgaacattttttttatatcctgcatttatt

SEQ ID NO: 126208 - DNA, 615 bp, Homo Sapiens
tttattaacaccattttatttcttttgcagctttaatttttaacattataacatttactggctcctctgggtgactaaatatcttcacatgcccactagctaaaaagaatttctaagtagaactcaactgaaactgcaagctactgctctaagaaatgcatacttatgtttatttgctctcctatataatcctgtttacaaatagcataactgcaaagatttatatgtaatttctaaatccttcaggttgctctaccattcatcttcttatgtctggcaagataaacactcttagtgaacactttgctgcatctcttaaatgagatttgtctccagtttatttcctatagaataagggatgcacttggaactgaaaaattccttcaatttctaaagtttccacattcatacaacttttctcctgtaggagtttgcaggagattcctattgcctatagtctttcccacatttgctacatgtacacagatttttcctagtgtgagtatacttaggtcaattaagggattaatactgacaaaggctttcccacatttattgacttcatatgatttctctacagtataaactctaataaaaaaatctgcatcattgcta

SEQ ID NO: 126209 - DNA, 748 bp, Homo Sapiens
  misc_feature (631)..(631): n is a, c, g, or t
ctatgtaactgatagttcattttatttttataagccttttgtaaacatactgctatgtaatatgagtatatataacatactaaagaacatatctttttagtccataaccattacttctaatggattataagtatacccagattttgaaatgtatacaaagaaaatttaccaaataataacatgtaagctatacatgtcatattttacctgttacccatcaatctgtttctgtttttaaaacacagttttcaaacactaagtctgtgattaaacaatgacactaaaattaaattgtttatatgtcctacctagttcaataggcttaacaaacatgtatgcatatatgtttccaaagagctaatgattctaaaaactgctttagaatcagagaatttgggaagcaaaaggaaccctagaaatcattttatccaatgccccttgtgttacaaataataggacagagatctggaaagtttagtgatttttgaggtatataaactttttatgttaacatctttctgccaaactgtataagaaaattgttgttagtatttcttttgcagatgaagaaagcatatcttgcttccttgacagttcttcgggatgtcaatgtctacgaatccaaattctntagagaaaaaaaggtgaagaaatgagaaacttggtttaaatggaaaccaccactcacagccaacatacggagcagggatggacctggctggagtgtaatgcatcatctgggtaccga

SEQ ID NO: 126210 - DNA, 2317 bp, Homo Sapiens
caggacagtacaaaatctctttattgctcattttctgtaaaaaatcgtggctctcggcggaccctggggataggaggtgcaaagtgcgctcacacgcggcccgggtccgcggccgagagctgtggggatctggagcgggccgggtcgcaagaagaccctgaccgtgctccggcgctggggcgcgtgctaagggcccgcggggtttcagctgtattttcgaacccctgtgcttggccgaggggttcccaaggctccactccgccttggagggggctgcggaagcccggaggtgacctgggctctgggaggggcgtccccaacgtgggggaggggagacaggggcctttgaagacagcgcgggactcggagggggtccccccgacctcagacgtggtaaactgaggccggcgaggagggaggctgagtccggggaccaggcggcccctcactgctcctccggcccgtctcccccctgcgcctgttcgtacgggcagggccggcggccgagtccagcgggctcggggccaggcctgggccctgcgggcggcgcctcctcctccgcgccgtccccatgctcgccctccgcgtcgctctcgtccgagttgtcctcctccaagtagcggtaaccgcgcaccttgtgctggggccgcgggatgcggggctggcgcggggccacgccccggcgcagcttctgctccatccgcaggtaggagaccgcggccgccaccagcgtcaccagcagcaccgccagcttagccttcatgtgcaggctcgagcccaggtacacggtgaagatggccacagcctgccaccagtggtagatggtgaagatgaagtcctgtctctccttgtcttcgtacaagattcccaggagtgtgctgagtccagtcttgttcagggcactgcccacaccccaaagggcagctgccacatagaggatccagctgtgttgcaggacccgaggcacaggggcccagaaaaagaggatgaaggtgagcagcaggtgcacccctgctccggccaccaggggcaccgggcgtggcagccacaggcccagcaggcccaggagtgaggcggctgaggcgcccaggctgtaagccacgaggaggtaagccagccgctccagccccaccgagcacacgccatagcccaaggcgataccagtgcaggcaaagagcacctcgaagccgctgtagataaagaaaggcacgaggtggcgcaggcggtagtcacgcacgtgcttgaagggcagctggaagatgttgccccagcccacgctgcgcagatcgatctcctccgtgggccggtaagcggctccgcacaaacccagcaccagcagcatggccaggaaggccactgccatgagcacgctctccaccacaatgaggtttccgctccgcgggagcgtccgcagaaccgtcttgttgaagccgctgaggatcccgtggctgttggtgccgcagctctgcacattgtacagcgtgtggttcaggtcatacaggtagtggttcaggaaataaatcatgggcagctgggcgcaggcgaagctcagatggaagaagctgtagaagatggcttggaagaccaggagatagggcgcgtgggagccccgcggaggccgctgcttcatcccctgcccatcctgctccttgtagtgggagtactcatggtacttctgcgccatcctggtgatgtagttgcccatggaagcccaaagaggcacgatggccatgcccagggccacagccgagggcacaagcgtgtagtagcgctcccagtagttggtggagacaaagagggcgtagatgcccacagcgaggaacatcatccacttcgttccaaaaaacctgatgagcacaggtgtgtagagcagggcggcgatgggagtcacgttgatgcccatcagcattttgctgtcgatgtcgggcagccccatgttgccatacttcacctcgcggtaggtctcgtcgtagtgcaggatcagctgcatctgcaggaggcccaggtagacgccgtaggtgagcatgcccccggcgctggcagccagcacgttcttgagcacgcccaggcgcttgcggcggtagtagcggcgctcctcctcctcctcgttgtagttggggtacgcgcccaccagctcgtccagcggggcctcgggcccgtccgggaccccgagcaggtcctcgtcgccctgcggccccgcagcccccgccatcgggtagagcggcggctccgcctccatggcccgaactactgcggactcgcggcggtcgccccggagtccctgcgaccgcccggccacttcctccctcgtctcgga

SEQ ID NO: 126211 - DNA, 508 bp, Homo Sapiens
  misc_feature (441)..(441): n is a, c, g, or t
gcggccgccaccagcgtcaccagcagcttcgccagcttagccttcatgtgcaggcttgagcccaggtacacggtgaagatggccacagcctgccaccagtggtagatggtgaagatgaagtcctgtctctccttgtctttgtacaagattcccaggagtgtgctgagtccagtattgttcagggcgctgcccacaccccaaagggcagctgccacacagaggatccagctgtgttgcaggacccgaggcacaggggcccagaaaaagaggatgaaggtgagcagcaggtgcacccctgctccagccacgaggggcaccgggcgtggcagccacaggcccagcaggcccaggagtgaggcggctgaggtgcctatgctgtaagccatgaggaggtaagccagccgctccagccccaccaagcacacgccatagccctgctgngggacaaggggtgagtgttgaagtccggaacagcccagaccccagtctcagccctccccgcattgcg

SEQ ID NO: 126212 - DNA, 518 bp, Homo Sapiens
ggattaagcaagataagaagagaatgtggtcctttggtattaggaaagtcagttttagaagatccccagattggtcttaacttttctagtctgtgaggtctccttgtaagaggtaaggcttgctcagtgaggtgaagtagaaagagatcaactttgccatcagacctgggcttttatgttttaatattccatatcgctgtaaccttggaacaaagtgtacaacctatttgaatttcagctttctttcctttagcatgagaacattaatagctacctcctggattttttggaaattaaatacatttatggaaagcatttattttgtttggcatataaccattaacaaatgttcattcctgacctttcttgaatttagcaaaattaatctataatattgtactaaattttaacatttattttcattttggataaaaactcagtggtaccaatttgctcaatactcgttcttcagtgctgatgtaaaaaccctgcctagggctggaagtggtagctcatac

SEQ ID NO: 126213 - DNA, 750 bp, Homo Sapiens
  misc_feature (720)..(720): n is a, c, g, or t
cctgcctcatgctttattttccatagagcttgtttccatccatacctcctctggtctcatccatgctgattccagggtccaggttctcaggtctgaggtccataatgtcaggtgaagccctgcccataccattgcctagtggccaacacccccgcccaccacagcctgatgaagcctctgtcaaccagggtttcttattccaacagagaatctcgtatccctgagggcacacagtgaggctgcctcactcctcttccatgctaaggatttgcagcaggatattgtacacttcatgttccatgtaaccccgagcagcattcagtagatgattcctgtaggtggagatgatctcttcatggttcttctgggaatcctgcagctgcagggcaaggcgagcattttctccccgaattgctagaacctcttctgaaagctgctccagcttcttcaacaactccttgatcttggcttccttgtctcggcaagccccaatgagatgctccatcttctctttcagcagctctgccgttttctcaaactgctcggagcgcccccgcatctcgctggcctggcgctcttgttcggctgcctgagcggccaggtccccgctccggcggcgctcctcggccaccgcctcccgcagccgacccacttcccggcaggccgtattatacttttccagcagagcctttagctcctggccccaagcctgagcctggngcaccagcgaaccccgagttttctcgtgtt

SEQ ID NO: 126214 - DNA, 662 bp, Homo Sapiens
  misc_feature (482)..(482): n is a, c, g, or t
cattagaaggttctgaattcatctaatggctggttatttttacagatgccaagtttacaaaacatacaagtgcacagacaggtgtgggaggtagctcgaaacatacagagtgttcgcaacactagagacgtcttctggctgccatcaggggactcggaggtagggtaggcttggtgaggcccgtggcttgtgtccgtggcacagcctcctgcaaaggggctgccctgctcccctgttcccatggtgccaggccgtgctccccaggtgcctccggggtgctgaagatcttttcatagtactcgatcagcagttcagtgaacatgttcaggggcacaagggcactcagggaggagaccccctgggatggccagatcaaattcagcccgaagacacaggccaggttagagctgttcattttgttgaagatgctctcccgggacaccgcatgcaggaagcccatgaggtagcggaggacgacgtanttgtgctctgggaggctccgtaagatctggcggcagccagtgacacgcaggctgctctccacacaggtgatcccgagaatctgctcgtaggcctggaaggtcagaagcggctggggcagctctcgcaggaaggtcttcaggatcacggcagggatgtgaatgtccccgtagtcgtcaaat

SEQ ID NO: 126215 - DNA, 2010 bp, Homo Sapiens
  misc_feature (653)..(670): n is a, c, g, or t
  misc_feature (1900)..(1946): n is a, c, g, or t
gggggagatcacccctctaattatttctgaacttggttaataaaagtttataagatttttatgaagcagccactgtatgatattttaagcaaatatgttatttaaaatattgatccttcccttggaccaccttcatgttagttgggtattataaataagagatacaaccatgaatatattatgtttatacaaaatcaatctgaacacaattcataaagatttctcttttataccttcctcactggccccctccacctgcccatagtcaccaaattctgttttaaatcaatgacctaagatcaacaatgaagtattttataaatgtatttatgctgctagactgtgggtcaaatgtttccattttcaaattatttagaattcttatgagtttaaaatttgtaaatttctaaatccaatcatgtaaaatgaaactgttgctccattggagtagtctcccacctaaatatcaagatggctatatgctaaaaagagaaaatatggtcaagtctaaaatggctaattgtcctatgatgctattatcatagactaatgacatttatcttcaaaacaccaaattgtctttagaaaaattaatgtgattacaggtagaggccttctaggtgagacacttttaaggtacactgcattttgcnnnnnnnnnnnnnnnnnngtaatcttttagcaaccccagtattccttcactatttcgcttcctgcattagcaaattttacttacagtcaaaagtgcagatttatactcctgacgtgtctcattcacagctaaataataggccataggacttttggtaggtttaaacttttaattctgtatttcatgattataagtcttgctagaattttttctaatctttagtagatttgattaaataatgattcacagaatttagtaacagaatcaaactaagccatgtatgagggtaatcgagatgaggatattaactcaaaagaaatagggtgatttttaaaggattaataaaattctgaaatgttaagtagaagattacattgtctagtcttgtatttcctccttttgttgctctctttcattcacacactctcagtttctcatatttgtagctcatttatttggttatttcctaagaatattgaaagtgaagcaactatgtgactgtattcttcaggtaaacactgactgcgcttgttggattttccctatttttgtgacttcaagaataatatgccctgctgaatacatgccatttcacattctgaaactgggtagagtggttgggtgttctgccaacaattgctagtggtgtgaattcattcatatttgccagtattgctcacttcaaagaaactccttcatcaagcagtccagagctaggccagatcaacgctacaatcatgaagttctcattgcatgcaattgtgtaggattgacaaggaactcagataaaaatttccagggtgcacttccagaaccagcttcaacatatgtctacattgcccccaagttaataaagtgccaaccctttactctctcatacagccagaaatgttagaaatccaaaatcttggtgcattattttttcataaacgctaaaacatttgaagaaacaatttaattatttaaaattcaagtattttattcacattatttgcaatatccaaatgtttaaaaattcccagataattaactagctattacagatctcacctagagggttgatgttatgaagactccagtggactgtactcacaaattgactggacaccctatgaaagtgggtagacctctcagcggaaaataagaagggcttttacctacagggcaggacagggtcccatgagagcagttctgtggagatataaaaagaatggaagaaggaatgccttatagtgatattgtgacatnnnnnnnnnnnnnnnnnnnnnnnnnnnnnnnnnnnnnnnnnnnnnnnataatcttacatttaaaattgtattcctacacatattagaaactcttctaataaatgaagtaaa

SEQ ID NO: 126216 - DNA, 760 bp, Homo Sapiens
cttggttaccaactaaagtttaatcacaattataaaaatgtggcgtcgggtttgcgctattaacatatgtacagtccagcccagcaaaagggacccaccccgccatcctggcctggctgagccggggagtgacaccagggtggaagggtgaccctcagggtctggcaggaacagatgaggcagggttccaggcacggagtccccaggactgggggtgcagagcccccccagggggagaacatggccactgccccagagacccctaaactggggaggggtacacgcagggcgtaaggggaagtccccattaacacaaagcgagaggactgtgtagccccccaggacagaatctgtacaggccggcaccccaggtttccacaggaaacagctgctggctgctacaaaacatttacagcttcttctccgcaaagaaaaacaatcagggggtggtgggcaggggcgacaggagaggcagaagctgcctccagggactgaggctccctcgctgggcttggggcccccaaccccacgcttggagatgggggcatgtgggccctgctgagcccactaaggctgggggggtgctgggagctcagggcaccagggggaataaataggggtgtgggcacccatcctgccccacctcagtttagggagccccggcagctctctgtgccacacagacacgggatcttgttgtcttcccagtgggaacttgtagtcgtaggtgatctcctcgtccacgccaatcctcgtgccg

SEQ ID NO: 126217 - DNA, 1059 bp, Homo Sapiens
  misc_feature (56)..(67): n is a, c, g, or t
  misc_feature (255)..(340): n is a, c, g, or t
  misc_feature (343)..(350): n is a, c, g, or t
ccccccggagggggtataaatattctttggagggaattttttgcccaatttttgtnnnnnnnnnnnnaaagagagggttttttcccaaaaagattccccaagggagcgcttttttcccaatccccggggtttgaaaaaaaaggggcccccgggcctatatttttaatagcgccccccttagggggccccctttttcaaaagaaaaatgggtgccgggtaaaacttggcccccccagggggtaattttggagcggnnnnnnnnnnnnnnnnnnnnnnnnnnnnnnnnnnnnnnnnnnnnnnnnnnnnnnnnnnnnnnnnnnnnnnnnnnnnnnnnnnnnnnttnnnnnnnngagaggcagctgggagagcagctttattatcatggctggggatagaacgggttcctctccctgggggctggggtcttccactggttaccacccgcagcggtcctggaggcaccacgcatctcagtgctggcttagctgcggggcagggccttggagaaggcgaactgtccagggaagtagaagctgtgggggtcctcaccagcccgctgcaccctgaggcactgggtctcctggtgctcctcagcctcccgcagaacttgggtctctatggggcagtggaccaaccggcccagaactttgtcctcagagcccagtttgatgcaggccaggcatttccgtttcctcccattgggcctgactttgcactcgggtttcttccagtccctcttccggcagcttgtctgctgcagcttaaattccagcctcacaaatattccagctgggaagggcgtgtccacggcgctctccacactggtctcctggaaggcccactgcacgggcgggtgcttgtgaaattcctccagggccacctgcaggccccggcgctgggcttccgtgagctcggcgacgcccacgcccaccgcgcccagccacagggccagagggatcagcagccgtcgcatgcttccgtgtcaccctggccgtccttccctgcgcctggaggtctcccctgaccgtcccgcagctgaaatcttggcctcgctgtccc

SEQ ID NO: 126218 - DNA, 1077 bp, Homo Sapiens
ttaagatgtaagaaaatatatttattttttccatgacaatactatgataaaattgttaaatacatgcatgttttaaaaacagacataagtaacatctttagagttaacagccaagcatactagttttacatttatggtgttttagtaatagattattttctatgtttttgctataatcatgttttccaaaagatacagaaactaaattctgaaattatacaatgatataaagtgtccaaatttcccattctaacagcaatttaaaatccaaattttcacaaggcaggaaatgcttcagttatcatctaagtggagttgttttattccatattactctcagaattctgtgaatcagactgaatcacacacatgtacttcatctatagttttcttcctgtataagtgtattgaaatgtttccttatacgattaaacatgattttaggtacagcacatcacaactgtttattcaccttaaaaaaatgtctgtagtggtaacatttcaagaaatgaaaaagggaacagtttgggatccgcagtttctccctatcttctttcagctacatttacaagcatttgaccaaacaaaaattagtaaacagttactagtatttataaaaaacttaaaatatttaacatataatactcactttaaaaaaacattcattctacaaaccttataaaagacagaaacttatatctgttcacagtatgtgtattttgtaaacagtaattcactataatgcaattttgaaagtaaaaaaaggtaatttcctagtgttataaggaccttgacttatggccagctaatgaaggaggagaaaacctaacatccttattaggaaagttaagtattttgaaatgatttattttacctttcaacatacttttaagatggtactatcttaaatctaggatgtctatctatccaggccaatcttttgcaagcaattctgaatttaaatgtatttaagaaaaagccgtgctctttttttgagaaaataacaggataaaacaacgccaggaagcccggccgtaatggccgaattcccgggcatatgtccggtaccgtcgactg

SEQ ID NO: 126219 - DNA, 410 bp, Homo Sapiens
tccctgatagtgtcgagcaggatgtcaatgaagaaggtgtagctctcggcggggatgttacccttggccaggaacactttgttgtaagctgccctccatcaggtattgcttccagggacactgggtgcttgatgtagacattggtctgtatgtccttggcaggcagccgcttccaactccgtgtggaactcagccacccggttctgggacagcaggaagaggaggttgaggcccaagagctggtgcatataggctgactcggggagctgctccttgtaatcaaagtagtagcatttgagctccagaagaactagcttgagtcgacccagctcttccgccgcacttgctaagattggggcttttacggttccactcgcccttgagttgctcgtacatccggtcgcggcctg

SEQ ID NO: 126220 - DNA, 877 bp, Homo Sapiens
  misc_feature (95)..(95): n is a, c, g, or t
tccggggctcagacggtcatctccagctccggcatactcgatgacctgttgcccattctgtgaggaatggtgtgtcttccgcttctgctgctgcntgcaactgtagtagttgttgggcccaggacccacctcgcttcttggcgtagtctgtcatctttttgggtgtgttgaagaagaggatccggtggcctcagtgaaaaggattttctcgtaggccttctcgatgcacccagcgatctcatccctgatagtgtcgagcaggatgtcaatgaagaaggtgtagctctcggcggggatgttacccttggccaggaacactttgttgtagctgccctcacatcaggtattgctccagggacactgggtgcttgatgtagacattggtctgtatgtccttggcaggcagccgctccaactccgtgtggaactcagccacccggttctgggacagcaggaagaggaggttgaggcccaagagctggtgcatataggctgactcggggagctgctccttgtaatcaaagtagtagcatttgagctgggccatgtagcgctcgaaggaggggatgtccttgcgtaggatgctccattgggccccgatctccagtatgtcacgggccagaattagctgctgtttggtcagcttggtccctgtggttggcaagaagttgagctccagaagaactagcttgagtcgacccagctcttccccgcacttgctaagattggggcttttacggttccactcgcccttgagttgctcgtacatgccggtcgcggcctgcagaacagcgcccgaggttgccgcgggcccggagctcgagaagcctgccgcctcggtgccgaattcgacacccagccctcgtactagcctaag

SEQ ID NO: 126221 - DNA, 1512 bp, Homo Sapiens
tttttcatttgaaaaattgtttaattcactgccaacatttattctttttagtaggacacttcaccccctttgttgaaaaaatctggtaccctggtccagcattcctatgtgtccacagctggctagaacagtccccctacctggggccatgccctcctgcaggccacagtgctgctggggccccacagtgggcgtccatgtttgagaccctgagcaatgcccaccagacagaggctgacccagttggaggctatctccaactcctgaatgccccaaaacctccaagttcttcagatataagaacttgtctctctgccgtcccaactggggagacaagggcctggaagagggaatgtcagtccacctttattgggcgaaaccctgcagtgtaactgttttaaataactcgtgccctgccccacccagtgcccggggggctcagacgatcatctccagctgccgggcatactcgatgacctgtttggccagttctgtggagggaatggtggtgtcttccggcttctgctgctggctggcaaaactgtagtagttgttggggcccaggacccaccctcgcttcttggcgtagtctgtcatctttttgggtgtgttgaagaagaggatccgggtggcctcagtgaaaaggattttctcgtaggccttctcgatgcacccagcgatctcatccctgatagtgtcgagcaggatgtcaatgaagaaggtgtagctctcggcggggatgttacccttggccaggaacactttgttgtagctgccctccatcaggtattgctccagggacactgggtgcttgatgtagacattggtctgtatgtccttggcaggcagccgctccaactccgtgtggaactcagccacccggttctgggacagcaggaagaggaggttgaggcccaagagctggtgcatataggctgactcggggagctgctccttgtaatcaaagtagtagcatttgagctgggccatgtagcgctcgaaggaggggatgtccttgcgtaggatgctccattgggccccgatctccagtatgtcacgggccagaattagctgctgtttggtcagcttggtccctgtggttggcaagaagttgagctccagaagaactagcttgagtcgacccagctcttccccgcacttgctaagattggggcttttacggttccactcgcccttgagttgctcgtacatgccggtcgcggcctgcagaacagcgcccgaggttgccgcgggcccggagctcgagaagcctgccgccccgttcaccgccgcggccgccatcttgcgtgatgcggcaagcagaccgcctgatttacggcagcgccgcctacaaacgcttgcccggcggaagtggggccgagaggtggagcccaaggcccggggcggggctacaacctgcctcagcccgccccgggtagcccgccgtcgctctcgaggtggcgccctcggagccctgcccttaatgaacatgtcagttggagctccgcctct

SEQ ID NO: 126222 - DNA, 1778 bp, Homo Sapiens
  misc_feature (443)..(514): n is a, c, g, or t
  misc_feature (553)..(602): n is a, c, g, or t
ctgtgggggcccccggtgtgataacttgttttgttgttgttgtgctgctttcccgttggggtcccgtttttctttctcgtccgtcgccgctttctttgcttcgcttttgttgttgtccgccctgattttctcctcagtcggtgggggtgttgttattgttttttccgtctcgaggggctcgctgtattctctctctcttggggttctttttcccgccccggagtgttgtctctccctcccgctggttgagggggtgcgctccttctccgtgggtggttccccgcggctttggcggcacttgttgtcccccgtttgccggcgcggtttttggcctcgtgccccctctgtcacgctgttttagtcgagccctcccttttggggcccctgttgctgcccgcgaaaccttgggtgacgcgcatcatgtggccccccctcggggagannnnnnnnnnnnnnnnnnnnnnnnnnnnnnnnnnnnnnnnnnnnnnnnnnnnnnnnnnnnnnnnnnnnnnnncagatttatcttgatattgtttattgtttacggttatgnnnnnnnnnnnnnnnnnnnnnnnnnnnnnnnnnnnnnnnnnnnnnnnnnncacaccaatggcactgattttggtacacatcagaattacttaagagagtttgttaaaaatggagattctggagccccactctgtgagtctggacgataggtcctacatttttaaatgcccctgcctgcccccaaggtgtttttatacagatggtagactcactctgaaaaacactagaacatacattcttaaaatatcaaacattgaattctgggtatgatcattcttttttggtcagggacaagaaaaaaactgtcaaagacaactgagattttgagtccaggtagccggaggaggaaaagtaatacttacaaaaataaggactggaatgaaaaaggaagatgatggaatacagactgctttttgaactgctttatgcatttcatattatgaaaagagtatttttcctaaaataggtgaattgccatgctgaccgtaacttttaggctgagacaaaacaatattcaattagaattctaatttccattagaaactggtaagtgtaaaccccaaaaggcttacagaaaaagtaaatcacaaaaatacaagcttgtaaagcagtgttcacattaacctcagcgaaaacttttaggattcaaggtatgaggcaaaagtcataatggttgtcaggttcaggagtttggaagcgcatatagtgcctcatctgctgttccctagtctttctcttgatttccatcatctgccctacaaacctttctacatcatctctcgcttcattgtgctcaatatgcctattaggtatggcccatcgaaaattagggacaagtcgcctaactcgcccccgcctgatatttcctccaggcttctggccttcaccccctcccaaatggcgggattcttcttcattctgcgtgggggcctgctcccctccttcgttttcttgttgggcattttccccgttgagattgtttgccgctagttcctctttggactccattactcctgggcctatccttgcagtctcctcctccggattcttgacgcgaggtgcgccgccgcgacacttagccccgcagacctgcagactgctccccctccgcttcctaatttcggggccgcccctggcccacacgtcctcagggccaccgggagcaggtaccaccgccgagaatggaacgagccacgacggctctgacgccagagcgagacaacccc

SEQ ID NO: 126223 - DNA, 781 bp, Homo Sapiens
tttgcacataaaaacatcatttattgttagaaatcatgacatgatacaaagtcaaaatccacttgtgtcttgctaaagactacagaaagccatgctcagcagcttcttctccaatgctggccagcagcgtacctttccaagtcacaaagcagttcatcccgccctcaaggagccgacagggcagcccagagcctcccactgacaagtgtggtcacccactcaagatactgggaaagatccctgttctagcatcacattttaatcagatttgtcaaaatcaggttgcttggggcaaaggctctttcaccgaggatgctagtcctggaagacttctccttcggcgagccgccagctcaatcttctgaaccaggctcacatcccagggatgggtcacaaaactgatgacggtgcctggcacctcgctccccacacggcccactctccctgctctgtggatgtaatcttgcagcgttggggggaaatcataattgacaaccagctccacaccagtgctgtccaggccccgagaggctatgtctgtgcagagaagtatgtctcgggagctcttctggaaggactggaagattcctaccctcatcaaggctggcatttgcccctgcaaccttaggtgttggattttgtggtcatccagaatatatcccagccagttcacagtgctggagctattacagaacaccagaacagttcctgagggacagtcctttctgctctgtcacgatgcttgaggatgtgcacagctcggccacttatctgctccttc

SEQ ID NO: 126224 - DNA, 736 bp, Homo Sapiens
  misc_feature (651)..(674): n is a, c, g, or t
tttgtttttgtcaatttatttagaaaaaaattaacatgggcaaatgagatacctcagtgttacaacagagtatagaaatgtctagcaatagtcaaataatttgatctttaaatacaaaataaccacatgaacacctaatatacaggtttcatctgaatacatatttattagataaatattagaggttgtcacatcatctaactacatacagctttgcaagactagaaatcacaattagttttttgaccagtttaaagtatgaaatgattgcattgtacatacgatgtacaaagacgatgatggtttctgtgggagttacttcaggctgcactggtgggtgtgtttatgtgtgtacgtgtgaatcacctgtgatcatgatatcaaaaattatacaaagtatgaatttggttacaattttcttctgaaatccccgtttcttttcattatttccatagcaccctaaaaatacacaggtggcaggactagtacactgaagctaaatagtacatgtaggtaaaataaaaacagaacaaaaacccctttccactcagggtcagagtatattacatgagcgagagagacagacgtggagaactcacaaatgctataaccaacaggatctagtttttccacgtgatggagttccaagcnnnnnnnnnnnnnnnnnnnnnnnncgcaaaataaaaacaatacacattccaagagaaatgaatgcatccctccgtgccgaattctt

SEQ ID NO: 126225 - DNA, 689 bp, Homo Sapiens
  misc_feature (41)..(41): n is a, c, g, or t
  misc_feature (654)..(654): n is a, c, g, or t
ccgcaaaagcataaaaaagtttattgggagcatcacagccnggtggggcgggtattgctgagtcgtgggggagggaggccgatcccgccggccgtaggggcccctaaagtgcactcggtgcggcaaggatggggtgttgcatagagagtcaggccggccgctctaactcggccctccggcctctcggcccagctaagccagaccagcctcccggccgcccggcgccctgggctcgccgctgctcgggctcacgaaaacggcgggcgcacgcgcctgccgcgccagcgtgggctgtcggccccggccccgcggggcggccagagcggcgctgcccaggcgcgtctgcgccactggaatctcgtccacggactctgccgacgccgagtggtaggcgccggcagggccatcggcgtgcacagggctggcgtccgcggaatccgtcgacgagctggagcggcggctgggggccctaggccccgacgccggatccgaggtctcagacgttcgcactttatacacgcgcctcttcctctttttctgcagagacactggggagcctgagggccccacatcgccataagaagcataggcgagcgccagggtataggcttctttctatcccactccacctggaccggaggcccagcacagtcnctcctacctggggtcggatccggggaggcagggcg

SEQ ID NO: 126226 - DNA, 1272 bp, Homo Sapiens
tttccgcaaaagcataaaaaagtttatttggagcatcacagccggtggggcgggtattgctgagtcgtgggggagggaggccgatcccgccggccgtaggggcccctaaagtgcactcggtgcggcaaggatggggtgttgcatagagagtcaggccggccgctctaactcggccctccggcctctcggcccagctaagccagaccagcctcccggccgcccggcgccctgggctcgccgctgctcgggctcacgaaaacggcgggcgcacgcgcctgccgcgccagcgtgggctgtcggccccggccccgcggggcggccagagcggcgctgcccaggcgcgtctgcgccactggaatctcgtccacggactctgccgacgccgagtggtaggcgccggcagggccagcggcgtgcacagggctggcgtccgcggaatccgtcgacgagctggagcggcggctgggggccctaggccccgacgccggatccgaggtctcagacgttcgcactttatacacgcgcctcttcctctttttctggggtcggatccggggaggcagggcgagagtgtctggggaagagggtggtggaggttccgcttggccacgggtggcaagaaactgggagggattggcattcactgctgctggcccggcctggccagggggctctgggcgcatatgtctgaaggtccgcatgtagaactccatctcctgaatgggccgcatcttgggaggacatgactcgagctccctgtgaacccccttggcctcctgtggtgggcggtgctgcacgatgtactcataggtggtgagcttgtgccacatgagataaatgtggaagcagagcaggtgccccaggagggctgtggacaggaggcccagaaggatgagcagggcggccagggccaggatggcaggggcctgggtctccacgggggcggcaggcaggaacacgaaccacacatccgtgtgattcttcaggacttcaaagtgtcggttggtgcgcagacgcatggggttgacaaagaactccacgaagacatatgtggccaccagcaccaggagcaggacgcccagtaaagcggatgcaacactgtgtagaaagagccggtagttccgctcgcccacacagttgttgagccacttgcagtggtggtcgaaaccgcacacgcacttgttgcaggcgctgcagtgcttggagcgagcgctcacatccacgttgcacaagttgcagtgcaggtcttcctttgtgccggaattcggcgcg

SEQ ID NO: 126227 - DNA, 1512 bp, Homo Sapiens
gtgttccagatccttttggggcaagggagtggggaacaggcactggccatgttgttacactgagatcaaacctgacagccgtttttaaaggtttaaccccaatcccaagtgctgaaaaaccagaggctgagggagatgtgtaagcttccacctcagtgttttactgagaccagcattggggcatatgaggcacaaggaatccagctctgttccctagaagccatccacaaggttttccttgtagacgtcatcactgtagacaatctgggtcctcttgtcccggtggcaacccttagggctgttctggacagcgagggagccccagacagacttgccagtagcggcatccagcatgggctgttttcgggctatgttgactttgagctgtacagactccacctgggtcccgttgagctcagcaacggcctgatctgctgactccatcttttcataggtgacgaaggcacagtttctgggtgggtccatggagaggtcaatgatgtttccaaaaggagagaaggccccacggagaagggtgggtgtcatgtcttctccatatacatagagagtattccctttcctaggggctcgccgttcagggaatgaatccgccctgcggaaaggaccctctcggtctcggtctcgatcccgctcccgattcctgtcccgttcccggtctcgatctcgatcccgatcccgatccctgtcccgctctctgtctctgtctcgatcccggtctcgattccgctcccgatctcggtctctgtcccggttcctctcatggctgcggtcccggctgcggcttcggggagggtaggctgaggagtgggcaccactgcgtttcttcatagccccagtcaaagcttcgagggggaccatcaccagcccctgggccctctgcctcttctccatctggtcctagttctcgaagtcgatcactagaagacacaaagctctcatacagagatttcctctggggacgtctggatgactcttgcaggtcatcatcagcagatatgctcctctggaacggctggaaagtggggactggtcccttctcggggtcctttaacttcccctcaagggttcgagaacgcttgaagcctgagttcttggtctcagccttgatggcactgatggctcctgacttcaccagctgctttgcctgctctgttgctgtggctgtgtccatgacaggctgctctgatagtgagcgtttgacaccaccttggctggttgtgctgctgctactttgcttcttcagagccagcaatgcctttttctttttcttgagcttgttgaatttcttctgcagagcctcctcttcctcgctcagtccggggggtatcaccaacatggtggctcccgagggggcggcaaccgggggccccacggtctccggccgcgcccgcgctggccgctgatagcgggctcacaacgatgacgtagcgaggagcggaaaacgcggtaaccaaggcggccccaggcgcgcacttccgcccggccttccac

SEQ ID NO: 126228 - DNA, 724 bp, Homo Sapiens
  misc_feature (702)..(702): n is a, c, g, or t
ttttaatttgttcaattatttatttattgtggagtattttacatgcaagaacccaattagagagagggtatctggaaggagggccagtggggtggatggatgctctgagcctcgggtgcactgacccaccctccagaaccagctctgcccacagaaacacatgacagtgacaaaaacactaaacttctaggacgagtggacagcaaacgcgacattcaacacattcctcttttcagtagcccccaacaatcctgagaatcctcacaattaagtgcaaactttaggaaataaatatccgtccccctctccgggagagcctggaggtatggacagacagaagcagttctgactcgggggctgatggctgctccctatggctggtggccgcaggggaagcctgacttggaccccacagataggaagggctggtgacgggcactgggggaggcgagcacttcaggggctgacaggcaatgtctctggggtggaaacacttctctctgggtggggaaggcctactgtaacccaagtgggtgagacgtccccacagccgacagtgcagaagctcccagggaccactccagcagtgccagaggctgaagccaggctgcaagcaagtgctcctccacactgctcttccagagctgccccaggggctggcctggccccaggtgggcccatggcctaccccaagctatccanaaggctgggcccaactgagtta

SEQ ID NO: 126229 - DNA, 914 bp, Homo Sapiens
tgttcaattatttatttattgtggagtattttacatgcaagaacccaattagagagagggtatctggaaggagggccagtggggtggatggatgctctgagcctcgggtgcactgacccaccctccagaaccagctctgcccacagaaacacatgacagtgacaaaaacactaaacttctaggacgagtggacagcaaacgcgacattcaacacattcctcttttcagtagcccccaacaatcctgagaatcctcacaattaagtgcaaactttaggaaataaatatccgtccccctctccgggagagcctggaggtatggacagacagaagcagttctgactcgggggctgatggctgctcatatatgtgcacaacgccggtgagatcaggactgcttcgaaaggcatcagcccatgcctggatcagagcaagcactttgtcctgtacaatggtgggagggttgttcttgggagatataattttgaccagaacactgtcgatgaaatctcggttggccacaaggatgtggaagcggtggccacagttcttcacacatgtctccagcactgttaatgccagcatcacctctctgtagttccggttcccgttgagccgcttcttcagggctcgaatggcatccttttggccctttctccgtctcattgatgatgtcacagatctccatattcaacgtccaatcctcactttgcagggagccatctgttgccttttcgaggcactgccccactggtgtgctgaacgggttccccaggaggaactccatcttgggtggacaacacgcagcggcccgggccccctgtctgccacctaggcctccgctgtaacccgccggcctcgtgccgaattcgccacccaggcctcgctaccttaagaccgtgatagttactgcca

SEQ ID NO: 126230 - DNA, 664 bp, Homo Sapiens
  misc_feature (21)..(21): n is a, c, g, or t
  misc_feature (81)..(81): n is a, c, g, or t
  misc_feature (458)..(467): n is a, c, g, or t
gtgttaatgagagcctatatntggaagtggcatctggagaggtggccttgcacaaagaccaaataattacctcttggcttntgaaaaaggaagggggaagcgggaagacaaaggcgcctgtgagcgcggaggacgctctcctgggactctggcctggagcgggactgcagccttgcgtgcggcgagggcgctgcgctactcagggcttccgcgaagccaggggcagcgcggccgcgtgcaaattaagtactcatgtcaccgtgttagctatggtggcttgaaagaaatgctttgtagccctctaaaggcaggctgatcggaagaactggaagattgcaaagataaaaaggaactctggcagagaaggggggcaagaggtaactgtcatttggaaccaccggacattctctcacacttttgacaagagatcttatcttttcatgtattacagtgcatcnnnnnnnnnnatgggaaaaagggttgtatgggtctttagagacaattatttttatttctaatattcccctgcttttatgtggtgctattttcatcagtataaagccattaaaatccatctcagtatctaccagtttcctgtataatgctaaaaaagaaattgaaggatattattatgaatatagattgattaaagttttaagaaccc

SEQ ID NO: 126231 - DNA, 1620 bp, Homo Sapiens
  misc_feature (400)..(408): n is a, c, g, or t
tctttactgaaagactgtgaccttttcactacagcaagagcaaacggtgaaggaccagaacttgagtatggtcgtggggcaccaaaagttttcaaagtcttcagattttgtgtggatacctgactagcaggaattgtcacaggttttggagctatgggaggaggggaggcttcagcaggagcctgaccgatgacatcatcatcagttttttcaacaaggggttgtggaacagggtgaggcattttacttaagggagaaagagtctgctccggagaaggcagcatatccctttctgcctctttatttgtcagttcttttggagcaggattaggggcagcatggacactcttggcagctgcagatgtcacatagtgacccgatactctcttctgcacccgcnnnnnnnnngagctgggtttggcctgggcatttgaagcccgagatttaaattttgattccaaaatattgtttatttcttccaaatttggtgcaaaaggagctgtgccagtgtctcttgtcattttgggagcaggtttcagaggactacccatggcatcatcaggtgagctcacagaactgggcacttgatgctctgttctcaggttaggcttcggtttaaggtttggcagtggctcttctgggctttcagaaatagcagaatcttctgtttggatggcagtttctttcacattctcatgagtgtgctttttccctaaagcatgcatgtcctgatcatctttatactctatggtttctgattgccagtctttcgatatttccaaggatttgggaggcactattttataagtagtcatgccaattttgggtatatactctcgtgtaatttcatttgaaggttttggcttgggattgtagtcctgtctataaagtgggtaattctttaggtaagaagcagtggaatttttgtcaatcctatctacaggaggcacaagatcatcattaccatgtgcacaaattggatcttttacggtaagcggatcttctgaatgtataattagggtgccttgactcctgaattcccttgaggtatttacagaatcttgtgaacttaagcatgagtgttgagttgatatgttgttatttgacgtttgcacacattcttcaactttggagtcagataaattatgatcttggtgtttcccatcaaactgttacaagaaggggttgtctgaattgctgcatcttttgtcttttctgcactgggttgattcagtttttgatctggtactgatgaagctgctagatggttttccttgtaacttatagcagtatcagtttcatgtgcctcagagtttgatggtctctcaacttccatatcaatgttgttatttttgcaacaccttctacattgatttctgttttcttcactccatttttcatattgtcttctgtgttctctggatagaccattatttcattttgaactacattctcttggtttgggcccaacgacttcaagtttcttatcactgtcaactaccttctttccattgcttgtatcatatactaccctgctgtggttcttgtccacgacgcgtggtcgacgatatcccggaattccgaccgtacagctgctttttaacacggtcattgccatat

SEQ ID NO: 126232 - DNA, 614 bp, Homo Sapiens
  misc_feature (563)..(563): n is a, c, g, or t
atttatgaggaatgtatattgttaagtcactgttatcaagggacacataaaagcagaatcataaaactggactgcagccatcatcacagtacccgagtctatgcttgggggtcttcctcactctgctcttggagtcacaaccaagactccaaaaaaccaacgaagtcccttcaatgtgagtaaaggaaacagcttcaagcactgacaatttttacaagtgattattcaaggaatgcacagtagccacagttcagacaaatcaactacaaaaatcattaaaaagaagagtagggagggtcactgcttattaaaaacaaaagactggacaaagaaagtgaagataacagtgggcagaagctctgcctcctctgtcctgtgtgactcagaggggcatgggggcatgggggcgcagggatgtgcgatctgacacggctcgtttccagcagatgcgtggaattcagggatgcctcgctctcttcctacaacagaaactgaatactacagggttgtcacctgctgagtcctcaggttgtttggcctctctggtccatcttgggcattangttctccagcagagctctggccagctgcctcttctttaactcctcgtgccg

SEQ ID NO: 126233 - DNA, 2293 bp, Homo Sapiens
cgaccaccaacgagccacgctgtttaccccggcacgagggaggaactgtatattgttaagtcactgttatcaagggacacataaaagcagaatcataaaactggactgcagccatcatcacagtacccgagtctatgcttgggggtcttcctcactctgctcttggagtcacaaccaagactccaaaaaaccaacgaagtcccttcaatgtgagtaaaggaaacagcttcaagcactgacaatttttacaagtgattattcaaggaatgcacagtagccacagttcagacaaatcaactacaaaaatcattaaaaagaagagtagggagggtcactgcttattaaaaacaaaagactggacaaagaaagtgaagataacagtgggcagaagctctgcctcctctgtcctgtgtgactcagaggggcatgggggcatgggggcgcagggatgtgcgatctgacacggctcgtttccagcagatgcgtggaattcagggatgcctcgctctcttcctacaacagaaactgaatactacaggcttgctagataagatcttgggggtgagtgggggttctgatcttgtgagagcctgtgttcccagttaaagaagaggcagctggccagagctctgctggagaacctaatgcccaagatggaccagagaggccaaacaacctgaggactcagcaggtgacaaccctgtagcctgaagaggagaggggctgcgctgccttctgatgctgagaaccacagacctctctgccctggatgtgggtgccaagactgatttactgtgcccccagcagacccagagccagggagcaggcctcttccactccaggagacaggcgccacttccctaccagttccttgggatgctttggtgttctgcaaaggcatccttagtctatttttagaacttgcattttcttactttggtcaatttttggtcaaaagtacagagagcacagaataaaagcaaagatgtgaatgtctctaccagacagaggatgacctagtcagcagtttggagggaaatcatctgagggtgctggctcagcacgttcccagatgaaggtctgtcatctaaaggagagaggcaggctcagctcctgaaggtcgcagagcctcagtagtcctcctgagtgtgtctagctgactgttatcgagggacacgtaaaagcagcatcacaaaactggactgcagccatcaccacggcaccaagtctatgcttgggctcttccctgctctgctcttggagtcatgaccaacactctaaaagccaacaaagtcccttcaacatgagtaaaggaaacagtttcaagcactgacagtttttacgagtgactattcaaagaatgcacaggagccagagagccagactccacagagaggccaaaggctctgaacacacgagtcaatgttcatggaggtatagacaaaggattctacctcacagagtttgaagacaacctgccctttcacccacaactactgctttctatgtcaaccctataaagatcaggtctgcgccctgcccacgagcctacttctgaagccatctggaaaaatgaaagcacttggataaatggaaaagtatgcctgaattttaaatctgctcaattacaggttatctgtagcagttaagaatcaacatctatggcattctttaaaacactcctaatttacatgtgacttagtcaacttcccttggtgtcactgtcatgagagatattacaccaggtggaacagtgacgttaagccaacaggattttttgcccttattcttgctaagtcatgattatctgagcagagatgattttataccctctaggatttgtcccgttggctagggtgtacgcccagcattggcggggaaaatattcctaggaatgctttaagagaagaggcagctggaagcttggcaatattccaaggcatgcccgtgctccctgggaagtggtctgtgtcatcctgccgggtgaaacctctgctattgcttgagcagctcccttaacccagtctggctggttctagacttcccagctgccggagaaagtgatacacttccagggaagcagctttccttgccttgcccgccctgcagctggctaaagtgcaggatgggaggatggctgagcattatctgcaggctccaatcacacttccgtggcactgggaactgcagttttcaactcctacccttacaaatgtttcaccaaatcctttatgttcacctcggacgcgtgggtcgacgatatcccgggataccggagcgtaccagcctgctt

SEQ ID NO: 126234 - DNA, 1380 bp, Homo Sapiens
tttagaaaataatccaatttattctctctagggaacaggccacccttcccggttccagggtgccatccatccttaaataaacagtcagaagggccgccagctcactcggcaggcgggggacattcaggagctgtaggggaggtctctgccagtgcgggctggccctcagccccgtcgcgagggcggaagaccagctccccagcctgcagcacctgcccggcaggccacgtgccacctggcccatactgctgatagaagtccgcgtctgtctggaacatgaccagtgcctgggctgtgtggattcgcacatgctgagccaggctgttggcatccagaaacttgtccccacaggagtcacaggcgtagaggatgtgagtgttggggtcttcttcctgcacttgcttcacagctttgctgatctcggccttcaggacttccgtctcatcggctgtcactgcagctcccaccggcaccactgtgagctgagtgacggctgtcgctgccagtgcctcggtagccagcgtgaccatgtcatccacagtgaccacgctgacctcactgccctcctcgggctccaggatcttgatgcctgccttgccctggtgcacggtcttcacgtgtgagggctgtcgttgtcagtgcctcggttgccagcgtgaccatgttatcacacagttaccacgctgacctcactgccctcctcgggctccaggatcttgatgcctgccttgccctggtgcacggtcttcacgtgggagcgcaggttgtctacccggttgaagccacgcccacacttatcacacaggtaggcttctctccagtgtgaatgatgatgtgcttggacaggtcccccacgttcacgaaggccttgctgcacacgctgcacttgtgtgggcggatgttgtcgtggtggcgaatatgattggccaactggctggactggacgaatctcttgccgcagcgctcgcagacgtagggcttctccccggtgtgctggcgcacgtgggcgatgagggagctggcctgggtgaaggccttaccgcacatcacacactggcatggcttctcacctgtgtgaatgcggacgtgccgctgcagagcgccggggtctgcaaactgtcgctggcagtggatgcacacgtagggcttctccccgctgtggatccgaaggtgccgcttcaggttccctgaggtggtgaactgcttcccacactctcggcacttgaggggcccgtcagcgatgtggatcttcaggtgggccttcaggttccctacctggttgaacttcttgtcgcagtgtgggcacttgtgctccttgtccgtgtcgtgggtctccaggtggcgcatcttggaagtggggtcggagaaggagcggccgca

SEQ ID NO: 126235 - DNA, 597 bp, Homo Sapiens
tttttccaaattaaacatttttattaaatcaagttgaaaaaattgttcagtgtagaaaagtcaacaggggttttaacaaaaccaaaatatacctttttatacaatatatgtatatattagcagcaaactacttctgagattctctttcttttatgttcttctagttattttaaagaaagcataaacaatgtatattagtatggaatgtcagcaaatccactcttagtcctttattctgtgatttgggccttctacaaaatactttgtgattctcactaatgaatattaagaacatacccaattttaactaaaaagtagtgaaacagtggttggtagaatctttctcactatatcacggtcacacattatatttgagaataacaaatgagcaccatataaacaggtaattgtgtgtgtgtaaactcaatttttaaggtgtaatagtagccaactagataacttagcactgtgactatcactttttaaaaatttggtgatatacaaaattttaaacaaatcagataaacacttcaaccccctattgcttgtccatttaaaaaatccttaatagaaattctatatataacctgacaaact

SEQ ID NO: 126236 - DNA, 916 bp, Homo Sapiens
  misc_feature (455)..(484): n is a, c, g, or t
ttttcacacaggtacacacactttattagtttcctctacaagagacaataacatcaatcttttttaacaggaatctcagttcatttgagaggccaaatagatccaaagaaggaagatgaaaattaaatacttaaattaatcaaaaggcactacgataccacctaaaacctactgcctcagtggcagtaggctaaggaagatcaagctacagcacatcatctaatatgaatgttagcaattacatagcaggaagcatgtttgctttccagaagactatggtacaatgttcatttgggcccaagaggatatttggccaggaaaggatcaagatagatgaaggtaaagccaaatcgaaagggataggtacaaaggagaatccaagctacatagtcaagcagatggtgatggatcaggcttcttcctcccaagaaacatttgctgcactgtgctgcctnnnnnnnnnnnnnnnnnnnnnnnnnnnnnnaatgtctgctcaagctgagctgcctgctcctgccttacagggtgctcagctaccaggactaggtttggggttgcccagggctcttgctataatttagcatagaccttggggagaactggtcacacatgggttgcctttgttgctagttgttctcgacaaagaaaaccctgaagcattcacatacaagtagtctgagcttccccagtcacagtcaaacaccctcacacaacatcctcaaaagtctgaaatcttgcagcagctgagctatagttaaagctgcaggcccacagaattatcaaggaagccagaatgagataatgcaggtaggaggtcccagcagttaatctcaatccgtctttccccagttcggataagctctaatatacctgatgtgggatgtagaagcctcgtgccgattaaccccggcctcga

SEQ ID NO: 126237 - DNA, 1173 bp, Homo Sapiens
  misc_feature (85)..(104): n is a, c, g, or t
  misc_feature (110)..(124): n is a, c, g, or t
  misc_feature (133)..(232): n is a, c, g, or t
gggggaattcaaaccctttttcttgcccgggtttttttggaaaaaagtttggcccattttcctttccttttggggccgggggccnnnnnnnnnnnnnnnnnnnntttttnnnnnnnnnnnnnnncgacaaggnnnnnnnnnnnnnnnnnnnnnnnnnnnnnnnnnnnnnnnnnnnnnnnnnnnnnnnnnnnnnnnnnnnnnnnnnnnnnnnnnnnnnnnnnnnnnnnnnnnntaaaagcaagaataatctttattccttggaaacacatttgtaaaaatgctatcaataagatgaaaagattcagaacacatttatttgtatgcagcacatacactgagcatcagaacgtctgctaaaatggaatacacctgtaaacaaatgccttagggagagtttataggtagtcagctccactgtgcaaggtatgcagctgataccttcttgctgaatagatttttgcagtagccaaaaaagatcagattttagtaataaaatatctcaaaggatgtcaaacattttttagagggcctaacatgggcaaaattacaattacatatacaaaaatggcacaagaatcaactgatttcacagaaatactaataaaacatttcaggtctattattaagagaaaaaaatgtttgactcagggcttgaaatgggggaaataaatattttggtacaagctttaacctaaaagacaacatattgatttctggttctaccaacagactagggcaacaaccatctcatcctactctacagaatgctttggcacaacttcaagaaaaccttatatgctttcatttgagccataaatgatcttgattgcacgttgctttttaagagtgaagtctagggtaaaaaccaatcccccaattctgacagtgtgtattcacaattatgtcttctgaaatcacgcaagttagcagcaccaatcattaagacattaaaaattattcccatacttgagcagcaaattcgatcaaaacaaatgctatgcaatttaagattagtacgactgcttaaattcaaagtagctcaactgctttaagatgtgaaattcaaagtccccctgtatctatataacatctaataagttatatactttatttagcttctgaaaggagtaactctgtcaaggaagtgggtattgcagttttccttgtgataaa

SEQ ID NO: 126238 - DNA, 1444 bp, Homo Sapiens
  misc_feature (74)..(84): n is a, c, g, or t
  misc_feature (1300)..(1366): n is a, c, g, or t
aggagacttgtagctcagccacacacgcagtaatgaactgtgcccgttcgaccactggcactgcacaaccctcnnnnnnnnnnncttctaattctgtactcacaaaagagaatctcattttcttctttcttccattcccttaaattctgagtactgtacatatatttctgggttcccacgatgatgtgaaaaactaccagactgttttttgtcttctcacaaagacaagaaaaatcagggcattttgtgagtgccttaagatcaaactaacaagatctgaccctctcccctcacagtgagccactgccccacttcagagggtaagagccaaaagcctcattgtgaaaggcactggacttggaccagggacaccatcagggccttggttttctcacgcataaaatggagagtggattaatcgccaaagattcttctgatctgacattttgaaattgtgagagaaactagatgactgtaaacttggtcacaggcctggttctggcagttctttgcggacttttttctagcattatgccaaataaacatgcagtctcagtgtgctctcgcatgtatgaatatctagtcctttctgtggttctcagccaagacataaaaactaggactcagagcacatacaaaaccagttatgtttcggaaagagggaaaagagtccccgagcccggatcttgtgctgcttttctcactgacgtgttgccttttttctttacaaaatctgctttgatacttaggacctctctggactaatttctcttcctagacagctcagcacagctattgatatgttagaggcagtatccttaatattcattctaaatgagttaacgacttaacttgaaattgggcctaaggagtgagaactacaaaaatacaaaatgcttgtccaggactcagccatgcacaccttgagcagcgccggcaggaggcacggaaggaactgtggctccgttctcctcactgtcatggtgccaccagtgtctgatgaagggcagagtgacccagactgcaggcagtaactgacttcacacagtccctggcatttagtcatctgtgattgttttatcactctggactgtgcagagccacctgccaccgagatctgcattccgactgcctatgaacgggtgtgggggccgggggctggcttgctgaagtcttcaacttgcactcggagctcctttgatacctcagagctggctgtcaggtggcagctcacacccagactcactggccacacctcagcagggggggagtcgagtgtcagtctctttctgtgaaggcnnnnnnnnnnnnnnnnnnnnnnnnnnnnnnnnnnnnnnnnnnnnnnnnnnnnnnnnnnnnnnnnnnntgtgctgtgcttcaaagccttaactgtcaaatcttgcattatcttgtttgtacagaaatatactggcctagcagaggc

SEQ ID NO: 126239 - DNA, 704 bp, Homo Sapiens
  misc_feature (445)..(454): n is a, c, g, or t
  misc_feature (591)..(605): n is a, c, g, or t
gaaattgggcctaaggagtgagaactacaaaaatacaaaatgcttgtccaggactcagccatgcacaccttgagcagcgccggcaggaggcacggaaggaactgtgctccgttctcctcactgtcatggtgccaccagtgtctgatgaagggcagagtgacccagactgcaggcagtaactgacttcacacagtccctggcatttagtcatctgtgattgttttatcactctggactgtgcagagccacctgccaccgagatctgcattccgactgcctatgaacgggtgtgggggccgggggctggcttgctgaagtcttcaacttgcactcggagctcctttgatacctcagagctggctgtcaggtggcagctcacacccagactcactggccacacctcagcagggggggagtcgagtgtcagtctctttctgtgaaggcnnnnnnnnnncctttggcctgggaatttttcccatttttatgaaggggttttaaattgtttcattttgtgtgctgtgcttcaaagccttaactgtcaaatcttgcattatcttgtttgtacagaaatatactggcctagcagaggcnnnnnnnnnnnnnnntgaattttattttacttgtcacacctgtcttaataaactggagttttgctgctaaagaactcttctctctgggggcagagcttctatttatggcacata

SEQ ID NO: 126240 - DNA, 714 bp, Homo Sapiens
aaaggagatttacttttactgcagctcttcttgcccatcaactgtccaaaaacaaaagactaggaaacagacccagcagcctccacccgacccagccacagggcctcaagcctccaatcagagccgctccatggcacccctcagctcagctcagtgttgcctgggagcaaaaggctcggagacaaagcccagagggtgagcaggggggccagccccgcgtgtctgtgagggtgccaagcccaccgtgggccttgcctcctctcccaggactcccgcgccctcctgagctcctatcagcctggcctcagtagcaagctggctgcccaggctcttaatctgcaccgaagtccctggccactgtcccttcaccctggcatgaggccggcctccctctccaccagccggctgaccgtgcgcagggccaggggcagggccgtgttggcatcgcggtgatagcgggggctgcacacctccgtgctgggtgtgagcacaaactgggccacgctaggcatcttcagcagggtcagcagctctgtggcccgggtacggatggcttccgcgccctcctcgctgtgcgtggagctggtggctggactgtgagccagggtcctcatctttgacagcaataaagaggccctggggatcagatcttggctccgggagggcagcttcgtcagcgtggtcatcagcacggtgaccacctgggggggacac

SEQ ID NO: 126241 - DNA, 955 bp, Homo Sapiens
  misc_feature (27)..(27): n is a, c, g, or t
  misc_feature (44)..(44): n is a, c, g, or t
  misc_feature (114)..(191): n is a, c, g, or t
  misc_feature (194)..(272): n is a, c, g, or t
gtaaatccttgataaaattttcccttntggtgtgaaactccaanagaaaattgtacatctcctctgagcatttaggagcagccatctttctaccccttgtgaataaatcattgnnnnnnnnnnnnnnnnnnnnnnnnnnnnnnnnnnnnnnnnnnnnnnnnnnnnnnnnnnnnnnnnnnnnnnnnnnnnnngtnnnnnnnnnnnnnnnnnnnnnnnnnnnnnnnnnnnnnnnnnnnnnnnnnnnnnnnnnnnnnnnnnnnnnnnnnnnnnnntttgttgaggtgacagaagagagaagctgtttttcctaccaattctgatgtagatctcacattatagcataacattacagtagaaggaatgaaaactaagaaagtaaatagtgaacatacagaacttactgcatttccactttaaaacctatttattttccctttttctaattttaaacttttgtggtcattcagaacctaatgtgccttgtgttgacatttccatagacttcacactttacaaaatttactgtttaaaaatacttgtcaaatgatttactgaacctttatacaaaagtaccctttctaaattgaccatttaaaaatgtatttttgtgataccgtcattatgttctgcatttgcctcattttggcagatctacagtatgccattaaagtttagtgttgtttttggttttggagggtttttttctgaaactgaatttataatctatttctctgtatacgtatatttttaaaatcttctgaaaggaactatgttccctgctgcttcttccctttctgaagtgaatatgatcttttcatggtcattgcctagataaaagtagagccttttcaatcttagatggaagataattcattttcccacacagaaaaaaaatctgacctttacatgatttaatctgaagggctagaatcttttaatttctagcccctcctcc

SEQ ID NO: 126242 - DNA, 3032 bp, Homo Sapiens
  misc_feature (2808)..(2808): n is a, c, g, or t
  misc_feature (2840)..(2840): n is a, c, g, or t
  misc_feature (2865)..(2865): n is a, c, g, or t
  misc_feature (2870)..(2870): n is a, c, g, or t
  misc_feature (2873)..(2873): n is a, c, g, or t
  misc_feature (2886)..(2886): n is a, c, g, or t
  misc_feature (2902)..(2902): n is a, c, g, or t
  misc_feature (2910)..(2910): n is a, c, g, or t
  misc_feature (2912)..(2913): n is a, c, g, or t
  misc_feature (2923)..(2924): n is a, c, g, or t
  misc_feature (2930)..(2930): n is a, c, g, or t
  misc_feature (2932)..(2932): n is a, c, g, or t
  misc_feature (2982)..(2982): n is a, c, g, or t
  misc_feature (2985)..(2985): n is a, c, g, or t
  misc_feature (3011)..(3011): n is a, c, g, or t
aaggtagcgaggcctgggtggcgaattcggcacgaggggcgagtgaggctgcggggactcgctgagcagcggagggggagcgtgcagagccgctgcggccctcacagtccggagcccggccgtgccgtgccgtagggaacatgcacttttccattcccgaaaccgagtcccgcagcggggacagcggcggctccgcctacgtgcttcggaaggagtatggggccaatgtgcttcctgcattccccccaaagaagcttttctctctgactcctgctgaggtagaacagaggagagagcagttagagaagtacatgcaagctgttcggcaagacccattgcttgggagcagcgagactttcaacagtttcctgcgtcgggcacaacaggagacacagcaggtccccacagaggaagtgtccttggaagtgctgctcagcaacgggcagaaagttctggtcaacgtgctaacttcagatcagactgaggatgtcctggaggctgtagctgcaaagctggatcttccagatgacttgattggatactttagtctattcttagttcgagaaaaagaggatggagccttttcttttgtacggaagttgcaagagtttgagctgccttatgtgtctgtcaccagccttcggagtcaagagtataagattgtgctaaggaagagttattgggactctgcctatgatgacgatgtcatggagaaccgggttggcctgaacctgctttatgctcagacggtatcagatattgagcgtgggtggatcttggtcaccaaggaacagcaccggcaactcaaatctctgcaagagaaagtctccaagaaggagttcctgagactggcccagacgctgcggcactatggctacttgcgctttgatgcctgtgtggctgacttcccagaaaaggactgtcctgtggtggtgagcgcgggcaacagtgagctcagcctgcagctccgcctgcctggccagcaactccgagaaggctccttccgggtcacccgcatgcgatgctggcgggtcacctcctctgtaccattgcccagtggaagcacgagcagcccaggccggggccggggtgaggtgcgcctggaactggcttttgaatacctcatgagcaaggaccggctacagtgggtcaccatcactagcccccaggctatcatgatgagcatctgcttgcagtccatggttgatgaactgatggtgaagaaatctggcggcagtatcaggaagatgctgcgccggcgggtggggggtactctgagacgctcagacagccagcaagcagtgaagtccccaccactgcttgagtcacctgatgccacccgggagtctatggtcaaactctcaagtaagctgagtgccgtgagcttgcggggaattggcagtcccagcacagatgccagtgccagtgatgtccacggcaatttcgccttcgagggcattggagatgaggatctgtaatctccactgcttggatgtctgccctctaccccagaggaatttacagaaacttgccctgtgcctgtgtcccccatgctaggggcggaggggtcttttccttcttctttcctacctaccccttttctcttggccaggggcctcgtatcctacctttccttgtcccctgggctggctgcacagaggattgccccttctcttttcagagctggccctcgatgccaaattagcatttagtattttgcacaaagtctaagggaccatggctgcctgccttggggaggaaccatatctccctctgggccgcttctggcctcttggagccatgggccaaaggccaaggggatgggcagaggtctgtgtttggtctggcccagttccccatcattaaactcagcctgactgctgcctacctctggttccctctcactgcccctgcttcccccatcacagcatggactactatgctaagggtaaggccaaattgcctgccattgccaattcagcatagacatggctttgttagtgtttcctttattataaagcactgaaataagttaaataaacaggtgggaggctgggcagtcccccagccggtttgtccacagcccctgggggcagtggaggtgaatacagggcccttctcactgagctcgtgaagtgcctcagtcaaggcaaggtcccctggtccatatgggcccccccgcccatggggttgggctggtccttatagtgcctacgttagtctgtgtggagcccctggccagcgggggagaaaaaggtggcttctggtccgtctgtataaaacatggggaagaaggacctagttcaggatgagtctgtgtggacagcccggctgccagcagtccccagggctggtgggccccgagagctcaaaacagagggtgggctatgaggtggggcccagccctcagaggcagagagaccaggccctcctgccccaccgtggccatgcaccttctggtggcgcttgtagttgtcccagtggcccgtggtataggcgcaggtggcacagcggaagggcttctcgcctgtgtgccgcagcatgtgacgtttgaggttcatgctctggttgcagctgtagttgcaaaggctacaccgaaaaggtttgtcaccagagtggatgcgaccatgacgcttgaggttggccagattgccacaggcataagggcagagggggcacttgtagggcttctctcctgtatggacacgctggtgccgtttcaggttatccagatgagcagagggcataaggacagcgggcgcagcggaagggcttctcacactgtgtgtcttcatgtgcccggccagngtggtgggatagtgagtggcaaaggggcagangctacaggcaaagctttgtcactgnggccntgnggcccccactggnacccctccagctctcntcgcatgnanngccaacatgnnagtccnancgatacctcacctccctcactcttgtcacacccgggcagtccaggaatancantctggcatggtctgatcagtccgcanagcctcccttcaccgcagtgc

SEQ ID NO: 126243 - DNA, 1070 bp, Homo Sapiens
ttttctggggaaagtccagccccaccccagggcatccaaaagccgcaaagtagccccatagttcccgcagcggtctggggcccagtctccaggaacctcctttcttggaagactttctccttgcaagagatttgagttgccgggtgctgttcccttggtgacccaagatcccaccccacgctcaatatctgataccgtctgagcataaagcaggttcaggccaacccggttctccatgacatcgtcatcataggcagagtcccaataactcttccttagcacaatcttatactcttgactccgaaggctggtgacagacacataaggcagctcaaactcttgcaacttccgtacaaaagaaaaggctccatcctctttttctcgaactaagaatagactaaagtatccaatcaagtcatctggaagatccagctttgcagctacagcctccaggacatcctcagtctgatctgaagttagcacgttgaccagaactttctgcccgttgctgagcagcacttccaaggacacttcctctgtggggacctgctgtgtctcctgttgtgcccgacgcaggaaactgttgaaagtctcgctgctcccaagcaatgggtcttgccgaacagcttgcatgtacttctctaactgctctctcctctgttctacctcagcaggagtcagagagaaaagcttctttggggggaatgcaggaagcacattggccccatactccttccgaagctgctcgtgcagccccaggagctggctgtagcgcacccgacagtgcaggactccattcacgtgaatgttataggccacgtaggcggagccgccgctgtccccgctgcgggactcggtttcgggaatggaaaagtgcatgttccctacggcacggcacggccgggctccggactgtgagggccgcagcggctctgcacgctccccctccgctgctcagcgagtccccgcagcctcactcgccatttgcggacgcgtggtcgacgatatcccgggattccggaccagtaccagcctgctttattaacagtggtctatagtcactcatgcag

SEQ ID NO: 126244 - DNA, 1212 bp, Homo Sapiens
  misc_feature (173)..(183): n is a, c, g, or t
ggggttgtttggtgttcccccctggggccaaatggttccaaagggaggggtgaccccgcccagcatttggccataggggggtgcccccggaaaggacccttttttgggaagtttttttgcccaggcaggggggaggttcaaggctgaagcctccatgttttggccggggtttnnnnnnnnnnngggggaacgttcttttcggggaagtcagccaccacagggcattcaaaggcgcaagtagccatagtgccgcagcgtctggcccagtctcagaaactccttctttggagacttcttcttgcagagatttgaggttgccggtgctgttccttggtgacccaagatccacccacggctcaatatctgataccgtctgagcataaagcaggttcaggccaacccggttctccatgacatcgtcatcataggcagagtcccaataactcttccttagcacaatcttatactcttgactccgaaggctggtgacagacacataaggcagctcaaactcttgcaacttccgtacaaaagaaaaggctccatcctctttttctcgaactaagaatagactaaagtatccaatcaagtcatctggaagatccagctttgcagctacagcctccaggacatcctcagtctgatctgaagttagcacgttgaccagaactttctgcccgttgctgagcagcacttccaaggacacttcctctgtggggacctgctgtgtctcctgttgtgcccgacgcaggaaactgttgaaagtctcgctgctcccaagcaatgggtcttgccgaacagcttgcatgtacttctctaactgctctctcctctgttctacctcagcaggagtcagagagaaaagcttctttggggggaatgcaggaagcacattggccccatactccttccgaagctgctcgtgcagccccaggagctggctgtagcgcacccgacagtgcaggactccattcacgtgaatgttataggccacgtaggcggagccgccgctgtccccgctgcgggactcggtttcgggaatggaaaagtgcatgttccctacggcacggcacggccgggctccggactgtgagggccgcagcggctctgcacgctccccctccgctgctcagcgagtccccgcagcctcactccctcgtgccgaattcgccacccaggcctcgctaccttagaaccgttatagttactgcc

SEQ ID NO: 126245 - DNA, 948 bp, Homo Sapiens
  misc_feature (626)..(627): n is a, c, g, or t
gtccctttccctgtgggaggactttttcttcttggccaggaagaatttggaggtttggccgggggcttgttttccttgggtgggacccaaagatcccaaccccccggctccaatattcttgatacccgtctggagcaataaagccaggtttcaggcccaaacccggttcctccatgacaatcgtcatcatagggcaggagtccccaataactcttccttagcacaatcttatactcttgactccgaaggctggtgacagacacataaggcagctcaaactcttgcaacttccgtacaaaagaaaaggctccatcctctttttctcgaactaagaatagactaaagtatccaatcaagtcatctggaagatccagctttgcagctacagcctccaggacatcctcagtctgatctgaagttagcacgttgaccagacctttctgcccgttgctgagcagcacttccaaaggacccttccttctgtggggccctgctgtgtcttcctgttgtgcccgacgcaggaaactgttgaaagtctcgcttgctccccaagcaatgggtcttgccgaacagcttgcatgtacttctctaactgctctctcctctgttctacctcagcaggagtnncagagagaaaagcttctttggggggaatgcaggaagcacattggccccatactccttccgaagctgctcgtgcagccccaggagctggctgtagcgcacccgacagtgcaggactccattcacgtgaatgttataggccacgtaggcggagccgccgctgtccccgctgcgggactcggtttcgggaatggaaaagtgcatgttccctacggcacggcacggccgggctccggactgtgagggccgcagcggctctgcacgctccccctccgctgctcagcgagcctcgtgccgaattcgccacccaggcctcgctacctt

SEQ ID NO: 126246 - DNA, 1030 bp, Homo Sapiens
  misc_feature (867)..(867): n is a, c, g, or t
  misc_feature (870)..(870): n is a, c, g, or t
  misc_feature (901)..(901): n is a, c, g, or t
gaatgaaccaccatgctcggcctcattttgaacattttaattagaaagttacaaaacatcatgggttctttatacaagatttgcattagaataatttaataaaatgcaaaccaatgtttatacgtatcttgtcatctttccatatctcattgccttatgtgaatttaaacaagaaactatttttcgtttagatcttaagaaaaaaatttaggcatataaaacagcctgaatattaaaaaaagacaagggggtcagtgttagggaattcctctgcttgaatacttcaaaatagctttgtttccaaaactgttttagtaagcctaaaggagcactaaaaacgacaactgatctccaaagtaaactgaggcacacactgaggggtgtgtttctgggtgggcatgaagcatggatcaccggggccatgtccttccagtggcaatgacctgcttgggatcaggaagcagctccatgtgttcttggaggagactgcccacatcctcaggaggtgaatgggctgaacaagccatcttccgtgtgcagaggccccttccagccatctctgctcctgcagacacttgcttagccacgagggtaatccactggactgcttagcattctgctagtggccaggctggactgacctgcccaggccagcatcctctttacactcttactgcttcttgtgtccttcccaaagctgcccgccccactctgatgggcaccctgttccttagtcaagggaaacgccagccgctgggcttcccgctagccttccaaataaacttgtggttgtcaggcagcgggagccaatcccaacacaacccctgtcgcccctgtcctttgcaggaagggggaggctgtcaggangangagggcagtgccaggctgttggtgagggcanaaaagactgtgtgacatgctttctccccagtgctgctgaggggctgagatgaacagcctctgactcagctgcatcagggcaagcagaggaaatagggcagagccatccatacgcaaatcaggtgtcact

SEQ ID NO: 126247 - DNA, 2376 bp, Homo Sapiens
  misc_feature (65)..(287): n is a, c, g, or t
  misc_feature (524)..(524): n is a, c, g, or t
gagagtatgaagtcgacggcgcgccgaattcggcacgagggtggcgctgctccctccaccacaannnnnnnnnnnnnnnnnnnnnnnnnnnnnnnnnnnnnnnnnnnnnnnnnnnnnnnnnnnnnnnnnnnnnnnnnnnnnnnnnnnnnnnnnnnnnnnnnnnnnnnnnnnnnnnnnnnnnnnnnnnnnnnnnnnnnnnnnnnnnnnnnnnnnnnnnnnnnnnnnnnnnnnnnnnnnnnnnnnnnnnnnnnnnnnnnnnnnnnnnnnnnnnnnnnnnnnnnnnnnnngccccggccccacggcgggatgcgggacaacaccagccccatcagcgtgattctggtgagctcggggagcaggggcaataagctgctgttcaggtaccccttccagagaagccaggagcacccggcgtcccagacaagtaagccgcgtagcagatacgctgccagcaacacgggcgaccatgctgatgagcaagacggcgattccaggttttcagatgttattctggcaacaatttntggcaaccaagtctgaaatgtgtggccaaaaatttgaactgaagattgataatgtgcgatttgttgggcacccaacactgctacagcatgctctggggcagatctccaaaacagatccttccccgaagagggaagcacctactatgattctttttaatgtggtgtttgcactgagggccaacgcagacccgtcagtgataaactgtctgcataacctgtcccgtcgtatcgccaccgtgctgcagcacgaggagcgccgctgccagtacctcacccgggaggccaagctgatcctggcgctccaggatgaggtgtccgccatggctgatggaaatgaaggtcctcagtccccattccatcacatcctgcccaagtgcaagctggccagggacctcaaggaagcttatgacagcctgtgcacgtcgggcgtagttcggcttcacatcaacagctggctggaggtgagcttctgcctgccccacaagatccactatgcggcctccagtctgatccccccagaggccatcgaacggagcctgaaagccatccgcccctaccatgccctgctgctgctcagtgatgagaagtccttgctgggtgagcttcctattgactgctcccctgccctagtgcgggtgatcaagaccacatctgctgtgaagaacctgcagcagctagcccaagatgcggacctggccttgctgcaggttttccagcttgcagctcatctggtgtactggggcaaggccatcatcatctacccgctgtgtgagaacaacgtctacatgctgtctcccaatgccagcgtatgtctgtactccccgctggccgagcagttctcccaccagttcccatctcatgacctgccgtccgttcttgccaagttctccttgccggtctccttgtcagaatttaggaatcccctggcccccgctgtgcaggagacccagctcatccagatggtggtgtggatgctgcagcgccggcttctcatccagctgcacacctatgtctgcctgatggcctcacccagcgaggaggagccccgtccgcgagaggacgacgtccccttcactgcccgggtcggcggtcgcagcctcagcacgcccaacgccctcagctttggctccccaaccagcagcgatgacatgaccctcaccagccccagcatggacaactccagcgcagagctacttcccagcggggactcgccactgaaccagaggatgacggagaacctgctggccagcctgtcggagcatgaacgcgcagccatcctcagtgtacccgcagcccagaaccctgaggacctccgcatgtttgccaggctccttcactacttccgcggccgccaccacctggaggagattatgtacaacgagaacacgcggcgctcccagctgctcatgctgtttgacaagttccgcagcgtgctggtggtgaccacccacgaggaccctgtcattgccgtcttccaggctctgctcccctgagcccaggcggagggcggaaggctgctggggtgcgcaggtttggaaaggccccttggattcctggctggggacaatgatgacctggaccctggccagaagagccctggccctccagcaaggcagcacctgctctgatgcacctgtgcacccctggccctcccagccacctgggagcccgaagcttagcctgtaggtggccaagccagtccctactcttgggctgcggccacgtgaggctccgcatcagcagccaggggcgagcactagtggacaaagccagcaaatgcggcgttcctgtgagcagataccctcaaccagccagctgtcaaaagtatttcaagataaaatccaggccaagc

SEQ ID NO: 126248 - DNA, 1140 bp, Homo Sapiens
  misc_feature (1046)..(1046): n is a, c, g, or t
tttttaaattgtttaaaaaccgaataaatgttttatttctagaaaactgtgccttagccagagctcctctaggtgatcaacccatgtctggagctagctcttcctccaggacacgagagctgggggcctgagtacgtagcgccaggcccggtgtggatgctggggagaatcatcagtgtgggagccgaaagcccccgagggtggggtcctgcacagtgggccatgcctccaccagcaagatgtgcacaggtgacagggcttctccagcctagcagggccagcccaggccctcgtgccccagatggtcaggaccaggtcacagcttggctatgagcctgtttgtggcttctgtggactgtggtgaggactgggccaggaaaggctcagggtagcctgggaggaagaagcgcatggcagacagaggtgctggggagggggccacagggcacttcacaaatggaaggctgtcagagagacagggacaggccacacaagtgtttctgcacattcttcagggtggccacagactggggggtccaaggagcaggtgtagggacagaaggagggtctgagaaacgcacagcccacatgggccttgaaggatgcggcctcacccagagacaggagtcctggcaggcccccctccagcgtggagatgcctacgcgtgcggcaaggactggagggaagcgtaggaacacagagggcagcagccccacagcggaaccaccaggggcaaggacagcggggctctgcaggcttcactgggccacggccagcccgcatccacccaatgccaggcctcagggccaagagggctcagcctcagcacggggggagccctggggtggggagacgcgagcgcccacctgcgcaccccagcagccttccgccctccgcctgggctcaggggagcagagcctggaagacggcaatgacagggtcctcgtgggtggtcaccaccagcacgctgcggaacttgtcaaacagcatgagcagctgggagcgccgcgtgttctcgttgtacataatctcctccaggtggtgngcggccgcggaagtagtgaaggagcctggcaaacatgcggaggtcctcagggttctggcctcgtcggaaattcgccacccaggctcgctccttg

SEQ ID NO: 126249 - DNA, 840 bp, Homo Sapiens
  misc_feature (43)..(60): n is a, c, g, or t
ccctcaactaaagggaataagcttgcggccgcggctgtaggcnnnnnnnnnnnnnnnnnnactgtttacaatgtggtttaatgagaattggaactagccctactattagcagacagcatcagggcggaggcccccagcccagaccccatggtcttccccatcccgaagtgggatggatttcctcatctgcatacacagcacttcgtcgatataaatggtgttctctttgacctggatctcctcctgcagggcaagctgtctgcgatgcagccctttcagctctgcctgagcttgggctaaagtttccttcaatcttgcgacattgtgggtgatctcttgaacctccttcattagcctatattgtgcgacatcacgacacagctccacgttcggccggtgtgtcctggtctccaagcgcgtatgagccaccttggctggcccttcttggtcaaggatggccttttcaagagctgtaatatttttctcctgggaagcaatctcttccatgaccttggccagatgatcagccagcttgtccctggcatcctttgtatccttcagcccattcttgaatgccgtgtccaccacatcacactgcttgcgcagatcattggctgtctgggacaggattcgatccaccagggctttcagcatcagggagttgttccgctgcttgtcagccttctccacattggtgctggagaagtccaaccagtcttccagactcacggagtttggctcaatcctcacggcgttctcagaatatctgatgtttggtgagttgttgttgagcgagaagcgatatcatctatggtcagggcacaacttgtccttcaatct

SEQ ID NO: 126250 - DNA, 1700 bp, Homo Sapiens
  misc_feature (311)..(326): n is a, c, g, or t
ttttttacttaatccaaaataattttattcacattttcagatttttgcttccacaaggtgttcagcaaacatgctaaggcgacagaatgtctagttggtcacgacatgcaacgctgaccattcaactgatgacagcagtgaccacgcccacctgagctaccagccccacagcacaaagggggtttgcgggaacacaccaaaccacacagcaaccagcaacctgaggtaggtctctttacagtacaaaaacttctacgccagtgtgagacactgattagcaagagctgcttaaagttgcagactttgagggnnnnnnnnnnnnnnnnctgtgcgacgactgcggtgagaaaggaaaacagacccacgaaatcctgagccctgccactgaactgtggaggtgtgggaataggcaaatgaaaaagtgccacctcaaaaagcagcagttggctccagggcttggaaccaacaggtcttggagctggagagctctgtgcagtggccagccataggaacctgaggcagtgggactctctgtggatagactgattcttgtttagaaacaacagcaaaaagaagaaggcaggaaagaaactccccggctcggaggaatgtctctgtgatccccattcttgatggagggagtgaaaaggggcctgggcttcgccccgctgctctcctgacagaaacagtaagtgacaccaggacagaaggcaggagccctgagaactcacggcgctctgcatggtctccagccgcccacccgtctccagccacccctggagcggctgtggggaggcggcagagggggctgtcggagggcccactattgccacacgtcttcctttggacacccagaaaacctggcaccgtgaaaccaccagctagagaagaatgaaatgctactcttcctacagtctaatagcaaaccagttctctagtacagccaactgtacccaaatgatagaaaggaatatgcactgttattagcacagtgcttattttaatataaaataaacagcttacattttcactgtaaatataggctatgtacagaattatatatagatatagctacacgtataaagcttcattataggcctctgatacaattataataacggttccctgaaccttttagagtgcaattaagaacaaaaactaaattttgtttacatgaatatggaataaatacaataatcaaaatatgactctccctaaaagtgaaacacacaagccaatccggaactgctgtgcgaaagataaaatcgagaaaggcaaggtttcggtaggaggacgcgatgaggggcccgccccaggcagggaatggcaatgctctaaagaaaagagacttcgtcaacagggaggagtcagcccttgacagcgaccttgttctctgcagcagcaaacatggcatagaatcgggaactgtcgttggacagaaggaccgatggggtgtcaaactccaccacctgtccctgggccagcaccataatcctatcggagcctagaaccgtgtgcaggcgatgggcaatggtcagcatggtacagtctgcaaatgcttctcggatggtctcttgaatcaataagtctgtctctgtgtccatggcagctgtggcttcatctaaaatcagaatcttacagtggcggagcagggctctagctatgcacaagagctgccgttcccccactgagaagttatc

SEQ ID NO: 126251 - DNA, 4034 bp, Homo Sapiens
  misc_feature (79)..(113): n is a, c, g, or t
ccggaacacaagtttatttggcatttggatgaaatgattctcacagcatcttaagaaaagttagtgtcaacccaaccannnnnnnnnnnnnnnnnnnnnnnnnnnnnnnnnnnaggcatcaagacaatgtacagtatcaaatcccacctccgcatggcaggtcagagggcacctgggctctgagaaaccgtggcaagctggtcctagaggaggaggacccctggagcacaaggttcagcaagggtgaccccgggacttgctggtcagactggggactgcagcaggccttgcaaagggggcattctggatggtggtgcaagaacagatgagcgagtccagctctcctcatgctcccaagggcctcctggagccacagtggcagcggtgttccaggcagccctgccatgtggaccttctgcctggcccaacgtgccagtggcctgagtgcttgtggaggcccatggggaaggggccctcactggccacctggcaccctataatgcacatgcctgctgctctggaacctggctgccctgccccagtgcatgtgggatccacggcatgcttcctgcttcgtcctctgcagccagtaggggactcttgtggccaggacttccttgttaagtagcagcccttctccaaggggagcacaagcctgcccgcacacagcctccagcatcatgctccagcaggccaagctcagggacaggcaattcagtaacaaaactcacagctctggacagttctggcacaaaggtcaagtctgtctgtgggcaactcaagattctcattccacatgggatggaaaaaatgggtctccagccacagtgtgagaatgtgtcaagaagtggactgtgcatggagtccatccccgagcagcaccacagaactgcatgcttcagacaggcctcccaggtgctgccccgctggtctggaaagactgagcgagacagcactgcctcagcacagcccaggatgcatcgatgaccctggaagagtgggcccccagtgacccgtgaagttccatgtgccaccctcacctgcagacgcttggccacatacacacacagagacacaaacatacaaaggaaagatccagacattcaacgtagaaaagatatggatgtgctaaaaatcgcacagaacccgcttaatctccaaacctcagaaatgttaaaggccctgtgtcaggcaacaaaaccactgcccaggagcaggcaacagggtccgtcaggcaaaagggtgccaggaagggcccccagcccctgcgctgctgaggaggggccgggaggtgtgcatgcggccgctgggcactgagctgcagtagtggcggtgatgtaaggagtggactttaaggagatagatgcagcccaggatggtggtttcagccacccctcctgcaatgaagcaaccctttatggcacaaatggggccgggggcaggcccaggggcaattcaacaggaggcaagagcccagggctccagagtggagagacaggaggcagctcagtccccagaccccagcagagcatctggggcctcggccccactccagagcttcttcctgagggagccatgcacagcaatgctgggagagggactgatggggtggggtcaggcctcctgccacagagctgggctgcagagcccagatggaaagacacagtgaagagctcaacctccttccaagctctccttctcagggcttcaggttccagagccccaggggagctcccagccaggggcagggtcaccttgatattcacaactgggcttgtgggggccatcttcagtgcaaccgttgtgacaaagtcaagagggtgcctccctgaagcagacccactgcctacgccacactgacggtccagaggccccctcctgagggcggccagcaagggggcactgtggcagctcccactgtgcctgtcccagactgggtcagcaggtctctctggacagcacactgcaccaagtaggcccaccaaaaacgcatcaggtgtggccatggcccacagtaccttcttcattccctgcctctaacatgtgcggtctgaatgaattttgtcactcttctgccatttataaaggagaagacagtgatccaaagctatgcatgtttctgaagccctcaaggaagctcggtgcaggccatcacttcttttggcagaaggcgggctgtggtctctatgtacacacgcgagcccgccagtgacgtgcggcagtgcgtggcgtccaggctgggacaggggcctttcaagtctccccagggaccggtgttttctacaacagacaggtgctcccagaccgttggggtacaggccaggccgtctacaccacagtattgagggagctgcggctgtggcggccaccccctggcagtgcctctgcagctggggtgctcccgctctgggcagggtcagggggcacgagcagggcgctgctgctgtcggcagagtcttccaggtctgccagagaggcccccgcagtgggcagaggctgctccaggcgccggagtaatgcaccttcactcccaccatccccaggggctggcaggctgacctccacaggctcaaaagcatcatcgtctgcagggtcatagaacacactgtccgggtggatggaggcctcgtagggcggcggagggtcgtcgggctggccgatgtccgggtacttgtatgccgtgtagggaggtggagggtcgtggaaatggaaagtcccaccctctccgtcgtcagaaagatgcagcggcgtgaggcccgtgccaaacccgtctgggccgtaatcaaagccagggatcctgcggccgaggttgaagtggtgcaagtttgctccaatcagggactcgatgcgctcccggcgccgctggcgcagccggtggaccatgaagagcagcagtgacaggatgaggaaggaggagatgcagctgacgaccaggcgcatcccgctggccatggagtcaaacagactgttgccatctgggtccagacacatgaacttgcagcactctttggggtccttgcggtactgttggcagccctggggcctctcacagagagcagccacacacatctcaggctcccctccatggcaggtgcagctcaggcatgggtcgtcccccttaggggtgaagtagaacccttcatccaccacgttgtccttgatgtcaacacatgtttgacttcttttacacagaaatgaagacttctcgtagcagctctcggcgtgccagctgtggaggtcgtggtgccgcagggtggggaaatggaagcactgaagctgggcacagaacacgttgtcgttctcagacatggcggaggcaaagatggggtctgggggcaggaacacctctgaagagcctttgaatgccacctcccggcgaccttccaaggagcggttccggccagtgataacatactgatagccgagccacaacttgcgctggtccttccaaccaaagctccgctcgggctggtcccattcctgggccaggacaaagcgcagctcctggtcagtggagaaggtggcgagagagccattcaggcgctggcaggtctgcgcggcatcccagtagttctccccgctcaggtagacccggtagcagctggccgtgccttcgtagtggtgccaccctgtcgggcacttccctaggaaactgctgaagcgaacgggctgcgccacgttcaccgcgtggaagtgcgaagggtcgcctcctctggcccgcccctgccgcggatccacagcctccttcccatgatgaggacgcacctccccggtcacttctggccgcagcggctcggtgacagtgagcacgagcaggaagagcagcaggaaggcgccgctgtctgccttgggcaccatttatcctccgttcatcgtccccggggcggctggaaggccggaccaggccggactgagggtcaggggaccgtgccaagcggagggtcaggcggagctgaacctgggcgaggcgcggagagcggcgggaaagagcttcgctggccgcgggctggcgcacactctcggctgcaacctca

SEQ ID NO: 126252 - DNA, 946 bp, Homo Sapiens
  misc_feature (82)..(117): n is a, c, g, or t
tttttccggaacacaagtttatttggcatttggatgaaatgattctcacagcatcttaagaaaagttagtgtcaacccaacnnnnnnnnnnnnnnnnnnnnnnnnnnnnnnnnnnnncaggcatcaagacaatgtacagtatcaaatcccacctccgcatggcaggtcagagggcacctgggctctgagaaaccgtggcaagctggtcctagaggaggaggacccctggagcacaaggttcagcaagggtgaccccgggacttgctggtcagactggggactgcagcaggccttgcaaagggggcattctggatggtggtgcaagaacagatgagcgagtccagctctcctcatgctcccaagggcctcctggagccacagtggcagcggtgttccaggcagccctgccatgtggaccttctgcctggcccaacgtgccagtggcctgagtgcttgtggaggcccatggggaaggggccacccagcaaccccggccagcccaaggcccaccctctgcagcctgcatggtccactttaccccgtttcctcactgccccctacgtgtctgaccggcccctaatgttcctctggtccccaaaggaagcgtcccagtcccacacatctcgtgccagccaccctgtcccgcacacacagttctgaggcctggcaggaatcctctgagctctcaggctcaggcccgtgggggactctgctgcgtggtcctcgggccctcactggccacctggcacccatttatcctccgttcatcgtccccggggcggctgggaggccggaccgggccggactgagggtcaggggaccgtgccaagcggagggtcaggcggggctgaacctgggcgaggcgcggagaggcggcgggaaagagcttcggctgggccgcgggctggcgcacactctcggctgcaacctcaggcaccgactccag

SEQ ID NO: 126253 - DNA, 786 bp, Homo Sapiens
gaccggttccggccagtgatatcatacttgatagcccttcccactacttgcgctggtccttccaaccatagctccgctcgggctggtcccattcctgggccaggacaaagcgcagctcctggtcagtggagaagtggcgagagagccattcaggcgctggcaggtctgcgcggcatcccaagtagttctccccgctcaggtagaccccggtagcagctggcccgtgccttcgtagtggtgccaccctgtcgggcacttccctaggaaactgctgaagcgaacgggctgcgccacgttcaccgcgtggaagtgcgaagggtcgcctcctctggcccgcccctgccgcggatccacagcctccttcccatgatgaggacgcacctccccggtcacttctggacagttggcttcgtcgctctcatcctcgcaagtcgcccagccgtcacactgccaggggagggggatgcactggatggtgccgctgcgacacgcaaactgcccagggttgcaccgcagctctggccgcagcggctcggtgacagtgagcacgagcaggaagagcagcaggaaggcgccgctgtctgccttgggcaccatttatcctccgttcatcgtccccggggcggctgggaggccggaccgggccggactgagggtcaggggaccgtgccaagcggagggtcaggcggggctgaacctgggcgaggcgcggagaggcggcgggaaagagcttcggctggccgcgggctggcgcacactcatcaggctgcaacctcaggcaccgac

SEQ ID NO: 126254 - DNA, 1004 bp, Homo Sapiens
gggcgtgcccaattgtgggaggtttggtgtttccgccagggtgggagaaatggaaagcatgcaaggctgggcacaaaaccacgtttgtcgtttctcagacatggcccgaggccaaagatggggtttggggggcaggaacaccttctgaaagagcctttgaatgccacctccccagcgacctcccaaggagcggtttccgcccagtgataacatactgatagccaacccacaacttgcgctggtccttccaaccaaagctccgctcgggctggtcccattcctgggccaggacaaagcgcagctcctggtcagtggagaaggtggcgagagagccattcaggcgctggcaggtctgcgcggcatcccagtagttctccccgctcaggtagacccggtagcagctggccgtgccttcgtagtggtgccaccctgtcgggcacttcctgctgaagcgaacgggctgcgccacgttcaccgcgtggaagtgcgaagggtcgcctcctctggcccgcccctgccgcggatccacagcctccttcccatgatgaggacgcacctccccggtcacttctggacagttggcttcgtcgctctcatcctcgcaagtcgcccagccgtcacactgccaggggagggggatgcactggatggtgccgctgcgacacgcaaactgcccagggttgcaccgcagctctggccgcagcggctcggtgacagtgagcacgagcaggaagagcagcaggaaggcgccgctgtctgccttgggcaccatttatcctccgttcatcgtccccggggcggctgggaggccggaccaggccggactgagggtcaggggaccgtgccaagcggagggtcaggcggggctgaacctgggcgaggcgcggagaggcggcgggaaagagcttcggctgggccgcgggctggcgcacactctcggctgcaacctcaggcaccgactccagctgcgcgcaattttttgaagttccggaccggtccagcct

SEQ ID NO: 126255 - DNA, 932 bp, Homo Sapiens
ttttcaccaggagagtctgcaggtttccttttaatcaaggctctactgaaggtgttttgtggggctaaaagcccccaaaacatgaaatggacatgtaacaccacctggatcccccatagcaggccagaccactctggcgagcactgctggtctgcccaaatctgggtaatcagactgggtattcattggctgcatttcaaagcacagcactgctttcagccaggatgaagtgggagtgaacccagctgctagcagagctgccactccaggctgagagccaagtaccagccactgccagtgaagactggcccctttactgaagggagttgttcagagtccagccaccggccctggggagggagagaagtcagggtattctgctcggggatggtcagggctccgcagctccatcgccagcatcctttggaaagccgcctctggcggagacagccggctgggggggcgctccaggtttggctgagacgttcccgccaccagccggctccgggcgccggcggcccagctgccgtaacatctcctcgcaggctgcgatggtgtccaggagctgccgctgccgctgctccaccgcgtccagcagctgctgggcgcgctcctctcggggcggctgtgggggtggcctcccgccgagccccagccccgccttcccgcggtccacgccggcagcctccccccgtgaccagtctgagcccgggccccattccatctccgcttgcgcggcccagaccaccgccaccccatttcggccgcccccctccccagcgctgcgttagggcttcgcaaggctgcgccccgcccccacgcgtccgcgacgcgtggtcgacatatcccgggaatatccggaccggtaccagcctgctttttttaacaaacgtggttctatagtgtactagtgcatggtgggagagacgcgg

SEQ ID NO: 126256 - DNA, 2653 bp, Homo Sapiens
  misc_feature (1627)..(1639): n is a, c, g, or t
  misc_feature (2235)..(2235): n is a, c, g, or t
gggtggtggatctcaatccggttgttcagggggccggggtcttctttaggaaacgattaaaaggccgcggggtcccctaccttagtagggccccgcgtcgtccaaagggaatgtgtttagagaaactatttgaagggtgcgaagccgggcccccaggctattgcggggatagtgggttgtggcggagtccgaggggagatctttattgacttattgtaattttttggcatacaaattacttaagtatatttacaattcttacataatgtacattttagaagataatgtactttgctccatttacaatgacaaactactgtaaaactacattcatgaattagatacaaatcctctacatactaataaaaagtaaatggactgttggttatacattctttaaaatataccttttcacaggtagcaagaaatagtacatgtaataagtctttatgactggaatgatccagaaatatcacaaagcatgagtaaacacatatataaaagtagctcatcatttccaaaagttaacctttagcctttgtgtaaaataaatggtgccaacaatctttataatgtagcaagctttccctgtttaatatccaaaaaatggagggtggggaggttgaagaaaaataagaaaagttagcaaataagatagtgaaaagaccaatgcagagaaaagtttatgtaatcaaatcttgctttgtctccacattatcacattttaagtggataaatttatgtaaacagaaaaagatgtccacaaaaccatatctgtagatgtcatttggaagcatcaagaaattgataagtatgtggtgaattaaaattacttttataatgttttgctttcattaatgtttgttattgcaaaaatgtaagatttcctacaattttgtcttcaaatcccaatctagcccttcaaacttttatccaggttctccagaatatttggagtctttgttatcaaagcacaaggaaagctggcattcattatcagacttcgctgctttacaatgatttcaaatcatttcatgataccaaataaagtgcctctgactggtggtcagtcagacctgggtaatggtgccaattctgccaccagctagcaaatcaagtgaccctgctctgtaaaacaaaaggagcaccctaggatcaaaaaagtagacaactttggagcttagattaagatctcagaaatcctaccatgagaatccagtgagataaagcaatgccaagtaccctgtaagtagcaaaacagtatacaaagggatgcttctatattttcaccttgtttcattacactcattttaattgtgaggaggccctgaatccaaaaagggtagtgacgactagtccagtgctccttccaccgtatcatgcggttctaaagtcattctggacatacaatctacaaaaatacatcatttttccagctcatgtccatggtccaaagtgatattatacacaagtgttatctgacaatataagaatgatctgggaatgtctgttcaaaacggtagtaaatttagtcttaaacacaatttcatttactgcgaccatacttaacatgcataaaatatttttaaaatacaaacttaaattggccagattctgaatgtgtacnnnnnnnnnnnnncaaaatgcactcatgaagaaccaaagttcatattccaaattaaatctgtatgtctggaaaagtaaccaatcaaagttcattaaaatatacagtgaaaaccggtataaattaggcaaacaccataatctaatgaatatcaggaaatttctgagtttctaaggattgtattaaaggtaactttttaaaaccttagaaatcttaagcacataaatgttataatgaagcatttgcaaatgactgctcaattacttttattctagctctaacatgaaattgcattttattaactcttcatagtgctgctattcttattttgatattaatctaactttcaagttagtaagctaatgataatgagctaacggattattaataaggaataagaaactaataatagcagataagttatggaaagaaaataaaaggccaatcacattgactaatgaagcccaaaagcatgattaactaagatttcttataatgcactgaataattcacagcataacataattcagatttgttacataccatataaaagctattagttgacatggctaaattcacctaagagccaacctaccttgtaactattaatntaatttaaagccttgctgtttactccatcatttctgccaaatgtagtccaaattgggtctcagcatattcaagaaatcaagccacagaaatgtgtacttgtattgctaggctccctgcaatattaaagattttgctttctctgaagatattctgaaccatgatcatctttaaggcacttcaaatacatttctgaccactaaatttaagtagatactaattaattactgccatattaacaattcatcacgtaagccacaggaggcaagagtctcataaggaattgccttcacaaccacagagattccagaggtgatctgaatgaaacacgcaccaatggccagatccaaaaggaaaactacctagacttcctcagataaaagtcaggatctttaggaattaaaacaggaagggacaccc

SEQ ID NO: 126257 - DNA, 1004 bp, Homo Sapiens
  misc_feature (829)..(829): n is a, c, g, or t
  misc_feature (831)..(831): n is a, c, g, or t
  misc_feature (884)..(884): n is a, c, g, or t
  misc_feature (913)..(913): n is a, c, g, or t
  misc_feature (939)..(939): n is a, c, g, or t
ttttgaaggacagggttacgagtttatttcttggtgcctccaagagctcatggaaaagcagcacagtgagcaacaagcaacagtggtcagtaaatgtatatgactcaacacattgccacagtctcagcttggctgtgtggtacatgctgccaagggtcgggtgccaagagagagcagaatgaagccaggtccccaaggaagtgagggcccaaaatagggagtgtgggtgatgagggtggagttcaaatccagatgtcagagctacaatcgcccccagggtagcggagctcatgggcaagggctgggccaaggggctccttcccgaagtccaccaggaagttggggttcaacttcagccctccttttactgtgtctacatcaacctgcagcatcacagagccttccctgatgagatcagggtaaaactgcttgtcccaggcactgtacagcgacgtggtgatgtagaggcgcttcccatccaggctgagctggatcatctgagggcctccagccacccgttttcccttgaccactaggggctctggctgggactttagttcctcgtcctccagcacttgcacagggcctcccttaacaatgctgcctccgaggaagagctgtcctgtgaggcggggtctctgtgggtcagagatgtcatactgcctcaggtccccatgcagccagttgctgaagtagaggaagcggtcgtccagggagagcaggatgtcggtgatcagggctggcatttcgggcagcagccagcctttcactttcttggggggcacctggatcaccttctccactgacatgtactccctcgtttctgtanancgctgatggggagctgatgcgcacccacaagcctgggcacgtctgggtgtgangagcggtctccagggaatagccactttanagacaggtctgacatctcatgggctncagtccatcatatagtggctccgtaagtccagctcaatcagggggttgagcatctcgtagaatgg

SEQ ID NO: 126258 - DNA, 719 bp, Homo Sapiens
  misc_feature (163)..(202): n is a, c, g, or t
aaagaaaatactttattatgtcatgaaaaaaaaggcatcaaccaactagattcatacttgtttgaaaaaaaatggaaaatttattaattagacagtatgtgggcatcctgttccacatgggaatgagaagatgctataggttctctaagtattgcacagtctnnnnnnnnnnnnnnnnnnnnnnnnnnnnnnnnnnnnnnnntcacatgatattgggaaccatctcacattatgaataatctaccaagaaacatttaaaaaagaaaaccctttgtttctacagtagctttaagtttatagttcttggaatgactgtattccattgaagacatctcagtaacaggaagctgttttagcaatcccatgtgcaaatattaataaaaaatatataaaataatgcaattcatctcttgccttcaccccggcaatcatgacatttctgagaactgttttgcttgaaaatgggttaagctgtaagttttgcctgaagctccatctctgcagcccgtttgagtgcaacatccactagaagctgaaatccactgaagtcctggttgaggtccggtggagtagggggaggagtgttgaaaagaccactctgtgtattcgtacttggtccagatttacaagtgtcctctgggtacatgagagaggtgtctgtgaagtttttggccgctatctgctgtatatctgtgttttgtccacaccgaccgactggc

SEQ ID NO: 126259 - DNA, 1699 bp, Homo Sapiens
  misc_feature (48)..(48): n is a, c, g, or t
  misc_feature (211)..(211): n is a, c, g, or t
cagtcttctgtcctccccagagcaactgccctccacagccatggcganctgcagtggctcggcccttgcagcaaggccagaggtcaaggttgccatggcctcactcctggaaaccacctgaaggtgcagccaccctgtataaacccatcaggtgacatctaacttggcagagaagtcctacccttccctccatgagagaccacagcggtanccttggggatcctgcttcagctgtgagatgatagactgacgagcctgtgaccacttctccctccatcatgaagtggtgcaaagtacatttatttttacaatgaaagctcatctatgaatctgataaaggccttccttcaactggagacaatttgggatgttgcaaaacaaggtttgggaagcccttctatggatcggttttgtgtccaagtctgtccctgccaaaagccatcaaaagtctccatcacccctgggctccagtctgctacccccagacttggcagctgggatctctccttcctggttcatagttctcattcccacccctcagcgatggagttagagttccaggcccacgtggtgaacgagattgtgagtgtcaagagggaatacgtagtttatgatctgaagacccaagtcccaccccagcagctggtgccctgcttccaggtgacggtgagtcaagtcgggaggaggccgacagagggctgctggaggcgggtgggagtgaggatgcacggccagaggccaggccccatgcccccgatgcccacctccttcccccccgccgggaaggccctgacttttccccttccagctgaggctgaagaacacggcgctcaagtccatcatcgctctcttggtgcctgcagaggcactgctgttggctgacgtgtgcggggggttgctgcccctccgggccattgagcgcataggctacaaggtgacattgctgctgagttacctcgtcctccactcctccctggtgcaggccctgcccagctcctcctcctgcaacccactgctcagtaagccctgctcccttacccagtctgccctgtttctccccggtcacccactggtgctcagctcgctgggcaccagagacacagggactggcccctgagcatctccctgtgccctgcctcccccagtttactacttcaccatcctgctgctgctgctcttcctcagcaccatagagactgtgctgctggctgggctgctggcccggggcaaccttggggccaagagcggccccagcccagccccgagaggggaacagcgagagcacggcaacccagggcctcatcctgctgaaggtgggcaggggctggggggtaaggaatgaggcctaggtgcacacctagggctggggtgagggcacggaggtccaggtgtgggtagaggccccttgcatccaccctgctggctctcctgtccctggtctccaccatgtcctcctcccttagaagaaacaggtctggggcagggagcaagctgagcctccctgaagtcccaggtgacctcaatcccctgataacccatgccttgcacagcctaagagggtgtttcttcaactgaagatggcctgaaatgggccagacccaaattttcatcagctgagaatctaagaaaggaagcgatacaggctgatgacccccctcgtgccgaattcaacacccaggcctcgtacctagcctaagtt

SEQ ID NO: 126260 - DNA, 580 bp, Homo Sapiens
  misc_feature (261)..(261): n is a, c, g, or t
  misc_feature (274)..(274): n is a, c, g, or t
agggtgtttcttcaactgaagatggcctgaaatgggccagacccaaattttcatcagctgagaatctaagaaaggaagcgatacaggctgatgacccctggggttcgctcttccgctcatgttgaggggaccttgaagaacagctcctttccctgtatctctccccacagagccctccagaggagtaaaggggtcacagagaagctgggctgagactggtgagcgcatcttcttcctcgtgtatgtggggggggtggctgngcacccaattcgnctttgcaggaatctggatgtgggcagcgtgcaagtctgacgcagcccctggagaggctgcaccccatggcaggcggcctaaactgtaaagggggcagggcctggggcttgcaaccctaggatgaagtttgctttcccatggctgggggcgggccatgacagggcctctggattaagccaccctgagctctccctccgctagcacacaagcacagagcgtgaaataaacccatctccagtgcaagtgtgcctcaagggtcagtcttcaatctcgtcctaaataggtggggccctattttttgcttcc

SEQ ID NO: 126261 - DNA, 1163 bp, Homo Sapiens
cacacgacgcacccacgagacggccaggcaaaagcagggttaaaacgaggcagtactatacggtcctaaggtagcgaggcctgggtggcgaattcggcacgaggccggggcgtgcggagggatgtggcccggaatatggtagggggggcccgggtggcgtcatgcaggtaccccgcgctggggcctcgcctcgccgctcactttccagcgcagcggccgccgcagcggacactccagaacggcctggccctgcagcggtgcctgcacgcgacggcgacccgggctctcccgctcattcccatcgtggtggagcagacgggtcgcggcgagcgcgcctatgacatctactcgcggctgctgcgggagcgcatcgtgtgcgtcatgggcccgatcgatgacagcgttgccagccttgttatcgcacagctcctcttcctgcaatccgagagcaacaagaagcccatccacatgtacatcaacagccctggtggtgtggtgaccgcgggcctggccatctacgacacgatgcagtacatcctcaacccgatctgcacctggtgcgtgggccaggccgccagcatgggctccctgcttctcgccgcggcacccaggcatgcgccactcgctccccaactcccgtatcatgatccaccagccctcaggaggcgcccggggccaagccacagacatgccatccaggcagaggagatcatgaagctcaagaagcagctctataacatctacgccaagcacacaaacagagcctgcaggtgatcgagtccgcatggagagggaccgtacatgagcccaggaggccagagttggcatcttagacaagttcggtccacctcccaggacgggagatgagcccagctgtgcaaaggagctgagaccagcgcggagagaacttccagtagcactgagaggggctctctcagatatgtgagggcagagccgcagacccagtggcggtccacctgtgcaggatggaggcctgagacttagtgagggtccgatgagggatcactggactggatatactcggcggcgacaaagaaacaaaatcggctttggggacagacagcgcacgtccactcgagaaccgccaggtaaacgggcaacacaggaaaagagaacacacaacgcacagcacagagcacaat

SEQ ID NO: 126262 - DNA, 1126 bp, Homo Sapiens
ttttgtaaagaccacaaagatttaatttaaaatcacagtgtctcagctggaatgccccgtccatagcgggcacccctgcaaattaaaagttcctcaagaggcccctccaagcccagcaacaaggggtgagcagggcccagctgggggtctggcaggcctctggcccctccacatgattctggagaggaggcccagctctcaggtgctagctgggacaggttctgctgccggcgctgcttctacaggctccttctgcaccagcgtgggctcatcctcaccgtcctggggagggtggaccagaaccttgtctaagatgccaaactcctgggcctccatggggctcatgtagcggtccctctccatggcggactcgatcacctgcaggctctgtttggtgtgcttggcgtagatgttatagagctgcttcttgagcttcatgatctcctctgcctggatggcaatgtctgtggcttggccccgggcgcctcctgagggctggtggatcatgatacgggagttggggagcgagtggcgcatgcctggggtgccggcggcgagaagcagggagcccatgctggcggcctggcccacgcaccaggtgcagatcgggttgaggatgtactgcatcgtgtcgtagatggccaggcccgcggtcaccacaccaccagggctgttgatgtacatgtggatgggcttcttgttgctctcggattgcaggaagaggagctgtgcgataacaaggctggcaacgctgtcatcgatcgggcccatgacgcacacgatgcgctcccgcagcagccgcgagtagatgtcataggcgcgctcgccgcgacccgtctgctccaccacgatgggaatgagcgggagagcccgggtcgccgtcgcgtgcaggcaccgctgcagggccaggccgttctggagtgtccgctgcggcggccgctgcgctggaaagtgagcggcgaggcgaggccccagcgcggggtacctgcatgacgccacccgggccccccctaccaatattccgggccacatccctccgcacgccccggtcggcttccgtccctcgtgccgaattcgccacccaggcctcgctaccttagaaccgttatagttactgccagttacg

SEQ ID NO: 126263 - DNA, 1068 bp, Homo Sapiens
  misc_feature (60)..(81): n is a, c, g, or t
  misc_feature (922)..(922): n is a, c, g, or t
agtgccatgccaaaattaaccctcactaaagggaaaaagcttgcggccgcctgctcaggnnnnnnnnnnnnnnnnnnnnnnaatttaaaatactttgttttgatgaaatgctttgctttcacaatagaagatcagtagtacacagtatattgaactctgtaacaaaattattttttgagaaatacagaagtgagaaatagtgatttcctcaatttgtttatagtcttatcacaaagtaggccaaagttcagtattaaataaatagatatcctaataaaagtttgtacaagtcttcctaaggaattacattcgtaagactgtttaccttctgtttgacagcagtgacaggaacgtggggattcccactcatgacgagtccctagcacttggctcctagcacccacagcctaggcgcactgcatcacctggtggggtgcagcctgggcttctgcgagtgaggtttcctcacctggaactctggttccatgtttgtgcttagcctgtgcgattctggtaaacacagaaaacctgcctgtccacccccagtgctgaagactgactggtcaaggaggtgttagtgagagtgttgtgttcaccatgtggagatcaggcggtgattaccgcatcttctttgctgactttagtaactgggtgtccagagaggagtgaccgggagtggccgagcggttgcctggactcagcttctgattctggcagccgggagtcagatgcaggcccaatggtcaaggggagttgttcagcgcctggaatcacatgcactgcgctgtggggcgcagacactcctgctgtgttccccaggcaccacaggtacttgggatgcattttgctcctctggccacccggagactcttggcggggcagagggacaaactgggggctgtcggacaccattcatcagganggcaggaccacctggctgatgagtcaggtatcagcatccgtacaggaattgttggcaaatgggagagtagctaggagaacggaactggcacggtgtgagggaggttaaggtaccgtgggagaaagccagtgatggccgctcactgg

SEQ ID NO: 126264 - DNA, 1526 bp, Homo Sapiens
  misc_feature (65)..(94): n is a, c, g, or t
cgggcagtgccaagctaaaattaccctcactaaagggaataagcttgcggccgcatacgcggtcnnnnnnnnnnnnnnnnnnnnnnnnnnnnnngccttgaaatgtttttaatagaattggtctagtaatcgttcaggatttcggtgatgggccctccctgtctggacactgccaacccacagctggaggggcacttaaggcacgtcattttgtgattagaattacacaaaatttgattaatattatagctgcaaaattaacatacacaattttcactcataatttaaaatattttgatgaaattctttgctttcacaatagaagatcaatggtacacagtatattgaactctgtaacaaaattatttttgagaaaatacagaagtgagaaatagtgatttcctcaatttgtttatagtctatcacaaagtaggccaaagttcagtattaaatagatatcctaataaaagtttttacaagttttcctaaggaaatacattcataagactgtttaccttctgtttgacagcagtgacaggaacgtggggatccccactcatgacgagtccctagcactcagcccctggcacccacagccccggcgcgctccgtcacctggtagggagcagcctgggctgccgtgagtgaggtgttctcactctggttccgtgtttgtgtttagcctgtgcaattctcgtcaacacagaacacctgcctgcccacccccggtgctgaagaccgaccagtcaaggaggtgttggtgggagtgttgtgttcaccatgtggagatcaggcggcgattaccgcatcttctttgctgactttggtaaccgggtgtccagggaggagcgatcgggagtggccaagcagttgcctggactcagcttctgactctgcagctgggagtcagatgcaggcccaagggtccaggggagttgttcagcgcctggaatcgccatgcactgcgcggtggaccgcacgacgctcctgctctgttctcccaggcacagacaggcacttggaaggcagctttgctcctctggccacccggaaacctcccagcagttcagatgggacaaactgggggcctgtcagaacagccacttgtgccgggaaggccaggccccggcctgctccgatgaacgtcaggacggtggctgcagcagggaaccagggctggccttggatctgtccagtagggtcactgactgggcagggcttgctgcatagaggatggctgcattttgtgctcagagttggttgaaatggctacgaagtgtggagaataaccactgaatcccaaaaagtcactgcgcttgatctgatccaagtaacagtgactgcagttagggtcgagagcttctccgaagcagcggtcatgcaggcttttgtgtggctgacgcttccctttttcacaacagtaaaaagctatcaatgggaaattgtggacttttcccaccagggactcaatggggactcaatgtgcaatattcagtcaacataaaactctttaagaactaaaaaaa

SEQ ID NO: 126265 - DNA, 1029 bp, Homo Sapiens
  misc_feature (725)..(725): n is a, c, g, or t
  misc_feature (750)..(750): n is a, c, g, or t
  misc_feature (759)..(759): n is a, c, g, or t
  misc_feature (771)..(772): n is a, c, g, or t
  misc_feature (948)..(948): n is a, c, g, or t
  misc_feature (960)..(960): n is a, c, g, or t
cccatcaatatatttcaccttttttattgaatttgtattaaaggaggtagtgagggggcggaagcacttaagagtcagaatccatattagactctggggagtgaaaaattaaattaaatcagtaagatggggagtgggggaagagtcagagggaactttgcccacctttgaagatcaaatcaagaaatcagggaaagcaaagacttaggagaggagaaagacattctctcaatccatcctccttccccagggcagagaattaaacaacgttactgagtgagcctctgagcagaaggctctcccatctatgcacagacttcactcctcctccccaggccttcctggacaatgtccagggctggccttagccaacagaaatagaggggtcaagggggtccaggagtacggaagggtcagcagggaccctcaatactgattcttctctggctggaggtgggcaggaagcagacatagctcaaatactgagcagccaaaaaaagaagaagatggcgagaaacaggaagagggaatcctgccagctggaggctgggtgaccctgtcccagatccacacctgtaccccggcggaaaggctcatgggcattgaagacggtggtgaaaaagccaaagggaaaagcaccaacaccaaatgagaagtggaagcccccggtatcaccaaatggctggaatcccctctgctctccggagctggtctctggccctggngggcggggtggagtttttaatctgnggactctgnggcttctggctnncctcgcccataagcgggacaacttctctctgctgatccagcttacatactggacactcttgccgttctggcgtgtctcagcactgatgaaacatgggcacagtacaggtggcaccacaactgacacagcttccgagcagtctcaacctatatacatcgaggtcgcgcccgccgccngctgcgattggnctcggggccctcgtgcgattctggctcaggcaatccctaagagtcgataatcgatcagtaagtgttctg

SEQ ID NO: 126266 - DNA, 1146 bp, Homo Sapiens
gtattaaaggaggtagtgaggggcggaagccacttagagtccagaatccatattagactctggggagtgaaaaattaaattaaatcagtaagatggggagtgggggaagagtcagagggaacttggcccacctttgaagatcaaatcaagaaatcagggaaagcaaagacttaggagaggagaaagacattctctcaatccatcctccttccccagggcagagaattaaacaacgttactgagtgagcctctgagcagaaggctctcccatctatgcacagacttcactcctcctccccaggccttcctggacaatgtccagggctggccttagccaacagaaatagaggggtcaagggggtccaggagtacggaagggtcagcagggaccctcaatactgattcttctctggctggaggtgggcaggaagcagacatagctcaaatactgagcagccaaaaaaagaagaagatggcgagaaacaggaagagggaatcctgccagctggaggctgggtgaccctgtcccagatccacacctgtaccccggcggaaaggctcatgggcattgaagacggtggtgaaaaagccaaagggaaaagcaccaacaccaaatgagaagtggaagcccccggtatcaccaaatggctggaatccccctctgctctccggagctggtctctggccctgggggcggggtggagtttttaatctgggatcctggggcttctggctccctcgcccataaagcgggacaaccttctctctgctgatcccagctttacatactggacactcttgccgttctggccgtgtctccagccactgatgaagacatggccaacagtacaggtggccacacacactgaccacagcttcccgagcagtctccaaacatatattacattcgaaggtcgcgcccgccccgccccgctcgcgatttggcccttcggggcccccgtcctcctcctccgctgctgccatggccggttttgtttcgccccacgtacccttcagtccccccaaatacacatacacacgccccaacaaaccagaaaccacctcctgcccacgatcgttgggcaggcttcaaggtttcctaatcactattggtctgaatgcctgccagtcacaaagaattcaaaa

SEQ ID NO: 126267 - DNA, 964 bp, Homo Sapiens
  misc_feature (931)..(931): n is a, c, g, or t
aaattaatttaatttaatttaatttaaaaaatcatgcaagtagaaatgactttttcccccttttatcaataaaatgctgcccagaatgactagcttattttctttttaattgaacccaaaagaagcttttagtatggagcaagtctggtggaaaagcagcatatctcccaggagagaagggaaacggagcagggccaatcatcaggtgacagtgcagtgctactcatcaccatcatgaaaaactcatgagcgtcagacgcgccacagggattcctgatcaggtaatatctgctattattatgacaagctccatagaaaaatgtagacagcagggcagaaagacattattctttataaataaaaggttcatctgtgcaatattcacattagaaaaatatacattgcttgccatagaccttctctggataaaatcagacgaatctaggatctgactccacttcactgtgagggctctggctccacggtgacgaccgactccacagcttctagaggaactccttctagcgggcccatccgcaggcacgcccctctgcatcagtcactgtgacaatgtcctcctcctgagacactattgtacctggaggggacaagataagcccatcggaagtctgaataaaaatctgcttctgtccctgagacagtaactcatggctcccattggaaatttcaaaagccatggcttcgccgacagcaaccacgctctccagttctctctggccagagtgcacctccatcccacaggggaaccggttcaagtcccccgaaaggcttctgagacacccttcagtcaatagtgatccatgtgggccaggctgaggccctggcttgggcacagtcctgtaggcacagtccactgccacgctatccacagacaaaattttctcaagcggaggggctgccacctctgtangcaggacgctggtggggctgggctgctggtggt

SEQ ID NO: 126268 - DNA, 761 bp, Homo Sapiens
tttcagaaagacattattctttataaataaaaggttcatctgtgcaatattcacattagaaaaatatacattgcttgccatagaccttctctggataaaatcagacgaatctaggatctgactccacttcactgtgagggctctggctccacggtgacgaccgactccacagcttctagaggaactccttctagcgggcccatccgcaggcacgcccctctgcatcagtcactgtgacaatgtcctcctcctgagacactattgtaccagcggccaaagcatgcaagggcctgggcttctcccggcctctgctgttggcagcaagagattcagtggtatcgttggacagggcttctcttctgggccttttcactgaggccagtccctcctccgcagcctcacgttccctcttctcgctgctagctccctctagctgctccccatccatgtctcggctgaggtgcttgggtccaaggttgtctgggtgtatttctttcttccgtaggaattctgtgattcctaatgactcagcaaccttcatcagaagaaactcatacacggtcacaacctgagccagctgaggcagagccaattccaccagatcctcccggtcacactgctggaggaactccttgagcctggctttgcttggcgacgccctctgctctcctgccgcagcagggccaccaggtagctgagcagctcttctctgctggaggacagctgtgcgggactctgcaagggtctctgagcatgtgcgt

SEQ ID NO: 126269 - DNA, 944 bp, Homo Sapiens
caatcacattagaaaatatactggctgccatagaccttctctggataaatcagacgaattttaggattctgacctccacttcactgtgaggctctggctccacggggacgaccgagctccacagcttctagaggaactccttctagcgggccccatccgcaggcacgcccctttgcatcagttcactgtgacaatgtcgtcggtcctgagacactattgtaccagcggccaaaagcatgcaagggcctgggcttctcccggcctctgctgttggcagcaagagattcagtggtatcgttggacagggcttctgcttctgggccttttcactgaggccagtccctcctccgcagcctcacgttccctcttctcgctgctagctccctctagctgctccccaatccatgtctcggctgaggtgcttgggtccaaggttgtctgggtgtatttctttcttccgtaggaattctgtgattcctaatgactcagcaaccttatgcattgtttatttccagggtctcctgggaacacagaccagaactactgaggtaatcttggcacattttcttaaccattttatgcaactcttcaaattccttatatatagctgggaacaaaaggctttgctagatgatctttttcaaccttcatcagaagaaactcatacacggtcacaactctgagccagctgaggcagagccaattccaccagatcctcccggtcacactgctggaggaactccttgagcctggcatttgcttggcgacgccctcatgctcccttgccgcagcagggccaccaggtagctgagcagctcttctctgctggaggacagctgtgcgggactctgcaagggtctctgagcatgcgcgtcttctagatccttggtatctctcctcgtgccgaattcaacacccaggcctcgtacctagccctaaatttt

SEQ ID NO: 126270 - DNA, 1329 bp, Homo Sapiens
  misc_feature (73)..(119): n is a, c, g, or t
  misc_feature (271)..(426): n is a, c, g, or t
  misc_feature (465)..(477): n is a, c, g, or t
  misc_feature (487)..(600): n is a, c, g, or t
cacaccccaaacccccggggggaggtttcccccccctttttgttttaaaggggggcgccaaagtggggaaaannnnnnnnnnnnnnnnnnnnnnnnnnnnnnnnnnnnnnnnnnnnnnnaggggcccaagggggtaatatcccccgggggatttaaggttttcccaaaccggttggagggggttcccctggggggaaagggttaaaaaattccaccattcctcccaaaaatgcccggggggggcgtaatttaatattggactccgctgggnnnnnnnnnnnnnnnnnnnnnnnnnnnnnnnnnnnnnnnnnnnnnnnnnnnnnnnnnnnnnnnnnnnnnnnnnnnnnnnnnnnnnnnnnnnnnnnnnnnnnnnnnnnnnnnnnnnnnnnnnnnnnnnnnnnnnnnnnnnnnnnnnnnnnnnnnnnngggccccgggccccaaaaaaaggttttaaaaattttttnnnnnnnnnnnnngccccccaannnnnnnnnnnnnnnnnnnnnnnnnnnnnnnnnnnnnnnnnnnnnnnnnnnnnnnnnnnnnnnnnnnnnnnnnnnnnnnnnnnnnnnnnnnnnnnnnnnnnnnnnnnnnnnnnngcctttacttttttcttttattatattttctcaaataaacttccccaaaggaagatattttaagagcattttcaaacatctttggcatcacataaaaaagaaatctcgtgtaaaaaacgaaatgtcatctgagcttttataatacaaaggcgcaatccaatatgaacatataaaatatatacaaatatagtgcatggtcagtcacttaatacagctctctctacaaaaagtaacttcttagaaattaaaaaaacacaaagtaaccacttaatcaaaaaagtcctcttctctcccagtattcaagttcctgtttagagtccggagggaagagaggtgggttggggagtttaggaggaggggtggcctgagccccctcagttccgccacggcctccacatggagtccgccgtaagcgaggggccgctggaaggtgacactgcgttggggcccacggaggtgccgctgttgctggtgtagacggggatgacagggccgctgtgcgcgaaggccccgttgggaatgaggaaagcaaactggccatcgggagccggtaccacctggaagcctccaaacaccttagccgcctctccagcctggctgcccagcttgcagggggcgccgccgggagggggcgccgcgcccccggggatgggcactagtggcggcggcggcgcgaacggcgcgtgctgggggccgccgggtcccggtgggggcggtggcggcgcctgc

SEQ ID NO: 126271 - DNA, 782 bp, Homo Sapiens
gtcagttgaaacatacaactttattgatgatacacaaatgaagtctttggtggataaattcaagtcaaaacaaataatagaacagtaggccattcataatggacaggtttactgtcaattcagaagaaccagtaaaaatatttctatccaagcagcacgattaaagtcacaaatatgttttcagtacaagaggtatttatttggtattcataaaatggttcagcttaaagctggtgactgtcacagataacatcactctggatgatacattattcaacactggcagctgaaaggatccctttactatatgagcaagtggaaaagcagtaactttcaattttcaacgcttccacactgcaaaatcatgaaatttcttcaagtcttttgacggtacataaccaatcagaatttgttcactagttttataactttcactttcactaagaggtcatggtgatttgctaaggctctaattttcttaacacacactccagatgtagtgcataagtaaaaaagggaacctttattgaattctctatagttaaacacttctgctctgagattgtcatagataatctcaaatagagtaagggcattaataaggatttctgattccacgtaagaattatagagggaactaaatgatgctggcacttgggtactgagaagtttcttcaacatatctggattttcagcaaaattcgaaaggatcgacgcgtgggtcgacgatatcccgggaattccgaccgtaccagcctgcttttttgaccacttgttcatga

SEQ ID NO: 126272 - DNA, 1280 bp, Homo Sapiens
tggacttcttcaagtcttttgacggtctaaccaatcagaattgtgcactagttttataactttcactttcactaagaggtcatggtgatggctaaggctctaattttcttaacacacactccagatgtagtgcataagtaaaaaagggaacctttattgaattctctatagtgaaacacttctgctctgagattgtcatagataatctcgaatagagtaagggcattaataaggatttctgattccacgtaagaattatagagggaactaaatgatgctggcacttgggtactgagaagtttcttcaacatatctggattttcagcaaaattcgaaaggattttcaaaatctcaaccttgatttttccacctccctgagatagcaaacggaaaaagtttgcaatggaattgacaagcaggtgttggtagtcattagtaatagtcatgttagttagaaattttagtccaactacttgaactgctgagttcaggttagaggccatgatatcatccatcactttattcatgtacacctgaagccggccctgattttcataattctcactcaggttattcatggccattaaggctttttccttaatgtgtggatcagttttgttgatcatgtttgcaataattgggaggcctcccaatttgcggattgtctcttgattgcatgaataattggcattgttgctcagagtgagcaaagctacctgttggatgaaaggatcatcagatttctgaagcaaggcaaggaccttcctgagatcgcggacacccagaatctcatcaatttcataaggaaaggggcgcttctgcatggcaacgggtcttcttcccctccctctgcgctgggtctcgggctcagagtctgaatctgactctgtgtcagtccacccggactccccttcctcagaatcagggacctctgccaggaaagcctgtccgccattagcagaggctgcagcagctgctgcagcgccatctccaggacggaagcccatccccagttcgtctacttcaactttgcttttcttgcccttgcccttgcccccattccgggacctggttacacccttgcctccacctttgggtaccgctccagtcgctgatgtggctttcggtatagccccagtgtgagccccaggggttgctttcttggcagctgatgttccaggaaccaccgctgttctaggggaaccagaagttccaggagactctgcagccccagtaggtgctgcagccccagtaggcgttgcgggcaagggggcggccgc

SEQ ID NO: 126273 - DNA, 994 bp, Homo Sapiens
cggcagtaactctaacggtccctaggtagcgaggcctgggtggcgaattcggcacgagggtggccgtgtgtgtggagtgggctgcagcgtcaggcggggcgggctggtggcctgggggccccagaggctgctgtctggatcctgggctgctgcccaggatggggctcccgcgtgctcttgcgctgccctctggtggccgctctgggtccttgcaccccgacccagggccagcctgccctgtcctgtcctgataccgaggtgggagccctgccttggccagggtggccgtgttgacggttcttgggactgtgacattggaaggcgaggcaggtcaccagcactgtcctctgcaggatgggctgggattcatttggcagcttctcagggcctgtgtccggctggttggtccctgtgctgcccaaaccaggtgtccacatttccggctccgaggcgcagagaagggggcaggtggtggcttgggtggaggaaggcaccatccatcagcccagggagggagggtaccacctgggcacctggggctggatgtgagaggcctggaccagggcccgccggagggcgtggaccagatgctcatgtgttcctgggtgcagtgtctgtgttgggggctggccccaccctgggccagggtgcatggagggcatggccccagcgggggaggaaggtgggcctagggctggctccagggtgtggagagcctgggagtggtctccgtcctggggccccaggaggttcccgcaaggagcgactggggcaggtgctggaggaggtcagtggacaagatggggagatgtggaaaccccaaaagccccttctcaggcagccctgcctccaagaccgacagatggctaagggggccgcagacctggctcccccagctcctgtgtggagaaagggcaacagctgtcccggatggttattctctcctttcctcaaacacatttggaactcaagtaaatccgatgcatgttgggtg

SEQ ID NO: 126274 - DNA, 1073 bp, Homo Sapiens
ttttgatatttcaaaaattattttcacacatgattatcatacagtattacaatgtattatgtgcaaaattccatttaaaaaatcatttacaaaagtacaacacagtatgtgctgagggttctagttcaacaaaagccaaggctaaaaaaggtacaaggtacaaagccaaccaaatgagatgactatgcatctttacacagtacaataacatgtttttgtaactacctgtgttacgtggatacaagaccctcatagtttgtgcacctgcaaactggttttatttaacataagtttaatttcactgcaggttctgataatgtagattgatttttttgtgcattttcaaattcttctccattatatagcatcttatttaactcaacaaaagccacattatacattacttggtttctggtcccaataatttgatgctgttaagttttaatttgtatggaaaagggagaaaagtgttcttcttgatttttattttcctcaaggggctttcaaaattgtttctacaagcaaatcacacatggaatagattttgccaaacctcactgcatatttacagtattttaagcataggtggttccttctatctctttttctacatcttttgaagagcctgaaccagcagactgcactcctcagtcctttgttagagttcatatttctctctctacctctctctacattcatttctctccttattctcagcatcatttgtttaaaaaacaaaacagcaaaacaccactaaacgtgaacaagagaacagtacatccgatttccaaaggcattctgtggccagtgtcaggaatacgttgctttaagaaatccagcagtctctccccacaaagttgccaaaacatccagttacagaagagagactttaaaaatgcaatactctcaaatccagcaagagatttatttttgaatattaaatgttaaaatcacatgcataattatagaatattttaaagttacaaaaatattttaaaaccaatcctgacagtttacctgcaactgctataaaaatttctatgaaatatataaaaacatgaaggctctttgta

SEQ ID NO: 126275 - DNA, 1156 bp, Homo Sapiens
ataaaataagacatatttattaagctaaagaacaaattttatttttcattttccccaaacactaaaatagcacatggcatagtaattcagcacacagcataaactgatatatgcaatcgataatcccgaaaatgtttaagtttcactttgggagtctttaaaaacttatgtccttaaatgacctttattaaagttatcaacagacgacaacaggagtcaccttgaaaaattttagggtacaggatactgcaattcttagaatctgggaaactttttatgtgggaaataactcgatttgcttctctgtaactgagctacttttttctcgagctcatttttgtttaaggtaacactgctagggttctgagtttgagaagggatcttctaaaggtaaacttaatattgcaactttcaccacagggcctctgtctaaattgcatttcaagtggaaggaaaggggtatgagaagtgaaatcgaattttgctgcagaccaaaatcattctacaaaatgtagacatggtaacagcttaccacgaattcagcaagatttaacgccaagtacagtggtgtagactttacaagtatccacttccattgggtgatcagacaagtcaaaaggacacacaggatttgggacagtagccctttagaatggatgttgaagacagaacttcatggtaaatccgtatgttctaatctggtatttatacaggctatgatcgtctcctgaaatgtttcccaattctttatatgtcttttaaagcacaatttaacacatgccaaaaaagttccttccgcatcaactggctttgaatttaaactcaatttactttaagtctgccaggtcgtacaaaactacagcaggaacctaagggctgcacagtttgcatccagacttaatgcgaaagaaatcattctaagacaactcttaaaattaatctattggtattgttctgcttgtaccttaactatggcataatgtatttgctaattcaaaaggttgcagagccagtaaccccagtgttatctgcagaccatctgaggtgcttttaagcattttcttgaattctattgtttgctttgaaaacatgggctttaaacggtcaaggaaaatgcgttttgtctcctcactcaggagcacttcggcctcgtgcc

SEQ ID NO: 126276 - DNA, 698 bp, Homo Sapiens
tttcttttaacaaaatttttatttaataaatggttaaaatcgcagtgccaaaaatacattgacatttagcaatttcactgaaaggaagaaactacagaatgcacggtttcagaaagctattttaagttatttacaaataaagtatctaaaactcaaaaacaggctctgtatgctatatctagtttatcccttcccgaacaaaatttctgttatttgggcaaattcttaaaccatggtttaaaccgtaatggttacaaaccacaaacacatccatccagagactgaaaccgtttctatccggtcagtggcaaaactgttgaaagggcaatagttgaagctgttgggttttatatagtgtgaactctgataaatattcctaccaggactaaaacacagcacgctttgcgggcatggctgactcacaaaggttgtaacaaacaagaactactcttcactcgacaccatggctcagaggccaccgagaagcacgagtgactgacagctcctctgcttacaaacgaatgaaacccaaagtggatgtcgttctcacagcactgaaagtgcttcaggactcacactgatccaatactaactttcttccctattttacacatatttttctactgtccagtggaaatcattttctgttttggctaaacaacaaatactagtttataacaggaatggtaaatctgtga

SEQ ID NO: 126277 - DNA, 2282 bp, Homo Sapiens
  misc_feature (41)..(60): n is a, c, g, or t
ccctcactaaagggaataagcttgcggccgcctgctcaggnnnnnnnnnnnnnnnnnnnnacttaaataatctttatttctcatgcactaggaaagatggttcgtatgaaacactgcagttcacagcaaaggcctcagtccagaacacaacataggggccagctgggatcacaatctggtcaaagctctgggagccacactgggaacaccactcccggggttgagtggcagatccaggactttgcagcaactgtggccccagacataacacaaggcagctgccctctcccacagaggcacaggaagctgacacccaaggagcacgtgggctggggacaggacggagaaggctgctgggcagtgacttggcggagatgtggtccagcacctctgccgcctgcgtctacccactcaggccaggaagcccaggcctgtgactgagctctaggcccagctctacccagtgcagagctgctggagttccacagaccctcagcagccccgtgcccacagcagaggtgtagagatcccccgcctgcccctcggctacatgaacaagacaggggcctaaacttcggccctggccaaggcttagatttgcccaggaaggaccggaaaggctagaggggccagccccccacaaccatcccaagcccctgtggacactggagaagcccataggacagtcaggcttctgaggatcccaggacagggccaccagcaggggaggcccttcaatacgctgggccatcaggctcaatacctgagcccaaacaacaatgagcagattcccaggctttgctttcactgggtggcccagggacagtgacatggtaggagacatgcaagacagagacagagaagaatggagacatgcagagaccacacagcatgggcggggtctgaggacaaaacgtggtaaaagtgctgcgatgtggtgggcacttcatggaccaggctcattgaggccctgggctcatggtgatacccgcctcctctggaatggtctccagcatctcactctggactgcctgcgtgatgagcgccagctcctggcacagggtctcgtagcggtagcccacgcggatgtctggcacattggtccggcggatgtcattcccctcagggccttccttggtatagttgggtcccagccagtggctctttaccttgtgcgagaagccgctcatgagcacgctgttgcgggccagctcacacatatcgcaggagctgagcttccacacctgggtggcgatgctgtactcctccatcagcggctccttggtgaagtggaactgcaagggatcatcagtggacagggagaccatgaggccgcgggacaggtactccggtagcggattccggtgatagctgaggaagaggctgttgttgctgagcggagacatggcgatgccgatctgggccaggtagtacaggtactgcaggacgggggccttgcgcagaaggagcccgtgggaaatgttctcagccagcatgacggctgacaccaggtggtggatgggcccagcctccccacagtgtggcctcagcgcaaacgtgtggaagcccctctgcctgcgcaggtggttcaacatggccatgttggcaaaggtgtagtacaggtagtaggcatagggtgggttgtcctcctccacccacgcctcaggcagggggctctccaggttgaagacatggttttcaggcttggactcatcatccacgctgtcaaaaccatccacgtgctctaagaagagatgcagttccgggtggctggcagggtgcacagtggcctcgaacagtggcaggaagatgttctccagcatctcctggaagttggccagctggcccttggtacggtacacgtcactgcaggtgagacaacatgcaggtatgtgcaagtcagggccagtgggaggaaacccagcggtccagcaagggtcagagcttggcccaagagcgcaggggcgcatctgaaccatattgggaaagcaaggatacccaggtgggccaggctggacagaccatggatgggaccaggaagcccttccttgcactcagaggggttggcagggacaagggaggctcagccatcctaggagggcaggaggcaggccctgaccccttgaatatgaccccgcaggttcccctcccactccagggacactcacaagaggcggggcacctgtaccagccagcgcacgttgggggggtgcacgcggtgcatgacggccagcgcgcagcttgtccctctctctctctgacttgctctcatgacctgttct

SEQ ID NO: 126278 - DNA, 1240 bp, Homo Sapiens
  misc_feature (195)..(203): n is a, c, g, or t
  misc_feature (419)..(427): n is a, c, g, or t
  misc_feature (437)..(449): n is a, c, g, or t
  misc_feature (634)..(635): n is a, c, g, or t
  misc_feature (638)..(640): n is a, c, g, or t
  misc_feature (642)..(649): n is a, c, g, or t
  misc_feature (651)..(652): n is a, c, g, or t
gtccgccccgtgtttctcccccccggggggaaaaatatttatttccgcaccaggggcgcgccacaaggggggttaaattgcccgcgggggcggggattcacggggtttctctctccaatccccccggttggtggagagggggtgttttcaccaatgttcgggcgaagaaaaattgtctttaatggaggaatattnnnnnnnnnagttttcttttcaaaatgaaaaggtggcccaggggcggcgggggggccgttaaaattttgatatattatgagggaggctcctgccgctttggggaacctctcccccggttgtggggattgggaatttccccaggtataaaagggcgcccctccaagggaacatcccccaattcctggggaatttgtggtttcaaggaaacccccttcggggtttgnnnnnnnnnggggcgcggnnnnnnnnnnnnnggggtggggggaattccccaaggccctcttagttccatggccccaggggttcttccctagggaaaaccaggcttatgaacccatgtttccactttaccctacgtgggggcccggcgcggccaaacggaatgggtttaggaaggcttcctcgaggggccgagggcggccgaccatgtttttggtgnnggnnngnnnnnnnngnntttgccaggcctcatccccaggcgggttcacagcccttggtctggaaaaaaagggtctgctggcatggacaagttgaagattagcccttcccggccctcctgcagccctgcacccactgcctgccttcctgatcatttccagggctgctgcggcctattcctcctgactcctccaccccttctacctctccctgccttcctccttccacacagaccagcgcacccgggctcgctcagctatgcaagagcggcgccctcccagaggtcaagttccccctccaccaggcagtagggacagcctggcctggagcgtggctgttctgcctgggggaccctgcggatattttccatgcagcctgccccactgtggtccccctagacctagtctccttgccaagcttccttctcgcacccccagcccgccccctagtctcatctaactcagtcatctctccctgtctgtcccctgaagccctgagctagccacttcctcccccacaactacacccaggcgcgcatccctccccctcgtgccgaattcgccacccagcctcgctaccttagacccgttatgagttactgcacgtt

SEQ ID NO: 126279 - DNA, 274 bp, Homo Sapiens
cctaggcctagtctccttgcccagcttccttctcgcacccccagcccgccccctagtctcatctaactcagtcatctctccctgtctgagatcctccctgtacttctggcccatatctgggccacagcactagcccagcctcctgccccctgccccctgcccttgatcttgtcccagtctcctccccaaccttatctgagcacaagtggcattgcctacacttctgtgtgagaaggtccccgccccctctgcacagcccacgttgcctcaaggg

SEQ ID NO: 126280 - DNA, 663 bp, Homo Sapiens
gtacaaatgccattttactggtacatttaataaatgtttattagcacctatcatacaaggcacaaagaagagtaaaagacctcatggatctgaccaatttgtgaaagattcattagaggcaaaatgaatggtcagagcagcagccccccacatcagagccatccaaccagatgtcctaaagtgctggctgagggcaattaacaagtccagaaggccatttaaatacactgggtgagaacaaactattttaggtcctacaacttccagaccactctcccatggcctcttatcaaatgacttcttccaatcactttctagaatgtagaagataactcatcatctcagccagactacattttctaatacccgatgatgtatagtggtaaataaagccctggtccacaatttctgtaaccattaagggctccagggtggcttcagttcagtgacaaatgagcaccaatgttggcatgaataccatgggtcactgtgaaagagtttttttccctacatggcttctctgatgttgaacaaggtatgaagttcgagtgaaaccttttccacatgtgtcacactgatagggtttctcaccagtgtggattttctgatgttcaataagacttctattccgtgtgaaacttctctcacactcattacatttat

SEQ ID NO: 126281 - DNA, 490 bp, Homo Sapiens
gcggccgctctcctacccggacaccgacgtcattctcatgtgcttctcggtggacagcccggactcgctggagaacatccccgagaagtgggtccccgaggtgaagcacttctgtcccaatgtgcccatcatcctggtggccaacaaaaaagacctgcgcagcgacgagcatgtccgcacagagctggcccgcatgaagcaggaacccgtgcgcacggatgacggccgcgccatggccgtgcgcatccaagcctacgactacctcgagtgctctgccaagaccaaggtaggcgtgcgcgaggtcttcgagacggccacgcgcgccgcgctgcagaagcgctacggctcccagaacggctgcatcaactgctgcaaggtgctatgagggccgcgcccgtcgcgcctgcccctgccggcacggctccccctccttcaccagcgggagcttgatatcccttgtctgtaacatagaccccgggtactgcgggag

SEQ ID NO: 126282 - DNA, 853 bp, Homo Sapiens
  misc_feature (118)..(130): n is a, c, g, or t
  misc_feature (260)..(273): n is a, c, g, or t
ttttaaatgtcatcatcatagtcttttaatattttacataaaaaactgtatacacagcttatagaacttttatgtaaacatcataagctcaccattttgtcatttgtcagtttatttnnnnnnnnnnnnncaagacaacaatttagtagaagtaccactgggagggaggggaggggaaaaaaggatatacaggggcaggtgtattctctgtacagaggtgcagagaaaatttcacatagctttagagaatgccttgtggnnnnnnnnnnnnnntaggccccaatacttgttactgccctttatcaaaactgtgtgcatgacctgcacaaataaaatcacaaaacagtgttgccacattcttcaaggaaacaaagcaaaatttagtgggtttcttttccctctccttgttaaaagtcattttttaaaaacatcagaagtagatgaggttacagcgtacaagtgtggtcagaatgctactgtcgtatgcaaatgacgagtgcattaagtgtcaaacaatgaaacaattgtgcaaagaataaaaaaacaaattttagcctttaaataaatcaaataacatcagtttcttggactgaacaattttcacttctaggacaggcacaaagttcgcttatggcaaaaacaaccccacagcgcatcctccctcctccctccggtagctggtggagggttcgcagcgcaggtcttttttgttggccaccaggatgatgggcacattgggacagaagtgcttcacctcggggacccacttctcggggatgttctccagcgagtccgggctgtccaccgagaagcacatgagaatgacgtcggtgtccgggtaggagagcggccc

SEQ ID NO: 126283 - DNA, 462 bp, Homo Sapiens
gtcattttttaaaaacatcagaagtagatgaggttacagcgtacaagtgtggtcagaatgctactgtcgtatgcaaatgacgagtgcattaagtgtcaaacaatgaaacaattgtgcaaagaataaaaaaacaaattttagcctttaaataaatcaaataacatcagtttcttggactgaacaattttcacttctaggacaggcacaaagttcgcttatggcaaaaacaaccccacagcgcatcctccctcctcgctccggtagctggtggagggttcgcagcgggctggcatgctcgtcgtgcgcaggtcttttttgttggccaccaggatgatgggcacattgggacagaagtgcttcacctcggggacccacttctcggggatgttctccagcgagtccgggctgtccaccgagaagcacatgagaatgacgtcggtgtccgggtaggagagcggccgc

SEQ ID NO: 126284 - DNA, 1770 bp, Homo Sapiens
  misc_feature (1503)..(1515): n is a, c, g, or t
  misc_feature (1638)..(1638): n is a, c, g, or t
  misc_feature (1643)..(1655): n is a, c, g, or t
tgcggccgctctcctacccggacaccgacgtcattctcatgtgcttctcggtggacagcccggactcgctggagaacatccccgagaagtgggtccccgaggtgaagcacttctgtcccaatgtgcccatcatcctggtggccaacaaaaaagacctgcgcagcgacgagcatgtccgcacagagctggcccgcatgaagcaggaacccgtgcgcacggatgacggccgcgccatggccgtgcgcatccaagcctacgactacctcgagtgctctgccaagaccaaggaaggcgtgcgcgaggtcttcgagacggccacgcgcgccgcgctgcagaagcgctacggctcccagaacggctgcatcaactgctgcaaggtgctatgagggccgcgcccgtcgcgcctgcccctgccggcacggctccccctcctggaccagtcccccgcgagcccggagaaggggagacccgtgtcccacaaggaccccaccggcctgcctggcatctgtctgctgacgcctctggcttgcgccaggacttggcgtgggcaccgggcgcccccatcccagtgtctgtgtgcgtccagctgtgttgcacaggcctgggctccccactgagtgccaagggtcccctgagcatgcttttctgaagagccgggcctcagagtgtgtggctgtgtgtctgttcgactcccctcgccccattttcaccccacccccgcctctgatccccgggggcgagattggcgcgggagtgtggccgcgccccatcagatgttctcccttcaccagcgggagcttgatatcccttgtctgtaacatagaccccgggtactgcgggaggggagggctgctggggaggatggggggatgttatataaatatagatataattttattttcggagctaagatggtgttatttaagggtggtgatgggtgagcgctctggcccaggctgggccagactcccgcccaagcatgaacaggacttgaccatctttccaacccctggggaagacatttgcaactgacttggggaggacacagcttcagcacagcctctcctgcgggccagcccgctgcgaaccctccaccagctaccggagggaggagggaggatgcgctgtggggttgtttttgccataagcgaactttgtgcctgtcctagaagtgaaaattgttcagtccaagaaactgatgttatttgatttatttaaaggctaaaatttgtttttttattctttgcacaattgtttcattgtttgacacttaatgcactcgtcatttgcatacgacagtagcattctgaccacacttgtacgctgtaacctcatctacttctgatgtttttaaaaaatgacttttaacaaggagagggaaaagaaacccactaaattttgctttgtttccttgaagaatgtggcaacactgttttgtgattttatttgtgcaggtcatgcacacagttttgataaagggcagtaacaagtattggggcctannnnnnnnnnnnnccacaaggcattctctaaagctatgtgaaattttctctgcacctctgtacagagaatacacctgcccctgtatatccttttttcccctcccctccctcccagtggtacttctactaaattggncttgnnnnnnnnnnnnnaaataaactggacaatggacaaatggtgagcttatgatgtttacataaaagttctataagctgtgtatacaggttttttatgtaaaatattaaaagactatgatgatgactttta

SEQ ID NO: 126285 - DNA, 636 bp, Homo Sapiens
tttttgcacatgaaattttaataaagataaaaagcctaaaatatactctaactcttcaaaaaacatttttatgaaagaggaaaggaaggaggccctctttgtggctggaatgctggctctgagcagagtcagggtgacgcggcagggcgctggctttccagctgggtcagcggtcgtgaggctcaacacgagaggaggtggggtggctgctttggttgtaacattagcagggggaagacagctgcttagaagcatggtgggaagcagatgtggtgaagtgccgtactgttctgcttacaaagatggggatgtctaagatcgtgtttactacctgatagcctaaaacagtatcacttgagtcatggactaaaaggaaccttaaacattgtccagcccagcccaggtgtccatctctgttgcactgagacttgtaaggcgtccttgctgcttcgtggcagtgtgccttagctttccaagcaggggtctgaatagctttttccatgaaaattcaggggtctttctttgatacccttgtgacttgtcattcaggggatggcttccactgtttaaggctgaagcctaggtgatctcatagaacagggttcaccaaatacggcccatgggccaatttggcca

SEQ ID NO: 126286 - DNA, 1279 bp, Homo Sapiens
tttagttttggatacacagtgcacttcattccaagagatcttactagagatccccgacagtcagaagatttcccgcttgatcagatatttctcgacgtgtgttattgctttgcttgtcacagttttctaggaaactggtgtcaggtaacactcctagctgcctcccatgaggagttacctctagagcgcagagttttatctggcactgaaaacttgctggttggttttctagatccatgtttattttcagttcaaagacaaagtagaaaacttgagagtggaaaatgttaccttttagttcacactcctaatcccttagtccccataaaataaacattctaaagtgtaagcagtagaaataatggaaactccacagaaacagaaataaattagtttctttcagtcttggtggaggtccttttgccgaacaccatactccactgtgaacagaattcatcttgaacgaagaagaaatctttggcctatttcaccatgtctccagcattgcataacagacatttttcaaattcagtttcttctccaactgcagcaaaaaggcaaagagtagtctgtttcaggagtctgcatcgggtcctgtgagagccttgtccacttagaacaagcctttaacttgttctgtttcggtatcaagatctatgtcataaaagcagggccgggtgggcagtcctggcatggtgctcatcgttccgaccaaagggtaaatgaacccagcgcctatgctggcccggacgtcactgataggtaagatgaagtcccttggcacaccttttttgtcaggttggtgagatagagaaaggtgggtctttgccatgcagatgggcaaatttccaaaaccctgttgagtgtaacgatctattttggcttgtgcctcaggagagagttcaatatctttggctccatagacagcctgagcaatggtccttatcttgtccacaattggaacctgaacatcatacaggaactggaatcggcttcttttactcgcagcctctctcacagcccgagccaagtccaccgatccttttccaccaaccgaccagtgatagcaggggactgcatcaaaggcaccagcccgctttgcaagctcacacaccaagtcaatctcagcgcgggtgtcggtcttgaagacattcagagccaccacaacgggaaccccaaagagctgagtgatctgaatttgcttctggaggttacagcagccgtctgcccccggccgtaatggccgaattcccgggcatatgtccggtaccgtcgactg

SEQ ID NO: 126287 - DNA, 518 bp, Homo Sapiens
gtttggttttctagatccatgtttattttcagttcaaagacaaagtagaaaacttgagagtggaaaatgttaccttttagttcacactcttaatcccttagtccccataaaataaacattctaaagtgtaagcagtagaaataatggaaactccacagaaacagaaataaattagtttctttcagtcttggtggaggtccttttgccgaacaccatactccactgtgaacagaattcatcttgaacgaagaagaaatctttggcctatttcaccatgtctccagcattgcataacagacatttttcaaattcagtttcttctccaactgcagcaaaaaggcaaagagtagtctgtttcaggagtctgcatcgggtcctgtgagagccttgtccacttagaacaagcctttaacttgttctgtttcggtatcaagatctatgcggacgcgtgggtcgacgatatcccgggaatccgaccgtaccagcctgctgttttaaccacggtctatagtctcagg

SEQ ID NO: 126288 - DNA, 554 bp, Homo Sapiens
  misc_feature (179)..(225): n is a, c, g, or t
  misc_feature (431)..(439): n is a, c, g, or t
agagacgggccgacagggtagttttaattgtgtcgaggtgttgtgttgtagcatttataaaaactggcagatttattctgcaggggcccattttcaagaagctaaaggtgaaggtgggaggggagaagtttcctccccttttcctttctccctcatcttatttcctccaaggggtaaannnnnnnnnnnnnnnnnnnnnnnnnnnnnnnnnnnnnnnnnnnnnnnctgaggttccaaaaagttacagcatcttatttcctcatagaaaaggggaaggagccagagggaaggggagtccctggggtggggggatatctcacccccagcccggtgagacatcccctccccttaaatagctgccccaaatggggcaagcccagggctatagcatttaaaaactcccacatcccattttatcaaaaccaaagagnnnnnnnnntttcccttttcccccaaaacccaaatatatatatattttttttcttaaaaaaaccaaaactttgaaggcacggacgcgtgggtcgacgatatcccgggaattccggaccggtccg

SEQ ID NO: 126289 - DNA, 1220 bp, Homo Sapiens
  misc_feature (126)..(176): n is a, c, g, or t
  misc_feature (382)..(390): n is a, c, g, or t
  misc_feature (407)..(407): n is a, c, g, or t
  misc_feature (415)..(415): n is a, c, g, or t
  misc_feature (428)..(436): n is a, c, g, or t
gcatttataaaaactggcagatttattctgcaggggcccattttcaagaagctaaaggtgaaggtgggaggggagaagtttcctccccttctcctttctccctcatcttatttcctccaaggggtnnnnnnnnnnnnnnnnnnnnnnnnnnnnnnnnnnnnnnnnnnnnnnnnnnnctgaggttccaaaaagttacagcatcttatttcctcatagaaaaggggaaggagccagagggaaggggagtccctggggtggggggatatctcacccccagcccggtgagacatcccctccccttaaatagctgccccaaatggggcaagcccagggctatagcatttaaaaactcccacatcccattttatcaaaaccaaagagnnnnnnnnntttcccttttcccccanaaacccanaatatatatatannnnnnnnncttaaaaaaaaccaaaactttgaaggcattaagcgttaaagtgaatctagaacaagggaatgtgaaattccctccttccttcccccttcctgtggggttcattggtgcatccccagcagagggaccggccccaagggtatggcagaggggaaggaccaaagggagaaaagggcgggggcctccccagccaatcagcagccagtgtgggtgtgagcagggaagccacacccccttggagttttccaagtgggatggggagtgggaacgatgcattcctgtgtagtcttcagccaattccaagtcaagtagaggcagggaaagcagggtgacaggccgggtgtgcggaaaggagaagcgggtcttctgggtccctgtggtcagggagaaccccgcttcctcagctcctggacgaaggcttcaatgatttcctctttcactttctgcaattccttcttcacctcttccagaagctcctgtttcaccctctgtaggtccgagtaatcactggagctgggcgtgcagggttgggtctcggaagtggtcaccgaagaagacgacttcatccttggcaaggttgtgctgttcttctcccagggtctccgcacagattcactctgggccgggactctggcctctggctcctcctgattggcagattcatccttgggggttttctccccaacttgcgtggctttccttctcccgacgcgtggtcgacgatatcccgggattccggaccgtaccagcctgctttttgacaacttggttctatattcactatgca

SEQ ID NO: 126290 - DNA, 1637 bp, Homo Sapiens
aagaattcggcacgaggttaaataccaatttattgcaaaccaacaccaaggagctggaatagctttgcaggctggacacctcactctcctcgggccctggacaagggaaatgagtcaccccgctttcctcggacctcagctggtgggacttagtggctggccaaactgcggctgttgtgtctaaaaagagaaaacaggcagggtgtgccagctctggagactgggccagtccagggtggtggctcagggcagagaatcacccaccagacagcgtggctcaacgggagcaaggcgcgcagggacaggctccacaaccacaccaagcaccgcagtgtggcaccgggaccagatgcaagtggctgttcctgccatggggccaatacccaatactatccctcagtcattcttcctagatattggtttgctgtttattaaagcagggcagggagtggggagaaatgcaacacagaatataaaatcaggcaaaacaaacactagtcaccatggaagtgaatgactctcaaagtctcccaaataacaaggtgtagggcatctcacaccactgcatcacttctggaagactacccacagggtgggggctgcaatgggggccaactcgggaactatagagaagagaggagacacacaccacaagacctcctttcattaggcaggaaagctcttgtgggacagtggtgtgcaaatcctaggacctcaatgggaagaactccaggaaaaaaaatgacaagtctttctcaggacccctcatagatgacaagaattctgctccccagggtcgagatctctttagaggggcttcaccagctcagtggcaaatatcagacaacaagactctcacattccaaagggggtatctagggccttttgctctcctgtgatgatcggagcaacatgtttggacccacagaagacttcccaggaatgctttcttacaaggggtgtcagccaccactgtaaaccagaaacaaaccacaaacttactctccaagagagcccccacaacccaagtatccatagagagtgtgcaggagcggggaccttcccctgacaataggccctcttagcatctgcgggccttgattcttgctggccgtgcatggtgccagggtgcactgccctgctgtgtggcttatccatgctctgagcttgacagacaggcaaatggacagtgccggtggcagctgaaccatactcccggcgatgggcacccagagcccctgtgagtacttggaacacaggcctgaggacctgtctcataatctcgtctttgcaccttggctggagtcagtcagcagccatggctcagggcataggcttgggggtcctgaggcagtgaccagtccctggagaacaggtaagattgggccataagttccaaggagcacagtctggcacctggcacagaggatgggaagaggggagtcttcactctcttctggttcagttgtggtgggacagtgtgccttcacgccccatgcagaaattcctcctctcccagaagcccttcaaggtcaaagcttctcaggacttgtggctgtcgagctctgctgagctgatggacatgctcctcgtgccgaattcggcgcgccgtcgacttcatactctctcccccctaa

SEQ ID NO: 126291 - DNA, 1347 bp, Homo Sapiens
  misc_feature (144)..(153): n is a, c, g, or t
  misc_feature (840)..(860): n is a, c, g, or t
  misc_feature (893)..(1124): n is a, c, g, or t
  misc_feature (1276)..(1276): n is a, c, g, or t
tttactagaaatatttggttcttttaatcagctattcatggtgtaataaaataaatttaagtggcacctaatttaacatttaaaatagttcattaaaagataatctacaaaacaatgttatgcctaattgtcaaaataacaccnnnnnnnnnncaagaaaggagaaataaaggcataatcaaaattatggctaacaacgtgggttcattttgacacttacagatgattctgtaggcatatcggcaggcacgatgttgaaaaccaatccactagatttaaaattaatggtaagataaaaaagaaaagatacacatttcagaggtaatgtttgaaattaaagaaaaatatccaccatatattacaacagatcttttaatgactatttttaacataaagattgttgttttgggaaacatctattctctttgaacatttcactaaattttcaatgtattaaataactgacagaaataagttctgtgttctgtacaaattaaaggtcccatgaatacataaccccctcccagccccaccaaagctcaattttgcatggtttcagcagaaaatagacagcccaaaatttaaacagaattcatagcattacaaaagtttacagaacccctatgttttcatcatttgtttctaacaacaaagattacaatgacagaactgaatgatcagaatgtaaaaatatttgtgcaaaactgcattaattgttcttaccatctaataggggtaaaacttaagaacacgcaatgacaataatgaagaaaaactacattaaaagtaattctacttttgatatcaaacaacatggattatactattactaaacattgnnnnnnnnnnnnnnnnnnnnngcctacagccgcggccctcgtgccgaattcttnnnnnnnnnnnnnnnnnnnnnnnnnnnnnnnnnnnnnnnnnnnnnnnnnnnnnnnnnnnnnnnnnnnnnnnnnnnnnnnnnnnnnnnnnnnnnnnnnnnnnnnnnnnnnnnnnnnnnnnnnnnnnnnnnnnnnnnnnnnnnnnnnnnnnnnnnnnnnnnnnnnnnnnnnnnnnnnnnnnnnnnnnnnnnnnnnnnnnnnnnnnnnnnnnnnnnnnnnnnnnnnnnnnnnnnncccgcgcggggagaggggtttgcgtatgggcgtcttccgcttctcgctcctgaccgctgcgctcggtcttcggtgcgggagcggacagctcatcaaggcggtatacggtatcacagatcagggatacgcagaaagaatggagaaatgcacanagggcagacgtaaaggcgcgtgtgggttttcatagtccgccctgacacacaaaatcgagtaatcaaggggg

SEQ ID NO: 126292 - DNA, 982 bp, Homo Sapiens
  misc_feature (91)..(117): n is a, c, g, or t
gggggcggaaaaacacagacccgtttgttctgtggcccacaacgctcctgttgccgagggcccgattccggggccccgggtccacgttagnnnnnnnnnnnnnnnnnnnnnnnnnnnacacaaatctctctagaaaagctttctcaaagggccgcggggccccccgcacaagggggccgcgctagctaaaatcggggggggagccgcattcggcgggggcgggagtcggcgcccaccccggcgggccgccaaggcccgtaccacccttaggcatggtttttattcacttgaacactgtacaaatattacaatttccttttgctgcaaaaagtataaaaataatctttatataggaatccattcgttactgtaaatctttctaaatctctgcaaatggctctaaatgagggtaaatgaaaaagccgaaatgaagagagggttatggggcagcaggaggtggggccaatcatcagggctggaccacccagactcctccccagagacctctgttccttcttggtagccgcccccaccacctgcaggttctagggctaaaggcccagcagaagtgggcacgtgagagggccaggaggagctggagggtcagggggtgggggatagcgaaggaagctagaagtggtgctggcatgtgcccagttccaccccacccttccctcctaggggaaggagctggcagaagcaagacactgaggctggcaggaacaagacactgccccctatggggggtaatggcagctcctcggttctgtgccactgggtggcagccgagcctgggctggcgaaggccgcaaaaagggagaagcaacactttggctccacggtgatgggggctgagtcctgttcccctgctctgcgagcacagaagtgccagcacaggagcgggagctgtggccagaactgtgcggtgaggggaggccggagaagccaggcgtctgtggctctcaagctctgtaggggtccc

SEQ ID NO: 126293 - DNA, 883 bp, Homo Sapiens
  misc_feature (77)..(88): n is a, c, g, or t
  misc_feature (408)..(417): n is a, c, g, or t
  misc_feature (454)..(492): n is a, c, g, or t
aattaaatcatatcttattttttatgaaaaaagatcacacagaatttgccaacaaacaaaattccaaaagaaacatnnnnnnnnnnnnccaataattcccccaaaaaacaaacccaaagtctggcttttccttccctcaagattgtctggttgaggccttggtttcccttgaaggcttggggcctggttaagtgctttctggggcccaagcagggaccctgggcttgggccggctcctgcctctccctcttctctccctaacaaacacttctctatcctggggggtgagtacagtacacttggcggggtgggcggggggtgtgctggggactgggaggccggtgaagccggtgctagacactataatctaacaggaaataaaaaataatattctgcacgtcagaatgnnnnnnnnnnataatttcatagctatttttcacagttttaaaaagtnnnnnnnnnnnnnnnnnnnnnnnnnnnnnnnnnnnnnnnattaaaaagttgactccatttaaaggcttatgatacaggggcggggcgagtctcttggtacaataaaactgtacaggttaagaagtgccacctccctcctgggtggggaggggccaggcgtggccgggcgacagtttcagcaccattggggttttctgtagtgtgagggtttggaccagggtgggcctgtgccgggccctctccacctggtgcctttgacagacactccgggctgcaaccccacccggctctgttccccaagtctaggccatcctgagagggtgggggcagggcctgggcacaagttcaggtaggcccagctggcatcgggctgccctgtcccatggcacggtgggaaggcctttggggtgggctccgtgctaaagggtgc

SEQ ID NO: 126294 - DNA, 703 bp, Homo Sapiens
gcacattaaaatgggtttattttatgcatattactgtaccgcaataaatttattacaaatcacatgacctttatgttagacattttaatacatcaataggaggtcacgtttcattcagaaaatagcagtttttccctcaaacaccttcaggtttactgtgggttcacatagcctaggttaagcagttggcaacattttgcttcactgtctggttttacaaagctttcttgtgacaacaggtataaaagagtctaccgagttcaccaagacatctgcttcaaagagagctgtgaaagcacaagcctcaagaagaccccaaacaggtgcctctggggagcaggcccatgccgtgtcctgcatgtagcccacagggtgatggggcaagggcggggtgctatgggatgctgcaggcctgtgggctgagccaggcggtctactcgcccagataggcagcccctgggcagccacgttctgctacgaaactgtatgtccatatatgtgcatgtgagcatacccagaggggcacagccgggcatgctgggtgctggggggggtcactctggttatgcatattcacacagaacatggtgctacaattgggaagcacagggtgttacggacagccccgagtatttaatggccgatatagcgcgtcgctctttactttttattcactcacacccaggttctttccacaaagggt

SEQ ID NO: 126295 - DNA, 741 bp, Homo Sapiens
ttttttttcggataaattttcttttatttccatactcttttgtgacatgtgtggcacaagtattcaatctcacagggatgttaaaacccacactcgaagggtgtccagtgtgcttaggaaatgtgggtttgcgcaatcacaggccaagcctgggggtcctcggggaagctactcctccaggtcacctgccaggtggatgcacttccttgggcaatgggtgaccctcccaggacaaggggaaccagcagggactcgatggcaccacacagcagccacctgttctgacaatgtgacacagaccaactaatgccagagcccaggagaagccacagcagagctgcctgggttggtgtcagagcaacaggcagaagtgactgtgccgcccgtgggctgtcatccaccggtggctactgtgtcattctggaaaaactatgatgccatgagactctgagaaaccgaatcactgcagagacaaactcataaaaattaaaaccaatccataaaattgtatctagaaactctgtccctggtgccaataagcagcaaagtcaacaaagagtaaaaactaaaacttcaacacattattaaaaagcaaaactggactcaactacaatcacttctggttagtccactagtgaacccaaaagtgacttaaaagtaaaaatcattattagcaagagattaagaacataacttcattgagaggtcaatgttaagagaacagttcattaaaagtttctg

SEQ ID NO: 126296 - DNA, 1167 bp, Homo Sapiens
  misc_feature (876)..(885): n is a, c, g, or t
  misc_feature (1096)..(1096): n is a, c, g, or t
gggaagcagtctctttggtcagtaacaagtgcaatggaaagaaaacgatcccttccttcttccactttcacagcttttctctgaactaggagaacctgggggtggatttgggtgggtggggccaaagaggaggcttctattgataaatccagagcctcaaggggcccagccacgtcaaacttctctccctcagggactctccagcaccaaaaggcagaaggtggaagccgtttttcccccagagccctgtgtttttgtgaaaggcctcactgtggctcctctgttttacatactcattagtaagtgggaggtccactggggcaacagacactgccacaatttcagtgttgtgttcagccaaggggacggtctggacaggcagcttaagtgtgagtttagtcacaactcctgagtgtcccgctctcctgcttacctaggaggtgagtgccaggaaaatacaccaaatgcttctagtattgtttccccacttaaaatagtcctgcttaaattcacatggtgtggtctgatgttctgagagcatcaggaaatacaacccttttgcccatttacccttctccccggatcccaaggtggtctgttgctctggcttcctttcattgtcttaggccttcatggagtggatgctgcctcctcctggctgtttttgtgcctgtttgaagctactgctgcctccatttctgggaaagacctttgagagcctagcccaggcctaagggctatgtttggtaccagtattttgtctttagcttttctatgtgattgtgccgtcattctgttttaagctcatggatcaatggatttgtttacaatgtgatattttctattaaatccagtattttctaaccccacccattnnnnnnnnnnttattaatatggccgggcccctccgcccctccaaaaaacttttccaaaacattttgctttggcgccccgggccccagaagggaaaatggaaccttgggccaataccttgtcttccctaaggaaaatcctggctcagtgaacacacgggctttggaattcttccccacgataaaagaacgcgcccgcgggcggttaatcccaaaccgttttnggaaaacacaatacgccaaaaagggagagttcctggaaggggcttatacaccgggtggaacttacttccac

SEQ ID NO: 126297 - DNA, 842 bp, Homo Sapiens
tttcaaatataatcagtttaactttattttaagcttctattacattgtaattaataataatatactaagttaagccagtttaactgtctagcaaaatgcatttcattttaaaattggatattgggagacttggcaaatgctgtgagattacttagtaaagttaagtatgatgtatatatagaggggaccagctcaccctcataggttagtgctgaaggctcaggaacagtctcaaaggcttagaaatgtggttatatagaccagagcattccattctgattttgcccccagtatacttatcactgttcattttttgctaagaatcacagtctactgacctaaatcacaccctagacatatcagagggaaattctgaccataaatcagccttgcaaatacatagcaggcagccttctctgtagtagccttggaacataatacaaatgatgtcagcatcctctgtggttgggtcagaactagcactggctatttgcaaggctgagtccatattacccttcagcacctgagtgccaagctgaggtctcaacatgggtgatgtgaaggacaagagagaatcagtggctgcagtccttctatatatctggtcactagatccgccagcttcttcaacttgttgggcttattatatctctgaaaggggacctgaacctgcatcattctgcccaggagatgatttctgagagatggggtgaattataatcactaactaaagagataaattcctcactttaccttctagtattgcatccagaaaggggttaagtaagggatattggctctgctgatccagcccagtgtgaccattcataaatgctcacaaa

SEQ ID NO: 126298 - DNA, 577 bp, Homo Sapiens
  misc_feature (485)..(485): n is a, c, g, or t
gcagctagaaaagatggtttaatatggttttacatgacattagaacatttgtctgagtggttacttttggggatggaattctagaggatttgtatttatttctgtagacttctcacacaatccaagttttaccaatgagccaatgttacttttataatcagaacaaaaatagttgtttcagaaaatggatcttgttgacacaagtctaaagggaccttcatgtgggtcatgagcatgtgatgccatgctgcttcctgactggcccctcgccaggcctcccttcttggcacagaagcagtgaccagctgagatggtttgctttgggcattctgcattctcttcctgggtgatcatctgcagcctgttgagaaagaggctttaacttcatagcacgagagctgggacatcaccatatggcagacccggctacagaggaaacacccaaaaatgacagactggctgcatccacactgacttggactcanagccatgaccataggtttttatggcctccttgtgaggaggtgggtatgagtattgatgattggcagatggggaagaaacagaagttccaaga

SEQ ID NO: 126299 - DNA, 1495 bp, Homo Sapiens
  misc_feature (113)..(174): n is a, c, g, or t
gattagcttgccattttaattacaatttcaagtcttttagagacaaattctatcttttccagaacaaacgtgcatatccttataatataacaggaaagaaaacaaacattagnnnnnnnnnnnnnnnnnnnnnnnnnnnnnnnnnnnnnnnnnnnnnnnnnnnnnnnnnnnnnnccttcacagtctggcattcatctgattcattagcttctccaatttgattgctagggccatgttacctttaatcttcaatttccctgacatgaatgccattgttggttttagtttccctgaaaacatttttacaaagtcatcagtagtcatactcatcaccacatctgcctgatcagaaggctctccatatccgacattcccacccttgcttttcagatcaagaaaccacgtgccaccatcttcaccggagagttcaaacagatagattgcttgagtggctttaacaacatcatcactgagagagtccttaacgattctaaatgtttcttccacagctccagaacgtggttttggttgcagctgcagtttctcttctttgaattctggaacagcaccagttgattccactttcttgctaactgcttctgggtattcatctaagaagaaatctggttgcaaagggatgacctggttttaattgcataaacgtcaaaattttcctattccttcttcttttaagatattttcatcaatgacaaagttgccagtaaaactttttggcttttggaaaatggaatatgctgcatctgcaatgatatcaacttttctaccactggctttcgataccaggtcctcccagcatatccatagcagcagtgtgtatggctgttttaggccataatgcattgactgcaatttcccctttaaattcttctgccattccaagcacatacatagacatcccatacttagcaatggtataagcacagtgctgtttgaaccaaactggatttaggttcagtggtggactgatattgaggatatgagcaactttgctctttttcaaataaggaatacatgctttagatgcaaggtaggtgcctctggtgttcacgttcatcatcagatccaatctcttggtaggtgtgtccaatgtattggtcaaactaatggcactggcattatttaccagaatatcaattcctccaaatttcttgatggctttctccactgcagcactgatctgctgttcatctctcacatcaacaatacatggcaaggcctttcctccaactgcttcaatttcttcagcagcagtatagattgtgcctagaagttttggatgtggctgggcggtctttgcagcaataacaatatttgctccatcctttgctgctttcaatgcaatagctttgccaatgccacggcttgcacctgtgataaaaactgtacatcctgccagcctcccggtgttgggtaacatgactttcgtagatcagaggaggtggcggcgacagcggcggcggcgagcagagagccc

SEQ ID NO: 126300 - DNA, 967 bp, Homo Sapiens
ttttaggtgtttaatatttatttatttagttcataaacaggcactgccacctccagtgttcatccatggcactttcatgaccgcttcctgttctgtggcttcttttagtgcccaagttgtatcacatttcttgctgaagttcagacaattgaaaacaaacagactcacatctagggaaatcaacagaccaacaatggcaaaacacaatacaatgaaatggaaaaataatgtttgttacaggagtgcagcaatttagagagtgtctcaggagtgtggctcactggcagctgcagctatgttagtgcttctttctgcctcaagttcagaaacaagctggactatctcagggtgattgaattttcctgctgtggaatcatagaagtcttgcagtctcccaggtttgtgttcaaggtcttcatattcagatgcttgaagaatcatttcacattggtctagctgcttcacaaatttggcttctgcactagattgggtctcgtactcttcccaaagttcatagagctcctttctgaggtcctctggtaggagctgggttatctgcttcatagcttcctcttctcgcctatgtttttcttctttggggatgttatctgctggtgctatgtccccaacgatgcattctgccatatcatgaaccagggctaggcgtacacatcggtctttgttaagacggtcatctttgatcaccatagccataactgccatccggtacatgtgatctgaaacgctctccggcctctggacatttctgtatacccagccagttcgtgggactctcttgagctgccctaccagccgcaggaactgcagtagggaccgagccccgtggcccgagaaggtcgcagaggagaccgaagccatgcggccaccgaccccggctgggcggagcagccgcggcccccggccgtaatggccgaattcccgggcatatgtccggtaccgtcgactg

SEQ ID NO: 126301 - DNA, 1000 bp, Homo Sapiens
  misc_feature (827)..(904): n is a, c, g, or t
tattctaatattttagttttaatatttatttatttagttcataaacaggcactgccacctccagtgttcatccatggcactttcatgaccgcttcctgttctgtggcttcttttagtgcccaagttgtatcacatttcttgctgaagttcagacaattgaaaacaaacagactcacatctagggaaatcaacagaccaacaatggcaaaacacaatacaatgaaatggaaaaataatgtttgttacaggagtgcagcaatttagagagtgtctcaggagtgtggctcactggcagctgcagctatgttagtgcttctttctgcctcaagttcagaaacaagctggactatctcagggtgattgaattttcctgctgtggaatcatagaagtcttgcagtctcccaggtttgtgttcaaggtcttcatattcagatgcttgaagaatcatttcacattggtctagctgcttcacaaatttggcttctgcactagattgggtctcgtactcttcccaaagttcatagagctcctttctgaggtcctctggtaggagctgggttatctgcttcatagcttccggtctttgttaagacggtcatctttgatcaccatagccataactgccatccggtacatgtgatctgaaacgctctccggcctctggacatttctgtatacccagccagttcgtgggactctcttgagctgccctaccagccgcaggaactgcagtagggaccgagccccgtggcccgagaaggtcgcagaggagaccgaagccatgcggccaccgaccccggctgggcggagcaggccgcggcgaagnnnnnnnnnnnnnnnnnnnnnnnnnnnnnnnnnnnnnnnnnnnnnnnnnnnnnnnnnnnnnnnnnnnnnnnnnnnnnncccctcttcttcttcccgacgcgtgggtcgacgatatcccgggaattccgaccgtaccagcctgctttttgaaacgtgtttatagttaccaaagct

SEQ ID NO: 126302 - DNA, 483 bp, Homo Sapiens
catattcagatgcttgaagaatcatttcacattggtctagctgcttcacaaatttggcttctgcactagattgggtctcgtactcttcccaaagttcatagagctcctttctgaggtcctctggtaggagctgggttatctgctttcatagcttccctcttctcgcctatgtttttcttctttggggatgttatctgctggtgctatgtccccaacgatgcattctgccatatcatgaaccagggctaggcgtacacatcggtctttgttaagacggtcatctttgatcaccatagccataactgccatccggtacatgtgatctgaaacgctctccggcctctggacatttctgtatacccagccagttcgtgggactctctcgcggcgccaggctctaggctcagactccgggccgccccagctggccagcctgtcccgccggctgcttcctccgtccaccgtcggcaacgcgcggccgca

SEQ ID NO: 126303 - DNA, 864 bp, Homo Sapiens
atgatgtctcctgataccatgtgtaggaagtgaactgtctgaccaggcagttctggactcctccagaacccgcttcctgcaaccacacagcacgcaggtaacattatcccgtgtgacccacgcccacaggcaggcccggatgcaggcacagctaagactggccataacctatcgagagtcctggccaatcagctgtgacctgctgtccaagtgcattgtgaccccaggtcggaatgagttctttatgcagacataatgagcagtcctggctggagcctcctgtgcccccaccacaccaagcactctgcgaggcccgcccatgtcttctggctgcctcctgagtgtgcttcacccaccctggcctggtcttcccttccacctccacctttcctttgcttcttttccccccagggtcagagcctctaagcctcccccatcatttggcaatgtaggctccaaagagggtaccctaagagggcagactccagccccacagaactgggctccgagccctggccaagaagccagaaggcacataacccctctgtccattcacttccaccaggctccactcagggttccccttcttgtcctgggcctccaggatggtcacaggctggcctgcctgcaggctcacttcatggctgcttctggccacaaaagggtacgcggctatgacctggttcatggtgggaatagagggcactagagctgggctgggctccggtgttagacatcgggggtctttgttcagccccgcctgccttctgagctcctctgcactggggaccacatggtacagctgtagtttcccagccggcacatacccacgatgtcccccggtgtccaccagccagcggccgc

SEQ ID NO: 126304 - DNA, 876 bp, Homo Sapiens
ttgaaaccccagggacctgccacgggcaataaaatgagccctggggtattcaggcatctttggtgcaatatggaggggatggtccattcatctatgtctacgcactgctcccctcgcttttgatatcccaggagggcactgacatgcaaaggatccccgtaaaatgatgcacaccttggtctgcttctacagtttgtgcgtcccctgcaggtgcactcggtctatgtcttggcaacagcgttgtgttcactttgctcgtagcctgctgcacactggatacggtgggaagggttggagggaatgcgctgagggtcagctgggttccgccggatgacaaagttatttcggccagtctgcatttcagggcctgcgactgcagcagcactggccacaaaaccacccccgggcaacactccactggttgccatgctgctggcagctacaaccccggtggttgcccctgaggttccttctgctggttgtgtttcctgctgaggctgttcattattgacaataatctgggctgttttcggaaggcagaggtatcctccatagtggttgacacacttcattccacctttacaagcgtctgggacaatgtcacattcatcaatatctttgcattgctgtctcacaggatcccactcatatccgtcagtgcattgcgtgtacgtgatggtttcttcggtgtcctgtgacttgaccagcgccagagtcagcatagttaggaaaagggctttcaacattgtgaatctgtgcggccgcgctgcgctccgggcccgggcagcgaggggagtgcgcaggggagggcagccccgtgggtctccccggccgtaatggccgaattcccgggcatatgtccggtaccgtcgactg

SEQ ID NO: 126305 - DNA, 2708 bp, Homo Sapiens
ttttttttgatcttctaaaggaatatttatttttatttaaaaatatgatacatcaaagtaaagcagtgacattttaaacaaggagacgtataaaatattccatagaattgggtaggagggtaatttgcttaagttcactgtcactctggatgccaggaataaaaaccatcatcattttcttcctctgtgagcatcaagtacgaagatgagaaattttagttataaattagtgaagtgttaggatttaaattttacttagaaattaaaacttctccagtgaaataccttttatccattttgttctgcatcttgtggaagtcctgaattcagggatgttattatattttccgagtttgcttcttcaggtcagttccaatgtggtttagaaggaatttattttctcatatcctccccatagatttctcaatagtataattttctaggggatatctggttcattttgggaattctggaaaattttgcttactgttttttacaaaatattcacaatctaaaatttctgacaaaattaaaaataccctacagaaaccagcatattgtacagcaatgatttattactatataataaacaaccacctttaggctggatatgaaaataaaaaccaacacaaatatggcagatccccattttctaaagaaatatatctttattgaccttttccattttcttacaaagcagttaaaaactcattcttacccttgcatgctattcaatggttatgatggctgcctccttatgagactgttagtggagctctagtaagtttccttaagcaccacagaagatcatcattgcttggtcccacttttataggaaagaatccaagtttcaccagatagtgtatacttagctctcttgaagaagaccagtttagtggattaatgtctaatttacatatagtaataaagacaaactttgaatctttacatattaaatgcccactttataccatggtgtaattgtttgaattatgggtgagtgtacagtatagagatgtagatgcactagatatatctataaataaaatagtgctttaaggtaacaatattctttggctgacttaaatgcctgtggttgactcttagaaaagactaaaatgaaaatggccccactattattgtcaatcttaacacagagcttgtgcggaaggtccctatactgctgactgtcagcatctccaggtccacgatatgttctcttggtcctgataatgacttcacgagcacaagcattgcacttacaggacttgtttgtcgtaggtagaactctccattttcatttccagatttaatccgaaaagtattgatggtgttggcataaatagttgtggcctgtatctggaagatgtctgatggcacagacctatcagatcggatgctcatgtatttgtagactattgactggggcagttctcggcacatggcatttgagactgggcaaacacatcggttctctggtgttagaatgtagggatcttgacaaggatttcgtggataacaacggaagccgccatgataattccaacacatttcatcctcccggcattcatttgtggtctcacactcatttatatcttgacatgttctacttctcaccacttggtatccctgggggcacatacatgagaatttcccaggttcattgacacattgatattgacacaggtagcttgaggttctgcattcatcaatgtcttcacagttgagcctgtcactgcttagctcatatccttgattgcactgacagatgaatgaaccaagaatgttgtagcactgctgagcacattgattgctggcatcacattcatttatatctacgcaggtatagttgtttgctgccaattgaaacccaggactgcactggcaataaaatgagcctggtgtattcacgcatctttggtggcaatatggagggatggtacattcatctatgtctacgcactgctcccctcgcttctgatatccaggagggcactgacatgcaaaggatccccgtaaattgatgcacacttggtctgctctacagttgtgcgtccctgcagtgcactcgtctatgtcttggcacacgttgtgttcactttgctcgtagcctgctgcacactggatacggtgggaagggttggagggaatgcgctgagggtcagctgggttccgccggatgacaaagttatttcggccagtctgcatttcagggcctgcgactgcagcagcactggccacaaaaccacccccgggcaacactccactggttgccatgctgctggcagctacaaccccggtggttgcccctgaggttccttctgctggttgtgtttcctgctgaggctgttcattattgacaataatctgggctgttttcggaaggcagaggtatcctccatagtggttgacacacttcattccacctttacaagcgtctgggacaatgtcacattcatcaatatctttgcattgctgtctcacaggatcccactcatatccgtcagtgcattgcgtgtacgtgatggtttcttcggtgtcctgtgacttgaccagcgccagagtcagcatagttaggaaaagggctttcaacattgtgaatcttgagctagcagagttccttgcacagcacagcaaaaatacctgtgcggccgcgctgcgttccgggcccgggcagcgaggggagtgcgcaggggagggcagccccc

SEQ ID NO: 126306 - DNA, 713 bp, Homo Sapiens
tttttttaagtcttgattccttccccaattttattgccaaataaactggtctcttgctacaggtatgtaactggttgaactaataaatgtgaatcactggaaggcaatctgatacaagttattcttgattacaatcaatcttttaagtatgcttaagggtcctaacatccagcagccttggagttaatgatctttaatgatttctcccatttatactgtgtttttaacaagcataataaaggaaaatataccagaggtttattaagtatgacaaactgtactttaaataaatgttgctattgactttaggacttcttgcacaaagtttatagattagcaatactaataccttaaaaatgctttttgaaggataattcttacacgagctaagtaagcccttacagtctacagaataatgatggacgttatgaacaatactatgataacggtaaattgtccacatgcccttaggaaccttatctggatttaaaaacttccccatctatataaaaaaataaccttacagaaataatgtttccaaaccttcggggaaaaggatctaaaataggagagaacatgatgtatttaaggaaaagaaaggcaagccagtgagggcgaagcacagaaaacgaggggggaggagggaaggaccaaattcctcagggcctcctagcccagaattaatacattttggcatacccatgagaacagga

SEQ ID NO: 126307 - DNA, 1046 bp, Homo Sapiens
  misc_feature (714)..(714): n is a, c, g, or t
  misc_feature (843)..(954): n is a, c, g, or t
tttttttgttgatcatccctttattttggggggctttacttttcagcaatggcaggtaagggaaaacagggtggctgcaaaagctttctgggcctgccagagtaaagccaaaaccccaagcaaataaaaagatcacagcaagcaagtgaggtctggacctgtctgagttcttggaggtcacaggtgggcgcagagaaggcagttccatgagtacctttagttcccagcacacggtggctctgcagtagtgaatgaagtctagcacagccaccgcccccatgcccaggctcaggagcacactgaggtcgtccaccaacagcaccgggtacgtccaccgagcctctccactgtctactggcttcagggcctcccgtacaaactcaaacaatggtttcaagttcccagcattagcctccctgagaaactgcagggggtgtggctccttttgagcctggaagacgacgtccactgcagacttgagtccctcaaggaacacaagctgcccacgctcccgcgccatggtcaggctgacacccagcttctgtcccacgatactgtagtggctgaaggactggatgagtgccacaaagcagactttacaattagctttgagatagaatgagagaaagtggtgtacaaggaaactcccatctgtcttggcatcacagagtagagtcagtttcccctgctccgccctgtcgggggtggtgttangcaggttattaagttcacgaacattccgagctcctgggactagcgctctggaggagacccggagtgctgcatagacgacggatgctggagagcactcgtgccgaattcttgggctcgagtggcatattnnnnnnnnnnnnnnnnnnnnnnnnnnnnnnnnnnnnnnnnnnnnnnnnnnnnnnnnnnnnnnnnnnnnnnnnnnnnnnnnnnnnnnnnnnnnnnnnnnnnnnnnnnnnnnnngtgggtggctatggagtgagccactcacattattgcgttgcgccactgccggcttcaatcggaaacctgtcgtgcagctgcattatgaatcg

SEQ ID NO: 126308 - DNA, 1372 bp, Homo Sapiens
ttccagtgtggaaacttactttattccagccatgattatcctagttgtcaccttgcacacctgccatccggtgccatctcctggctggcacatctatacccactctggctctgaaaggcttgtcaaccaaaaatgggcagctggggctaaggcatatttaaacaaaggctccaaaggacccctttcacttgggtctagcatccagcctctctctcagcaaaggcaggattgtggtcccttgtgttttctgaacagggcccagggcagccaaggcatgccatcactgcagcactcaaccctctggtcacagtggagtcgccggtccagcctgaaatattactacagaggagaaagacccattcttgctatgttgctctatcttccacgtccaaaaacagtcctatgtagcttcagctgctccgaaatcaggtcacagaacagcaggagacattcctttggcaaaaaaggacacgcttttgtcctgtatcttatactggtaagtgaagctctgatcccggtggactgcgggctgcgatggtctcctccacaggatcctcagctgcccgtgcacatccctgcagaagccagtggccaggccctcagcccgcagtatcagatggctctgatgactgaggccattcagcaggatgtcattctcctcatcctccgcatctccactgtcgtgcacaaggaccaccatgtttccctttagttcccagcacacggtggctctgcagtagtgaatgaagtctagcacagccaccgcccccatgcccaggctcaggagcacactgaggtcgtccaccaacagcaccgggtacgtccaccgagcctctccactgtctactggcttcagggcctcccgtacaaactcaaacaatggtttcaagttcccagcattagcctccctgagaaactgcagggggtgtggctccttttgagcctggaagacgacgtccactgcagacttgagtccctcaaggaacacaagctgcccacgctcccgcgccatggtcaggctgacacccagcttctgtcccacgatactgtagtggctgaaggactggatgagtgccacaaagcagactttacaattagctttgagatagaaggagagaaagtggtgtacaaggaaactcccatctgtcttggcatcacagagtagagtcagtttcccctgctccgccctgtcgggggtggtgttaagcaggttattaagttccacgaacattccgagctcctgggactagcgctctggaggagaacccggagtgctgcagagacgacggaggctggagagcaaaacacacccgacagcccggctcgcgcaagcctcgtgccgaattcagccacccaggcctcgtacctagcc

SEQ ID NO: 126309 - DNA, 863 bp, Homo Sapiens
ggatttcctttctttattgaggggataaggggaagaagtactttaaaagttaaagatggagataaaattaccccccatagatttgctagtacaatggatagagtctttatcccaaacaaaaattataacaacacatagaaaaaatttttaataggaaatattcagagattccagctgtggtatggttagcccttttctgtatggaagaaagggtgttgatctggatggcttatggacagctatttaaataacctctccaggggagagtaaaccctgttggtgatgacagctcccactatggggaggaaagcacagtgaatgtgtgaagatgaagatggtatgtggagacacaaatatttatagttttgtaaactctaaagaggaaaaagaacaccctttattacaattggggttaaaaacaaaaagcccctgtctaaaagagaagactcccatctgctgtagacagaggaaataaacatattgacaggagttcaatagaaattactcctaaagtccagttttgatgcaacagcttttgtctgtgtcctctgaaacagtgaatccccaaatcagattagctgtccaaccagaaccagtcttggttgatcagtggaataaattattgttttgtatggatcttggtatttgcatgttttctgaaaggacaagagggccagagtggggtttttaaactagtagatgaatccctgaaaaattccttctcacaatgtcctattgcactccatgtgcttctatcagatagatgcttggtctctacctactgaacctacaggctcatgtctcgctcacacaacagttcctactttacttcctgtaacaactgcagtgctttcaacaagagg

SEQ ID NO: 126310 - DNA, 1070 bp, Homo Sapiens
ggtattaacttccttttcattatttactgaaactagaaaaaagtattctataacaaaatgtatacaatttagtaattgtacaaaacattaatccagcaagatattaattacagtcactaaaatgaacactcaacatatttttcactgccacttccatgaaaagctcagaaaaagtcactggctaaaaagtcacaacaaaagcaatttaagctttacgtacaacagaaaaggtaaatcttccacaataacaatgcagacacaatcactaagaggctctccatgctgccatggtttcctggaatgtttttcagagtccatcttctacaagagacatcatcagctttccaagagcaacacttgaagcattagatgtaatacaaaataaggagttctttattatttatacaaaacttgtacattaaaaaaaattaagattcaataactctgctgaccccctgagaaagctaagagcgttcgtgggtccatcaaagagccctgtgggaatgtttcagtcaccaacctcctggccacaggaactaggcacagttctagggccattcacgtggctccttcactggctctgaaagctgactttccctttcattaggctcggcaagcaagccagggtttcctggacaacattaaagaacattatcttctctggcccaggctagagtattttatcagtacacaagttgatttttatttcttgaacacttccaataaactagcataagttttattacaacatatacagatttgatacagtttacaaaaaaaactagatttttcaactaaataaaaatgtcttttaagcaattaaagttggcttagagacatggtatttttctttcaaaactgtgtttctacaatgatttctaaggtcccagtcttgcttgtacttgacagtcaccctcatctaagcaacattaagagctctgatatctttagtaaagaatacaaaaccctgtgtttcttaaaagcctaatgctgaaagacatgttatagccaatccagacaaacatttatatttaaacatttatatttaaacaaaaggcctctctgaaccc

SEQ ID NO: 126311 - DNA, 1067 bp, Homo Sapiens
  misc_feature (27)..(27): n is a, c, g, or t
ttatatttaaaaccaaaaggcctcttnttgaacaaaatagcctgcgggagataaaatacagtgatttgttttcctgatagaactatttagccatgtttaacccattatttctgtagtttgggaataagagtgttttttcccttgaagaaaacagttccccttctgaggaataatgctgattacccccccaaaaatcaaaaatagcccagccccaaatgaagtattaatttacaaacatgaacttagaacttagctcttacttcttgaagttctacatcccagacttaataaattaactacaaaatcaggagtttcatcagctacagtataatttaaaaatccattttcaactggcaggggtgagggagaaggtcaattgcactgatcaccatgaacttcaagaatttcatcaaaacttttttcccagcttatatttgccttcagaggtgagctgtagattaccatctctgatgctttaacatacaatattcttgttgaaatctcttcaaagagcacagcatgtaaagcactaaactgtgttcagatctgaggagtctgcatggaaagaacctgagacctctctgaaagagccaaaaaccaagtggctgtctcagtgatcacatctattcatcctccacaagacaatgcattgagcttttttaattcacagattttatgttagtcctttagaacccaatgcccatgttccagttcagaactgtcgggctattcaggctgtcttcttggtgcaagctccttggaggtcttgtaaattgatcttcgacctgttgtgaatcatgtgacttctttgacaagatgtcctgctgcacaatgctgccataagatgacaattccccagccattacaggtcccacacacaattcgggcaagctgtccgggcattttccccaggattatctttgcatgctccttgaacacctagcatctgcaaacaggcttactgaggtagtaggttgatcccaccacccaccgttccgtatcgtctatagatggcatgggtgacagcttgatatataaatcattcatttgtgggaccacttgcttca

SEQ ID NO: 126312 - DNA, 1598 bp, Homo Sapiens
  misc_feature (1213)..(1213): n is a, c, g, or t
gctcggagtctggagttctttcgatgtttagctagaggaacgcggtgtaataagaattcgcgtaccaacgtgcggtgggatgatgattttcccagcgcccggtgctgatataggtgtggattatccgagagcgcataatgtagggctcgtcccgttggataaaggtcgcccgtttaaagggccctccacggggccttcccttcctggggagtttgtttataagaacaggttactcgtagtgcccaccagggggggtatgtttttattgggggaagaatttcccaagacaagtagtggcgaggtccaaggggtttgccagatggggaacgggcttatggacccatttttgaaggtttccccagtggggggcccgactggccgggggggaagtggtgctataaaaaagttttgtaaggggtcgaggggggccggacagggggcaaaaagacagggcgtgggtgtgggataggtacacgagttgatttttatttcgtgaacaattccgaatagagtagcagtaaagttttattacaacatatacagattggatacagtttcaaaaaaagaagtagatgtgttcaactaaataaaaatggtcttttaagcaattaaagttggcttagagacatggtattttctttgcaaaactgtgtttctacaatgatttctaaggtcccagtcttgcttgtacttgacagtcaccctcatgtaagcaacattaagagctctgatatctttagtaaagtataccaaaccctgtgtttcttaaaagcgtaatgctgaaagacatgttatagccaatccagccatacatttatatttaaacactttatatttaaacaaaaggcctctctgaacaaatagcctgcggagataaatacagtgatttgttttcctgatagaactatttagcatgtttaacacattattctgtagtttgggaataagagtgtttcttcccttgaagaaaacaggtccccttctgaagaataatgctgattaccccccaaaatcaaaatagaccagcaccaaatgaagtattaatttacaaacatgaacttagaacttagctcttacttcttgaagttctacatcccagacttaataaattaactacaaaatcaggagtttcatcagctacagtattcaagctggcaggggtgagggagaaggtcaattgcactgatcaccatgaacttcaagaatttcatcnaaacttttttcccagcttatatttgccttcagaggtgagctgtagattaccatctctgatgctttaacatacaatattcttgttgaaatctcttcaaagagcacagcatgtaaagcactaaactgtgttcagatctgaggagtctgcatggaaagaacctgagacctctctgaaagagccaaaaaccaagtggctgtctcagtgatcacatctattcatcctccacaagacatgcattgagcttttttaattcacagattttatgttagtcctttagaacccaatgcccatgttccagttcagaactgtcgggctattcaggctgtcttcttggtgcaagctccttggaggtcttgtaaattgatcttcgacctgttgtgaatct

SEQ ID NO: 126313 - DNA, 1062 bp, Homo Sapiens
tttttgattttgatcacatgaaacactttatttattacagcattgttttaactcccttataaccaagattatccatatttattgcaaaagcaacaatatcaaagaatgctttaaatgcaattaaatttgtttaatatagataaactataagtaataagattgttttcattataatataggtgtcacacatttctcctggtaactaagaaagataaatgggcagataaaacataacagtagaagcatctagaatagtaaattttattactggaagtctctccctagcaatggacaaactcaaccacattcaacacataaggaaaccagggacaagagaggctggcattcttcactctacaaatacttagggcactgactatgtgccaggcacttgctttgtgctagggatataaaattaaacatacaaggtacccgtacccaaggagctcacagccaagataatggatgagtgtcctgaaagcagaaattatcacacagcttaataattattgtgagaaatgcatgctcaagatgcaaggtgcaactcatccaggcttgggagcaactcttgtgaatgagctgacctggaaggagatgcagacatgtcaggacagaggaggttatgaagcagcgttctaggaccggccaaagtgcgggcaagcccagtgcatttactgaccaaaggaagtgacagtaacgagggaactctagtcctgggtttaggagacaatagtctcgtgagtccctgttccgtgctagttttagaatactgcctgtgttttgacacgtctgtgaagattccggacatacgtcagtacgctgcattagacagacagacgcctacatgggctctggctatgcgacggttgcacagttaggaatgctactacacttgcttgcctcaaaaaggttcccctttggaagaactaattaactatcatattgtgagacctaaagatatcctttcataaacgccgaagattcgatggggcccatagcacaagagagaagcctagtcagcgacagggaagaaaacttcaccacgtacaaggggaaccaatg

SEQ ID NO: 126314 - DNA, 3181 bp, Homo Sapiens
acatcacttttgttaagtttttgtgcttggtccaggattcctccccagtggagaactaaaggcgggggatactgcccagcccagcttccttgacttgagagctcttagtttcaatggcatgccaatctccaccatctttgtctgtcaagtgtaactgtcccattggctcaggctcagctgcagctcagggtaatcttactagctacacaccaggggtggtccaggctgtactttaggctgcatgaaagtctcctggagatggaaagcattccaacccaatctgcccccaaccaaaagcaaaggcggcagatgagtggggcaacgggctggaagctgtagcatcacttgcaggtggcatagtagagcacgcgcccattgatgtggtcacggatctgctccacacgcttctccagtcctgtcaggtccgctgagcgcagcatgatggcctggctgccccgcagcagctccaactccatgtctttcatcctgtccatcatctccatggtctccccaaacagctcctctgcctctgtcttcacactctggatccgggcaccctgctcacccagcatggaactctgacccaaccggtccttcaactcagcatacttttgttttattctctcaaatccctcttgggcactcaatgcctgctcgctggcaccttccgcaagctgctgggcctggactgcctctgccccctgctgccgggcttggtggcggagctcctccatccgtgtccagaagtcacccagctgcttggtcatgcttgtcaccagcttttctgctggccgcagtacctgctgaacctcagcaaccctgtcctggataagccgaagggagcggctggtgccttgcatggtgtcctgagcttcctgcagtgccactgtcccctgccgcaggttcccaaccacatcttccacctggccctccactgcatgggctcggctcctggcttcctcagcctcagcctgcaaccggcgggcacgcgcaatgtcctgcttggtctgggacagcaccaagtccacgttggggagcctggctgcaatggcctggatctcattcatcttctgcagaacagtagctgagtctgtgggcagccacagggccagcacggcctcgctgacctcctggatagtggctgcatcagtgtcggggtctgttaggaagtcccggacctgctggattaggagccgtgtgcgtctgacatcttcctccatctgggagcggctggcgctcacctgggtctccaagcgctgggcactggattgaatctgtgaggcagattcctcggctgccctaatcatctgcctggtccgctggagctgggcattgaagccccgcagctgctcagccacctgccccgccatcaagaaggccccaccggccctgggaaggacacccctgcagcgggagccacaggctgtgccattgtcttggggacatagctcaccagggcatgatattggggtgcaagccatctgcctggagttgccacagagcttgttgaaggtgggtgtcaggtcaggcaacgaagacatctccagcctcagggccacaagcttggggctgccggtgcctcctcctcctcccgcctgccgcaccagcctctctgcctctctccggctgtccctgagctggtccaaaaggcgcgagctgtcggagacctgctgagcagcctgggctgactgctcgtaggctgtgctcagcatccggaaggctcctgaaggatcagcactgcttattttttcaaactgctccctcttcctctgatacatagtaaggagaccattgaagcttctgtcaagactctccaggtctctcggaagggacaacgtctcctcctccaggggcagatccagctgcaggccctggagagttcgcctgagggagaggatggcactggccacctgagccacctcctgctctgtgactgcggggctgctgagaactgctcggatctgctcaatcttactctttgcatctaggatccgggaggccaggccacggtcctccagcccaggccctgaccacaggctggcggtggcattgcggagtctaccaaagcgcagggcctgctcccggaggtccgcatcataggtctggaagcaagggtggcaggccacgcacaccgggtagcgattgcagtagcctcgctggcactggtcacagcggggcccggtcaagccagggcggcagaggcagcggcctgatgccttgtcgcagcccgggccctctgttccccggaaatcacagtcacaggctcggcatcctgtggccacgtctccataggtccggtctggacactggcggatggctgcagcgctgcacatcaggccaccaaagccttcccgacaggggcactgccctgtgaactggttgcactgtgggctgagggagttgtgcgggtcgcaggcacacggttcacagccctggccactggccagcttccagtggtagggagcacactggtcacatttgggacccaccacgttgggcagacaaaggcagcgcccactctcctcgtcacacggcatgtccctccgggaccccaggatgttgcagtcacagcggtggcagccctgcgggttggcgtaggtgagtccagtgaagcccggcttgcataggtcacagcgctctccctgcacatgctccttgcacacacactgcccggtcactgggtcacagggagcccctggcactgccccatccggatcacactcgcaggagatgcaggtctcctgaatggaagctcccgggcgccggttccggaaatagtgcagctgacaccgctcacagttcttgccttcggtgtggtcccggcaattgtcacacacacctccatatgccccctggctggcggcaaacacagcggggtcaaagtgacatgtctctgagtgcccattgcagtcgcacctttggcattcatgggcgtcctggccctccgccggtctccagggccggttgttgtagaagggtgcacagcgctcacaatttgggccggcagtgttgtgctggcagacacagacatcgtggacctgcacagcggtggaggggcctgcagaggccccaggcttgggtgcgcagcgatcagcatggccgtgacagaagcagctcccctgcagacggagctgggacacagccctcgtgccgaattcggcgcgccgtcgacttcatactc

SEQ ID NO: 126315 - DNA, 998 bp, Homo Sapiens
  misc_feature (708)..(708): n is a, c, g, or t
cagcaactcaaatgtcaaaaaatcaagaggtgggggagatcacaaacttgagagtcaatttcaccaggctggcccctgtgccccaaaggggctaccaccctcccagcgcctactatgctgtgtcccagctccgtctgcaggggagctgcttctgtcacggccatgctgatcgctgcgcacccaagcctggggcctctgcaggcccctccaccgctgtgcaggtccacgatgtctgtgtctgccagcacaacactgccggcccaaattgtgagcgctgtgcacccttctacaacaaccggccctggagaccggcggagggccaggacgcccatgaatgccaaaggtgcgactgcaatgggcactcagagacatgtcactttgaccccgctgtgtttgccgccagccagggggcatatggaggtgtgtgtgacaattgccgggaccacaccgaaggcaagaactgtgagcggtgtcagctgcactatttccggaaccggcgcccgggagcttccattcaggagacctgcatctcctgcgagtgtgatccggatggggcagtgccaggggctccctgtgacccagtgaccgggcagtgtgtgtgcaaggagcatgtgcagggagagcgctgtgacctatgcaagccgggcttcactggactcacctacgccaacccgcagggctgccaccgctgtgactgcaacatcctgnggtcccggagggacatgccgtgtgacgaggagagtgggcgctgcctttgtctgccccaacgtggtgggtccccaatgtgaccagtgtgctccctaccactggaagctggccagtgggccagggctgtgaacccgtgtgcctgcggaccgcaccactcccttagcccacagtgcaaccagttcacaggggcagtgccccctgttcgggaaagcttttgggtggccttgatgtgcaacggctgcagccattccggccagtggtccagaacgggaacctaatggaagacctgg

SEQ ID NO: 126316 - DNA, 355 bp, Homo Sapiens
tggtctcccgggcttcggcagcgaagcccccttcttttcctcctctctcctcatcttcaacggttacctcaagttcatgcagcacctcaggggttcagccctcgatgccaacagacgactattcggaggagtctgacacggatctcagccaaaagtccgacggaccggcgagcccggtggagggtcccaaagaccccagctgccccaaggacagtggtctgaccagtgtaggaacggacaccttcagattgtaagctttgaagatgaacaatacaaacaaatgaatttaaatacaaaaattaataacaaaccaatttcaaaaatagactaactgcaattccaaagcttctaacca

SEQ ID NO: 126317 - DNA, 1268 bp, Homo Sapiens
  misc_feature (247)..(550): n is a, c, g, or t
  misc_feature (940)..(940): n is a, c, g, or t
  misc_feature (967)..(967): n is a, c, g, or t
  misc_feature (970)..(970): n is a, c, g, or t
  misc_feature (1042)..(1042): n is a, c, g, or t
gggtccggaattcccgggatatcgtcgacccacgcgtccggtactttttatggcatgcccatgaaaaagcactttcttaagcctacagtatcagatcaatgggaaaacaacagaaaactaagaggagaattttcccgttaattttcttgcagaaaagtataagtctaattgcccattgccataaattttgtcttgtactcagagaagcaacatgcactggctcattttatgtgcaaagaaaagattnnnnnnnnnnnnnnnnnnnnnnnnnnnnnnnnnnnnnnnnnnnnnnnnnnnnnnnnnnnnnnnnnnnnnnnnnnnnnnnnnnnnnnnnnnnnnnnnnnnnnnnnnnnnnnnnnnnnnnnnnnnnnnnnnnnnnnnnnnnnnnnnnnnnnnnnnnnnnnnnnnnnnnnnnnnnnnnnnnnnnnnnnnnnnnnnnnnnnnnnnnnnnnnnnnnnnnnnnnnnnnnnnnnnnnnnnnnnnnnnnnnnnnnnnnnnnnnnnnnnnnnnnnnnnnnnnnnnnnnnnnnnnnnnnnnnnnnnnnnnnnnnacacacacacatcaatttattttagttgtataatgcttttctattagtaaagcatcagctaagcttcagtggcctgctccatcccctaatgactcccatgggctatcctaaaggaacttccagaacctttgttggtgtgttgacattgaccatgcagaccaatttgggcacaactggacattgattccttttacacaagagctgcctcccaaagatagataaattttcccagccctaaatatgaatcatggggcaagatattggtcgtattgatggtgaacctttcctactggattctttgcatgccacatagcaggattcattggcctttctctcatcatgggatggcatgcagcagcacccaagtattcttcattctttgcagggaanaaattgtgcatgggggctgaaatgtantangtgtagctcattatctctcctctgtgatgcaaatggctcgtgccgaattctggctcgagggcaattcctaantgagtcgtataaatcgtatcagtcaagctttcagtgtgaattgtatccgtacaatccacacacaacagcggagataagtgtaagcggggtgctatgatgactatcacatatgcgtgcgccactgcgcttcatcggaactgtgtgcactcattatatcgcaccgcggaaggggttgggattgggctccctcccctataccccgccggcttgtggggagggtcatata

SEQ ID NO: 126318 - DNA, 1006 bp, Homo Sapiens
gtgtgagacaccatacctagccaagttaatttttttaatggtgaaatcttttctttgcacataaaatgagccagtgcatgttgcttctctgagtacaagacaaaatttatggcaatgggcaattagacttatacttttctgcaagaaaattaacgggaaaattctcctcttagttttctgttgttttcccattgatctgatactgtaggcttaagaaagtgctttttcatgggcatgccataaaaagtacaataaggggacttaatagttctgtgaaactggcatatgttagctgaaagtataattgtaactgggaaaaggggaaaaaagtcactagtagttcaaccatctacagtttctgttaaattgtggtttgtaagcctccaagaagttgctttaaatagtttgtgataaatttgcatacattttgctcccacttatacttttaagaattctcaaagtgtccaacccataggtgcccattaaatgtttgtgtatctgatacatcttaaaatttattttaaagccctctgagtccaaaaataaccttttcactggcaaggccatggggccccaaatccaggaaacctgcatttttaacccagctttacccttataggctgtatcatactgtggaaaccacttcacatctttggctttcagtcttcatctgtacaatgaagtggttgggctagttgatctaattctttgaatggtgacttcctggagttggaactggtttccatggtgaagttaatgtaagagctgcagttgagtgcagttgtcaagcaatttttaaaatgggttttggtcattactgcaggaatttgttttttaaaaaagctgttgacattgggggtcacaagtcaagatgttgaaacttgatgatatcctgcatacatatattcaaagcaagtccacatacaggcatatcatccccaaccagctacatacatgtagctgtttttacactagtctgtaatcagatctgagaatgtgtctttat

SEQ ID NO: 126319 - DNA, 1716 bp, Homo Sapiens
  misc_feature (206)..(216): n is a, c, g, or t
  misc_feature (420)..(439): n is a, c, g, or t
  misc_feature (1582)..(1616): n is a, c, g, or t
caggttttctaattttatttgaacacaaaatatttaattttttgcatgtagagaataagaggtaatcattagcctgaaaagagaggatttataatcaacattatgcagaaagaaagcaaaattacaaataccagcctactcacatgaaaatttttcatgtttacgctgatatatatctgagtgcttatcatcaaagtaggaagttnnnnnnnnnnnggcagcttaacaaagttccagtgtttcaaagaaagcacttttaaaaatgtatatacatgaacgaacatttcattatatcataaaataaatgctgcgctgtaagataaaggaagactaacatatatggagttttggcctttttccgccccctccagctgcaaccatctttaacctgctgaacttaatctcaagggttacaggagnnnnnnnnnnnnnnnnnnnnctcctgttcagttcacatttcaggctgttcggcagatgcctgtgattctggagattcaaatcgctggtgaaagtttgttctctgtttcctcagtttttcaggagcttttctccataaaattatctcctgctgtttgaagtacctccggtcttcctcatcaacaagcactaaattcaaaaagtaccttactgaaaattttttgttcacatctctcattgttggagttgggtcatatcctgctaaaaatagccttattggaattgattcaccttttactggtgcaccatccattatttcatatttggcgattgttttctgttttctgttgtggtactgggtccaattcctgtgatctcttttttgatcagctgtaactccatatgttgtatttttattcttactaataagaagtaaattttttccaacaatcacatcctttaaatgatactttgatttattatattcaaattctatatgtagacaatcttcaatgcccacttccatcttaatagagttgttaacatcaggataggtggcaagctggtgaacaataagatcatactcttttaccaaatctgtcagtcttctcactattgtcactttaagaaaatacctcaagcggacattggcaccgatgtaagattcatatggcttttcaacttgcataaattcaaaatcataacttctgctctgagtcagttctccaggtaaggctagttctttcactaggtttacaaattcatgagtattactcttgtcattgaaaagttcaatttgacctacaaattcaattctaattccttggtgttctagcctctttccaggttgcttaaaggctaggtttacctttcctgaaacggattctccgtcatagaagagatagtgtttttctactttgccatcttcagttttcatttctgccattttcctggtttccccatcattaagaacaatatcgatctcacaaattggaccaaaaaagcctccaagaaaactcattgtcaacgccgccgccgcgtcccccctactccactcctcttccctcaggagaactcccagccccggctccctccgctccggcgctccgtcacccccggccgtaatggccgaattcccgggcatatgtccggtaccgtcgactgnnnnnnnnnnnnnnnnnnnnnnnnnnnnnnnnnnncggccgcttcctcgctagctacctcgctgcgctcgtcgttcggaatgaacgccatgcgccatatgatgctccagtattgacgggttggggaggtggtggg

SEQ ID NO: 126320 - DNA, 556 bp, Homo Sapiens
cacctcactaaagaatattcatttatttataattattgctaagtaaacttctcttttaaacaggaacataaaaacacagtagggctttgcacaagtggaatctctaaacagttggtttgtatacatgtcaaaataagttagaatggaatttgtccaggagtttccaagtcacccgagaggctgtgcacctcttttgagaaggttagggaggggtacagacaggagccttgccaagaccaccccccagctcaaactgtgagttgtgctgtttcctcctcctagctttgcccaggtccaaggcacagggcagggggcgttcaagtatcgaacctcacagagggccagtgctgacggcggggctgggggagggaaaggagagccccaccctgggggccagaccttctcccttcagtttccaagaccaaggccactgcactggcaggagggaggaggaggaagaaaagtacagggttccttttggtaccaggggagaaaaacgtggcaagaggtaattgcaggggatgatgccttctgctcagcaggagaaaatgttctt

SEQ ID NO: 126321 - DNA, 1043 bp, Homo Sapiens
ccaaaaattagaatttatttcagtttctaaggaatgaatccccgagtgtggcaggaaggacacagccggctcctgacgcacacctgatttgattcaacaccgagtcggcacagacacaaccagagatggcctgggtccaggctggggctgcacgggctgtgtcctggacagccaggagggaggccccgcacacagacggccgccgggcagggggcctgagcgggacaggcctggccacagcccatgtccttggccttccacataggtgcacacattgtctgcccagagagggccaagatgccccaggcaccccttcgctccgggggctcaggacacaggctcccagctgaggccacgcctggacccagagctgatgtttggctgcacgcgagcccactcgggacagacccaagaacacgaattctgtccctttggatttaaggctggtgttttttgacatttacttcagtttttctctctgaaattaaaattacctgagtaaaagattttaagacattaaaaaagccaaaaacacagaatccctgcaggcagacggtgccagggaggtggcggccagggccaggatgccaggggcacggtggggtcggctggagctccagggctgggcctttcccagtctcgcctgcccctggagcccccaggagccgcccctgggccgacgctcctgtggccggagcacaggaaggcacagtgaggtagggacagtggccattgtcccccgcctgcaccagggctgagagggcagcgcacgcctcggccctcctatagccctggcccctcggagctgggtgtcttgtccagaagccggggcacggcccctgcagtgttggagcgcgggctgccgggaggctgagctcgaccgttactagtccttattgggtggctgggaagggttactggccggaggtccgctaggtcggccgaaccctggggttgacggcctccggggcaagagtccgtgcccgattcgcgggcggccacagcccaaggggagaggcccctatgccgcgtgtgtggaaccc

SEQ ID NO: 126322 - DNA, 917 bp, Homo Sapiens
  misc_feature (54)..(70): n is a, c, g, or t
  misc_feature (78)..(87): n is a, c, g, or t
  misc_feature (89)..(134): n is a, c, g, or t
  misc_feature (137)..(142): n is a, c, g, or t
  misc_feature (146)..(146): n is a, c, g, or t
  misc_feature (148)..(222): n is a, c, g, or t
  misc_feature (227)..(234): n is a, c, g, or t
ctttgtgggggcgcccgccccccccaaaaaggggggtttaaaaaattttttgtnnnnnnnnnnnnnnnnnccccaaannnnnnnnnntnnnnnnnnnnnnnnnnnnnnnnnnnnnnnnnnnnnnnnnnnnnnnnttnnnnnntttntnnnnnnnnnnnnnnnnnnnnnnnnnnnnnnnnnnnnnnnnnnnnnnnnnnnnnnnnnnnnnnnnnnnnnnnnnnnttttnnnnnnnnaagaaactactctttattttagacaacctcataaaattattttcacatcccccccaacttcttgctcttaatcctcatcttttagttgaagaataaggcttaagagagagaaaggaaaaaccataatggctaaacttagcagcaccaacacggttctttcatcaaggcgtagtcatcatttctccaaactgacatgctacagaaatgtcttccaaaaagcgttaagttttcacagagtggggactatgatttccatgctcaaatagtgtaggaaatggtagattacgttagttttgtttactgtaacaggaattctcaggagtccttagacactctaatgtgggttgatctccagaaggagaaagggagtgtgtagtattttccaagctttttgagcaaacaatccttttctcatggaacacatcagaaacagtttggagtatgctggtaaatgtgttttggggatggaagtcagaaagcctgatctttttcatatggttcctcctattctctgctaaagccagcaacagagtaagttgactctagcatcaagaccactagtcatattaagaaagggcaggttggtcgagaatggaataggaagaactagctgcctcacttttcactttcgcgcctacattttcttcgctccctaagttatacaagatgtacatttcctctct

SEQ ID NO: 126323 - DNA, 1624 bp, Homo Sapiens
ccaggattcttgtattggaatataatcttttattttaccactcaacgattaagccattcaactacacaacacagataaaacggaagttataacatataaaccagtacctgcccacactcatagcagtgaggggaataaaaatcaaggttgcactgtaattccatgactctaaaaatcaagtctatttgacattggtttgaagcaacagaacctttatagcagattcccctttttaaagaaaaacccaaggagagatgatcaagcacaaatgatcacttcatgcattttattgatagtctatattttaaatctgcagtatgacatcttacatagggaaaaaagcttcttcctaaaagataactattaataatcaaaccagctttaatatgattgacctttcaaggtcttgttttgctttaaacaagttaacttttagcagttgtaaagcactgtacaaaagaaaactgtgtacattctcaaaatttaatacagggcttcccaaccaggagtctgctggataggtatcggagaagggtgttatgttcaggtttaaattgaaagaaaatgagaaaccagataaagcaagccaaccaaattaacttcactttgtgctcctctctgcttttttgagtctctcccgaaggtcaggaagccctggtataacaatcactttagtctttacagaacatacatctatgtgctttgtgaccaaagacataaaggcagcctttgttactgttccccctccaaaccccttcaggttcttataagcttcagaaagctttccaagattgctgccctgttctttgtatgaatccaagtaaacaactataccaaagcagctcttcctgggagaagataaaacaggcacagatacatcaccaggccaactgcgtacctactcaacttgatacctgatcacatggccctacatccttaaaagcagcaccagggacaaatggagctatcaagaggtaaaatccgaacactggacagttaatacacatactaaccagttaaaagaacattagtaatggggcactaaatagagttaaggctggacagctggttcaaccataccttggtattgaaataattctgcaagatgaggaactttacagaggaaccttgaaagaggcaccatgatatgacagggttcactttcactgcatgtctttaagatatctactactcagcccaactgaccataaagcagctcgtggaactttaataaaccaatcctaatacaaataaataatttttagaatgttggagggtatgcctatttccttcagatctgatcaagacatgagaattataaaaccgatacaaactgttctgtgattatcacttgacagttctaacactgttatacagctcaattctatcgctgcagcctttacagataccaactggggttacatgagatcactcacttgttagagaagtatcagataaatgtttagaactgttccacgttaaggaaaataacttcttaatcttcataatcctaaaactttttctaacaatttttgcagggcaggtacttaactcatagctgcttttagttgacttaaaaaatctgatttaaaaataagtaaggctgggcgcacgtggctcacgc

SEQ ID NO: 126324 - DNA, 1945 bp, Homo Sapiens
ttttattggtatttgaatacatttattgtgacaagaatgctgttataaatattcataagcaaaggccatctttttatctaggaattgtcaaagagaagattccaaattggaaggatacatcttttgtaaaatctgccaccaattcctgctttgagaataagcacctattgtaaaatttctactaacattataaatggtcacagcacatgccacttgatacaatccaaactttgaaatgtttgacttctcagtgggctgtccctctccactgcaaccccccttcctccagcctcctgaaacatcgcactatcctttggtaagcaattccatatagatagctgggggaggaggagtataacctgaccatagcatcaggtacatcaggtacatttatttctaaagtctaatagagaacagtttttactgcttaatagtaagaagcactgagagtgattttaatcgacattcttaactctttcaactccacctagatagctagtatctacagatgatgcagaaaagaggttaggggagtactttccaatagtttattgtattttcttaaatatcctttctggaattttcagaaacaaaacataaaaaaattatatactttattacaaatggtaaactcagagtgctccaaatctcttatttacaaacaacactgggcaggatacccaaacaaacaaacaagaaataacttacaaaggcatgaagctgtttattgacagtaatcagctttcatcaaattaaaaaatatatatatgtacatacacagttaacgaaggcaggccagaaagagttcatctgtaggctcagcctcgctctcacaaacctccctcctgccgcccctccccaaccctccccccgctttgtgttcttaaggagtactacagaagcaatctacagtctctattgcagtttgtaaccccctccccctcccccctttaatactgaatgagatcgaatgttaggtccatgcagttcttggtcaatgttaacgaaaagtccaacgttccgttcgcgcggggacagcccgtccgcaaagcggggcagcccgcaggcggccgctccctggctccacgccaagggagggcgcgccaagtccttcccactcgtgcacactgggggcgccgtcaggacgcaacccagtccaacttggatacccttggctttagttctcggacacttcttttttctctccgtcgcaacttgtcaagttctcaagtctgtctctctgtgttattttttttcttcgttgcccctcagcccccgacggtctctcttcaaaatgtttgcaactgctgcgttagcatgagttggcacccactgttaacgtggttcatgactttctgtttaagctgtgccacctgttccctgagcatgttggccgtggacgccagctccgagttctgagctttcaaggttttcactttttcctccagccgggcgattctctccagcttcctttttcggcacttggaggcagcgatgcggttcctcatgcgcttcctctccgccttgatccgctcctgggactccatgtcgatgggggacaggggcggtgtctcgccgggcatctcgggcactgtctgaggctcctccttcagggcctgcagccgcgggtgctgcacgggcatctgctggggcaggtggtgcggcggctgctgctgctgctggggttgcgcgggaaaggccaggccggccgcgccgtaggagggcgccccgccgccgctgctcagcgcgcctgggttgaagttgctgaggtttgcgtagaccggcggctcgctgtgcaggctggcgctgaagccgccgctgccgctgccccctgccaccgaggctaccgcgggagccaccatgcctgccccgttgaccggctgcgccgccgacgtgacgttggcagccgtgtctggctgtgcagttcggcaggggcgcacgaagc

SEQ ID NO: 126325 - DNA, 491 bp, Homo Sapiens
caggtcggcagtatagtccgaactgcaaatcttattttcttttcaccttctctctaactgcccagagctagcgcctgtggctcccgggctggtgtttcgggagtgtccagagaatcgcccggctggaggaaaaagtgaaaaccttgaaagctcagaactcggagctggcgtccacggccaacatgctcagggaacaggtggcacagcttaaacagaaagtcatgaaccacgttaacagtgggtgccaactcatgctaacgcagcagttgcaaacattttgaagagagaccgtcgggggctgaggggcaacgaagaaaaaaaataacacagagagacagacttgagaacttgacaagttgcgacggagagaaaaaagaagtgtccgagaactaaagccaagggtatccaagttggactgggttgcgtcctgacggcgcccccagtgtgcacgagtgggaaggacttggcgcgacctcccttggcgtggagcc

SEQ ID NO: 126326 - DNA, 1732 bp, Homo Sapiens
atgggggacccagggggcgattttttcttcgggcctttttccgggcccctttctggaggctcctcctttccagggctttccagccggcgggtgctggcacgggcatttggttggggccaggttggtgccgcggctgcttgctgctgctggggttgcgccgggaaaggccaggccggccgcgccgtaggaggggcgccccgccgccgctgctcagcgcggcctgggttgaagttgcttaggtttgcgtagacctgctggctcgctgtgcaggctggttctgaagcctccgcttccgctgccccctgccaccgatgctaccgcgggagccaccatgcctgccccgttgttcggcttcgccgccgacgtgacgctgggcagcgtgttctggctgtgcagttcggccagggcgcgcacgaagccctcggcgaagccctcctgctcatctgtcacgttcttggggcacaggaactgggtgggggtcggcgtggtggtgatgtgcccgttgctggactggattatcaggcgctccagctcgggcgacgccagcttgagcagccccacgtcgggcgaggtgaggaggtccgagttcttggcgcggaggtgcggcttcaggctccccactgggtcggccaggttcagggtcatgctctgtttcaggatcttggggttactgtagccataaggtccgctctcggacgggaggaacgaggcgttgagggcatcgtcatagaaggtcgtttccatctttgcagtcatagaacagtccgtcacttcacgtgaggttagtttgggctgcgcgcacaagtttcggggccgcaacagggctctggcaagcgggggacacccgcgccccccggagcctttgacagggaaagtttctctaagagcgcacgcacccgctggctgtcgtccccgctgcgccctcctcaccagctcgctccagggagcgcagggttaattaagatgcctcccgcactcttacttgtcgactcgcgcgcgctacccggctttgaaaagtcgcggtcactcactgagcgctcttcgggcgcagcggttcctcggagtccgcaggcgaactcacttcccagagcagcggctctccccgcggagcggatcagtgcggaccctgcagtggccggccggcggcgggtcttggccgcccggactccgacgacttgtcccctcctccgctgctagggggagggggcgcccggcagccgcggctcgcgctcgcccaagttcaacaaccggtgcgagcgaagctgagcgcacgtccttcttctcttgcgtggctctccgccgccttctggtctttaccgccgtggagaagcctaagacgcaggaaaggcttgcaaaagttcgctccgggactctgccacttgtctccggtcctcccagccgggaaagttctttgctgctgcagccgctcgccgacttcccccggcgggcgcgtgggtaccgctgctttccgccgctgtcaacagcgcctgggcagcagggctctcctcccgggggcggctggagaccaggctctctggacactcccgaaacaccagcccgggagccacaggcgctagctctgggcagttagagagaaggtgaaaagaaaataagatttgcagttcggactatactgccgacctggctggctggctgtgtctgtctgtctgcctgactccgcgcctcgtgccgaattcggcgcgccgtcgacttcatacctctcccccgcata

SEQ ID NO: 126327 - DNA, 576 bp, Homo Sapiens
  misc_feature (234)..(349): n is a, c, g, or t
  misc_feature (434)..(451): n is a, c, g, or t
acactttccttccgtatccctcttcattcacatctcaccttttccgtattaccactgaatcattcttcaacttatccatctttatcacactctatcttctgacgtccattttaatgctcccctccatctttttctaccgtcgccacacagcctcctatacatccactcccctctcatccctctcccctcaatactcccctcctccactttctacttctctttcctaccactcgnnnnnnnnnnnnnnnnnnnnnnnnnnnnnnnnnnnnnnnnnnnnnnnnnnnnnnnnnnnnnnnnnnnnnnnnnnnnnnnnnnnnnnnnnnnnnnnnnnnnnnnnnnnnnnnnnnnngccgcccctccccaaccctccccccgttttgtgttcttaaggagtactacagaagcaattatcagtctttattgcagtttgtaannnnnnnnnnnnnnnnnntttaatactgaatgagatcgaatgttaggtccatgcagttcttggtcaatgttaacgaaaagtccaacgttccgttcgcgcggggacagcccgtccgcaaagcggggcagcccgcaggcggccgc

SEQ ID NO: 126328 - DNA, 888 bp, Homo Sapiens
tttttatccttgaaccacaatcatactctttattattatacaaacttttaaatattggtatctgataccataagtccttccatcatttcctcttctgcatctggttccacttccttccatgtatcttttataatcaccttatcaaattataataaggaaaaagcactagctgggattatattgggatttattaaatttataaattaattccaggaacgcttgtttccttaaatacacagctgcttctggctcacgctcatcctgagggagtagatgttggtaaaccagcctcatgtgcagagggtctcctgctggatccccaactggagccatccctgggcctagacttctgtctccctcacttctaaatgagtgctcagtgatgtgaagcacacaggagtccctcagggcaaaagtggctatgcctggtgctaccctccccatgaccccaaaaacgagagccatgagacaatgccaccttagccatttcccttgagagaaatgaaggaggaacagacataaggcagagccacctgaggtttttagaatctatatctcacatactgaactagtgtttaatggctctgagaataaaaccaaaccaaatcttccttccacttgagtttccaacataaggacaccttactctctgcacttctccttgaccaggaggcagcactcggggaagcagcaccaaggcaggcatcgtcattctgcatatgcaggccttgactggcagcagagctcactgtcctgatgggtacgtcagtagcacacagaaggtaaggctcaccgagcacaggccatgaatctcctctgctcgactggatgttctcatactcttggctgggaacatgacctctgcctcgagacaaccctcgcaagggc

SEQ ID NO: 126329 - DNA, 1293 bp, Homo Sapiens
ttttttagtagcacgattattttattatatgctttataaaaaaacaaacacccaaagacatacaacacaccgccctcaccccccagcggccattagggagggggcttatacttttcctaatgtagatctggccatcttataaagcagaccacattatttgtttccatatatacctgtagatatttctctcccctcaaatatttatatctcgactaaaaaaaggaggtgcaaagagtatataaagataaatgagattttcttgctgttgttatagtacaaacaccagatgactaccagtggagtaacagggcaaaacaaaaacacaaaccccaccttcagtgaggaatggaaggtctgttaccgacctcaagtagctgaatcacctgctgtaactggcacctccctgacaatcatgggtttgtagggacatgggccaggtgatggcttctacttgtttccagaaggctaatgtgtcctacaccctttcttagtaactaaagacgaactacgggagaacccagtatttggattctgcccagaggtattaaatgcacaaggaaaaattagttatgtccaagtagcaagcaataatatttttaaaccaacatggttaaatgttaagatttgtagaaatcaaaatatttattcacataattttaaactaaagttgaagctaatatatcttccgtggtaatgatttaagtgcaagtgatgcttggctttctttcacattcatttcttttcttctgagtgaaggcatatcagttattcttgaacaagtcaatacagctctgcaaaagggagacattgttcctggcatgttttatttccagttcagacatttcaattagattctttctaaatgctgccactctcttccgtttgaaatttatcagttcttcttttgcagattcggaaagttgttcaaatttctggcagcactcctgctggtgtgcctcagccaacttgacgtctttgctctttaaccgggccttatccagagctttgtttgagttctcatagtcaatgagggctttggtgcgtctgtataagagatccttagcagcttcaatgttgagcatgtagtatcggaggagctctgttagcttcaaatcttcatctgatgaaactcgaccctctactttccttagtttttcaaatagctcagcaaccttcaataggtactttttgatgactgtgggctcttctaaagccaggctatgtaagcaggctgcggtgtggatatagtcatcggcaacatttttatgagatctggtcattttgtcagctttc

SEQ ID NO: 126330 - DNA, 975 bp, Homo Sapiens
  misc_feature (705)..(705): n is a, c, g, or t
  misc_feature (710)..(710): n is a, c, g, or t
  misc_feature (785)..(785): n is a, c, g, or t
  misc_feature (800)..(800): n is a, c, g, or t
  misc_feature (827)..(827): n is a, c, g, or t
  misc_feature (837)..(837): n is a, c, g, or t
  misc_feature (907)..(907): n is a, c, g, or t
  misc_feature (911)..(911): n is a, c, g, or t
acattgtaaacaccacatttatttgtctgaggcttgcaaacctctggtaagaagcacagaacgcagggctctccttcatgctgccctgggccccagctcgccaggcatgcaggacagagctggcagatgagtcagaaatctttgggagcagcgccagggaagcagcaggccctgctccttcccatgcccaatcccgccagcacgggcctggactgcagccaggaaggtgggccagccaggatccccaggtaacttcgccacagggacctcttcttggagctgccttcccttccctccccatccctctccaatccccgcagagcttagagcctgggccacatgcttggtccctcacacaaggaccaaaccagctgctgtcaggctgtttctgtgggtcctgtctctccagtcaggaagccagcagggcagggcaggcctggctctcctcctggaatcacaccgtgcacccagctcagcgctgggcactcagctggggaccgggatggacaaagccttgtccagagaaccactgtaggggagacgtgcatggcagccggactcagcctcctgcagcctccattcatgggctcttggctgggcctgaaatttgttagggcctcaactctctgtggtgcagatgaacacctcctcctccaagaggcccctcagggcttggtgccaggcttgggactgggctctggaaangtcangcaaggctgctacttcaaggccctgaggacagctccagcttcatgggccatagcaggtcgcccttcactttcagncgtccactcatgtanggccccaggggcgcactctctgcatancagggccgangtctgctcggcatctcacacacatcgggatgcatcaggacccgtgtccatctctcgtctgtatgagtcangaantaggcttggtgcgctgggagacaatgactggtacagccactggtgacaggctcacaggaagtgt

SEQ ID NO: 126331 - DNA, 2089 bp, Homo Sapiens
  misc_feature (1581)..(1626): n is a, c, g, or t
  misc_feature (1975)..(2009): n is a, c, g, or t
ttgtttaaaatgaaaagtttatttgctgagtacaccaaataggatgcaagcactgtcatgacaaatatacagaaatatgcagatcaacataaaacagtaatttagtttaaatgaagggaaatctctttaaatgttatgacaacatactcccaagaagaaccttttcttcagttaagttaattatacatttcaataaaataaaggataatggattagtggaagttagcttgtgaatttttcttaaaaataaaactccaactctattaatccatgccagttaaacactataactaaaatttccaaataagcgcaaaaggagatgaagcagttagttaccttttttgcttgaacagtccaaaggaaaatggttactataaatacagcaggcaaactgttagactgacctagaacatagtgtactaaatttcagtctcaaattgtgctaaatgctcatcattagtatggcacatttggtccatgatgtggtttaatgccaagacagatcccaatttgttacagaaacacatagattactgttgctttttgtttttaaatacatatattttaaaaagccaggtatacttccacatacaaaggcaggtttcccaggagaaatttataggaagtagtctggggtgcgccgtgtaacatgaggctcaccacgacgaggcgctgggtcaaattgaaggaaggaatattttaaagtgtcatctaattccatgatagcagcctggttcccacaacgataacagtaattgggtgcactgaaaatggtaaccacattccgatcatgacaccaattgtatccctccattacaagctggtgggcacgagaaaccagtgtgagaccattggcatggttaaaggtttcagaaatgtcttgtccaaatgtgtagccagcaccacgtggtgaaataccccatccaccacgatcatctggatctgaccataacagatcacacattgggccctcatgtggaacttcctgtaaacgatccagggctcttatatgatccagtgtgtctatggatggagagaggccaccatggaggcagaatatctgtccatctactaaagctgtaagtggaagataatcaaagagatctgtaaaatatttccaaacgttggcattcccatactttcgcagacattcatcataaaagccatatacttgggtaatttgtcggctttcgtgatttcctctcaatattgtaatgcgttctggataacgcacctttaatgctacaagaagagtcacagtctccactgaataatatcctctgtctacatagtcacccatgaataagtagtttgtatccggtgattttccaccaattctaaagagttccataagatcatgaaattgaccatgcacatctccacagacagtaacagggcaacgaacctcttgcacatttgattcttttgttaaaatttcctttgccttctcgcacagcgtccgcacttggttctcgttcagctgcttacactcgttcagctgctcgacccactggtccagctccttggtgaacgccttgtcgtccatggcggcccgatcccgatgcggatcccgagccccannnnnnnnnnnnnnnnnnnnnnnnnnnnnnnnnnnnnnnnnnnnnnaccgggcgcacgctcccctcttccctaccgccgccgtcgccaggtcccacagggggaggactggagccgggtaggcggccccggacccctgcgccccgcccaagcccagcaggccggctccgagcgcgcagccttggaggagaccaccgcccgcccttaccccacgccgcggccgcggcgccgcgggagtccgggtgaagaacgcaggtgaggtgccggggagcacggcagcgggtcctcggcctagctctcgccggacgaagccgcccgctgccgcttcaggcccgcctcacgcctccccggccgtaatggccgaattcccgggcatatgtccggtaccgtcgactgnnnnnnnnnnnnnnnnnnnnnnnnnnnnnnnnnnncggccgcttcctcgctcactgacttcgctgcgctcgtcgttcgctgcagagcgtagggcccatatgagtcatacaatgtt

SEQ ID NO: 126332 - DNA, 1587 bp, Homo Sapiens
ttttcctcattaagaaacatttatttggataagaaagaaggcctgagggctaggggccggggctggcctgcgtctcagtcctgggacgcagcagcccgcacaggttgagaggggcacttcctcttgcttaggttggtgaggatctggtcctggttgggccggtggagaaccacaaagctctctggaggaaggacggggcctctgttctcttctacctggcccatcagcagataactgactcctttcttcatgggggggcactgcttgcaaggcacgtaaaacttcagggaggcaccagtgggtggagaaggcaggtccagtcctccagttttataagcaccaataagactgacagtcacggcaaggccctcccctggctcccgaaccatggacttcactgtcgcagtcaccacaaggctgctggcacagaagttgctctgcaaggtgcctgtccggcggcactgctttgggcaggtgggtgcatcaggggctgaaggagattcctctgttttctccggaggttgggacttggggggcagcttgactttaggctcagttccccgtttggggccgggcccttgcccttctttggcagtgccccgcggcagggtcttgtaggaggctgagaagccatcagcggtgacactgagatctgagacgaactggacgaggagttcattcccttcggaggagatggagcccgggactgcgtcgccgcagaacttccccagcctccgggagtcgtcgctcacggctccgttgaacacgctgaccgagtcatagcggcagtaggtgtccggctccaggtcaaacttctcgaaggtcagcgcgatgacctggtccgggggcgcgatgatgtgccaggaacagctgatgcccggggggtaatcggactcgggccagttgggcgtggtcagggttccctgggccttctccagccgccccccgcaaaattggtgctcagtgcccgaggtggcccgcccgctgtaccagagcaggaagcctcgtcctcctgtgccctcatccgtcgtcatcctcagggtcacctggttgccgggggcgactaggggcgcaggccggaaggtcccacaaaagcgtccgagccgctggccggaagtcccagacccagcgaagacctccagagcatcgtagcggcaggcggggtgcagctccaggtcgaagactcggaatgagagggacacagtctggccctcggggaccgttatggtccagatgcactccttattaggggggtagaggttggggaacccctcacttgccacgtaacctgattcccccttcacatcccctccgcacaggaacacgggtctggtgtagttgggggtctggccctgggcaaaaggcagcagggcgcaggcagtgaggaggggccccaggagggaggctgtggctgcaggcagcatggccccgggggaaaggcgctggggtcctcaagacagaggcagcagctgaattttgcagagcagcagcagcggtggcggcagcagcaggataatcagcgccagatcccgggaattccggaccggaccatagtggtgtcgttaatagtgtaggggagaaaattat

SEQ ID NO: 126333 - DNA, 1101 bp, Homo Sapiens
  misc_feature (189)..(197): n is a, c, g, or t
  misc_feature (543)..(556): n is a, c, g, or t
  misc_feature (693)..(707): n is a, c, g, or t
  misc_feature (798)..(807): n is a, c, g, or t
  misc_feature (879)..(879): n is a, c, g, or t
  misc_feature (989)..(989): n is a, c, g, or t
  misc_feature (1030)..(1040): n is a, c, g, or t
ctgatatatcttgttgaaaaaatggaaaaggtgcaaagtattagaaggaacgttagggcgttgctttcaaactgctgaggggaatgtgaaaatggtatcataaaacaggaaatgtgcttcatatgcccaagaggggaagaggtggaatcggaactccaaaacaactggtacatgttttgttgatgggcnnnnnnnnntcacagcacaaccagaaaggagaatgtaccagatgttttcaaattagagtatttcaaaaggaaacatgttattttttgttctgtattgttttaaatcccaaggatagtttttatatttccttctgtcataatatattttagttatcctaatttttaagcatgttggcacatttaaaaaatcctaattgatgatgagaaatttttaacaataggactttatgttggattctgtacttaaaaggtactgtcaatatctcactcttggggatatgagctctaaatatgagaagcaagttatatgtgttcacctgaggaagaagctgacggacaaagcaaaccctctttnnnnnnnnnnnnnngaaaattccacgtgtgtggaatacagccggtgaaaaataatcactgtagttagaatcacatacagaaaaaaaatgattgaatcctccaagaaggtatttcaaaaatgggaaatgctatacttataagaattgaaggnnnnnnnnnnnnnnncccctcacgtatgttattcttcatcctgttcttccccttgggactgttatggccatattctacggtatagtacattttaaattggccaccnnnnnnnnnnggtttcccccaagttaatgcaaaaatgcctaaaaatttaatggggattgtttaaaggggagccaccttttangtttccccccctaaggcagacagaaatcctctgactaagctctgtctgcagcaaccacacagttactttgcgcagttttcaataatctataaacaaaacaaaatacttantgggggagcgggacccccatttttctaaagaagggtttctnnnnnnnnnnnagggggggcccccacagaagctaatcaactggggtccctccacacgcattttcttttttgt

SEQ ID NO: 126334 - DNA, 652 bp, Homo Sapiens
  misc_feature (440)..(456): n is a, c, g, or t
gatgcagctgcaacttacaatgaactgtgccctcctatcccccatactttacccttctttcttattttatagtgtgggatacacatgagtgatgttttctttgtgcactgagacaagcctattttttaaatatttagggagaagtactttagttcatgcttcttatacaacttttttctgttgtttagctttggttggattacaaattctttgtgcattcctgaatttgccttatttcatgtaaaatttatgtcattcagtttttgacaatgagtttgaggcatcagtgatatttcttatctacttgttacatatagtttttcaagtaatgactgtgattgtgaccgagtaatgtgcactttttcttgtaactgtggacattgctatgcttttttcttctagtgtttctagaattactgttccttacaattatgtaaacnnnnnnnnnnnnnnnnncttttgtgatactgttggtgaatataatgtgaaaaatcttattgaaatatgagtattttggaaatacatagctgcacaaacatcttttaagatgtggatttagagtttgcttatttaaatgaaaattcaaaaattgagggctggtataattttctctgttttgtttggtttaataaacagatttctgtgttaaaag

SEQ ID NO: 126335 - DNA, 1164 bp, Homo Sapiens
ggcggtctagcaggatcctcactgttcccaaacactatctggtaacagttttaccggttacaactgggaaggcatctggaagaaggtcccctctttgtctttctctctcccctgtctcaatgaggctccgagctctgcctggcggacattcccacacagtgctggttttgaaaggtagtcaagacacagtcgcccgttcaggacgggtctccacagtcctgcccctgggccctccccgttacaaggcctttttgtgagggctgctacgcaaactctctttcccccgcctctgccgtaccacaaagtccttctcattagaaagagagatggggcggtcagtgtttggggctggggatggcttggtcacgtctctgcccacgttctgtttcctagctgggggaggctgggctggggcagggtccttccctttggtttcccctacggtggcagtcaccgagagagccctgtcccggtggctggccccgcccatggtgtttgggtcggggtggtgtgactccagaggcagggtggagacccggaaggagggcagggagtcactctttgtcatgtgggttcggccctccccggcaggctgagccttcctatggtccctgttgctgggggctggaagctccagcatgcccccggcggccttggcagaagaggtgtcgctgctggctgcagaggcctctctaactccggccctggtttcagggaagctggaggagcagctcagagacttttccgggagggccgtggatcggaaagaactctgcccagtggctgagggggtccgtttcatgccattgggcttgtctgcctccgtcggtggcttctggggaccgggccctttccctctggcctcaaggaagccctttcccaccccgcggctggccgctccgcgcctttcaaccggttctcgctatgcacaaaggaaaggccggcctcgagcttgtcgccctctgctggagcataaagtgcttcagtgcatttcttcccttccgcccttctgtcggtgttggcggccggctgactcgggcttttgtctgtctgtctgttgtctgtctgtttgcacagggtggggcaatctttcacagtggatggtttggggtgctttggagacagggtttgcttttcaccaacagcggacagtttctggtccgc

SEQ ID NO: 126336 - DNA, 992 bp, Homo Sapiens
gtggacaaacaacgggaactacccggtacaccggaagcatcggaagaggccccgtgtcgtacgagcgccccgtccaataggctcccaggctcgcccgcggacaatcccacacagagctgtttgaaaggtagtcagaccacagtcgcccgttcaggacgggtctccacagtccggccactggccctcccggtacaaggccttttgttgagggctgctacgcaaactctctgtcccgggcctccgccgtaccacaaagtccttctcaattagaaagagagatgggcaggtcagtgtttggggctggggatggcttggtcacgtctctgcccacgttctgtttcctagctgggggaggctgggctggggcagggtccttccctttggtttcccctacaggtggcaagtcaccgagagagccctgtcccggtggctggccccgcccatggtgtttgggtcggggtggtgtgactccagaggcagggtggagacccggaaggagggcagggagtcactctttgtcatgtgggttcggccctccccggcaggctgagccttcctatggtccctgttgctgggggctggaagctccagcatgcccccggcggccttggcagaagaggtgtcgctgctggctgcagaggcctctctaactccggccctggtttcagggaagctggaggagcagctcagagacttttccgggagggccgtggatcggaaagaactctgcccagtggctgagggggaccgtttcatgccattgggcttgtctgcctccgtcggtggcaggctctttgccctttgtggctgctgctttcactgtgcgcagcaacaggcttgggagggtcctgggggctcgagctgggctctgcagtgctgggcttggcccccggctctctgccagaagcgtggcttggggaactgcaatgctgcctggcagccgggctggaccctcgtgccgaattcgacacccaggcctcgtacctagccga

SEQ ID NO: 126337 - DNA, 399 bp, Homo Sapiens
aaaaaaagcacataaaccctacatactaaaattatacacatcaagtactggtccaatcttatatcaatctatttacaattaaacagcaccatggttttcccacctaggttagttaaacatgcccagagaattgttattcaaagcatatgttcctttaaaataaaataaactcttaaaaagagagctcaaatcctcaacaaagaaagaccttttaccaatcgatatcatagatattgatgacatcaccaaatctgcttaagaaaaaaacagttttaaacacttttttccagttgacaaactttgagaagtgctgctattcgatgtggcacacaaatgaacaaaaactttgatgacaggagcaatatactgatttaccctaatatctccacctctaaacat

SEQ ID NO: 126338 - DNA, 1418 bp, Homo Sapiens
  misc_feature (600)..(715): n is a, c, g, or t
  misc_feature (1294)..(1328): n is a, c, g, or t
  misc_feature (1332)..(1371): n is a, c, g, or t
aaagttataaaaatattttatttaaatgatacagaaaaaaatgtatacttaaaagtgattaaaacttcacattaggaaatgctaaaaacccagtaatgtacataatgataaaatctaaagtgatgagaaaacataaaatattttcatttggtcctgtcacctaacaaaactatcataaatatgagattatagtaattactaaagctggttaaaggcacatgacaacataattcctttatacacatccagtcattttatacaaggaactgctatcccttaaatggaagagtgaactacttgtttaaaatattaacagtgcactatgtacctacaatgaaaccactttctccaaagactcaaacagattaacattgcaaaatagtacttctgtatcactgacttctgaaaattttaataatttatgcatatgcaagtgaaatataatttattctggtttcaacaacagttatacaaagtcacaattttccccaggaaaccattcacttcatagctgcaaaaacacactgtagcttttctgttagggtctgccatgctttcagctagctggatgtttaaccattcacttcaaatttacatgtnnnnnnnnnnnnnnnnnnnnnnnnnnnnnnnnnnnnnnnnnnnnnnnnnnnnnnnnnnnnnnnnnnnnnnnnnnnnnnnnnnnnnnnnnnnnnnnnnnnnnnnnnnnnnnnnnnnnttcggaaatcatccaaggagtgtgataaacatgacgacccccataaactgggtaaacgacatcaatggagtgaataacgaccacacatgccataaagcaatgttgaagcaaattcctgctgcaataaaggaggcagtggtaatgggtatcaaggctggatacttgacatcatattctccaattccactataccattccaggtagactatgcagtaaaatgcaattgataaactgacaagcaacaaggcactgccacagagaaaccagctgctagtgtggaagttttctttaagggttttaaagaagtcaacataataggtcacaacaatggatgccaaaatccagaatccagaatggatattaagtcttggaagaggtttctcctttttctcaacagctgtggaggtttccggcccggcgtcaccctcgcggtccagctgggcctcggcgtccggcaggaggaggaatcgccgccggagctgctgccgggcccgcgaggagtccatcttggtaccgccccgaaatgcccccggccgtaatggccgaattcccgggcatatgtccggtaccgtcgactgnnnnnnnnnnnnnnnnnnnnnnnnnnnnnnnnnnncggnnnnnnnnnnnnnnnnnnnnnnnnnnnnnnnnnnnnnnnnctattacgccgctagcgccctatagtagtatatcagttttctccccg

SEQ ID NO: 126339 - DNA, 753 bp, Homo Sapiens
tggtgacaagggtcaggtgaggaagtgttcggagatgtgtaggaatcctccgggcccaaaggcagctagtggcaccacaagcatacaggaacgaagggcctcctgtgagggctcccaatggttccaagacacaagcaaggtgcttgaaggaggctggagacattggcgtgggcatggaggtgctagcaactattttcagactgctaacaatgagagtatgtccagtttcttctttgtacagttaccattgaccttcgctgtgtaaaatcccacagggagaacatgctgtttttagcagaaatgtcagtgtttcattaactccttgaaaatttagtgtattaactgtttattgtcgcatgagcgttcagttgtccacacgctgtcaactgctgtataaagcaggtttcctgcaagttctgatgtaagtgacctgacaggaggcactatctttgtccttctcaacatgcctctaagcatctggagtgagtattgctcaatatgcacttatttaataacagagttatccgacactcagaaaacagcctccactgtgtaaggcagcagatctcaggatggggtgatcttcggaaatcatccaaggagtgtgataaacattacaacccccataaactgggtaaacaacaacaatggagtgaaaaacgaccacacatgccataaagcaatgttgaagcctttcacagactggggagtggagcctgggcctgcgcctctccgcgccagagccggcgccag

SEQ ID NO: 126340 - DNA, 610 bp, Homo Sapiens
  misc_feature (188)..(225): n is a, c, g, or t
gtcttcttcgctgccacttcctgagcggtcctcctcttgttcctcctcactgtcgtcgtcactcacgaccggcttggctcgggaccctcggctcggccgccgccggccgcccttcagccggtcctgtgccttctccttccggccaagcttgatcttcactttgacggaccgagattcggattcggagnnnnnnnnnnnnnnnnnnnnnnnnnnnnnnnnnnnnnngccttcactgtcatcctccttctcgattttctgccgcacgctggtgaagaccgactgcaagacgatggagtcttcatagatcagggagccctccaggttgaaggtctgtgcgttctggcacaggagcatgacgtccttctctaggtcgttgaggctgcggtacttgtggttgcgaatgcgctcctttatcttcttgaagtccacgggcttgcggatgagctcgtagtactcgggcagctcctttcgcgagggcagctggatgaagacctcgctgagctgacgtccactgctgctgtccttgtacttgatcacggcatccacaatcttcttcatcttcttggtgaggttgggtgggttaggggagagtttctcggcaggcggccgc

SEQ ID NO: 126341 - DNA, 1078 bp, Homo Sapiens
  misc_feature (230)..(244): n is a, c, g, or t
ttttgcgttttgttgttggtttaatttattactgtttgacatccagtgacactgacataccctcgccgggcccccggcgagtctgacctgtccaataaaatacagtaggaggagtggacggtgacgcacatgcatccacacttaactacagtgactccaaactgcggcgcaacagtactgccagcaacggaaaagaaaaacaggtatcgtgtgttccccaattcggaatnnnnnnnnnnnnnnnttaagacagttaatgctgttacagatgctactgatgccaggacagggccagtcacaaacagtcctacagcttctctgctgtataaatatggaagattcttttgtttatacagttttactccaagtctgaaactacatctgctgctacccgttactgctaaggcctatgccatctcagctctggaacgaggggctcggggtcgagactggaatgtcggggctcagtcttcttcgctgccacttcctgagcggtcctcctcttgttcctcctcactgtcatcgtcactcacgaccggcttggctcgggaccctcggctcggccgccgccggccgcccttcagccggtcctgtgccttctccttccggccaagcttgatcttcactttgacggaccgagattcggattcggagccttcctcctcgccctcttcctcctcctcactctcctcgccttcactgtcatcctccttctcgattttctgccgcacgctggtgaagaccgactgcaagacgatggagtcttcatagatcagggagccctccaggttgaaggtctgtgcgttctggcacaggagcatgacgtccttctctaggtcgttgaggctgcggtacttgtggttgcgaatgcgctcctttatcttcttgaagtccacgggcttgcggatgagctcgtagtactcgggcagctcctttcgcgagggcagctggatgaagacctcgctgagctgacgtccactgctgctgtccttgtacttgatcacggcatccacaatcttcttcatcttcttggtgaggttgggtgggttaggggagagtttctcggcaggcggccgca

SEQ ID NO: 126342 - DNA, 1067 bp, Homo Sapiens
  misc_feature (92)..(150): n is a, c, g, or t
cgccggccgcccttcagccggtcctgtgccttctccttccggccaagcttgatcttcactttgacggaccgagattcggattcggagccttnnnnnnnnnnnnnnnnnnnnnnnnnnnnnnnnnnnnnnnnnnnnnnnnnnnnnnnnnnnattttctgccgcacgctggtgaagaccgactgcaagacgatggagtcttcatagatcagggagccctccaggttgaaggtctgtgcgttctggcacaggagcatgacgtccttctctaggtcgttgaggctgcggtacttgtggttgcgaatgcgctcctttatcttcttgaagtccacgggcttgcggatgagctcgtagtactcgggcagctcctttcgcgagggcagctggatgaagacctcgctgagctgacgtccactgctgtccttgtacttgatcacggcatccacaatcttcttcatcttcttggtgaggttgggtgggttaggggagagtttctcggcaggcggccgcccgcgcttcttctgcttcttgctctcgtcgtccttgtcgcggctgcgggtgctggtggtcggggtggaggagccggcgtcgctgtctcgcttgcgcttccgtgatgatttcttctgccggacctcctcttcgatctcctccagcgtgccctcctcgatggccttgagccactgcttctccgtcagtgagtcgctgtagtccacctccttgcggtggcgggagccacggccgaacatcttctcctcctcctcctcacaggtcagccgctccacctccgcgtcgtccttgatgatccacgaggggagctcgtcctcctccatgaggcgcggcttccgcttggggttgcgggcctcctcgcgcctgcggtccaggtccatgcgcatgaacagatcaaactcctcctcgtgccgggcgatcatctggttgacggtctcgtcgtcgggcacctcgtcttcctcctcatcctgctcctcgtgctccaggatggcctgcaggaaggcgccccgctcatggttggaggcgtttcggttcaggatgccagtcttccattccttcgtgcc

SEQ ID NO: 126343 - DNA, 687 bp, Homo Sapiens
  misc_feature (170)..(178): n is a, c, g, or t
gaaaagaggccccaattttggaccccggaaaaaaattttcttcttataagcccctttcccggagggaaagggggtaacaccattttaaagttccatttttaaaattgggccacaaaaaattacccgcccaaaattcggaagtttttttcaagggtttccccttaccaccnnnnnnnnntcccaattgggtgtttagcccccggttcggctgcagtgtggttttcaagcggtgcctttgtcaacaatcatgtatttcaacggatcttggcgaggatgtgctgttcttgaggatgtactcgtacgcccagttggacagcgttgagagaggcacgatgatgagaaaggcccattgatgcgtttgtgctccatgaggtacgtgatgagcgcgatgttctggatggtcttccccaggcccatctcgtcggccaggatgccgttcaggttgttgttgtacagggacaccagccactccaaacctttgatctggtactgtttgaggacaccattgaccataagttctgactgcttgtccactctctcagtgacagcatgggccacggcatagtaggactgcaggccacgtgcacagggcctgggacacgccatattcatcatcgacatcttgcttggcattctcaacctcgtgccgaattcggcgcgcctcgacttcatactctctcgcattag

SEQ ID NO: 126344 - DNA, 2543 bp, Homo Sapiens
  misc_feature (238)..(295): n is a, c, g, or t
  misc_feature (331)..(331): n is a, c, g, or t
tgggggggctctcagttcctttcttttcggctggcccaaacttcccctggaggcgggtccctccctccttggttccctcccttcacttgtccattgttcaacctcaccgacccgggcttgggttcggggacccttcggtctcggccgaccgccggcacgcccttcagccggtcctgtgccttctccttccggccaagcttgatcttcactttgacggaccgagattcggattcggagnnnnnnnnnnnnnnnnnnnnnnnnnnnnnnnnnnnnnnnnnnnnnnnnnnnnnnnnnntctcgattttctgccgcacgctgggtgaagaccganctgcaagacgatggagtcttcatagatcaggggagccctccaggttgaaggtctgtgcgttctggcacaggagcatgacgtccttctctaggtcgttgaggctgcggtacttgtggttgcgaatgcgctcctttatcttcttgaagtccacgggcttgcggatgagctcgtagtactcgggcagctcctttcgcgagggcagctggatgaagacctcgctgagctgacgtccactgctgctgtccttgtacttgatcacggcatccacaatcttcttcatcttcttggtgaggttgggtgggttaggggagagtttctcggcaggcggccgcccgcgcttcttctgcttcttgctctcgtcgtccttgtcgcggctgcgggtgctggtggtcggggtggaggagccggcgtcgctgtctcgcttgcgcttccgtgatgatttcttctgccggacctcctcttcgatctcctccagcgtgccctcctcgatggccttcagggtcttgagccactgcttctccgtcagtgagtcgctgtagtccacctccttgcggtggcgggagccacggccgaacatcttctcctcctcctcctcacaggtcagccgctccacctccgcgtcgtccttgatgatccacgaggggagctcgtcctcctccatgaggcgcggcttccgcttggggttgcgggcctcctcgcgcctgcggtccaggtccatgcgcatgaacagatcaaactcctcctcgtgccgggcgatcatctggttgacggtctcgtcgtcgggcacctcgtcttcctcctcatcctgctcctcgtgctccaggatggcctgcaggaaggcgcgccgctcatggctggaggacttctggtcgaacatgccggcctggatcaccttctggtccacgttgagcttgtacttggctgcagctaggatcttctcctccacgctgttgacggtgcagaggcggagcacacgcacctcgttctgctgcccgatgcggtgggctcggtcctgcgcttgcaggtcctggtgaggattccagtcgctgtcaaaaatgatcacagtgtctgccgactggaggttcaggccgagccccccagcccgggtgctgagcaggaagatgaagtactcagagccgggctcgttgaaggttttcagcagcatgccccggtcctccgccttcgtggttccatcaagcctgaggtatttaaagccgcgatacgcaaagtaatcttccatgatggtcatgagggaggtcatttggcagaacagcagcactttgtggttggttgctcggagtttgggaagaattctatcaagaagctcaaatttacccgaggctcggtacaggtccagcccttggacaatgccgccagtgaaccccaagtgctcggaaaaggactcctcgatgtgctggaacatgtaggggtggttgcagatcttccgcagctgcatgatggtgttcatcagggtcttggtgccgcctttgcccttcttgtccttctcggagccatcagtcagcagcacgcccttggcctgcatgtggcggtagagcactcgctgcagcgcagacatgtcgcacttgatgacgtactccaccttttcgggcaactgggcctcgacttccttcttgagtcgtcggagcaagaagggccgcagcactttgtggagacgccggatgatgagaatggtttcctcctcattcaggtccaccttttccccggtcatggcaaagggtgcgttaaaccactgctcgaaggtgctgcagctcttgaagatggtgggcagcaggaagttgagcagcgcccagagctcgggaagcttgttctgcagcggtgtgcccgtcagcagcaggcggcggggtgccacatagtgcgtgttgagcacctgcgtcagcttgcagtggtggttcttcatgcggtgaccttcgtccacaatcatgtacttccaacggatcttggcgaggatgtgcttgtctttgatgatgtactcgtacgtcgtcagcaagacgttgaacttcccactccggagctgggggacaaaggcccgtcttgctgctggggatcccttgtaagacaccttcaccacggagggggcccacttgtcaaactcgtacgcccagttggacagcgttgagagaggcacgatgatgaggaagggcccattgatgcgtttgtgctccatgaagtacgtgatgagcgcgatggtctg

SEQ ID NO: 126345 - DNA, 463 bp, Homo Sapiens
  misc_feature (100)..(100): n is a, c, g, or t
  misc_feature (123)..(123): n is a, c, g, or t
  misc_feature (130)..(130): n is a, c, g, or t
aggagcacgttcttttctgtacagagaagatagttcttctttcttggtcaagaaattcaaccattagttttttaaagaccagcttgggtggggtgcctgntgggggcagtgctggtctttcantgcagcncaggccccttgaagagtcccagtgtgtgttatgccccgagccagtcaagctgaagggagagcgggtgcgggggccctcctccgtgtcccagcccggcccctgggattgcgtcgcggcctctgcttgtcgacctgggtgctggctgtcctattttactactattgaccctgaaggccatcgaggagggcacgctggaggagatcgaagaggaggtccggcagaagaaatcatcacggaagcgcaagcgagacagcgacgccggctcctccaccccgaccaccagcacccgcagccgcgacaaggacgacgagagcaagaagcagaagaagcgcg

SEQ ID NO: 126346 - DNA, 945 bp, Homo Sapiens
cgggaactccaccccccgttccttagctctaccacctaccgtgccctgctgctgcaggggccatcacagtcttcttcgaaggcttaggccgccccaagcagcacagaccccgccgcttcctacggccgactctgggttcccttcaggtgttgttgtcggcagggctgtcagggcacatgcctggccggctggggtccccacccgcggagacggtcctagacccagtggggagtgctgtgtctcctgggtctgcccacccgtggccaagcaggaactccaggtgcagggcgggcctccaggtgcagggcgggccagaagccccctcatcggcccgcagctggctggcccagtgctcctggctgggggctcttgcgtggtgagagtaggggtccccccaggagccatgctggacccatgagcctcgctggggcctcctccccaggcagccaatgggccccagacaagcctttggtggggaacagaacctccgcatcgtgtagttttgtgacataaggagacctcctacttgagctgtctgtaccccagaatcaaacacagaacctcagaaccagatttaggacctcagaatcctgcactcaaggtggcaggacccaatttctgttttatatgttcatgaactttaaacctggaaacatgtccttactaggtgttttatcaaaaaaaagttttcatatttatctctatccctaaccccccaaaaataggatgtcttattattgaagatatttttaccccccctttccccgactcacaccacccgtaaacccttgtcggccgccttcgcccccttcaaaaaagctttcaaaaccatttccctttggccccccgggaccccgctagggaaggtgaaccatgggcccaaccctgatctccgtacggaaaatcccgggtccattgcccaaggcgctgggcgactcccccacc

SEQ ID NO: 126347 - DNA, 1427 bp, Homo Sapiens
  misc_feature (66)..(101): n is a, c, g, or t
  misc_feature (1332)..(1366): n is a, c, g, or t
gggtcagtgccaagctaatcgtaaccctcactaaagggaataagcttgcggccgcctgctcaggtnnnnnnnnnnnnnnnnnnnnnnnnnnnnnnnnnnnngagatttcccaggactggctttaatttgaaaaatctgattggggtctcttcccgtatcagagaaggaacagcccaagctatgaccccagggccagggaattcagtccccaccagaccctgtcattccatcactagggggtaattccaggctccccctgccagccctgagacaggaggacggatgtgaagttgcccaggactagattctgtctctccaaagtggcccaagccctgttctctgtactagggaagccagctgtgtcttttcgaggacagttggtccagccagcaggctcagttcagataccagacaaccattccagcacgagggctcagcgccctggccccggcggtcgctccagtgcctgtgtgcccaccagcacatccatgaggtagtccaattcggcctcgtccagctccggagcttcctccttgcccggcccatcctcagggcctggtttgaggccctcagaggctggtgcccaaagttcattgtcatacatagaggtgtcaatatcctcaaacaggccctcaagcccatcgtccagtagacagccagtggctgggcccagcaggtccaaggcacccaggctgggcgctgctcccccgatgctacggcctggtggcccctcgtctgccaagggttggggagcctgactcaggccctcaatgtggctgaggtcctccaggaggctggccatggaggctgaaagggcagcgtccgagcttgccagtaagttgtcagccacactgggggctgcaggtgggcctaggcacaggtggacacgggcagccgcgggtgccatggacgcctggatgcgccgcagagtgttcatcgaccagcaccaggtcgccgacaggtccggctcactctgctgccaggctgtggtggagacttgagacactgagaggtcaaagagggagctagaggccacggccgggggtgcctgtgccaccgctgtgtggccaggatctagaccaccaggagtcgactgccagaggttccttctcctcctcctcctcccgtttccgcttcagacccttgctcagcatcttgctcactagcggccaatcagcacgaagaggtagccacccacaaccaatcaggaaacggcggcggcagcatcgcttgttggctgtcctccggaaacccgcgcctgggtcgcgagacgcagttctccccggccgtaatggccgaattcccgggcatatgtccggtaccgtcgactgnnnnnnnnnnnnnnnnnnnnnnnnnnnnnnnnnnncgccgcttcctcgctcacaactcgctgcgctcgtcgttcggctcacgccgagccccataga

SEQ ID NO: 126348 - DNA, 771 bp, Homo Sapiens
cagagtgctagggctttattacaaatggagttgactgctagagagagccttctccaatctttcttctgtaccttcttccctcccaaagacatccctctaggggaggtcagtaggccattaggtaggaggaaatctggagagtgaaaaggggccttgcttttgtcaaagtcctctgaaacaaccactgagtctgaaggctggctccagttgagaatcttctagtggaagaggtttagctctcatcttcaaggtccttcatttctacatcctggggggcttttgtcttcttttgccttttgagctgtggttcactagtcctggctggctttgaaggggcttccacttccatggctgtcttctctttctgggcaagccggatctgctggaggagttttctgcgcttcttccctgacagtgtaatgttggcacgtgcactggacgcccgcttcttgaggtggtgccgcgtgatcagcccttggtctatcacagccccgaccacccggtgcctcagacgccgctcccgattcaacacccgccggcgtttgaacagcttcttcttcagctcctgccggggagaaagatgcgaatcagatggagtgggctcgccgcgacccggggcccctccaccaggcagccccggcccctcactgatcccatctcgtgcgagataaaagggctcaggaacgcttgaggaaaccaagtcgcggccccccacacagtcaccgttcggggccggttgatctttccccccggagctcccatagtcgcccc

SEQ ID NO: 126349 - DNA, 408 bp, Homo Sapiens
tgagctgtggttcactagtcctggctggctttgaaggggcttccactgagtaaagggaagaaggaagtattaacccaaataaatccaggattcccctcacccacctctgtcccagcctcaccttccatggctgtcttctctttctgggcaagccggatctgctggaggagttttctgcgcttcttccctgacagtgtaatgttggcacgtgcactggacgcccgcttcttgaggtggtgccgcgtgatcagcccttggtctatcacagccccgaccacccggtgcctcagacgccgctcccgattcaacacccgccggcgtttgaacagcttcttcttcagctccgttcggggccggttgatctttccccccggagctcccatagtcgcgattccactccagttcccc

SEQ ID NO: 126350 - DNA, 657 bp, Homo Sapiens
aaatcaattttttccccccgcgagtgctagggctttattacaaatggagttgactgctagagaggcccttctccaatctttcttctgtaccttcttccctcccaaagacatccctctaggggaggtcagtaggccattaggtaggaggaaatctggagagtgaaaaggggccttgcttttgtcaaagtcctctgaaacaaccactgagtctgaaggctggctccagttgagaatcttctagtggaagaggtttagctctcatcttcaaggtccttcatttctacatcctggggggcttttgtcttcttttgccttttgagctgtggttcactagtcctggctggctttgaaggggcttccacttccatggctgtcttctctttctgggcaagccggatctgctggaggagttttctgcgcttcttccctgacagtgtaatgttggcacgtgcactggacgcccgcttcttgaggtggtgccgcgtgatcagcccttggtctatcacagccccgaccacccggtgcctcagacgccgctcccgattcaacacccgccggcgtttgaacagcttcttcttcagctccgttcggggccggttgatctttccccccggagctcccatagtcgcgattccactccagttcacggtccgtccc

SEQ ID NO: 126351 - DNA, 689 bp, Homo Sapiens
  misc_feature (449)..(554): n is a, c, g, or t
  misc_feature (668)..(668): n is a, c, g, or t
gccttctcgtaattttatttttatcacaagaaggaaatacatagtgattcctgaaccggaagaatgaaccccatcttccaactgtcacggaattatcaccaacatattcaaaagagaaaaaaataaaaccaattgttgatatattgagtccccttgatgtgaatagctcaacataagtatcttattcaggatgggacagggccctccccacagacacgtgacaacagatcaaacatgcatttcctgtttcctgtttggtttgatctgtctgcctctcaggtgacttataatttttttcatcaagagaccagttttagaataaaaaataacttgagaagattcaagtaaaggacccaaaagctttaagagaatgaaaagcttccttgatatctctgggccctttcgctctagtccttccatcacagctattcctcctcgtcgtcgtcctnnnnnnnnnnnnnnnnnnnnnnnnnnnnnnnnnnnnnnnnnnnnnnnnnnnnnnnnnnnnnnnnnnnnnnnnnnnnnnnnnnnnnnnnnnnnnnnnnnnnnnnnnncagacttgcccttttgtcatcagatgtgctgctctcagactcctcctcctcccgagccaggagcttcttaaaaacttgaaactcctcaacagaagtacaggctgtcctggccanaactcagcttctgaaactctg

SEQ ID NO: 126352 - DNA, 698 bp, Homo Sapiens
  misc_feature (653)..(653): n is a, c, g, or t
ttaagcaaagcaactttattccttacaggcaggcaagggacaacagaagcctgggatgtagggtgaactggtcccccaaggctcaggaacctgcccagggcagatggagtctcacctgtgtgtcccacttcacactgcagctgagggaccctgaacgccctctgctgtcaagttttataccccaagggcaacttggatcattgggctaaagcgttgcaggacatcctgttctaggtgtgatgggaacagagtccaggtttaggacagttcctccttatctcaggacaacactcccagtacattctctagttattctgagaactacaaccaagaaaagagggaagcaccgggttggccaaggccatccggagacttgtcctgctgggtcatttaaaaagcttttctaggataacgttggctttccaagtggttttccaagctgatgtctttcccactgaggagaagctgtaggcctgtggactgccaggtaggaggaggttgaggtttagaggaaagaggagagcaggaatgggttgtttgcagtggggctgttcccatggactcaccaagaagaaatcgaggtgctgatggggctgcacaagtgcttatcagaaacagcaatagggagacatctattcaattcccttctgcangcggtatcagacttccacgtgtgggttcgctgcctcgttttatac

SEQ ID NO: 126353 - DNA, 907 bp, Homo Sapiens
cctctggaaaccctcacccccagggactgtgtagcataggggccttgcctggaccaggtcccatggctgcagctgctcccccctgagctgctctggcagggtctatacagagtgaaggaactaaaggaagagcggtgaggagggctcctaagtggcacaatgactgccaggaagtggctgttataggcaggggtttgcaagctacttttagtcaggaggccccacactatgccctggggctacttccctgccccttctgtgtttatgaagccccagtatctgcttcataaacaccagatgtgcatgtggggggcatctgtctcccacctgagcagaggctcccagtgcccactggggtgagtgagctgcaacgtcttctcagggaggtgaacaaggtgaaatgctgtaacactgactgttggaatctgggagaaagactgaaagaggcagtggtttcccctgtgtctgaatgagtgctcaattattccttgtggcagcatcccgcggatgatcagttgttgcttgcgggctttgttatttcaagtcaataaaaccacatccttaccaatagggagacatctattcaattcccttctggaagcggtatcagacttccacgtgtgggttcgctgcctcgttttatactagttgaaattcttatttgggcctcgggggacctctcttgcccagcatgccctgctgggctcactccattcggtctctccatggagttaaaagcaacaacagctttattcgagatgatggggaatcttccagaccaggtatgaccactgggaaaagtgactgtctggaaagctggggttgcctgatcaatggctttactgttcttctacaaacacctgtaccatatcactcgtagtttccgatcactaatcactcaacatac

SEQ ID NO: 126354 - DNA, 2107 bp, Homo Sapiens
aagaaaaaacatgattttgatcattgtaccacatgcctttataaacttttggtgttatgatgcaagatctaattattatcaaatgtagtgacgcttgttccaaattctaaaattgtttcaattatgccttggttaggggtgacaggaaggctctggtctttagcttatggtacatgcctttcgtcgtctcattttcgtctggagatcctgtatctcatttttcattattctgctttctttttgaaatccctcttttagtagttgctcctgttcctgaagtttaatagcgagggtcctctcttgctctttcagcaactggaccctgtcgttctccatcttctcagtcagttgtttcaagtgttcctgataactcctctccttctgttccatcatctgctcattctttctttgcatttcctgcaacatttttgctgaagcctgtgcagattcagcttttacacgttccacttcaatctccttttccttttctgtgagagtctggtctgtctgtagaattgcatcggtcatagactccttggatttcaagtatgtctgcagaatctcttcagcctgtatccccttccttggttcctcatagtactttttctccaggtcttgtagcttctgaataaagagacaatagccccctggtttcgaataaattcccgccttcacttcttcttctagaggactgaaaatgacctgaagtaaagctgagcaacgatctgatgatgcttcttgattctgtttacaaaagtcatcccgctttttgtctagctgggccgctaatttcttttgaaacagatggtccacatccttgaaagagttcttcatatagacttcatttggcttcctctcactaaccctggtgcaggtccagcagctcctggagggtttctgcgggcagctgcaccttctggcccatctgctggtcatagtgggcaatagccttttgcactgcggctgagttctctatctgggccaaggccaggactgcgttctccatgcagggcagatcccctctgctgatagcattgatataggtcagcactaggctctctagacgaggcccattgaccttgatgcctcctgaaagagttttagttttggaattgctaaagatgtaggaacagaagtctgctacttgttgcacaaattcggggtccagctcttcatcttgtagtttctcgagctgggcaagcttcctgcggtgaacgggccgatcgaagacacaagcattcttttctttttgggaagggaaatttaccgacgcatacagagtctgggcaggttaaaattttcatctttttgactggtacctttcttcagcttcagggagtatgtcaggtactcatctggtgtgaggggttgtccatctgcttccaagtccagggagaaatctctcagtgtccacacaaagtctgggaagaagctcacaaagtcagctgaatcctcaacctcattctcattctcatcaggtgaggattttgatcggattctatgtgtcagctctgtcacatagtacagttggtccatagcctgctggttgatggttcctatgctattgtacacgaaggtgctgctcaggaggacggccagggcgaagatccaggagtcattctggttgtcacccttctctacatctcccagaccctcggtgtccagcagaactaggatgtggcctggcttcttggggtggggcacacaccacatccagattcctttagtgtgagactgcaccgtggagcccagagagaagccctttttctttccagccagcttgttcatcaggtaggatttgcctgtgcggtagaggcccacaattgccaccaccaccataggctgtgtaatggcagaaaggatcttcagagcttctggattcgccatcagtcgcccattagtgttctcaatgaggcacattgggcctgtcatgtggatctctgatgccatgtccagggctgttcccttgtctgttctttttctccttagttcacgagcatctggctttctagcacttctgtgtctctcactggatcgctggacttttatttcacctgttccgtgttgtgtagctttctgggttttcctcattgatcaaataattaga

SEQ ID NO: 126355 - DNA, 3097 bp, Homo Sapiens
  misc_feature (39)..(39): n is a, c, g, or t
  misc_feature (49)..(49): n is a, c, g, or t
  misc_feature (77)..(77): n is a, c, g, or t
atctcgtgcttcatgtgagtcgacgcgtaatatacactngacaccgcgngcaatacgggcgtctcagccgcgcacgntgtagtgatgtgtatatattctccgtcctgtctgtggtgtatctctagtgtctcgctcacgtcattcgtgatgtgcactcgtggattctcaccttacacctctaatgcggtgcgctctaagtgtgctcttcccggcggttgccctctcatagactgcggtaccataggatcttgatactccaaaactcccgttctacgtcgaaatccgcttcgtcaacgtatgatgcgtacaatacgattagataatgcgggtcgtcacgtttaagccggtgcgcatagctgctgggcgtcacatgctacggagtcatgcacacctatgagggcggatgattgcggcacttcacttctccggctcctagaatgctaatctcctggaccgcgcatctatctctacagctcgccccaattcttcttgcgataattgttttgagatgattccttcctaccaccggtctcggcctgggcagcttctcacccgcagtggctcttagacttttcgccttctccgacgccctcttctatgggtgtccccgttccacgcggtcccgcgttcactgcacctgcgcctaggcccatcttagaagttcagctcaggagcccgtattaggtttacccccgggccgtttgtttatgtggggaaggatacccagcccgctcgtcccaggccccggaattggcctaggagaacccgcctatggcccatattccctttgaccttccgtggcccgcggcgcccagcggaagggtctagaaaaacttattcgagggccgaaggcggcccgacatgctttttcttatctttttcgatcgattataagattttgagttaagtttaatggcagttgtttgacactctgaagttgctcattcatgttgtttcttggggagagggagctggacaggcaaattttgctccttggacttttagagtatgttacatattggctccaatgatttgcttctcatctggatatcccatatgtctttttgaagtctcttgctctcattctcgaatccctccttgagaaggcgttcctgttcctgaagtttaagagcgagggtcttctcttgctctgccattaactgggccctgtccctctccatcttctcagtcaattgtttcacatgttcctgataactcttctctttctgttccatcatctcctcattcttcttttgtatttcctccaacattttctttgcagcttctgcagattcagcctttatacgttccacttcaatcgctttttccttttctgagagtgactgatcagtctgtagaagtgcatcagccacatcctccttggactccaaatattttttcagcacctctttggcctgtatccccttccttggcacctggtagtacttattcttcagctcctgcagcttctgagtaaagagacggtaacctcctggtttagaaaatgttccctgcttgacatcttcttctaaagggccaaatatatcctgaagtaaagccatgcaacaatctgatgatgctttggaattctgcttacaaaagtcatctcgccttgcttccaactgggcccctaatttcctctggaacatttggtccacatccttgaaagagttcttcatgaagacttcaatggcctctctctcactgtccctgtgcaggtccagcagctcctggagggtttccgtgggcagctgcaccttctggcccatctgctgttcatagtgggcaatagccttttccactgcggctgagttctctatctgggccaaggccaggactgcgttctccatgcagggtagatccccactgccgatggcattgacgtaggtcagcaccaggctctctagacgaggcccattgactgcaatgccacctgaaagagtcttgacattggaatggctgaggatgtaggaacaaaattctgcaacttgttctatgaaatcagggttcagctcttcttcctttagctgctctaggtgagcaaggtccttcttaggagcgggccattcgaagacgaagccctttctcttggggaagaactttcggatgcacaaccgaggatcattaaagcttttgcttttcttatcagtacctttcttagctttagcgaaagctccaagtagtcatcagcagtgatgggttctccatctacttccagttccagggtgaaatctctgagagtccacacaaatgctggaaaaaagctcacaaagtcagctgagtcgtctacagaattgttaccaggtgaggagtttgccttgattcgatctgtcagctctgtcacatagtgaagttggtccatggcctgctggttgatggttcccatgctattgtacacgaaggtgctgctcaggaggatggccaaggcaaagatccaggagtcattctcattgtcacccttctctatatctcccaggccctcagtgtcgagcagaactagggtgtgttctggcttcttgggatgaggcacacaccacatccagattcccttggtgtgagacttcactgtggagcctagagagaagccgtttttcttcccagccagcttgttcatcaggtaggatttgcctgtgcgatagaggcccacaatcgccaccaccaccacaggctgcgtaattgcagataggatcttcagagcttctggattcaccaccagctgccctttagtgttatcaatgaggctcattgggcccggcaagttgatctctggagccatgtccagggtgttgttccccagatcagagatcctttagcactggaaagaaggttgttccaatgtgaaagtcgagtccttttcctcctctcttttcttccgagtttggctgcactgctttctccctcttttttctctcacggtaactgtggacttttactttacccctccaacgtcctggggcttcctccaacgtccaggctctgtcaatgtcagagacctgacgagagacaagaataatgaggtaacctctgccaagaaatgcactaatatccccggccgtaatggccgaattcccgggcatatgtccgctaccgtcgactg

SEQ ID NO: 126356 - DNA, 537 bp, Homo Sapiens
tttaagaaaaaacatgattttgatcattgtaccacatgcctttataaacttttggtgttatgatgcaagatctaattattatcaaatgtagtgacgcttgttccaaattctaaaattgtttcaattatgccttggttaggggtgacaggaaggctctggtctttagcttatggtacatgcctttcgtcgtctcattttcgtctggagatcctgtatctcatttttcattattctgctttctttttgaaatccctcttttagtagttgctcctgttcctaaaaagggacaaacgaaggctgagtaaagtgtagcatcaggcaaattgaaacattctatctggtttccacattaaatgatttgttatttaattttctctgagtcacgcaagacgtaaatgtcatactttggcctatcattgaccaaagcacagccatgttccttaccctattatgtatatgacataacaccgaaataagcaaagtatcctcaaaatctcataaggtgtatgaatcatggattaggaaatttggtctaag

SEQ ID NO: 126357 - DNA, 765 bp, Homo Sapiens
tttttctcttaaaaataattttttattgagagatttacataaaataagcatatgataccaaaaagaaccctagcttaacaaccctaacacaaaaaattttcatttattttgaccatgagtcagcaaacttttctgtaaagggccagactgtaaattattttgctttgcaggtctctgtcctaactactaaactctaccactgtaacacaaaagcagccatatacaaaacataaacaaatgagcatagctgggttgcaatcttataaaaacaggacacaggtcctcaatttggatctatcataaaaaactttaataacactaacttttgctcattaaaatgtttgcttagttggaggtcaaattcttagcatcagatgtaactccacaaaagtaagaaaggtattccatcacttcactactatagaactgtataataatacatttctcatttgttacctttctaatgaactattctgagcagtctgaagtaactgactgcacagccttagattaccactcagggtggaactcttaacattcacttaagtaatacctacaaaggattttccattcaagttgatgggtatcaattccctgaatgctaataacagaactcaagaagcttccaacaaatgacaggaaaaacaattctgacttaatcctatagttatcacttagactcttcagtttcactttcttaagagtgactcaaaaagttccttaggcacacatactaataatcacagtcctgaaattttaaggccc

SEQ ID NO: 126358 - DNA, 1604 bp, Homo Sapiens
  misc_feature (1502)..(1518): n is a, c, g, or t
ggcgagagattttgtggagcgcatttaaggggtttttgttgtgactgctgccttgtatatatttattttctttcttggaactgggcctcgccctcctcccactgacatgatggcccagtccaaggccaatggctcgcactatgcgctgaccgccatcggcctggggatgctggtccttggggtgatcatggccatgtggaacctggtacccggcttcagcgcggccgagaagccaacagctcagggcagcaacaagaccgaggtgggtggcggcatcctcaagagcaagaccttctctgtggcctacgtgctggtcggggccggggtgatgctgctgctgctttctatctgcctgagtatcagggataagaggaagcagcggcagggcgaggacctggcccatgtccagcacccgacaggcgctgggcctcacgcccaggaggaagacagccaggaggaagaagaggaggatgaggaggctgcctcaaggtactatgttcccagctacgaggaagtgatgaacacaaactactcagaagcaaggggagaggagcagaacccgaggttgagcatctctctcccgtcctatgagtcactgacggggctcgacgagaccacccccacatccaccagggctgacgtggaggccagccctgggaacccccctgacaggcagaactctaagttggccaaacgactgaaaccactgaaagttcgaaggattaaatctgaaaagcttcacctcaaagactttaggatcaacctcccagacaaaaacgtccctcctccctcgatagagcctttgactcctccaccgcagtatgatgaagtccaggagaaggcccccgacacccggccgcccgactgaatggccccacttgagccacgctccctcctgtctctcacacctttcacccccaagactctaacaaagccacatgagccacagttgagaagcggaggggccagctgtgcatggagccatttggatggcggcgggcggggggggattctctgtatcaggagtgactttgttgccccacacagcctcctgctgcaggtgctttggaaagagatgctgccttggagctggtgaatctgtggaccacattcaagggtgtggcacaggcatcttcccatccttttcactccgaatcgctggcgacacattctcctttccagctaggaaagggttcctcgcggctggtttagattgtggttgtttgttttgcttctactaagactgttttgtttcaaaaaggaaacaagttttgtgtttgctgtctacgctggagtcctgaactgtgggtagaaaacacgacctggctttgtagaaaggacacagggctgttttatgaactaagcggtgaggctcaggtggcggctctcgcagagcccctgatgctgttgttctttgagggcttaaggcctgatgaacgtaggcacgtgatgcataatagtcttcaatggtacacttaactagtctcttctgtgtaacagcnnnnnnnnnnnnnnnnngaagaagaaagaaaactgtaggaaatgttctttttgaaatgccatgcaatggagctttttgtaataaaatattttatatgtagtac

SEQ ID NO: 126359 - DNA, 1239 bp, Homo Sapiens
tatattaagagctttaatatcagaaacttcaacttttatagatctttattcttcaaactttatgtcaaattacaaataaatagtccataccatgtagctctttatgatacacgtcttcaggcagaaaacagcaacaaccaagaacacatcggaaatgaactcacagtaaataaccaattttaagtagagaaaggatatatgacatttcagtgtggtccaatatgtacactgtttaaaagcggatccccctgtaaaacatcacagatgtacataattcttatgggaaaaaaagagcccacacatcagagatttttaaaagttttttcaaagttgtatcacagggactggttgtttaaaaatggcaaaatcttgagtattttagcagcaaacaagtaagttattccaggttaatctatttttaaacgttgctgaaaaagttgcaagctttagagaacattataaatatcaaatcgcactgctgaaaagcaaagtagtatttagaaagtagattactactttcaggtttgttctgtgtcagccaaaactttttcatgaagtttctgctaagaaggatgtcagtggaggagcagtggggaaataaatggaggtgggcaccagtcttggctctaagttgctaaacttactggaacatgtaatgcttacgaattcttcatagagcttagtttattcccaggtaaaccatagttcttaagaaccattcttttagatctgtatcttattgtcagatatttgtattagatttagcaatttgaaattccttaaaattttgctccccaaatatctcctggttaaaccagtatttcttatatgagtcataattgagtggttttttcattgaacagttttttcctcttgaaagggtaattttagaggatattattttttaagtcactaaagatagttttgcttacagagaaatttgtttaaaaggggactctacttaatttcacgttctactgtggcatttgacacctggcatctgacattttaggactgaaaggaattataaacttcatatgagaaaacaaacgaaactaaatagagtttaagcctgcctcattagatggttccatcagtgatcagctacataattcatctgacactatttcaagtcacaattatcagtatctctcctttgaagcattcacacttttttcctagatacaatcccggccgtaatggccgaattcccgggcatatgtccggtaccgtcgactg

SEQ ID NO: 126360 - DNA, 1641 bp, Homo Sapiens
  misc_feature (1525)..(1559): n is a, c, g, or t
taattttgcagaaccttgaaataaaacatgttttacagtaagttcacacacaggcttaatgcaaaccagagtaatgcacagatgattgccaagaccatattgacaaattgtgattagattataacgcatagtagcctgccttacattcagcaagttcaaacaggacacaaaaccagtcaactgaacacagagcagctctcttcagaagcacttccaatgagtgatgcagagatttcaaaaatacaaagcaggcaacttatatacagcaaatcctcacactgcctggacatgtgccacttttttgttgtttttaatatatttttccttcctggttgctaatttagactgaattcttaaggatttatcttgatgacttagaaaaatacacctgtcctttctcactttgtttcaggtagtacagtcatgaaattgagtaagtctcttaaaaaaatgaaagtccacagatcccattgtggaaggtttcaggaacccctccccaggtaatgatcacgggatcttcaacagctcaaggagtgctccaacagctccaaaataaccctcgtgttccgaaaaaagtgctttcaactgccccttggaccaataatccaaagcatatgccaaaagccgcatggcgatcgtattaattctcaagaaatttccaacaaataccacctggttaatgttttcattaagggcacacattcttgctattgagccaatgttgttggtgatggtgatcaaagtcgctctggccaggtcctctttactgacagcctctcgcttctccttgctcatcatgtttccaaagcttgaagccacagcccagcctggcagtccaaacctctcatagtcccctccataaatatctcgtactagtttatccactttggtgctatctccacgagatgccatttcaagagcttcttcaaaagtggtacagccagtaagaagacagcagagaccaaaaaaagttcctcctccaagactagtacctgtgacccgtttgtaattatctttggaatatactgctaagatgctaacccctgagccaatgttcaccagaagcagaggatacggatttttcaaatcaaatggtaacttctgacacttttcagaatcagcagggttttcaaagtaatagcactgtgaccgtccattgaatccgactgagtcaatgtataaaattcctttgatcaagcaatctagttcatccagtttgcaaagctgaagatcacctatctttgcgtccacacagagtcaggtccttcagctcgaggtgcacgtcccgaatgcctgtagacccataagccacattggaggtcaggtacttccgaatgcttttaagactttccacttcttcctcttcttcttcagcagtgatgtctttgggttcaaaatataccagcttgaccagagttccaccgatatccagtccaaaccatggaaaaagcggccgctttttcctcaggctttccccggccgtaatggccgaattcccgggcatatgtccggtaccgtcgactgnnnnnnnnnnnnnnnnnnnnnnnnnnnnnnnnnnncggccgcttcctcgctcaatacttcgctgcgctcgtcgttcggctctaagagctagcgccctatagtgattatcagttctta

SEQ ID NO: 126361 - DNA, 705 bp, Homo Sapiens
atgacatgaaatgattttaattatatttcaatctcattgttcatgatctaatgatgttccttttaggtagtttcttcctcaacgtatagcagatgccctaatttttcatactaaaggagcaataaaatgctacccttttagtggctctgattgtcgtccatacatctgaactagacaaccacctctagatggccaactcctatcactagcgtacctttaatcttcatttgactcaagaaaattcaagttccattagagatggaaattatttcaccacttgctactggcattatttttaacaatcaaattaccataaattgtatataagctaaaaaatgcatactgtgagaaaatcctgctcaaatttgtacgctccacctccagtggcacaaaagacagtgtggagactcgagaagtttttatctctgcccatttgaataaaagcaggcatgtcatgagtgggaaagcgtataaagtgcagattgcctttgcgtccacacagagtcaggtccttcagctcgaggtgcacgtcccgaatgcctgtagacccataagccacattggaggtcaggtacttccgaatgcttttaagactttccacttcttcctcttcttcttcagcagtgatgtctttgggttcaaaatataccagcttgaccagagttccaccgatatccagtccaaaccatggaaaaagcggccgca

SEQ ID NO: 126362 - DNA, 1047 bp, Homo Sapiens
  misc_feature (865)..(865): n is a, c, g, or t
  misc_feature (929)..(929): n is a, c, g, or t
  misc_feature (990)..(990): n is a, c, g, or t
ttttgacagtcccacacaaatcaatttttaataatttcaacttgccaccagctccaaatccagctgtcttggggatttatcaccagggaaaacactaaatgccccaggctgagctatccatccagtgatcagatgacccagcctgtgatctcttaagaacctacatctacacatggcagcctgttagtggcttctctggaactagtgcatagctgctcaatgttagagccagaactctggttcccagggagggcgagtatcccaaagagatttgaggttaaatggatggcagtccaggtggtcccagacatgctctcactgctgaattcctgcacttactcctagaatataccagtgctgtttgctcccgccatcctgagggctttagaaagtgctttaaaaagggaggatctcgaagcagcagctatttcagaggcagctgttgggaaagcctatagtggttccatggaggctatccaagggaggaaccacaagccaactccccataagtcaggagatttgcctgtggccccacccagaatctgagcggacagaatggaggccttatgcatgatgctcacctggcctgtttcagatggagggcaccctacccccagaaagttctctccctcccaggcactagaccatgacaggaatagattcctctccagaggaaattctcaggcatgttggatgtaaaaacagcaggggtaggtggtgggacacgtggaggggagctcatcatatgcaggagacgctgccataggagggggggctactggacgtgttggagctgatgggaagggaacaccaagtatgcacttgagggctccacaagctgtcatgtttattcatacaaccctangacagtaagcagttagaattacagtaaaggggtgacctattgtgctgatggtcaatgggcacancagggacagcctcttccgaatcttgtctccagggcaattcccataggagtcgtataattcnaacatgtcaaccgttccgtgtggatgttacgctcaaatctcacaacatgagccggac

SEQ ID NO: 126363 - DNA, 623 bp, Homo Sapiens
ttttgaatttagatatttatatatattcatcgacatagaagtccacgagatacattatttggtgaaaaatacacagtatagaacagcacttatatttggtcactcttatctatacatatatctatctgggtacacaggtacagggagatatctggaaggacattcaccaaagggctgacaatggttacaaaagggtgctgagtttcaggtaatttgtactttagtttttgtatcttcctttatttttgaaggtttaatgaaaagatgctcctttcataaaaagtataaagtcatcaaagaaatagacacatggagaatagacccttaagccagcagagaagagagcagggacagaggtcacaccattccccatccactgtgctggtatgcaagacctcttctccttcccaaaggaaaactgctttgtggattaattcatgcagttagaaacccacccccctctcctgttattcccattaccagactctgaatacagtcaaggactcatttagggctggactagatccttactgtggctcagaagcatcactgtgttctccagggacctcttttgacctctcctctgtatgtgtcagctcctgcagggtgatgatcagattctc

SEQ ID NO: 126364 - DNA, 1273 bp, Homo Sapiens
ttgtaattattgaaaattggagataaaatttttattacttgtaaacaaaattctgtcaaaaacctgacaaattaaacaatacaattaatatgtttaatagaactaattacatatgagaggcatccaaaatccattttttctatacaaacatggtttgatatacagtcattttatctgtgtattaattggtttatgaaataacaaatagaaaaatcaagtatgcattatcaagttaaagaagcaggagagatggagctataaaaacaaagagagaagaatgttgtaaggagggcttaacaaccaggataaatgttgtagaaagatcaattaaagtgatggcctagagatcacgggcttcctttggcagagccatgttggtgaagtgaaggaagtggaagccagaccacaatggttgaagaatgaatgtaatgtaagagccaagacatttatttgagtctgatagtaatgaaaaaggacaagaattttcttcttgctgttgtttttgtcatttcatgttcaaaaccctttatctcccatgtggtactgaaaactccaagatgggatctctgtttctgtgaggcctgtagtgcttagtacatccttgaatgtgtgaggctctcattggtataagtttaattcctgactgtggatgaaagctttaaaactttgcgggcaaaatacagaatgaatttcagtgagttcccatgtattaaacaaggtggcgctggctggagacatgctgtccctgtgcccacaggagtagcagtgctgtgctcatcttcctgacccgctcttcacagtcttcaccgcctttcttcaggagtctcccctttggcttttccacagctatgaaacccacgtagtcggacaccctaatgcttctcctgtagggtgtgtgatgaggaggtgagcttggctttggagtgctgggaacctgaggaattgccaaggacccagagcccagccctgaccacccagagagcccaaaacacaatgaacaaattgaatttccacaacaacagagtcatgcaagaccgccgcagcgtgtgccttttccttcccaatgagaatctctgaacatcatcataaatgtgagtagatctcaatataattctgatagctggaggatagtgtattttcaggtttgctggagggaaaaaactggactttaaataattaagacaaaatgattgtattaattgacttctattcttaatcactaatttcattttttatatttcccttgacttttgggggagaaatagtctttgtc

SEQ ID NO: 126365 - DNA, 1050 bp, Homo Sapiens
  misc_feature (141)..(172): n is a, c, g, or t
  misc_feature (426)..(439): n is a, c, g, or t
  misc_feature (796)..(882): n is a, c, g, or t
  misc_feature (911)..(1002): n is a, c, g, or t
ttgcaaactgaaaaaaatttatttcctcagtgttttatccactgtcaatactgtatttttgatgcaatatatttgccaaaagaactcagcttttattttccattttaaacaactacaatatttacaagctgttcagaatannnnnnnnnnnnnnnnnnnnnnnnnnnnnnnngtaagtacatatgtccttatctctggtttatactgaatgctggtaaaggccatgaatactttccagagcccatgatcagaaaaggaaaacccattttcctttcttacgttcactttcctagaatcattttcaatattcctccttccatttcctcatgcagagctcattgccagacttgtataggtttaatcagtttttacattttacttttacttaaactataagcttttaaaaagcataagcagacatgattnnnnnnnnnnnnnnatttctattattttggttgtagaatcaagcttcatagataaaaaatcttgttcaatcacaagtacactaaacccaagagtcatctggagcagccatcttatgctctatcactactctgttgtgaattccggggcaccacctcattgtgcaggtaaaactcaggaattcatccccatcacagtgttagatgacctttgttccttctagcttggctccactgaatcataaattgtcaggtacagagctgaggcatacgaaaaaaaggtataaccctatataataggtataagtcttagaacagagttgtcatataaccttgtggtgaccctcgttccgaatttcttggctcgagggcannnnnnnnnnnnnnnnnnnnnnnnnnnnnnnnnnnnnnnnnnnnnnnnnnnnnnnnnnnnnnnnnnnnnnnnnnnnnnnnnnnnnnntacgagccggagcataagtgtaaagctgnnnnnnnnnnnnnnnnnnnnnnnnnnnnnnnnnnnnnnnnnnnnnnnnnnnnnnnnnnnnnnnnnnnnnnnnnnnnnnnnnnnnnnnnnnnnacccccgggaaagcgtttgctatgggcgcctccgctcccgtcacgacc

SEQ ID NO: 126366 - DNA, 698 bp, Homo Sapiens
  misc_feature (655)..(655): n is a, c, g, or t
gaattatttcattccatttatttcacttgggataggattgaaagtcttgatgatgaggccatagcacagtcagaccatctgcttttccagttctgtgtttgcaccgtctgtgcatccatattccccccaaaaccaagaaggccagtgaaagtggggccagcacaatgccccaggagaacgtggaggaggcttccttgactgtggtgcgtagtgtctgaaaactcagggtattatggacaacacatttaaaatccatgtgcaaatcctctcttgtgacaggatcaaaaatcaatggcacttcaatgtagttctcattattttctgaatattcctggcgtggcccctcggtcacgcggcctcccgggtaggcgctctctatgtgggtgtcattggccgtccaccacagcatggtggttaagggtgtgccggttcccagaaacaccttacacgggattgtcagtcttgaccttgttttttcctcgtgggtgatatggctccctgtggtgtgtcttttaatgcacctggccccaccacgggttgagaatgccagccgttctccatcctatgccactcctatgaccttaaagatcttcctcagccgtaacaacctactaatcagtgtcacgtggccccacacccattccagtgcatccanagcactgattgggaactgggcctggaacttggctgggaagccc

SEQ ID NO: 126367 - DNA, 1384 bp, Homo Sapiens
ttttgaacacttacatccatttatttgggaaattgcttcacctgtaaactcacaactgataaggcacattattgcaaaactgtcggggtggagggagggaggcaactctaaggatcctgaaaaggggcaaagggcacacacttgcgatgatgtggaaaacatgtttctccttccctccccctactccagaacaccaaaggccacagtcttcaaagtctgctgcctccttcccccactctcgttatcaaggcttcttttaaagaaacacgttttaaacaatgaaatcctcggtgtgaaaggatcataccataaccaaaaaccatcacctggggatgcactcttcctatggaacgtgagtaattcccaagaattcatgtagaacaagaggcatagattaaagtcttggcaagactcttggccaaaccaaatcatcaacccagcagatgatgcccaaaagcagcagtctggtaagtcctgatgagttactcctgtggggtgcaggatcacagggctggtcagtttaggtgccaaggtccttctgtctttggaagcattaatccaggtctgtaacaattctgtactgcagctacaggaagtaatgacagctataggccattaagatacaacacaacaaagttatcagaagccaaggtttcctctttgaattaaaagataaattgaaagatacaattgtttagttactctaagcaaatacaacaatgttaaacattcagagggtatactgcctgatggccccatatactgaacccattctcctagcatgacacagaacggattcctgcagaaaggacagataaaatgtttgcctggtcatgattcaggtgagtcaagggccctgccccatccagatgggtaagaatttctccagaacatatccatgacatacagcgtttgctccattcatatttaatagtctgtttgcaatcagcttaactgtcaggacatgcgatcataaggaggtctgacatacatggtaatgtcagtgtgtctgaacacaagagcgtgacagaaatcatcatgtatgtgagcaacacgtggaagtcctaggcagttcgtcaacttgtttcacttggcttatgaagaggtaggtcatcagcaaagaagtacaaaaaaatgctcttcaagagactaacagaagatgaagagcggtgtcagtgatgtgagttcccgtgtcatcattggtactaaacatccacaaagatgcaacaggaggacatctgtcccagcagcctgtcactctgcaaaagcagtactctggacaaggacaatcagcatcttctcccaaggcagctcaggggctggcatgaggcaaatacaacaggctatcccgaactccttattagaccacaaaatacaaacagca

SEQ ID NO: 126368 - DNA, 532 bp, Homo Sapiens
atcattcatattttattaccatggttttgccatcttctatctaagagtagcatgcaagatcttgtaaaatgctttattggaaccaagaaatgttgcgcttaaagcttacaaaacagagacagctaaagctttctttcataagcaacaattgtcttctccatccccacctcattggaactgacatgatgaaggatttgaaagtttcataacttaactcagcgaagctcagtagtacatttagtattggttatacaacatttgtttaataaatgcaatgaacaaagctacacaggaattagatattgaagcagaaaaggtggttttacagtccctgcattaacctctaattcttactaccctggccaagaaagcattttcacctcctgcgctttccttcctgtgtgcttgtggttggttctttcttctcaggctttctcattctgatgctgagatagttctgttcacttagcttaacttgggacagtgacacagggtttgttctgtactttctttgtcaccccacccccacccc

SEQ ID NO: 126369 - DNA, 652 bp, Homo Sapiens
gtaaaatgctttattggaaccaagaaatgttgcgcttaaagcttacaaaacagagacagctaaagctttctttcataagcaacaattgtcttctccatccccacctcattggaactgacatgatgaaggatttgaaagtttcataacttaactcagcgaagctcagtagtacatttagtattggttatacaacatttgtttaataaatgcaatgaacaaagctacacaggaattagatattgaagcagaaaaggtggttttacagtccctgcattaacctctaattctttcttttccaccccaccccccaccgcaatcctcagtccccttcctaggaccattttctactcctagcattaagaggactcatcgttatatacttggagatggtccagttctgatagagtcccctggaagactcaattctacgtcaccctcatgatttcctgttaattccactacggctaatgttctaggaagacacccttatctctgggctcagatgggaacacctcccttagactatcctggactacctgctatttctcagccatgctttcattggtcccactgaattccctagatccccagcagttcccacactctgtatggtcctgcctcaaccattaattctacttatccatttatttag

SEQ ID NO: 126370 - DNA, 698 bp, Homo Sapiens
  misc_feature (669)..(670): n is a, c, g, or t
cttcttttaaaaaataaatatttataaacttaaggaagattcaaagaatcagggtatcttttcctccaaaaacacaaatgtcccgtgtaagtcaaaccaaggtgcgaccaccaacccatgaatgaagtcccctccccctgcagctacagggttgaggggcaggtgggcaggggagctgctctctctcctgccttcagtcccccttggtgatgaggtcctcaatgtaggcgtccagctcatcatctgtgttgatgtctatgtcctcctgcaccttttgcaggagtgccacgatgttggtcctcagcttctgcagcttctcctccgtctcgcggagcttcctctcggaggtgcgcaggctttcctcggaggccttggcccgggagtcagcacggctctggtaggaattgcacaggttttggagccctacttcatattgcttgaagtactccttcagaggaaaagatattagctcatctgaattcatagcactcagctgcttcttggagatggggaaacttggaggcaggaagtaccgtaaacaattccggaggatctggacaagcaggtcgatggtctcgtgattggtgctcagggcagtggtgtcaggctcaatgcggaggcattcggaagtggagggctctgcgacagctatggctgctgggcacaggnncactcctcctcccgctcctgttgtgtac

SEQ ID NO: 126371 - DNA, 827 bp, Homo Sapiens
  misc_feature (53)..(56): n is a, c, g, or t
  misc_feature (58)..(58): n is a, c, g, or t
  misc_feature (60)..(60): n is a, c, g, or t
  misc_feature (63)..(79): n is a, c, g, or t
atggttcttggaaagctttcttgagggggccggagggcggcccgacatttttnnnntntnttnnnnnnnnnnnnnnnnnggggtaaaagagtattttaattcttgtccttggaagccataaagattatacatgacttggaaatgagactgtaccaaatgatggccaaagaagaatcatcctttctactccttctctttcgtctggtcactcagaaatataatattatcagctatgattgttgttgcttgtcgcctcacattatttttatccatgtattcaccatagtctattttcccttccaaataaattcgagacccctttttcacatattgatatgccacgtctctgaggcctggccggaatactgatattctgtgccatgttgtcttttgactgacatcacccagttggtaaacttcactatcccctgatcgccacatctcattagttgctagagaaaatattgtgactggattttttccttccacctgtctcaagacagggtcctgacccactcgcccaagtaagtgcacacgattcagggatctttcaagaaccaaactggtagttgtttcggactcatgtcttacaaactgacgaagtacctgtaatacaggtcttcgaaacatggcttctattttcttttcttacagtctaatctttaggcttttcacagaaacacctcccgacccacgcaggatcacgcgcagccaaaacacacgactccagcacttccttcgcgctggctatcccttcctccctcacctgacgatctccccggccgtaatggccgaattcccgggcatatgtccggtaccgtcgactg

SEQ ID NO: 126372 - DNA, 860 bp, Homo Sapiens
  misc_feature (148)..(152): n is a, c, g, or t
  misc_feature (156)..(173): n is a, c, g, or t
ggtggagaaatcccaggccttaggtccatggcccgggttctccttagggaaccaggttatggaccatgtttccctttccttactggggcccgggcgccaaacgaatggtttagaaaggttttggagggccgaggcggccgacatgttnnnnntttnnnnnnnnnnnnnnnnnnggcgtaaaagagtattttaattcttgtccttggaagccataaagattatacatgacttggaaatgagactgtaccaaatgatggccaaagaagaatcatcctttctactccttctctttcgtctggtcactcagaaatataatattatcagctatgattgttgttgcttgtcgcctcacattatttttatccatgtattcaccatagtctattttcccttccaaataaattcgagacccctttttcacatattgatatgccacgtctctgaggcctggccggaatactgatattctgtgccatgttgtcttttgactgacatcacccagttggtaaacttcactatcccctgatcgccacatctcattagttgctagagaaaatattgtgactggattttttccttccacctgtctcaagacagggtcctgacccactcgcccaagtaagtgcacacgattcagggatctttcaagaaccaaactggtagttgtttcggactcatgtcttacaaactgacgaagtacctgtaatacaggtcttcgaaacatggcttctattttcttttcttacagtctaatctttaggcttttcctgacgatctaacccgagcagcccagccacgcaggggatcacttccggcgcacagggaacgcaaagctcgccagaggaaaaaggaaacagccc

SEQ ID NO: 126373 - DNA, 560 bp, Homo Sapiens
ttttttacgtaaaagagtattttaattcttgtccttggaagccataaagattatacatgacttggaaatgagactgtaccaaatgatggccaaagaagaatcatcctttctactccttctctttcgtctggtcactcagaaatataatattatctgtaaaaaagccaaaatgtaaatattaatttcagaactctttctccatctcattcaataattctcctctaatacatataactttagtgctgttcattaaaaggattttagccatcttttcaaaatattaaatcacttgctatgctcacgagaggtatatatacagttggcataagtggagctacaagttaggcactggctgcttttcgaacaattcagatcttgttagaagaggtgggatatttcttgtcttccagtcttctcagaaacaatttcctgcaaaagaactggtcacaaaattggatgcttgcaatggtcaggcagattccacgacactaggcagcacatcctcagagaaaaggacaaaagtgtatcacattctacactctgggggtctaagagaaaga

SEQ ID NO: 126374 - DNA, 889 bp, Homo Sapiens
  misc_feature (37)..(37): n is a, c, g, or t
  misc_feature (444)..(465): n is a, c, g, or t
ccacaaatcatattttattagctgtgcaataccaccnttccattcatggcctgtgttttaattaaatttcataaactaccagtacaaatcaatacaatgcattttttaacacaccaacagcttgaatgttcttgaagcttttaaacaatgagtttactgtgagcaaacagaagcaaggactcaaagagataattagctcatgcatctggtgctggctaataattttcacatgaatgaagaaaccactctatgttaactgtatttatttttaaaaaatagtttgaaatgggtaataaaatgcaattttcagaagcatcttggtgatcgagtagaactgcttaatttaaaaaataattcagttacttccacctggcctggggtggataacatgtagcaaaaacttccatcccactagattctggcagatggattgatctttcacannnnnnnnnnnnnnnnnnnnnnttttctccatttcttcttatggaagccagaagccaggaggagcaccctgttttgaaaagagattgtttggttcacacggtatactttggtttatttaaacaggtaagaaagcggtccctacttctgaggagaaaatgtggtttctgacttttaggtacatcacgatatcaccagtctgaatgagtttccttttctgtaaagcagaaagtgtcattttcttttcctccagtgttcagttgctcctcttcgaaaatactcttcagagaaagtatctgtacgtctgtattagtacaaaccattccttccctatgtctcaatgcctgacattcagtgcctgacagaatcagcatttggcatgtccttggatatggcatcaatttgatgctttgaactgaaagttctcataatgcatctcaaaatatct

SEQ ID NO: 126375 - DNA, 1233 bp, Homo Sapiens
acttgaaacaacttttcaaataagtttatttgaagcaaaataaactactgccaagaaactttatgaaagttccatctcaaaagggtcaaaaaaggggaattaactgctatgaattctttgcattcagggcgtcaaagacgcggcctgtgatgcgtgatgacgaattcttgaatgagaaagcatgtagacagtattcctatggcagaatatttacagcactactttcaatgaagtgcttcttccataaacatttgaaatgagatgaacaccaaatcttccacttctttctaactgtctattgctattgtgcttaggttcggcattggatatatgaacgctgattcctttaatgatcaagtcctctccacaaagagactgcgcaatctgatcatctgcaaatgtaacaaaggcaaaggccctgaatggcttggggatgaagacatccatcacatccccgtactgagagaagaactcccgcagctcatcctcagtcatgtcctctgtacagcgccccacaaacacttttctgcttctcaaaggctcatcttggctttgcttagaattaggaagtttgcagtcacaccatcgtccatctatcatatgtcgctgtgacattactttcacttgtgtttcatattccgtgaaacgaacaaagccaaacccctttgaatgaccagtcttaagatctttcttgacctgcaccataagaacttctgccaaaggtactaaaatactctttcaggtcctgttcgtttgttttccatgggaggcccaacggtattaaatgggatgttttctggactgctcttttcgctttcactggtgatgaagcatctgtctcatccatttttcttttgttatcttttggatagttgacaacatacgccagatttccccagccagcatctggggcatgcagaattccttctaccagccggacacctctcatacactgagacactggattcctgtagcgaagcccacacgcccctggaaactgggctgtaaccgtggagagcagcaccgtcccatcgtcttccgatggtatttcaatgggctcatcgttctcatcttcggttacccgaatatattcagacatcttttacttttcccgctaggccgctgctgggaagcccgacagggacaccgaagcagcgacggacccaagcgcagcccagccacccccggccgtaatggccgaattcccgggcatatgtccggtaccgtcgactg

SEQ ID NO: 126376 - DNA, 2126 bp, Homo Sapiens
tttatttaaatcagttttatttaagaatttccaacaatgacaactcttataaaaagcatccaagcacaggacacagaactgcagcaaacagcattcttatgggtagctaacagacattagaacttccacccttctttgagacacctgagctcactggtgaactctgcttcaagtcctcctgcaaagcacaccacaagctcagtccatgttctcagcccatcagcttcagttcacattgccacacttacatatcagtaacagaagagaacacacaccatacagcattcacagcagttgacaaaggggtagggggagtacaagtatcatttcacttaacacattcatctaatgtgggttatctaagaacaaaaactcacttaaaagtcttccaacagatgtggatgtcctttgaatgcaaaaaacattcgtacattatttgctatcattgctctctgcacactctctcaccaaagccacaggattgagagacacatctcgccaagttaaaaaatatccattatgcaccaccaagtctctgcacgcgctctctccttttctcgctcatactagcctttcatgcctcggcaccaccatcaatcccacacaaggtttcaaaagttcagacagccttctggttccatatcacagccttgcgttcatagcgttgatacgactccatgaaataaagagtagcggataaaaatgggacacccaccgtcaaagacgcggcctgtgatgcgtgatgacgaattcttgaatgagaaagcatgtagacagtattcctatggcagaatatttacagcactactttcaatgaagtgcttcttccataaacatttgaaatgagatgaactgcagagattaaatgaaggcttcatattgtacttttgtgtatgaggggagacaagtgttaaaaaacaaaacaaaagaaccaaacactgtgacaccatgatctcctaaaaggagattttcttaaggaaaaaaatccatatggtggggttcaaattaaaacaaggggtaaagaatgtagttctaatcaatggtttccgttttgaacatgcaaagaattcacttgacaagtccagggataaaatattacaggagaaaccttttgatatcaattgtagtgtgttggtttaccaatcaggcaaacagcagttcactttcaaccactcaatatttcaacctttcatgtaacaaaacttataaaattcctttagctcttcctttttctaaagaaaaatgtcaaaaatactgctgaatatactccacactgaacaaaccaattttgaaaattcttagtacatatgtattttacaatatacttaccatgagtttagaaaaatttgaattcccaccattctataccaaccaaccacaaccccactgtctacattccccagccagaagacttagaatccatgcttgagccaaagcctccattaaaaccactgcccgaccctgcattggatgctgatccccaaccaattgctgcaccagaattagagccactataagagttatttccagaaccgaaggcctggtttggctccctctgcatgttgccttggttttggttattacccgatgggcctgactggttctgctggctggctaacatgcccatcataccccaactgctctgtagtgctgcctgggcggcagccatcatggctggattaatgctgaacgcaccaaagttcatcccaccacccatattactaccttgattgtttcccaaaccagctccaccccctctgctattaccaaatccaccctgattcccaaagccacctggattaccaccaaatcttccacttctttctaactgtctattgctattgtgcttaggttcggcattggatatatgaacgctgattcctttaatgatcaagtcctctccaccccgagactgcgcaatctgatcatctgcaaatgtaacaaaggcaaaggccctgaatggcttggggatgaagacatccatcacatccccgtactgagagaagaactcccgcagctcatcctcagtcatgtcctctgtacagcgccccacaaacacttttctgcttctcaaaggctcatcttggctttgcttagaattaggaagtttgcagtcacaccatcgt

SEQ ID NO: 126377 - DNA, 996 bp, Homo Sapiens
  misc_feature (85)..(119): n is a, c, g, or t
gaagaaatgtatcgactcactatagggcgctagcgtcttcgagccgaacgacgagcgcagcgagtagtgagcgaggaagcggcgnnnnnnnnnnnnnnnnnnnnnnnnnnnnnnnnnnncagtcgacggtaccggacatatgcccgggaattcggccattacggccgggggccattttgtgggagcgaagcggtggctgggctgcgcttgggtccgtcgctgcttcggtgtccctgtcgggcttcccagcagcggcctagcgggaaaagtaaaagatgtctgaatatattcgggtaaccgaagatgagaacgatgagcccattgaaataccatcggaagacgatgggacggtgctgctctccacggttacagcccagtttccaggggcgtgtgggcttcgctacaggaatccagtgtctcagtgtatgagaggtgtccggctggtagaaggaattctgcatgccccagatgctggctggggaaatctggtgtatgttgtcaactatccaaaagataacaaaagaaaaatggatgagacagatgcttcatcagcagtgaaagtgaaaagagcagtccagaaaacatccgatttaatagtgttgggtctcccatggaaaacaaccgaacaggacctgaaagagtattttagtacctttggagaagttcttatggtgcaggtcaagaaagatcttaagactggtcattcaaaggggttgggctttgttcgttttacggaatatgaaacacaagtgaaaagtaatgtcacagcgacctatgattatatggacgatggtgtgactgggaacttcctaattctaagcaaaagcgaagatgagccttttgagaaagcagaaaaagtggttgtgggggcgttgtacagcgggacatgactggaggttgagctgcgggaagttctcctctcaagtaacggggatgtgacggaattgtcttcatcccaaggcccttcagggccttggcctttgttacttggcatgc

SEQ ID NO: 126378 - DNA, 1097 bp, Homo Sapiens
  misc_feature (126)..(134): n is a, c, g, or t
ttgaattttatccaaatggttatttattctaaaactggaagctactttgcctacattttcgccagaatggtgtaatgagaacaggggaggaaaaagttacagatgtaaacaatgacacagttacannnnnnnnnaaaatggtaaaacccctttttactggccacttccaagaatgctttacaggttgtgcaaaaacatttacaggctccatgtggtgtttttctcacaagctttcctgtctacaactacaacagacgtctgataaaacactaaacaagtcttctaaggaaaacaaggctagggattcctctggttaccataatccacattttcccccttaacatagtttttcataataaaaagacagaaacaaaacccggacatctactgttgttgcaaatgatctcttggactaaaccaacaaggatgtggcagtttcactttccacccacctagaaaaacagttttgtaaaaaagattactttctagtgtcaaatatcaacagcgagtacctcccctaacccctgctggaaaaaaactcaacttgatttagtttagtccccttgcccctaagggccctagcatccccatccatgtcacagactacaagaaagatgctatttgcaggactaaacatctgaaaaggggtggcagccactgcctcaggaaattcaattttctattataacataatcttgccctaagggaatttctttgggctccagtttttactccttgccttgacattataagcaaagctttctcaaactcccttaataataatacaaagttaatgtgttacagaaaaattcatgcaatcactccactgccacacagaaatccatttgaggacaccgcagggaagcaggtgccaagagaaaggacatgactatgagtaagcaaacttatctcctaccagccccattccagccttggggtcagaggtatttgggcggaagggtgtgtcatgacagacaaggacactagaggccagaataagggtctgtacacctgaacaagggctgcagggcagtaacagtgggaggaggagaggaagaccaaatcagcccacaattttaaacagagcggacgcgtgg

SEQ ID NO: 126379 - DNA, 1603 bp, Homo Sapiens
  misc_feature (439)..(522): n is a, c, g, or t
  misc_feature (1343)..(1376): n is a, c, g, or t
cgtaaactgccttcctttatttatatttgcaatatgaaatagaagctcggcacaaacgcacgcacactcacaccagcctgggaggagggagctggggacaaggtcacttggcaacagggctgggacctcagaccctcaaggcccctggggctgttgccggggaggcccctgctccccagagccggactggcctggttgaaagtgcagggtctgggcaaaggcacggcccccactcgggaccctctggcacccccacccacgctgggccgtcccccatggtggacctgagctaaaaggccgggtgtgggcgtggccgtctgcgctgcagcgtgggacagctgggcacgtgggtggcaaccttgggacccctaacaccagctcccgctgggacggaacagggaaggctgtgctttggagccgccagcccagttcggtgtcnnnnnnnnnnnnnnnnnnnnnnnnnnnnnnnnnnnnnnnnnnnnnnnnnnnnnnnnnnnnnnnnnnnnnnnnnnnnnnnnnnnngtatctttattctaggaggcaaccgctccaaaaacttctcttctccagtgcaaatgggggtgggttgggcctgtctccctggcaccagcctcttgggggtccagaggagagaatgtgggggtgtcagggtgatgagggcaatgggggccatcgtgggacccgccctgccccccaccccgggagatccacgggaggacggaagatttggccgccgctgccgcaccaggcagctattgggagcctggggatgcaggcccttccggtgcagagccattgtgtatcggaggaggcgtgagggcctgggcactctggctttggggaagccccaagggctctgggctcttctccccttctgtggtctgggggggctggtgggccccggaggctgggacagaggtagaggggtctctggttgcactgtccgaggagctgggggcagaacggatcccgtggaaggtggcctgaaggtccccgatgctaaccaaggcctggcaaggggctgagggctccgtgactttgctgccttctgtggcttcctgaggtgctgaggggggtgtggggtcctgagacctgagctgcagggcgtcacgggcaggagggctggccaggctctgagtggggaggccctggggcacactgaggggcccctgtggggctggaggcccagtgtgcagctcttcctccccggagactcgggggctggtcggggcatctgtaggcactgggtcaaaggtggctgtccagctggggcctggaggctgagggccagggctggggtaggacagaggggtggcccctccacgggctgcacagccaatgcnnnnnnnnnnnnnnnnnnnnnnnnnnnnnnnnnnttcttcgtcctcactgtctgtgctgcctccactccggacaccaggtggctggcccagacgggcccccctggccagctggctgccctgccaggcgccatcttctccatcagactcccctgagccctgggcctcttcctcgtcctcctcttcctcatcatcatcaaactgctggatgcggtccttgtagcatatctcaagtaggttggcgttggggttctcatcgtcag

SEQ ID NO: 126380 - DNA, 722 bp, Homo Sapiens
  misc_feature (172)..(180): n is a, c, g, or t
ttttattttttaaatttttttattgtttaaaaatctgggttgaacagtcaagctgcatatacataagtgaacccaaacaacaacaacaaccacctttaaaatataacccaggtccttacaaattgttaacagactactggactatcaactagagggccggactggaggaacnnnnnnnnntcccttccaacgctgacactctaggacagaaaataggagtgacacccactttcccactcatgtgcccccacatgcacagggatgtatgcacaggtgcgaccatctgggggaagaaggaaaaagctggagacggtacaataacatcattcacgttactgaccgcttcctacatcgttcagaatgatgtttccagtgttaagaaattatgggtatcctctatattaaaacaaaattacagaacagtgaaaacgttaggacagttttgttgctattatttggaaaatacagccccatagaaaatattaaatttttaaataaaagcattgcgcttcttatctaagtagttaaattgaacagacttttgttagtcacagctgagcaagaggaccctgggacaggttatacttggaatctacccagaagagattgtctccatctctttgggaagatgttttgctctgtttcagaatgaaaaactaaggaaatgcacagcagtccattgcctattctattgctaaatttacagcaacatgctggtgtca

SEQ ID NO: 126381 - DNA, 1072 bp, Homo Sapiens
  misc_feature (755)..(755): n is a, c, g, or t
  misc_feature (783)..(783): n is a, c, g, or t
  misc_feature (851)..(851): n is a, c, g, or t
  misc_feature (856)..(856): n is a, c, g, or t
  misc_feature (860)..(861): n is a, c, g, or t
  misc_feature (874)..(874): n is a, c, g, or t
  misc_feature (878)..(981): n is a, c, g, or t
  misc_feature (993)..(993): n is a, c, g, or t
ttttgtgaaaaaccaaacctcaaaaagccactttaattccggcctaacagcgccaggtgcaatgtctggggacagactctgggtacaatgctgtgtggcgaccactcactcacacacggctccaagaaggcccccaaggggggacttaccttcagggggctgagccaagggggaaaggggtggccccagaacaggggaaggggcaggcatggggggaaaaggtgctacttcttggcaaaggagatcttcatggcgttgttctgcgtgatcttaaagccctgcagggcatcgcgagctgcccctgcctgtacctcattgtcaaactccacgaaggcgatgtcatgccgcccgggtaccagacggacctccttgaagccagggaactgattgaaaagcatggacagcatgagctcgttggtctcctctggcaggttggtgaggaacaagatgtgattcggtggattctcagaaagaggctgggcagggggcatctgtcctggcataagctgctgcgggggcatggcccctggtgggatctggccaggtgcaaggcctggcggggggatcataccatggggcggcatgtagggcggctggcccggcatgtggtgcataattgcggggcgcctgagtcatcggcggcatgccccgggacctggccctgggacaggccccaccacgggggtggctcgccccgccttgcacaggcttcttgggtggccggggtctcctggctcttgggcttcctcttctcncgcttgcggtcccgctccacgaaggtgnctttcatcttggcaatgatatctgagtcggtcttggcatactggatacgcataggtttgtccctcgtngcganttcnntggctcgaggggncaannnnnnnnnnnnnnnnnnnnnnnnnnnnnnnnnnnnnnnnnnnnnnnnnnnnnnnnnnnnnnnnnnnnnnnnnnnnnnnnnnnnnnnnnnnnnnnnnnnnnnnngtggtaagctgnggtgcctatgagtgactactcacatattgcgtgcctcatgccgctttcatcggaactgctgcactgatatgatcggacg

SEQ ID NO: 126382 - DNA, 844 bp, Homo Sapiens
aaaaatgttttaatattttaaactaaaatttttaacttttttgtttgaagctttaacacatgtacagtcacgcgaccaccaccacagtccacacacagaatggctccacccccaaatctccttagtgccacacctgaccacggcgccttcccccaaccttccttcacctcttcccacccccatggtgcccaatgtgtcagtctctgcatttcctggtggctggtggtgtcaagcctcttctcctgtgcccaacagtcaatgctgtgtcattgctggtgcatgtctgatcaggtcttttccactttttagttggactgttttcttactgttgagttttaagagttctctgtgtattccaaatacaggtccttagttgacaggtgatttgtgaatattttctcctcatcttttcattcttttcacactgtctttggtagttcaaacgtacagtttttatgtggacttaagtttttcattctctaaatacccaacagtgggattgctgggtcatgtggctgtgtacattgaactttataggaaaccaccatgccgtcttccatttccagcaggtccacaccctggcagcttggggcaccaccagcattctcttgcactgcggctgtggtgcaggtgcctcgtgtcctgcgtggtggctgaatctgcatttcctggtggctggtggtgtcaagcctcttctcctgtgcccaacagtcaatgctgtgtcattgctggtgcatgtctgatcaggtcttttccactttttagttggactgttttcttactgttgagttttaagagttctctgtgtattccaaatacaggtccttagttgacaggtgatttg

SEQ ID NO: 126383 - DNA, 620 bp, Homo Sapiens
cacacacaacctgtagtatattgtaggcagtccaccccaaagtggctgctccttgcatgcctgcccatctcggcagaatgggcattgtgaggctggggctgctgtgcctaaaggtctcagtcctgttcgtttgtttagtcagctgccacagctcttgcatgatctgggggtgcagaaaagacttgcatttgacccctgccctcatgacacagattgtcacagtcttccagggtaggaccagcttcctgcaagggatggtggtgggtggcagcagatcccagacacctgtgtgggccaggctgcagagcagggtgggggctgtgaggggctggccgggagggaggtgcatcaccggggccttgtgctgttagctttcagagacagcctatggtaatgacaagcaggcagcccaggcgcagtggctcacacctgtaatccagcactctgggaggctgaggcgggaggaggggtctcactatgttgcccaggttggttcgagaccagcctgtgagacctccttctccacaaaaaattcagaactagccgtgcatagtgggcacagctgtagtcccagttactgggcaggctgagaatggaggatcacctgagcccagaattca

SEQ ID NO: 126384 - DNA, 793 bp, Homo Sapiens
  misc_feature (706)..(729): n is a, c, g, or t
ttttttcaagtgtaaaagctagagatttattgttattttatgattaataaattgtcaaattagttatgacactatcccacactgaataccaccatttgccagtacagaagtttttaaaccaaactgaggcataaagcagaaagagcaaagacacatgaatacccttcttaacaatctcttctacttatgcctccaccgtaacctttgtacttgttttcctcctggggaaagtgtcagaacagtgcaaggactggtgggtaacctggcctcttaacctttttaatagcaagcaacatacagaagtaatgcaatcaacttgtatttcccttgattttattggtctgaattcattttaggttactttaacattttaatttcctgtaactgtacatgagagaatataatcacctaagagaatactgaaccagagtcagccaaatgtatcactgaccctcaattatgttttaattggtcctaaaggaatgtaccaccccaacagtttgggagttaggcaaacagaattctttggggggagggaagaaaaaggctataaaacagccaaatgtactcaacatcattaaaacggctctttgtttttcacccctgaatgatacttctttactacactatatgcacagaaatcctaacagaatcttggttgccagtattatttaagctggccccatcaaggacagattccggctgnnnnnnnnnnnnnnnnnnnnnnnntttctctgaggctctgaaaagcacaatatttaactatttcttaatagaactaccaaaacacttc

SEQ ID NO: 126385 - DNA, 1094 bp, Homo Sapiens
  misc_feature (107)..(116): n is a, c, g, or t
  misc_feature (236)..(248): n is a, c, g, or t
  misc_feature (382)..(399): n is a, c, g, or t
  misc_feature (406)..(426): n is a, c, g, or t
tgaaaccctttgccgggggcctttcccctcccggggggccccttcccctgaaaggcgaaggtgtggggcaaaacacaataaggtggtttccctcccccttccggggnnnnnnnnnntgtggcccgggcattgcacatggtgggtggggtcaatgccccccaaaatttcgggtgtcccggggaacccaatccctagcccggcgggtggcaatcttgccattcggtttgttcccggtnnnnnnnnnnnnnacagtccttggggaaaatgtgtcttgtctcccatttggataaaaggaacccacccaacaaacaatcccatcactggaatttcccaccgcttgtggagccgtgtcgtatgccttagtaaactttgtcccaattcnnnnnnnnnnnnnnnnnnctcgagnnnnnnnnnnnnnnnnnnnnnagtagcgcagttttattttctgtagtaacaaacatttaagaaccagataaaacatgaggccctcccaggaaagtagcaactgtgggaattcctgccctagggaaggatggacgcactgcctacaaggagacgcaaagtgggacctcgctccatttgcccaggccaggcttagcgggaaacggggggcccaaagcgctgcatggtccgcaccaccagggaaagctggtcaagaaagttgatgacggaaattcggagcaggcgacagtcttcagctttccagcggacgaccaggatcctgccactcactgtgagatccttcccaaccaccctttggtggggctcggcatctggtgccagggacccatgggcgatttccgcctccaagggggtcgggaaaggcacgctgagggtgaatatgtgcggccgcattcgtgaccccctggccgcagacgcggcgtctctgcccggacctggcgcgtgcgctgggggagctccaccggccggagctgcggctgtgtccacgcccccgcggcagctgtggccaccccggccatccccgccgtcagcgcctccgcctgcgtctgcatccgcgtcccgcatgaccgccgcccctcgtgccgaattcgccacccaggcctcgctaccttagaaccgttatagttactgcg

SEQ ID NO: 126386 - DNA, 782 bp, Homo Sapiens
  misc_feature (636)..(636): n is a, c, g, or t
  misc_feature (741)..(741): n is a, c, g, or t
ttttttgataacaattgtggttttattgtgtccaaccaatgcatcaataaatgaacttgaagcccaagcctgtgtgtgtcctaattccactcacccagccccgggcacctgccccactcacctctggctttgagaaggggcgtgtgtcggtggttgcctggctgcagtgtctcacctaggctaggtgtgcaccttagaagcacaaagcgggcacagttgtgggtaataagcttactctgcaggccgctgggtgtgtgcccaccctcctgagccccgaaagaggacctgtcagctcctgagaggctgctacgggtttgccttgttctgttcaggcatctgaggtaagaaggaggggccagaggagcaccttgtccagccttcaccatgagagcgggcatataaatataaatacaggtaacttataaatagaagtccagctctgagctgaaaaccacaggcaggataaagagcagcctccaagagcgaggctggcgggctgggcactgagcggccactctggtgactgacagcaggtagtgcactcctgccccctggtggctggagggagcggcagatcccagcctccagggctggttggcatagcccttaaagagggagaagcattggctttacganatcaagagaactggaaaggatctaggagatcatctaagcaactctggtcatcttacagatgagaaactgatgcccaaagaggggaaaggtcttgctgggtcacanagtgggctggtgactcatagcccagttattctattccatct

SEQ ID NO: 126387 - DNA, 2391 bp, Homo Sapiens
  misc_feature (474)..(591): n is a, c, g, or t
  misc_feature (617)..(620): n is a, c, g, or t
  misc_feature (625)..(713): n is a, c, g, or t
  misc_feature (716)..(716): n is a, c, g, or t
  misc_feature (2329)..(2329): n is a, c, g, or t
gccgtcgtgctagcctcttgccagcaagcggagggttatatggcgtggtttggattttggttgtctgctgtgccacaaaaatcggggtgaaggaccggctgttgacatgtgggcgtgggggagccggcgtggtcgacgttgacgtgcggctccacctgcgggagtgtgcgggccatactaggggagagagtcgaggatgaggaagcgaaagaaccaaaccctggccgagacggcgtaaatctgtcactagactgcttgtaaagaaaaaagcgcgcgagggtgacgagaaggaagtaatatgtgggggggctagcgaaattgtaaggagccaaaaatacgcggccgtttggatggtaggtgctgtagatattagaattaggttggggctgtccgaagcgattgttttgtttcgggggggattggccaacgactcctggatatgtgggccggggcctctcccgggaggcgctgctnnnnnnnnnnnnnnnnnnnnnnnnnnnnnnnnnnnnnnnnnnnnnnnnnnnnnnnnnnnnnnnnnnnnnnnnnnnnnnnnnnnnnnnnnnnnnnnnnnnnnnnnnnnnnnnnnnnnnntgtttggtgtggtggggggtgtgttnnnntggtnnnnnnnnnnnnnnnnnnnnnnnnnnnnnnnnnnnnnnnnnnnnnnnnnnnnnnnnnnnnnnnnnnnnnnnnnnnnnnnnnnnnnnnnnganaagtttcatttaggtgctatcatttaaaaaatcagaagatatcacttaagaatccagcattctagtttctttcgaaaaatcagaagatctggcaacactaggcccacattccggcatggcaacaaccagctagagcggtgctggctgttccccctctgtggggcttgtgctctggtttctgaagtcctaaccctcaccaggcccaactgccacctacgccagctgcatggcccctacactgtgtctctgcacgaggcagcccagcaggaaggaacaaaagtgggggtgatgagaggttgtcctgttcagccctccccactacccacaggcctgggcacgtgaaggaggtcagagtagggtgagcaggaaggcagggggggtcccggacaggacacaccccagcctctctctgatcactgtgcatggcaagcagcgtcccaggcaccccacgtgtcctggcccagcccaagcctgccttggcggccgggtggctgcaattgcgtagcttgctgtcttggtcctggccactccacatcctgtcagagctgggcccacgacctgaggccttgtcctgagcctgagcaatatggcctgtaggtacaggcttcctcactgtcccatccagcttcagctgaatgtgcaccagggtgtggcggttcttgtcacagtccaacatgatgttggaggacagtgcagggggccccgcccacagacagggcagtgcgggaagccacatggtacttcacagtgttcaggcctccctccctgtccaccttgaactgctcctgtttttgagctgcgatgcgcttctggtccctcttccgccaggctgggtcgtgcaggtggcgaaatgtcttgtacccagttgtgattcccgaggggcggaaaagctggagcccagctcccttaatgcgccggtagaactcgtcgtcctcgcggccccagccccagaagcggttggacatcccattgcacagccggtagtgctgcttggagagcagcaggatgccgccgacataggtcttgtagtggtagagagggtggagctccggggaggccacgtggaagggcccagcctcaggaaagccatagtccagctcctcgttgagagggagcaggtcaacgtcgtgcatggcaatgtagtccgtgctgttgctgctctccaggaagcccacgttgatgagcgctgcccggttgaacctgaagtggtccacctggttgagcacgtagatgtggtgccggatcttcttcctgctcaggaagcggcgcatgtggggcacgaagaccaggagctcctcgaagcgttcgcggaagggcaccagcactgccaggcggtgggggccccaggatgcgtcttcttcccagtgctcagggggcggctctggggggcaggcgcggggagggcccgaggtctcctgcccttgtcccctgactgcccgggccacgtccccagagcagctgagctgcagccagagtagggagaagaagcccagcgagaggcaggccacgaacaggtggaagacggaacacttccgagggaggccgccggagagcaacccggacctgccgtcctcccagggcagctgcgccgctttcctccgcgaggggaacantcgtgcggagaggcggcggcgcatggggcaggcgctcgcagcccggccggcccggcctcccg

SEQ ID NO: 126388 - DNA, 458 bp, Homo Sapiens
ttagaaaaatcatctagagtttattatcgagtgccacctccgtgtctagcattacgctgggtaagcctgagtaaagaagagtgtccgaaaaccctgccataaaataaactacatagacagaaaaaaagtcacttagtttggttataaagaaaggagtcttgttcacacagcgtaaaaacgaatcttataatcgtattttataagcatcagaggcaaaagcaactagggtgacgggctttggggagtggaaagcgccggatcctgggagccagtcgccctactcgatcaagcattttctgacggccctatccaataacgtggggacgcagctgaaaaccatgcaagctgatcgctgccctcccggagtttatggtctggtgagaagatgcctgctctgagtcactgccaagctctagctatgtgactttgaacagggaatttctgtccctatctataaa

SEQ ID NO: 126389 - DNA, 2845 bp, Homo Sapiens
  misc_feature (341)..(372): n is a, c, g, or t
ttttatttttatagaaaattttattcaacatacaacattttccagcaaaaaggcaatatacaggaagagttggtgtacactgctcccacagaaacaacccaaaaaataccggaaaaggatgaaaaataagagtgatttgctgattctattttactgcactcaaaactagacacgcagctggcattagctccaaaataaaaggaaacggggctgggaccgaaataaaactacacacaatgaatatcaacatcagtgaaattcacttgcagactcacccaacaaaaaggaacctcctcccagtggcaaattgtacatgttcattcattaaatatacaattcannnnnnnnnnnnnnnnnnnnnnnnnnnnnnnnacaaagtcgacagcttactaaccactagtgagcatgccctcttgctaaaaggctttcttgtcgtctgttccactttaacgaaattctatttataatcctttcacctgctcgtatgaactgttgagatcgtaagtctgccaaggcagcagagtaaaccttaattgaatttaacaatgttcttgatttaataaaaagacccccacaatgtctgtccggactgtattcagtgcatccactttgcaaaggggctgcagacagtagtggctgacgaggtgagacaagtttattaaaaagcccccaggcagctggaggaggagaacccgaggaagggccgacaatgcacacaatgaagggaagagcgctatttattaggttgtgagtttctctgttttgccttaacagatgcacaaaaggtcattgaaagtataactgaaggaaataggtcagacgagcctaaacacaagacttgctagctgcagggctggtgcacgggaccccaggaaggcagccgagccactcgtgcccactagggacagcccagagaccttgagccagggacccccgatccactaacctcttctcccccattgcgctgacagttgccttgcactgtggttaccataaaataactctcattggcatccaagctttataaaaacatcttcattttgctcaaaaagggcagtcaatagatacagagaagccaaactgaacagcctcaataaaataaaattaacaccagcagcgaatcctcttgctgaagacttcggctagagggcacgtgcaccaaagttctaggctgttaaggggccacccacacaccgtcctcgccttgaacacaccagcttggaaatcagttatggattttaatggccttttcaaggtaagtgtagcgactcctctttggggctttgttgaagtggtcgagccctagccaaggccgaggatgagacatattaccgggctgtggctcaaagtctttcaaatttacttcatactcgtcttcatttatgtactggtgtcggcccatcattacaattgcaaatttaaacttctcaaactccttctcctggatgtccagcaggctctggattcgcttcatcacttctcgaaaatgctcgccctggtgtatcctcagcaaaaacgggattccgaacgttccgaagacctctttgtggaaatgcgccactgtgacaagcatctcattctctttgtctatgtccacctggtccaaagggatttcctctattcgaaacgtccggctcgttgcaggagataaacattctaatagttcatcttcttgatgaacaccaatgattttgtagcttacaatttctagcagcctaagtttccctgatgctttctccccaagctccacggcctttttacattcttctaacaggtcccggacacacccatgcttgtctggatatagtgttatttcctcttccctaaattggctgtttaaccatatacatttaaaacttcgcctgttctcaaagtctgtgattttcatcttaagctgctgatagtaaagtttcttaggttgtctaggcttgaagaactgtagaagatctcttaaagtaccttcataattatgtctaagaggattacctgggccatccctataaccttgagacttgaaaaactgcagcaacattggatctgtgttgagcctctgtgcaactgtctttgcaacctgaaaataattcattctatttgataacgtaaccacaaatccaggatcattagggattgttttatcacagaaaatgacatcaacgcggtggtagagatctcggaaatactcctttgcggtgggtaattcactgttatcattttcagggtcatccttctgaaatactatgatgtcaccatccattagttcatcaagggctttatcaagagacacgtcatagtcctgaattctctctgttaaattcggtttaacttcctcatagaggataaggctagtatcttgaataaatcctgctctgtcacacataactgggagcaagtcacgtattttacaggatattggtgtgtagatatgcccacagtaattcaagctccgcgttttgggatcatacatcttcaaaaataacattacatcatgatctttatcaaacttgggtaaggtcgctccactagcagccagctcgggatcaactgtttccaggaatattgtccaagggttttcattatcactgagctcaatcattgttttattgccgtcggcttcattatctaacattgctggtcgttttgttccattactccttgcttgcatgggccacaatcgaatttgatcttgtggaaatcccatggtctgagagaggctctgaacaaactcagcaagcgaggagttcttcaatactttgaacacagtgtatttcactttttcttcatcgtacatgtcattcccttggtggccacaaaaccctcgtgccgaattcgccacccaggcctcgct

SEQ ID NO: 126390 - DNA, 1037 bp, Homo Sapiens
  misc_feature (733)..(733): n is a, c, g, or t
  misc_feature (769)..(769): n is a, c, g, or t
  misc_feature (785)..(785): n is a, c, g, or t
  misc_feature (917)..(917): n is a, c, g, or t
  misc_feature (958)..(958): n is a, c, g, or t
  misc_feature (983)..(983): n is a, c, g, or t
  misc_feature (1024)..(1024): n is a, c, g, or t
ttttttttggagaatgaatgcaagatttattgagtggtggaagtagctctcagcagatggctggggagccagaagggggatagcatgggaaggtagtcttcctctggagtctggctgctcagcagccgggatctcctactgtccttggccgaatttcccttggcgtccgaatcgttccaccatcaatggcctgccagcgtctttcgatgtgttcttctgccagtgtgttcctcttgacgtccagccgcttgtgtgtgtgcccgctggggtctcagggtttttataggcacagaatgggtggcatggcaggccagagtggtcttggaaaatgcaacatttgggcaagaagacaggagtccttgttctcattaggtccatgggcacaagcctgagggtggagcccttgccagtgaccctgcccttctctacccagcacttccctgtccccctcccatatcactgttgccatcttgtccttgatgaggaatacaactcccaattacagtgttgctgtgggagatgcagtcctctttatgacagtttctagaagttgataagaaaatgggacctgcctagggctagtatctcatttaatactctatagaatattatgtgtttttcctttttagtttttaatgttgaggatcagaaaagagacaccataaatttacttgatcagcgtgaaaagcgggatcatacactctgaattgaactggaatcacatatttcacancagggcccgatgagatgactattagatgttcatgangggactgaatactganaactgtgagatgtactaaataccatgtacatctgacgatgattattgtgatattttagtatgcactttgtgtacgagaaaattgcatggtcttttagacagcttttggggggtacttttggagtgtctatangtgtccacttttttggatagtattcgtgagaagtcacacanactggacaagtctctttcagtgtgnacagcgggctcgtgcgattctggctcagggcattcctatangatcgatattcga

SEQ ID NO: 126391 - DNA, 1534 bp, Homo Sapiens
catcttcagatgtacattttatttagtacatttcacagttttcagtattcagtccctcatgaacattttatagtcatctcttcggccctgttgtgaaatatgtgattccagttcaattcagagtgtatgattccgcttttcacgctgatcaagtaaatttatggtgtctcttttctgatcttcaacattaaaaacatctatgtttctgtcattccctgccagggctgcttgcttgtctgtctcagattctgcttcattttcatccatgttgtagtcatcttctcctctcagtttctgctggtttctcccttccccggcagcttcctgctcctcctcctgtccgtcggggatgacaagctggtctcgctcagggccctccatctctggattttcctggctcactgacagggcagcctgcacctgtggggtctggcccagttctccggctcccccgaagcctcttccacctacaggtctgtcttccaccacctgctcccggcctggctcctgcggcagcctgtccctctgaggctcctcattcaccacctggatctcattggtttcctctttctcaacttgtctctttgaatccaaaaccacttcggaactgggggctggtgtctgggacttgctgttaccaagcacgtttcccttcccttgtggcacctctgtgtgtggcaggcctgctgcctgcagcctgggctgaggctcactgagggcttggagctgctgtctctggtcgttgttttcactcaggtctctggaagctacagcttcattcccctttttggtgacctcttctattcgctcctcacactgttccttcacctccttcatctgattgatgcactggctcaggtcgtaggagaacttcctctccaggttggtctggttcttctgaaactggaggacatcctgctgcagcctgccgtaattcctctgcagggtctttaactggtcttgcagcactcggatgagcctctcacctgtggtgatgttattcaccaaaaccgccttttcgtcctggtacagcttgttgacgctctccagctggaagttgtggctggactggattttgtcaagctgctcccgctgcttctccagctctccctggaactcgttcttcttcagctccacggcgcctctctctgcagccgccctgcggaccctgccttccagctccatgatccgtgtctggaggtccacgctccgggagctcgcaatccagtagttgaagcccaagacgatgatgcaggccaccagggcggccagcacgaggggcggcgacttcatgctgcgacgcccgtttcccaagcccatcatctcaaaatcagcgctgagaataaaattgtcttttttctcccacgaggcattccctgttgaccatcatctcgcctcgattgtcaccgctcaggccttagtgtttggtctgtgacccttccactgctagcaacggaaaaagtgaagattcccggacgccttcgggtggcggacgcgtgggtcgacgatatcccgggaattccggaccggtcca

SEQ ID NO: 126392 - DNA, 680 bp, Homo Sapiens
ttttcattataaaagtcagtttattttccctttctgtgtttcgtattttccctttttgtcagtaaatgagcaatacactgattggaaatctgcatgattaaataacattaacaagttcataaacacaccccatatcagagtataaagcaagaggttgaaaaatatcccctaaccgaatgcaaattaggtatccctcaaaattgcacattctcctcctagtttgcttgcataatttaaaatatgtatatacagaatgatcttaaaatattgataactagtatggaattcacagccctgaagatatatatactctacatttttctaaagaacggacacccctcaggccctagtaatccattcatgtgattcaatgtcatgtacagacagtcctcagcttctgatttttggactttacaatggtgtgaaatggttgcaatttcaacataatgtacaatattcaataaattacatgatatattcaacactcgattataaaatagagtttgtgttagatgattctgcccaactgtgggcaattctaagtgttctgagtacatttagggtggacgaggctaagctgtggtgtccagtcaggggtattaaatgcatttgacttccaatgggtttactgggacataaccccatcataagtcaaagagcatctgtacttgacacttact

SEQ ID NO: 126393 - DNA, 604 bp, Homo Sapiens
ttcacgtggaagaggtttattacaaataaatgaaacaaaaatcaaaggcttgtgaaacatctctaagtcttcctgttcattgaccagtttctcaatcacaaaaaacaggaacgtctgtgaggttcaattttggaaagggggattggtttagtggctcttctgatacaaccacagacccctcggataagactgtggtccaaagaaggctgctgtatgttctctgtaggctagactcagtccttgtaaataaactcagtttaaagctttcaatactcaactgcatagttccatataaacatgaaaattaggaagattgctattagcacacattcctaaatccacaggagttatttagcaaaacatccaatgcatgaatgtagagaaaacacaatgacccaaaagttaagactggtgaatctccaggttcacatgagaaggtaacccaaattcatcacttaaccaaatttagacaagagtcaccatttcctaattctaggaaatctgactagttaaggtggcataactagtgataaagttcatcatgagctttatcatcacaatgctaagaaacattattttagaaaatctagagaatcattaacag

SEQ ID NO: 126394 - DNA, 623 bp, Homo Sapiens
caaatgcaaatagtctttattatgagaaagcagtgttatctaggaaagtcacatgctgggtttctttctaataaaatgacaaagcaggtttcttaaataatttacaaagggcagaaattgctcttgaacagggctacccctcctggcacatccacagtgctctgcactgagcatataaataggtacccgtgagcccagggtcgtaagcctggaaatatctcctatgccttcctccgagtccctggtagggggaaaaggagggatgagagtggggccctcaagagccttggcaccagaaacacagtgggtgagtgactctgggggatgactccccaaaaaccaggcacccgggtacagagctaagagctctcaaatatctgatgctagcacttcatgttatagatgaggcaaatagaaggctcaaggtcaagtgtacgatgagtttctaagctcaagagtcccctaggaaagcagaaggaacaattctccccctctgcaaggtctccccaagacactctcaggctatggcaggcagtcactgatgggtccagatgtggctggagcagggggctctgggccccttgttaggtgcttgttagcagtggcccaggggtactgacgac

SEQ ID NO: 126395 - DNA, 962 bp, Homo Sapiens
  misc_feature (628)..(636): n is a, c, g, or t
  misc_feature (643)..(644): n is a, c, g, or t
  misc_feature (648)..(648): n is a, c, g, or t
  misc_feature (794)..(794): n is a, c, g, or t
  misc_feature (847)..(847): n is a, c, g, or t
  misc_feature (864)..(864): n is a, c, g, or t
tcagttatacaacattttcagcctttattgagagtacagtcatcatgccaaaattcatccatcaacatacaaccttatttcccatctaaagttaatgagaatgtattttattttaaatgggacatagaggcaacatgccaagaattaaagtacaaccataaagttttagtttcacactttgaatatcaacaaagcagtaattcctaaaatcatgaaaacatgataaagtatctatacagaaaaaaatgaacatttaagtcatttcacgctttcttaatatcatatagtgaaaacagatgtacctataatttcagcctacagatagcatacttcataaggtcattattcatttaaaatagtacaaatgtttacaaagaacatttcacttaaatttcacagctgcttataaaatggtacttgcaagactgacctatataaagaaataagagtctcatcaagagatggtaaattataaatatataatatatcacaatgttaaaatcctcagtgctaatcaataaagataatgatctttggagaggaaagtatttagctttacatatttactgtgaatttacatattaataagaaacacatttaaaccttgccctgccacagaatatttgcnnnnnnnnnaagaaannaaanctttttttaaaatatgtgtacatcaaacaaaaagttacttttactttttccttttatggcaactttgatgcattttcggttttggtcccagagggattttttacaatcttgaactgcactctgtcagcttgcagccttttctgtcngttattcctgacctgtcaaaaacctgatctttccatctgtttactggagtccntagatactcttgggtgncaataaccaaacatgattatggttgcagacaatcatttgctgtcagtggtcacttcgacaccattctaaaaaacaggctcacaccacaacacatgatc

SEQ ID NO: 126396 - DNA, 2257 bp, Homo Sapiens
  misc_feature (1075)..(1097): n is a, c, g, or t
ttttaagattttcaaaatatttttatatagaaattttttacaaagattttacaacatagcaaatcattatgtcatactgtagaaagatgaagcaaaggattaaactccaaggataaagaaagtgctcatagcaacgtattgcagtctccatgaaagtgcatataaacggttaaggcaaagtaccatcttggtacagacatgttgcaaactgacttttaaaacaattttttaaaatatatacaaactttttttcttctattcttctcaaaggcatttgaaagggatacttttatgaatattcttgctgtagaacaatgtagaaataacttctgggtataaaacagtaaaaataaaaatattctacctgagtgtgttaaatcaagtgatttgtaaaacaaaaccttcacaagtgtgggctttctacatgtaacttgccaggctgaaggcttacaccctcatgttctacaacacagatcactaatgatgataacatgagttaaattgggattcttgcccttctgtgtggcttttggcttctaggttctatgaccaaactattgacatatttgaagtctgtatgcagtcattgtgtgattaatctactttacagctttgcttctacctgcagcttacatgataaccatgctgtgaagtgctacatatgcttcatacaatatgttgccccatctgataataaaaatacaaaggtgctctttaagctaaaccataaaccttattagagaattctagttaagtgttttgtttttccacatacatgtaaataccttaagatcaataggatcaataaggataatattagttatcacaatttagtcttcatacttgaagaatttgtttttaaaaataactaagatgcacaaaaatacattagctagtcttgaacaagagtgagttttgcagaaaactgacatatctgaattctagtacagataagaatctgtcaaatgataactgaattcacgtgactaaccactcttttacgtaagattgtatctactcatgagaaataggggaattcagtgttatcattatagtctccgtatttaaactgagnnnnnnnnnnnnnnnnnnnnnnncatgcctcaacataagggaaattaatcagttaatttctgctgacttaggtttcctaaacagcttttagttctcaaggcacagctgtggtaaaaacagagcaaaacacccagccatttattggaattctgcagtacaaaataagcacatgtgctctatataatctagtaacaggatagcaacagttaaactgtctcaaacaacagatgtatttgcttgattttccttcctaacttcttttgcatcaggaccgcaagcaaagagcttgtttcccagagtattttgggcaaatcggaaatacataatgtggcccattgccacaaaggagactgaaatcaatacgagcaagccaaaagcttcaggatttggagccaggatgaccatgatgaaatgcagaagatcaagaagatagttcatggagttctgtacaccatttataatgcctctttcagattcaattacattttcttgcagcaactgtgtcacagttaaatcaaaggaccaaagaccgattctagcagcaatgacgcctgcaaacagcagactgacagagattatgggcacagattcaggacttgtctccgggacaatattagcagaattagacccattagacatgtatatttcagttgtaatttcaggtatcttggtaggtgtaattgactctccttgaatgaaccttgatcggatatcttcaaaaggagaaacggacaagtccagggggcttccaggcatgaatacagagatcacacacaagatcaaacaggaaagctgtgccaatcctgagatcagacctgtccgaaccaaaccacattttcgacgtagccaagtaaaagctacagttcccattattccagttatagctgatggtcccatcaaaatactgaggatggaaccactcagtccctgagtgtaggcgtaccctgtggtgatgcagtcaaagcccaggacagtcatataaaggaaagcaagacccatgccagccagaaacacaggctggttgtagtaggagacccatccatctcggaaggtacggaagggctcagccatctgggaggcacaagtaggctcttgctcatgttcaagctcatggatgttagagtctttcacaccccggccgtaatggccgaattcccgggcatatgtccggtaccgtcgactg

SEQ ID NO: 126397 - DNA, 1201 bp, Homo Sapiens
  misc_feature (835)..(853): n is a, c, g, or t
  misc_feature (870)..(1012): n is a, c, g, or t
  misc_feature (1126)..(1160): n is a, c, g, or t
caggttaaaatatttttaattaatggtatttggcactatataccaactcgattttatatattttattgaaaatatgcacaaaataaatacattttcttttcttttaatccaagataaacaatgtcacatgattaaaggtaagcattgaaattctttcagataacctggagggaaatgtcctttttctctttgccgagtttctctctgggaaatgaagaaacaagattgtgagagttcagagttccttcctcacctgctgcaagttcacactcagcaggtcgccagatgtattacatttaccttatggatggcagagattgtctgtgatcaacagcatttgtgactctgtctagttcttgtttcttccatttcatagaatatacactctcaaggttctcaaaaaccatttaatccaagatactttcctgggcgagaatttagggattgcttgtttcgtgagtctccaaaagtctataataatacttaaaagcaagggatgaggcaaaaggcatctttgaaaattacatttgaagaatgcagtgtaaatggaattagatattccaagtgttaaaaaaacatgggactggctgagtttaggggttacttcatttaaatcctcacttttcactcagactagtcaaaatagcacccatttcaggctagacttgttgccaagctaatctttttaaaagtacaataacatacactttgtaaaaatttgaaacagtgcagaaagaacgagaaatagccaaaccatgagttccctcacctctgatcccctaatcccattccgtggaggtaaccacttaaaaatttctgtgtatcctcttagacnnnnnnnnnnnnnnnnnnnaagagatgaggtctcannnnnnnnnnnnnnnnnnnnnnnnnnnnnnnnnnnnnnnnnnnnnnnnnnnnnnnnnnnnnnnnnnnnnnnnnnnnnnnnnnnnnnnnnnnnnnnnnnnnnnnnnnnnnnnnnnnnnnnnnnnnnnnnnnnnnnnnnnnnnnngcatatactggtgtatatttccttatacacacaccgaatcagaatatactttcagttctacaacccggccgtaatggccgaattcccgggcatatgtccggtaccgtcgactgnnnnnnnnnnnnnnnnnnnnnnnnnnnnnnnnnnncggccgcttcctcgctcacaaactgcgctgcgctcgtcgtt

SEQ ID NO: 126398 - DNA, 941 bp, Homo Sapiens
ttttttctaatccaacagttattttattaggatgtcagccctgggtccagagtgagagatagggacaggggacagcccagcgaggctgggtcgggggtcaccccaggatgttccaaccacaggggcagcatctcctccactccacatgctggccaagggcacagagctgccgtatcgcctgccaagggggtggctcaatgctgctgccctggtcctgtatgggcccggggtgccgagaacagacagcaagcctcaggcgccggtcctttgagctttcttgatttcctcagagagcgcctccttcagctctgcgtaggcctggtccaggctgtcgttaatgatgaccacatcaaacaggccgggctccttgctgctctccatgtcggcctgggcagcagccagccgcttcaccaggctctcctcggtttcagtgttgcgctgccgcagccgctgctccagcacgtgcagtgaaggcggctgcacagagatgtagatgggccgcagatcggtggccttgatgttccgcacaccctgcaggtccacgtccagcacacagatgcggttcatggcctgcacggcctgcaccgccaccttgctcgtgccatacaggttccccgagaactcggcatgctcgatgaagtcgccggctgctatgtcacgctgcatcacctccctggttacaaagtagtaatctttgccgttctcctcgccgggcctcgggttcctcgtggtatgggacacgctgaagccaaagatgccgctgtgctcctggagcagcctcttcagcagggtgctcttcccagctcccgaaggcccgctcagcaccacaggcctggggcccgacatgccgtccggtggggcccggcccagggcggccgcagccagcccggccagcgggcgccgccctcgtgcggaattcgccacccaggcctcgctaccta

SEQ ID NO: 126399 - DNA, 979 bp, Homo Sapiens
ttttttttggagtttctaatccaacagttattttattaggatgtcagccctgggtccagagtgagagatagggacaggggacagcccagcgaggctgggtcgggggtcaccccaggatgttccaaccacaggggcagcatctcctccactccacatgctggccaagggcacagagctgccgtatcgcctgccaagggggtggctcaatgctgctgccctggtcctgtatgggcccggggtgccgagaacagacagcaagcctcaggcgccggtcctttgagctttcttgatttcctcagagagcgcctccttcagctctgcgtaggcctggtccaggctgtcgttaatgatgaccacatcaaacaggccgggctccttgctgctctccatgtcggcctgggcagcagccagccgcttcaccaggctctcctcggtttcagtgttgcgctgccgcagccgctgctccagcacgtgcagtgaaggcggctgcacagagatgtagatgggccgcagatcggtggccttgatgttccgcacaccctgcaggtccacgtccagcacacagatgcggttcatggcctgcacggcctgcaccgccaccttgctcgtgccatacaggttccccgagaactcggcatgctcgatgaagtcgccggctgctatgtcacgctgcatcacctccctggttacaaagtagtaatctttgccgttctcctcgccgggcctcgggttcctcgtggtatgggacacgctgaagccaaagatgccgctgtgctcctggagcagcctcttcagcagggtgctcttcccagctcccgaaggcccgctcagcaccacaggcctggggcccgacatgcctcagtgcctctctagccccgcctccacctgcgctggcctgtcgcgaccgcagggatcgttcagcacagtgccctcccagcccgtcttctcccgctgcgtcaccagcgccccgcagaacgcg

SEQ ID NO: 126400 - DNA, 875 bp, Homo Sapiens
gggagtttctaatcccaacaggttattttacttaggactgtcagccctgggtccagaggtgagagatagggacaggggacagcccagcgaggctggttcgggggtcaccccaggatgttccaaccacagggcagcatctcctccactccacatgctggccaagggcacagagctgccgtatcgcctgccaagggggtggctcaatgctgctgcctggtcctgtatgggcccggggtgccgagaacagacagcaagcctcaggcgccggtcctttgagctttcttgatttctgctctccatgtcggcctgggcagcagccagccgcttcaccaggctctcctcggtttcagtgttgcgctgccgcagccgctgctccagcacgtgcagtgaaggcggctgcacagagatgtagatgggccgcagatcggtggccttgatgttccgcacaccctgcaggtccacgtccagcacacagatgcggttcatggcctgcacggcctgcaccgccaccttgctcgtgccatacaggttccccgagaactcggcatgctcgatgaagtcgccggctgctatgtcacgctgcatcacctccctggttacaaagtagtaatctttgccgttctcctcgccgggcctcgggttcctcgtggtatgggacacgctgaagccaaagatgccgctgtgctcctggagcagcctcttcagcagggtgctcttcccagctcccgaaggcccgctcagcaccacaggcctggggcccgacatgccgtccggtggggcccggcccagggcggccgcagccagcccggccagcgggcgccgcagcatccgggccacctcggtgccgattaacaccagcctcgtactagctaatt

SEQ ID NO: 126401 - DNA, 518 bp, Homo Sapiens
ccttgctcgtgccatacaggttccccgagagctcggcatgctcgatgaagtcgccggctgttatgtcacgctgcatcacctccctggttactaagtagtaatctttgccgttctcctcgccgggcctcgggttcctcgtggtatgggacacgctgaagccaaagatgccgctgtgctcctggagcagcctcttcagcagggtgctcttcccagctcccgaaggcccgctcagcaccacaggcctggggcccgacatgcctcctgaggaaatcgggctcttccagagccacagaggagtgaaggccccagcccttcacgatgctgcgcggctatgtttgggtctgtccatcagggagaaagaaaaaccggccgatgtcttgcacagggtcctcgacagcaaccccaggtaaagagcagagcaagccgtccggtggggcccggcccagggcggccgcagccagcccggccagcgcctcgtgccgattaaccgcacggacctcgctacatagcgaatagct

SEQ ID NO: 126402 - DNA, 971 bp, Homo Sapiens
ccagggccagagctgccgtatcgcctgccaaggggttggctcaatgctgctgccctggtcctgtatgggcccggggtgccgagaacagacagcaagcctcaaggcgccggtcctttgagctttcttgatttcctcagagagcgcctccttcagctctgcgtaggcctggtccaggctgtcttaatgatgaccacatcaaacaggccgggctcctgctgctctccatgtcggcctgggcagcagccagccgcttcaccaggctctcctcggtttcagtgttgcgctgccgcagccgctgctccagcacgtgcagtgaaggcggctgcacagagatgtagatgggccgcagatcggtggccttgatgttccgcacaccctgcaggtccacgtccagcacacagatgcggttcatggcctgcacggcctgcaccgccaccttgctcgtgccatacaggttccccgagaactcggcatgctcgatgaagtcgccggctgctatgtcacgctgcatcacctccctggttacaaagtagtaatctttgccgttctcctcgccgggcctcgggttcctcgtggtatgggacacgctgaagccaaagatgccgctgtgctcctggagcagcctcttcagcagggtgctcttcccagctcccgaaggcccgctcagcaccacaggcctggggcccgacatgcctcctgaggaaatcgggctcttccagagccacagaggagtgaaggccccagcccttcacgatgctgcgcggctatgtttgggtctgtccatcagggagaaagaaaaaccggccgagtcttgcacagggtcctcgacagcaaccccaggtaaagagcagagcaagccgtccggtggggcccggcccagggcggccgcagccagcccgccagcgggcgccgcagcataccgggccacctccctcgtgccgatttataagcccggcctcgacctgccaacg

SEQ ID NO: 126403 - DNA, 892 bp, Homo Sapiens
tccccccatcccatgtgccaaggcacagacttccgtatcgcctcccaagggggtggctcaatgctgctgccctgtcctgtatggcccggggtgccgagaacagacagcaagcctcaggcgccggtcctttgagctttcttgatttcctcagagagcgcctccttcagctctgcgtaggcctggtccaggctgtcgttaatgatgaccacatcaaacaggccgggctccttgctgctctccatgtcggcctgggcagcagccagccgcttcaccaggctctcctcggtttcagtgttgcgctgccgcagccgctgctccagcacgtgcagtgaaggcggctgcacagagatgtagatgggccgcagatcggtggccttgatgttccgcacaccctgcaggtccacgtccagcacacagatgcggttcatggcctgcacggcctgcaccgccaccttgctcgtgccatacaggttccccgagaactcggcatgctcgatgaagtcgccggctgctatgtcacgctgcatcacctccctggttacaaagtagtaatctttgccgttctcctcgccgggcctcgggttcctcgtggtatgggacacgctgaagccaaagatgccgctgtgctcctggagcagcctcttcagcagggtgctcttcccagctcccgaaggcccgctcagcaccacaggcctggggcccgacatgccgtccggtggggcccggcccagggcggccgcagccagcccggccagcgggcgccgcagcatccggggccacctcttccgcccactgaacctacgtgacagcgccgcaccggcccaccctcgtgccgaattcgccacccaggcctcgctaccttaggaccgtagtagtactgcccccggtgttc

SEQ ID NO: 126404 - DNA, 762 bp, Homo Sapiens
ccatcaaacagccgggctccttgctgctctccatgtcgcctggcagcagccagccgcttcaccaggctctcctcggtttcagtgttgcgctgccgcagccgctgctccagcacgtgcagtgaaggcggctgcacagagatgtagatgggccgcagatcggtggccttgatgttccgcacaccctgcaggtccacgtccagcacacagatgcggttcatggcctgcacggcctgcaccgccaccttgctcgtgccatacaggttccccgagaactcggcatgctcgatgaagtcgccggctgctatgtcacgctgcatcacctccctttgccgttctcctcgccgggcctcgggttcctcgtggtatgggacacgctgaagccaaagatgccgctgtgctcctggagcagcctcttcagcagggtgctcttcccagctcccgaaggcccgctcagcaccacaggcctggggcccgacatgcctcctgaggaaatcgggctcttccagagccacagaggagtgaaggccccagcccttcacgatgctgcgcggctatgtttgggtctgtccatcagggagaaagaaaaaccggccgagtcttgcacagggtcctcgacagcaaccccaggtaaagagcagagcaagccgtccggtggggcccggcccagggcggccgcagccagcccggccagcgggcgccgcagcatccggggccacctcttccgccccctcgtgccgaattcaacaccaagcctcgcaccta

SEQ ID NO: 126405 - DNA, 1072 bp, Homo Sapiens
  misc_feature (58)..(60): n is a, c, g, or t
cccgatcccatacgcgtctttttccgcgccccggaactagaaatcccccgaagtcaannnggcgggaggttgtttccgaatcccaaccgttattttatttggatgtcagcccggggtcccagaggggggagattgggccagggggacagcccaccgagggttgggtcggggggtccccccaggaaggttccaacccaccgggggaggcatttcttccactccacatggtggccaaggggcccagagctgccgtatcgcctgccaaggggggggctcaatgcggctgccctggtcccgtatgggcccggggtgccgagaacagccagcaagcctcaggcgccggtccttgagctttcttgatttcctcagagagcgcctccttcagctctgcgtaggcctggtccaggctgtcgttaatgatgaccacatcaaacaggccgggctccttgctgctctccatgtcggcctgggcagcagccagccgcttcaccaggctctcctcggtttcagttgttgcggtgccgcagccgctgctccagcacttgcagtgaaggtggctgcacggagatgtagatgggccgcggatcggtggccttgatgttccgcacaccctgcaggtccacgtccagcacacagatgcggttcatggcgtgcacggcctgcaccgccaccttgcttgtgccatacaggttccccgagaactcggcatgctcgatgaagtcgccggctgctatgtcacgctgcatcgcctccctggttacaaagtagtaatctttgccgttctcctggccgggcctcgggttcctcgtggtatgggacacggtgaagccaaagatgccgctgtgctcctggagcagcctcttcagcagggtgctcttcccagctcccgaaggcccgctcagcaccacaggcctggggcccgacatgccgtccggtggggcccggcccagggcggccgcagccagcccggccagcgggcgccgcagcatccgggcctcgtgtcgagttcgccacccaggcctcgctacttaggacctttggggggcggttgtgggttgaagtagtggggcgg

SEQ ID NO: 126406 - DNA, 1824 bp, Homo Sapiens
  misc_feature (68)..(68): n is a, c, g, or t
  misc_feature (147)..(147): n is a, c, g, or t
  misc_feature (162)..(162): n is a, c, g, or t
  misc_feature (186)..(199): n is a, c, g, or t
  misc_feature (476)..(476): n is a, c, g, or t
  misc_feature (702)..(758): n is a, c, g, or t
  misc_feature (943)..(974): n is a, c, g, or t
gatctatatgctacatctgggagtggttatctctcccccccacccgcgctacgtccttaggaacgggngacgggcgcccaatggcgacgagagggaagtcggtctgttccgcgcgctcgcctgtgcgttgcggcccacggcagaggnctctgtaacattgantctactcgtgcggatcggttccannnnnnnnnnnnnntacatggtgctcggcacggctgcatgcgcgtgctcagtcctattccatctaccagcccctgcacgtaggtgcggcgcacttgttacactcgctctgtggggcgacgagtaactgtttttatgtatgttagagagcatagtacccaacgccccttagtcgctggtcatatccgtactagtgtgcccagctaagcagtagggagagaccccacacccttgaggcggctaaacatccgccacgcactctccgctcgtgaggacactagcatctctcgagngcagcagcgggatcgtctccttcttttgtgcttctctctctgcctgccgagagagcacccggcgatgcggcgagtgtagtgttgctatacgctagcagcggcccggtcgtgctccctccaccgcgcgcggcctgcttcttgtgtcgggcgcgggaaagaatatcagcgtcctcttcgtggtcttagaccacggcgtcttcttttctggcagcgcgagcatgttcgnnnnnnnnnnnnnnnnnnnnnnnnnnnnnnnnnnnnnnnnnnnnnnnnnnnnnnnnnttggttttgctaaattattctaatgtcggagagggagggcgcggcgccacctctctgaatacctgcttttcctcggggttgagttgggcgcggtcgcttcgaatctgcctctgcccctctccttccaggtgcttcgccgtcgttgggtatggtgccgttgtggatctttctgatctttgatgacnnnnnnnnnnnnnnnnnnnnnnnnnnnnnnnncacattgaaagcttttattttgaaaaataaaatacaaaagtcattaggttgtaaatgtataatggtaatttcccaacttctcagaaacaatacaatgaattaaataattaggatatttaatattattcacatcaatacacttaaacaggcacacgtgttctacaaaacattagaacatgtacagacaacctatttcaaaaggagactgcccaagtctgcttacaggatcccatttttaaaccctctccttgaaaacaaacgtcataatgtaagaaaagagaacaagaggagttttaacaggaaacacatgttccttctgggctccttactgcagggctgtgcatgaaatcgggatcaagagctctttgctcaggaggcagatccctcacgaggcccaaagctgtgcggacacctccatcctctcagtgggaggaaactggcaaatgcacaggcggcgcagccaaggtgcagacgctccaccaagcttggcaggggacagccaatcctaggaatttcccttctgctgaaaaggcagcaatctttcctcatgtatggaagaggctcctggttctgctactccacttgctcagtctgtggtttttctttaagaaagtcaggtagttggaattctcccttatagacccttcgagtgttttcaataattttgggatcaggttttccgtagttaggtgggttggcatatgggtcatatccaagcttggcaagcataggagcaatcactgccatgtcttgtaaaacatctggcggtatcttcccaacccattttgatagagctcctacattgactggcttgattacttggtctgtagatctctccactctgcaatcc

SEQ ID NO: 126407 - DNA, 1409 bp, Homo Sapiens
  misc_feature (1250)..(1341): n is a, c, g, or t
ggtagaaaccttactttttgtttaatttgttttgccaaacaaacacagtgaaaactttagtctgactaattgtacagaaaatagaatttgtaaccagtagcaaacaaaacaggataaacctaagtccctggcaagctggatctccatcagcaggtcatccagatccccttgtaaatggcctcctgggaaaataagtcctaggaggcagaggcacagatttaccagtccccatcagaatcacaggctgcacctgggaaggaaaagcatgaaaaggaggagaactgatgttacttgaatctcttatcactacacacattagagttgtctgactgctgaccaaccttaaggtatggttttcccaaacctatagtccctggacatcccacctgcatccctagagggtaagtttcaagttcagtggttctgaagcctctgcttaaccagaatctgcaacaataactggggaggaagggtagacaaagtcataattgctggtgtcaccagggcagagtctaaggccccagcttccacttcaggaggaaacaattgaggatgccaggtcaccagcaagagagtccagctgccttaagcctcagtactgtcaaccagtgcccaggagtatagaggagttcaacaatggcctgcggtcccctggctggatggggtctgggagtccagcaggctgccggggcaccagttcacattccgtgcttcttgcggatgacagccatggcaagcagccgatccttctcacgcagttcttcgcgcagcttggcctcagtgagacgcaggtggcgaatgctgcctttcatctctttcatcttcacttccatcagagccaggatgtcccgctgctcattcagcttgcgcaggagctcctcctccgtggtgcctgacgacaaggagtacgaatggtcggagccagtatcagggaagccctcttcccctaccaccaccaactgggggcccatagggcactcggcagcctccagccctgcggtagcagcctgtaactccgacgcggcggccgcagcggctgcgccctctgcggctgcaaactccacttgcactgtgagatcgatgggcttcacgtcttctccagtgggagtgatgggcgccggctgtacggatcccggagcctgactgctgtctacagtggcctgaagggtgagaagcacggccgcggaagcagataccaggtgtcggctgcagtctgggcagtctgggcagtggaggcagagggtgaggannnnnnnnnnnnnnnnnnnnnnnnnnnnnnnnnnnnnnnnnnnnnnnnnnnnnnnnnnnnnnnnnnnnnnnnnnnnnnnnnnnnnnnnnnnnggcgggcggccgcggccccagcgggtctgcgcctcgtgccgaattaacacccgagacctgtcctagcc

SEQ ID NO: 126408 - DNA, 456 bp, Homo Sapiens
tgcagggagagagaactgatgttacttgaatctcttatcactacacacattagagttgtctgactgctgaccaaccttaaggtatggttttccctaacctatagtccctggacatcccacctgcatccctagagggtaggtttcaagttcagtggttctgaagcctctgcttaaccagaatcctgcaacaataactggggaggaagggtagacaaagtcataattgctggtgtcaccagggcagagtctaaggccccagcttccacttcaggaggaaacaattgaggatgccaggtcaccagcaagagagtccagctgccttaagcctcagtactgtcaaccagtgcccaggagtatagaggagttcaacaatgcctgcgtcccctggctggatgggtctgggagtccagcagcttccaggcaccagttctctctcctgagggatcctctaagtac

SEQ ID NO: 126409 - DNA, 940 bp, Homo Sapiens
  misc_feature (124)..(139): n is a, c, g, or t
attacaggcgtgagccaccgcacccggccccagctcccagtttcatgtggggaaggcaggtgggtggatgggatggcaaccatgacgtcctgcgcagagcctggaacagacactgagattcccnnnnnnnnnnnnnnnnaataaatttaagaacagctctaccttctctcctccccccagagcaactaaaaccaactaaaaggggctatggtctggggggcagaaggcgctaggagtcgtaatcttcttcgtcctcttcatcaggtgctgaggggcccgggggcgctgggggcaaaggcagagtagaggcgaagggcaggaagggtgtcggggggctctgaaagtgggcagaggggtggctggcctggggtgggggttgtgatgtctcctcttccccatcagtatctgtgtcctcagattcatcctcctgctccgagtctgtcccggacagcttcttgtccttgcttttcgttcccatcccaccgttcttccggccgccgctgcctggcttccggcccctgcgggcgcccttgtccccatccatgtggttgtcttccccgtccccctgcatgtcgggaacagatgccaccaggtccttcaagaagtcaaactgctgctccagctcgatgcactgcttcaggtgggatgtggtcatggtcttcgcgttccgcgactgggtcacctggcaggccttcttcaacagcgactctaggaagagctcgagcgcccgggagatgatgacaggcaccgccgccgccaccttcccaatctcttcgtccgtctgcatgatcttcttgatccgcgccggcgggaaccgcgcgttgtacttcttcttcttgctcggcatctcggggcctctctcgccgcgtcgggtccagcgccgccgcccgcagcctcccggctcccgggcctgctcgccgcccgcccgtcgcggttcccc

SEQ ID NO: 126410 - DNA, 1418 bp, Homo Sapiens
  misc_feature (1366)..(1366): n is a, c, g, or t
ttttcagcaccatgattcagccctttaatcttccacgggagcagttgagcgcggggcgtggcgggcggccctccgtgcccatgattcaggggcacagctgccccagcagacacacactttcatacgcactcacaccccacccccagacacacccccaggtctctggaactggcccagggtcctgctgctctcacagccgcagggacagggctcaagggctaccctcacccccacccggcttcctagcgccctggacgcccacggcccctcttggacttcttggtccctgaggggggacggatggggagaggggcggtggtcgagggcggcggcggtggcaggagtggaggtagaggtagctccgtgggctccggcaggctggggctgggccgaaacccctcaaaaggggagaacttgagggggctgacgggggcccgggggctactgttgaggcgcctgggtgagcgcagcttgggctggaaggagaagccctccttgatgctgtccaggacagacggcgccacgtatgtgaagcccaggaaggcctggttggcactctcgctgagggctgtgtcatcaggactgtccaccggcgtctgccgtgtgaagcgggtatcaaactggctcacgtcctcctctgactgcagacagggcctgaaaggggggtccacacgccaggccagaaggtcgtcccaattcatgtgccggaaaaagggatgtctctgcacatcagcagcatcccctgggccacccccaatccgctggctgggattccgtttcagaaactttttgacaaggtcccgggcatctggggtgaggtaggggggcagtgccagcttgcccctgatgatcttatccatggttttcttccggttctctgcggtgaagggcggcgatccagtgagcatgtcgtacatcagggcccccaggctccaccagtccacagcccggttgtggccactgcgcaccagaatctcaggggccatgtactcaatggtgccgcagaaggtgtgagtgacggcgccctcatggatagactccttgcagagtccaaagtcggtcagtttgatgtggccctggctgctgagcatgatgttctcgggcttgaggtcccggtagatgatgccctgggagtggagatggcccagggccagcgtgatctcagccaggtagaagcaggccgtatcttccaggaagatgccctctcgctccagatgcgtgaagagctcgccaccactgaggcactcaaggatgaggtagagtttgccaccagtctggaaggcataggccagttccacaataaaggggtgcttcactgactctagaatgttccgctcagcccgtgtgtgtgctgtgtccttggcanttgcgcacaatcctcgtgccgaattcgccacccagcctcgtacctagccgtt

SEQ ID NO: 126411 - DNA, 1129 bp, Homo Sapiens
cctttgctcaacggccctaaagggggtcacacccgggcagaagtcgtcccattcatgcccgaaaagggatgtctctgcacatcacaccatccctgggccacccccaatcgctggctggattccgttcaggacttttgacaagtcccggcatctggtgaagtaggggggcagtccagcttgcccctgatgatcttatccatggttttcttccggttctctgcggtgaaggccggcgatccagtgagcatgtcgtacatcagggcccccaggctccaccagtccacagcccggttgtggccactgcgcaccagaatctcaggggccatgtactcaatggtgccgcagaaggtgtgagtgacggcgccctcatggatagactccttgcagagtccaaagtcggtcagtttgatgtggccctggctgctgagcatgatgttctcgggcttgaggtcccggtagatgatgccctgggagtggagatggcccagggccagcgtgatctcagccaggtagaagcaggccgtatcttccaggaagatgccctctcgctccagatgcgtgaagagctcgccaccactgaggcactcaaggatgaggtagagtttgccaccagtctggaaggcataggccagttccacaataaaggggtgcttcactgactctagaatgttccgctcagcccgtgtgtgtgctgtgtccttggcattgcgcacaattttggccttccttaggactttcatggcatatattttgcccaagttggtgccttgcacctttcgcacctggaacaccttgccatagccccccttgcccagcacacgcagcagctcaaagcagtggggcccgatgcgctctgggccaacgttcacgctggtctcagtcagctccacctcttcatagtgtcccacaggctctaggccagctgccctcaactcggcaaggggacatgcgtccgcggggctgagctctggctcgccctcgccctcgctgccttcctccgtctccaaatccaaatcaaacacggccgccatggcggcgccggccccgcgggcccgtcggcccgtacctggccgcctcgtgccgaattacacacccggcctcgctcctgccgtattttttgtgtgggcga

SEQ ID NO: 126412 - DNA, 874 bp, Homo Sapiens
cgggccgacgggcccgcggggccggcgcctgccatggctggccgtgtatgatttggatttggagacggaggaaggcagcgagggctgatgggcgagccatgagctcagccccgcggacgcatgtccccttgccgagttgagggcagctggcctagagcctgtgggacactatgaagaggtggagctgactgagaccagcgtgaacgttggcccagagcgcatcgggccccactgctttgagctgctgcgtgtgctgggcaaggggggctatggcaaggtgttccaggtgcgaaaggtgcaaggcaccaacttgggcaaaatatatgccatgaaagtcctaaggaaggccaaaattgtgcgcaatgccaaggacacagcacacacacgggctgagcggaacattctagagtcagtgaagcacccctttattgtggaactggcctatgccttccagactggtggcaaactctacctcatccttgagtgcctcagtgactgagcgtcctgagggcagtggctgggtctcttcatcctgtccccagcttcacccagcacagggccaggcaccgagtaggcttcggtagatgtttgctgaattgaattgaatccccacggcagctctgtgaggcaggtggcgagctcttcacgcatctggagcgagagggcatcttcctggcaagatacggcctgcttctacctggctgagatcacgctggccctggggccatctccattcccagtgcattcatcttaccgggaccctcaagcccgagaacatcattgctcagcagccagggtgcgcttgccacattaaagtgaccggctttggactctgcaagggagtctatccattgaaggccgccgtaatccacac

SEQ ID NO: 126413 - DNA, 811 bp, Homo Sapiens
  misc_feature (771)..(771): n is a, c, g, or t
  misc_feature (790)..(790): n is a, c, g, or t
aatgtttgacttatcttttaatatttagataagagatgatacttaacattcacaagttactgtaaatgctggggaccataagcatggggcaggccacggtaaagatcattttgaatgggcaagtctttcaatttcccttacatcacagcaagcaggcaaagcctaaatacagggcaggacttgcctatgtgatgtaccattccagccctccttttcaaagaaaacttgagcagggaccctgggataccaccagcgatggtgggactcccttttgcaatccaaataagcacgatctaaatgagtccaggttggagcagataaggaatggggttgaaaaggagatgtgttcttgaaatcggccaatttcatagcctggaggagacatttgtggttagctgagtcacactgccttgggattagccagctctgctttctgtttcaacagtaaaaagtcttgcaaagctgctggcatgtgagacagaggtatccagaaaattttggcatcttttccagcggcataatgagtcttagggaagagacttgttagagcgtggtccatgcactctaccaccggagagaggtccatgttcacataggatttattgcctttcagtttgtctagacttttttcaatgtaaccttctccatattgttgtttgatgtctggagacagctgctcccaaatggcgagttttttttcaattacctttactggatctgccaagttttgttttgacaatcctggttcaatgcatgagacgtgcacaccanaagcttttcatgtccgtcntaagctgtcattgaaaccttc

SEQ ID NO: 126414 - DNA, 1010 bp, Homo Sapiens
tttgacagaagaagtattttatttatttataatatcattttgtaaacaatcacactgtgcactttttaattcaacaataagaacaatttttttctagggatttatagcaaaccctatataaagtgaatgacttaatacacgagtgaagatgactagggtagaataatttctgaaaatgtcaaattacagcacttgatacaaagactgatgataactatctgtaccataaaaatttacatgccacgaaaacattaatttataattttaaatatacagtaaaacatagttataaaaagagtattacatttattataaaccagtgaattactcagagaaatatttattaaaacctactaaaaaccagtaaatattgcaactgaggtaaaaatttataagtaaacaaaactatcatttataaggaccaagaagtaaacaaaagggcagacattttctgatgactgtgtctactccttgatattttgaagcagcttcaacaaatgtgactcaataacctgttgaacacttctatagcctagggctacagctagatccatagaattatatccagagtcagtttcaattgttggatcagccccactttctaagagcatctttacacatttcacatgatttccatgtacagcataaagcagaggtgttcctccattccaatcatattcatttacatcaactccacaatcaagcagcattttgacaatatctgtgtagcctttactacaggccaacgacagtgcactttctcgaccttttcctaaaagttggggatcagcaccctggtatgggaagtagagataaaagacttctcaattagtttaaacaagaatattgttattcctgtcaacaataattatagttcaacactaggcctggtaatgttctgggcttaataaagaataatggaacttttactcatggatgcttttattgagattgcctggatgcttccttcctccgtcctgtatcatcctaatatccttcactctggagtc

SEQ ID NO: 126415 - DNA, 522 bp, Homo Sapiens
  misc_feature (109)..(109): n is a, c, g, or t
agagtattacatttattataaaccagtgaattactcagagaaatatttattaaaacctactaaaaaccagtaaatattgcaactgaggtaaaaatttataagtaaacanaactatcatttataaggaccaagaagtaaacaaaagggcagacattttctgatgactgtgtctactccttgatattttgaagcagcttcaacaaatgtgactcaataacctgttgaactagaacagataggtaatcaagattacagcacagtgactataaaatttcttttaaaactatcaaatttaacttatccccaatattttcctaaaataaagttatttctaagcaggatacatacatagcctgagggcaataatacaatgcaatactttaaaaaacttgaaacttagtctgtcactgagtaactgtccaagttactggacgttgtgtctttgtttctttatttttgaaactcaaggagagtccagaatacaaggttatcctaaggttgccctataaatagtttgctatc

SEQ ID NO: 126416 - DNA, 702 bp, Homo Sapiens
gcagcatcactgccataggcccccggcctggctcagcgcccactcagccccactctggcgggaaggaaagggccccacctgcaggcgattctccagatgggcagtttaacgtggcctgttaggatcagagctagtttctcccaaccgacatctttgaattctgcatctactaggcccatttcccacataaggagaaggacccttctgtcctctgcttgaaaggctgtattccaagaagggctgagtttggtagtgacaaatactggtccttgggcagtgtctggccggtggtgccatgcaagatgagtccctacagcttcatgccactccggcgccgtgagtccttccgggcaatggggctgaagttcacaatctccttgtagatgtgctgcttccattcatccactgtgagtttctcgtgttctaaggaatcatcaaacggctgctgggcctccgtctcttcctcagggtcccggaagggttcaaagaagggatgggtgagggcctgcgcggccgtcaggcgcttgtccacgtctagctccagcatcttctccagcaggtccgcagcctgggggctggcccgtgggaacagctgagtgaaatccttcctgggggtctgtggcagggactggatgtaggatttggccgctttgtcgttcagcttctgcacaaactccgtgccaggcaccccggtcactttca

SEQ ID NO: 126417 - DNA, 809 bp, Homo Sapiens
ctcacatacatgatgaaaatacagatttaagccacccacatcctcagttgttttccttagcatataaatacttcgtagtaagctttacaaagaactgatgcactgagagacattttttctgagcttagcaaatcaaaaacaatttttaaaagtccttattaacaattagaacagttttgctgtcaaataaagtaggtcttttctcttttattctcaaagaaccccttaataaaggaggcactgacaggtacattacacattaataggagattttaacactgctcataactgataatctagtgaccattaactccaagttataacttggaaaacataaaactatatcctattaagaactgattaaaaagcaaaagaaacaaaagtaagacattagcagctagacaacaaagcaatgacccttaatttagaagacaactttttaccaggtacctaagactccgtggagtaaaactcaggaaaggagaatcaattctagaccccatcccataaggactttagtttccgaaataccaaaacaaacttcttacttcccctgtgggtaggtgccacagaatgaagagtaaagcaataaaatgcatattcagtgcatgtgaagtagaagggtatatatcctatatatattgttaagtttagcctaaagtctctttacatatctcaagttcagcttaaaggtttctcagtacatagaactgtagcctaactggacgtgtaaacagacggtaccctactcttgtggcaatcactaagtttcagccaaccaaagacagcgaactgttcaaaccatattc

SEQ ID NO: 126418 - DNA, 1612 bp, Homo Sapiens
  misc_feature (1433)..(1524): n is a, c, g, or t
ggctttgatgagctgatctatttagtacatgaaaataaattcagaagcatattaagatgaaacagtgttcactcacaaatctcccagttgccgttgtgttccccaggcttcacagacagcctggaaaaactcctctagggcttgcagacttagctggaaactaatcctgagcaggaagcttggcttgaagggataagaggggaccctccaggttggcaatcacaccgtttattcgcacttggcagcaagacaatggatgatgtgggaggtgccaggcccctgggttggcactaatttggagtatggttgagacagggctggagagaggcatcttagaggtggcccccaaatccgcaatcgggagaaaaaggcaagaatcgactagagattgtcaggataaagggaggcactgcccacccctgctatgtctgtctgcccccacaggggcttctttaatacctggggttccctgggtgatgaatgtcctcctaccctggcaaggggccatacctgtcgccgtggccccataggcaaccctgatgaaagagtatcatttccaagggggctttggtttctgggtggccccacctcgtcgtggggtagatggcactgaaatgctaactgagcgagccctggaagtcaccagggggctccggaaggtcacccctgacgtggaaggcctgagatcctgaggcccatttgtgtggggggcactggtggctggatgaccagtgctggggacattcaggtgggtgagggaatgggaaagtccccgcttcagggggcgtgaagagtgtaacccacccatagataacttctgggagtctgccgctggccccggctctgtcttggagggaccagctgggtgaatggctcgcagtggtgcctccctggggcggggcgagtggctacccctgggggtaggtggtggcgtccacaagagagcacggagctttgcggcatcccccttcgccatccgcggggccccgaagctggcgccttcagatcgggagccaaacagcgactcatcacagtaagacggggtgtggctgatgggtctgtatttgttcttcttccttggtgtgagggtgggggtgctgccccttgagggggtggtctcacagctcccctttgcccccaaggccttcgatgcctccttgcccacgcctctggttctgttagccttctccacccagggcggatcgaagtccggtggggtaggccgggtgcctgctgggctgccaaacagagtctcatccacatatgacgtcctggccttgacccggtagccacctcggcagcggtgctgaaggccgagggtctgcatcccactgacggccagctccacgggggtcttcatgctgcctgtggtccctggtgacagcaggtgtgctctgccggccaggccctgcttccgaggctccctcctgcannnnnnnnnnnnnnnnnnnnnnnnnnnnnnnnnnnnnnnnnnnnnnnnnnnnnnnnnnnnnnnnnnnnnnnnnnnnnnnnnnnnnnnnnnnntgaagtcacatgtgtaggtcacacctataaagctgagcatcttggctcgtaggcatcgggatcctcagggacccgatcccgggaattc

SEQ ID NO: 126419 - DNA, 1162 bp, Homo Sapiens
ttttttttgttcagagcaaagtcatttttattgtaatgaaattttaaaaggcagttacattagttacacatatacacaaccgacttaataactgttagtcatagagaacattcaagaaatacaaatgatttatccacagcacagttcacatccataagaagaaagagaaatggttaagtacttaaactgtccactgacacctgcttatgaaatcttttcctttctttctttttttaaaggaaactgagattgttagatgaagcaagccgtcctgctcccgcacagcctgtgaaacctccattttgccactttcaaggtcagtgccccacagaccctggcctgttgttgaccataacactagctttggccacaaaagccagggacacctacgcttggaaatgtgcctgcaccactgtgtggtgcctccttaagttgccccagactccagatggtcaaagaaaaggtgaatgtccaggtggctcatggctccttagtatggggtgtttggtggggaatgaccccggcaggttaggagacagcgacttaggccaagcccatattttctggtaatataaaggacacttctattctgacttgttattcctagagctgttccggtcactggcttcttcctgtttatgtggtaggtcagaaccgtgacggagcaaggtgagcgttcacattctcgcatagcttatgggctgcctaaagtgctgccgggagtggggagaccaccattcattccctgggactggtttctttctcggctaaagctagaaggacactgatgtttgcatgtgtggctaatctggagaacatgtagtcacattgttgacacggaagagtaaagctccccagtgtaagttccttaacaaccagaatccccccactctctgcaacattcacgtctcatgaaataacaacagtgtagaatctggtatgttggagagtagagcagaatgtggctatttgtgatggctgtcactccctgaagccaaagctaaaaataaaacttgggggagtgacgcatggacagagtgttctagagccatccttggccatcctgttgccatcactgacccagtcctgatggagccttactgtggctgcatctgtgtccttgctgccggcccgggttgtcactgtacagacctcttcagtg

SEQ ID NO: 126420 - DNA, 960 bp, Homo Sapiens
  misc_feature (670)..(703): n is a, c, g, or t
tataaccagaaccataagaataattataataaaaggtgtcatcagcctcccagtataaaactgcagcctttggagatgaccaaaaacatcacattccaggggccgggagccgccttgtgcacagaggggtggatggtgggggcctcataaaagaacacacaaaaggcgacttagacaggaaagcaccagtacgttttgtatgtttttttatttgctccaggtggggttttgactgtcactttcccacactctggattagttctgatcccaccacaaggagccctcgaattggctaaagtgagaaactgggcctgaagactccgtaccctctgccatcttgccgagggagtctccttttagaaaacaatcaaagggttattgcatgagtctggatgaatcccactctcagctgtccacgggcccgaccacctcatctagccccctttttggcagggagaacctggctcccaagttctcctccttcacttcgttacaaaccaaggggaagagcccaccgtgagaacgcgccatctgcaagctgtctccctttctccatccttggtgaaaccctttgcgcagaaggcaacgtggaagctgatgtttttactcatctcgctgtttgaaagcaccattatgaagtcgggttgtacagtagttaacagtacctttnnnnnnnnnnnnnnnnnnnnnnnnnnnnnnnnnnaactgtaaacaagaggtaacagcggcttctagaaactgattttcttcaaggtttcctgtgtggtaggcacctgaaatactgtagaaaaatgtcttgtgtggtgttctcgtctccctgctgctaactgggttctgttttgcgtgaccaggaatggtgctggcacgacagctcagtggctgggagggaatgctgccgcctgagtgtctctctctttccgtcccctgcttgtgctcctatctgatcaggctagagacaac

SEQ ID NO: 126421 - DNA, 1136 bp, Homo Sapiens
ttttaccacataaagtttttattgaactcaaactcaggggctccaaagcctgaggaagaagagggaggctggggtttgcacgcagaggcccaggccccaccccggggccccactccccaccccacctaccttttacccgctcctgactcaacgagagtttcagcagctaccaatctaagctaacccactctaattaggtaatcccctgccctcccccctccctgctctagcagttgccaagccaggcacccaccaaggagccgcggctgaggccagccctccgctgacctctctccatttctcccagggcctcccgctgccggcctggcctccctccaacccacttcccacaagtctccagggcatgtcacttcctccaccctggttctcttcttccagcatcctcagctcctccattctcctgcggcttctccactatcctccctaaaggttcctctagctccctggccccttatcttctgcccacacctcccacccctgctggggccccaggtcagcgccggcccgccgcgtgggtccgctggtggcggatgaggtcggagctctgggagaaggcctttccgcagtcatcgcacttgtaaggccgctcgccactgtggacccggtgatgctgcagaagcgtggaggagcggcagaagcccttgccgcacacggcgcacctgtagggccgctcgcccgtgtgggagcgctggtgctggatgagagtggaggagcgattgaaggtcttgccgcagtcggggcagctgtaggtgcggcctggcaggtgggtgcgggcgtggatggccagcaccgagctctggccaaagcgcttgccgcactcagggcacttgaagggcttctcccgggcgtggctgcgggcatgggggataagggccgaccgctgggagaagctcttgccgcagatgccacagctgaagggcctctgaccggtgtgcaccctctgatggctgcgcagggacgagttctggctatagcacttgccgcactcggtgcagctgtagggccgctcgtggctgtgggtgcgctggtgtcgcaggaggtaggagctgtcgccctcgtgccgaattcgccacccaggcctcgctaccttaggaccgctatggttactggcctta

SEQ ID NO: 126422 - DNA, 1330 bp, Homo Sapiens
  misc_feature (366)..(390): n is a, c, g, or t
  misc_feature (646)..(660): n is a, c, g, or t
  misc_feature (686)..(735): n is a, c, g, or t
  misc_feature (826)..(929): n is a, c, g, or t
tgtacacagctgctttgttatcttctacatatataccaaagggataagttaggaacaccagaaactcagtagtaactcactttaaccttgcttctggggctccaattcaagtgatgctcaatttcaaggtacaaggaaaaccatgagaatataaagtcataatgccatttccactcagatgaaaagatttatctatctttagatactcaaaattattcttggcattttagcacttttggtacacatttcctgatgtaggaaatagtaaaatttcagagcctatggcattggctttcaccacctatgcaattttctacacatctgaaaattaccagtttatctaactccttaaatgttcctctcttnnnnnnnnnnnnnnnnnnnnnnnnnttgctggaagaaacaggaagcatccaggtccaaatgacagcataacagactatgaagaaacagggcttaagtgcccatctagaacaagatggtctagattacaataaggaccccatgggacagaacatcaaaacattcaactttcaagtaaatgtcttggaagtaaacatttaaaatttataggacttcctctggcatgtaggtatgatattagaagagtttcctttgacaaaggacaatgacccaagaagtaggnnnnnnnnnnnnnnnaaataaaggagagacagtctcactcnnnnnnnnnnnnnnnnnnnnnnnnnnnnnnnnnnnnnnnnnnnnnnnnnnttttaactcctgggctcaagcaatccttccaacctcagcattctgagtagctgggatcacaggtgctccccatcacaccctgctaatttannnnnnnnnnnnnnnnnnnnnnnnnnnnnnnnnnnnnnnnnnnnnnnnnnnnnnnnnnnnnnnnnnnnnnnnnnnnnnnnnnnnnnnnnnnnnnnnnnnnnnnngagtgagccactgcctctgccttcaggtagcaattttattagcaaactataagcctaaagtaatagttaaaattctcactgtgatattcattactaacccctgaacctgtacccttcagcttaccactacagtacttctgtagtagagcgagtatgggttttggtatcagacaggtccaaatttgaattctggttctacctttcatttatcaaatgactttgggcaaagtacttaacctctctgagctttagttcccttctctgtaaaagaataaaatatttcagtcttatcgtgtagatgatatacagagggcacataacaaatgttagatctctcaaatgtttttctgtaacccaaatatgcttacaactgattaaagaatgttctcactaacaaactg

SEQ ID NO: 126423 - DNA, 600 bp, Homo Sapiens
tgacttaaaacaatggaaatttattctcttacagttcaggttagaaaccccaaatcaaggtgttggcaaggttggttctttccggaagctatgaaggagaatgcttgttacttctctcctagcttctggtggttgctggcaatccttggtgttccctagttgtaggaacatccctccggtctcctttatcacaaaacagccttcccagtgtttctgagtatcttctgctcttcttctaaggacactagtcattggatttagggcccaccctaatccggcatgactacaactaattacatttgccaagacccgatttccaaaataaggccacattctgaggttttaggttgacatcagtttctgaatgacactactcaacccactacatgtaaataacatagatatacaaaagattgaatatattactgacagtgtttatctctgggtagttttagtttatgaatgatttaaatatttttttgcttttctgaattttaaaataaatagcttatatagagattaagttctaagtttattgtataaagtgaatattaggtgtagtcaaaaatcatttctggctgggtgtggtggctcacacct

SEQ ID NO: 126424 - DNA, 1041 bp, Homo Sapiens
  misc_feature (842)..(842): n is a, c, g, or t
  misc_feature (871)..(871): n is a, c, g, or t
  misc_feature (952)..(952): n is a, c, g, or t
cttgatctaaagcttttcccaagttcctcacagtattagtttcctagggttgctgtacaaaataacagactgaatgatttaaccaagagaaatttattgcctcacagttctggagcctggaagtgcaatatcaaggtggagacagggttggtttcctctggaggccataatgaaagcatctgttccaggtctctgtccttggcttgtagatggccatcttctggtggatccacacagtcttctccatgtgtatccttccttcagtttcccttatagggacaccagtgatgtcagattagggatcgaacccaacaacctcatttgaagttactcacctgtttgaaaaccctatgtccaaatacagttatagtgtaaggaactaggacttagggcttacaaatatggagtggggcatcatccagaccataccatttaaattgcagggtttctctccaatgtgagttcacatacacacattaaggtttgtgggattcagaaaggtattcccagattctctacattcatacagtttctctccagtgagatttctgatgtgtttggtaaggcttgagaattcagcaaagtcatttccacattccctgatgcagggtcttctccactgtgaattcatatgtgttcattaagacctgagatacaaagttgcttccacatttttacattcatagggtttctccccagtgagttttcatgtcttcagagagaacagggacacctttaggttttcccacattccttatgctgacagtctctcatccgcatgccttctttcatgatttcgaaaggaactggagactgaaggtttccgcatccttacatcatanggtctctcagtgtgagtcgtcatgtactnaacgaatggagtactgaggattccaactgttaattgtaggtttttctcatgtggtcgcagtgaggtacaacgtggaactanagcttgcacatcataactgatgtttttgccttggtcgcagtatataaactgagatggtatgctacaattcagatcaaggtcctcattta

SEQ ID NO: 126425 - DNA, 580 bp, Homo Sapiens
gcagacccttctccttgccccaaacactggcctccataattcctgcctgcagatctcccaacttgaactataatccaccagccagcctcagccttgagctttggaaccacattagatcctgcatctgggtgaagaaacgggagctgtggaccacaggccagccagtgaacctcctgggctttcttgcctttgtcctgatcctctcacagaaacactgggccaaacagtggggagagattggagagcgggtgtggctgcccaaccccatccagagcatctgcttccagatgagccagtgcctcgcatgataccagaggaggcgagggacagagacagcaaggcagacagtggctggcaggggggcccaggcccgggacgaggcctccccttcagctcaggcacagcaacttgcccaggactgacactgtcaccctgactgcaggaggcacagggactccgggagactcagagggcgaagagcactggcatttggcatgtccatgacattggagactcccctagcagggtgcctgacgtgtggggaaccctcagtaaatagtggtgcattaaaaataagaaa

SEQ ID NO: 126426 - DNA, 902 bp, Homo Sapiens
tgggccccttcaaggttcccccttttaggaggaggacccctggctcctagcgctgggtttggggggctagggcctgctgaacttgggaaggccggggaagtagaacccggaatggggtgattctgggtttcttgcagccatttcctcctttgttggtgtagggggaggagagaagaggtcaaagaaagcaagaccctgcaagaggcatccccagtgaccccccagaagtgacttgggtaaggggagcgctatcctagaaggaggggtggggacggagggggcagtgaagcagggcggtgagcatggccagtggtgggcttcggccgcggttctacctgtggccactcactctcggacgtagaccctggtgcacacaacgtcatccgccgtcatggtcaggatcagttccccatcgttggtcagttctctggtccacgaggtcttggggccctctcccttcaggagcttctgctcacagaccattttattctcactctcccatttcaccaggctcttacagggcctcccatccacagtctgctcctcaaactcctccccaaccttgaagttaatctctgtggtgcgcacggtggtggaggttttgatgtagaaagtgtctccctcctgtttgatctccactgctggcttggacgctgcagccacagcaatcttcctcagcatcacattcacccccagcactttgagcaattcctcgaagttttccgatcggatgattttccagttgccagagaagttgggcatggtggcggcgcgggaggcggtccccgtagactcctaggctggagcactggacactgtcttttagtcaaaagagacgtcgccgtcgccgggtcgtcaggttctggaaccaagacaagtccagggacaaccccaaagctccc

SEQ ID NO: 126427 - DNA, 1024 bp, Homo Sapiens
gttcatttaacctctttttttccggccccccgacataagatgccctcgaggtttggtgtttttttggggaagttttttaaagcattttaataaaattaacaaataaatattctaaactgtataggctacagggacaaagggtagaagctagagggccagtctttcctgctcaggccctcaagtcccctttagagagaccctgctctgggctggtttggggctaggactgctgacttggggaggcggggagtgaacccggaatgggtgatctgggctcttgcagccattcctctttgttggtgtaggggaggagagaagaggtcaaagaaagcaagaccctgcaagaggcatcccagtgacccccagaagtgactggggtaaggggagcgctatcctagaaggagggggtgggacggagggggcagtgaagcagggcggtgagcatggccagtggtgggcttcggccgcggttctacctgtggccactcactctcggacgtagaccctggtgcacacaacgtcatccgccgtcatggtcaggatcagttccccatcgttggtcagttctctggtccacgaggtcttggggccctctcccttcaggagcttctgctcacagaccattttattctcactctcccatttcaccaggctcttacagggcctcccatccacagtctgctcctcaaactcctccccaaccttgaagttaatctctgtggtgcgcacggtggtggaggttttgatgtagaaagtgtctccctcctgtttgatctccactgctggcttggacgctgcagccacagcaatcttcctcagcatcacattcacccccagcactttgagcaattcctcgaagttttccgatcggatgattttccagttgccagagaagttgggcatggtggcggcgcgggaggcggtccccgtagactcctaggctggagcactggacactgtcttttagtcaaaagagacgtcgccgtcgccgggtcgtcaggttctggaaccaagacaagtccag

SEQ ID NO: 126428 - DNA, 1472 bp, Homo Sapiens
  misc_feature (53)..(87): n is a, c, g, or t
  misc_feature (1026)..(1034): n is a, c, g, or t
  misc_feature (1372)..(1423): n is a, c, g, or t
actgaaaaccaggaagaacggacaagcgagtcagttagcgaggaagcggccgnnnnnnnnnnnnnnnnnnnnnnnnnnnnnnnnnnncagtcgacggtaccggacatatgcccgggaattcggccattacggccggggtgtcagtgttttctgtacatattatttgttaattcacagctcacagagtgatagttgtcatagttcttgccttccctaagtttgtataaataacttaagtattgctacagtttatctaggttgcagtggcatctgctgtgcacagagcttccatggtcactgctaagcagtagccagccatcgggcattaattgatttcctactatattcccagcagacacatttagaaactaagctatgttaacctcagtgctcaactatttgaactgttgagtgataacaggaaacaaatataactgtaaatgaatcttggtatcctgtgaaacagaataattcgtaatttaagaaagcccttatcccggtaacatgaatgttgatgaacaacatgtaaaattatatcctatatttaagtacccataataaatcatttccctctataagtgttattgattattttaaattgaacacaaagtttcacttggatgaaacaaagtagaaaagtaggtcattcttggatctacttatttttagccttattaatatttttccctattagaaaccacaattactccctctattaagccttcacttactagaccagaaacagaacttattccagatacgctttgaatatcaattcttacattaactttaggcaaacagggaataggtctagtcacgaaaggaccattctcttgccattgctgcattccttttgcacttttggattccatatttatcccaaatgctgttgggcacccctagaaataccttgatgttttttctatttatatgcctgcctttggtacttaattttacaaatgctgtaatataaagcatatcaagtttatgtgatacgtatcattgcaagagaatttgtttcaagannnnnnnnnaatgttccagaagatggccaatagagaacattcaagggaaatggggaaacataatttagagaacaagaacaaaccatgtctcaaatttttttaaaaaaaattaatggttttaaatatatgctatagggacgttccatgcccaggttaacaaagaactgtgatatatagagtgtctaattacaaaatcatatacgatttatttaattctcttctgtattgtaacttagatgattcccaaggactctaataaaaaatcacttcattgtatttggaaacaaaaacatcattcattaattacttattttctttccataggttttaatattttgagagtgtcnnnnnnnnnnnnnnnnnnnnnnnnnnnnnnnnnnnnnnnnnnnnnnnnnnnnaaatttacttatgttaaaaataaaccatttattttcagctttgaatttt

SEQ ID NO: 126429 - DNA, 778 bp, Homo Sapiens
  misc_feature (625)..(625): n is a, c, g, or t
  misc_feature (649)..(649): n is a, c, g, or t
  misc_feature (686)..(686): n is a, c, g, or t
  misc_feature (719)..(719): n is a, c, g, or t
  misc_feature (725)..(725): n is a, c, g, or t
gtgactcaaagatgagatttttatttaaaaatcattcaaaggtgaaacacagcaacagcaatataatgaagtttaaagtccctgtcctcaatgaatgtacaatgcagttgggaacaaaaacaatgattattaaagtgctagttaagtcttatttttaaagagaccctatcttgtccaggatgcagtgctgtggctattcacagacgatcatatcacactccaccctcgaactcctgggctcaagctatcctaccacctcagcctcctgagtagctgggactgtacataggcatgcaccactgcacctggctcataagacttgataatttataaaataattctacagcctcttccttactcttcccctttatttattccaactggcatatgctcttttcctggtgagtgagtcgtctacagtgttttctggtggataatgcatcccgatcaaccagagaaaaaacagtgagaaaaatctgtgttctgttgcaatccctctgtgatttgtctaatacaatagatgtgggtgtacccctgcagaaaaatagtttcgcttcctttctccttatacagttacaaaatatccatttcaagatattcaaagaataaagtattagggagaaangtaaatcccctgaactcgcaacanaaccacttttaacgttttggtgccatactttcatgtnattcttgattcatggacaccccaatatttatgntaatcntaacatacatttttcaataaattgtactacacaatcagtacaacatgctttgg

SEQ ID NO: 126430 - DNA, 587 bp, Homo Sapiens
ttttgaaagtccaaactagaaagttattttatcctgtccctgcatataagacagtgaattaaaacccaaagtgctctgtggagatgagcaaggttgtccttggaggatgctcctcccaacatgcaggccaaatgtgttctctgtgctgggtcccagcattggagtagagggggctgcagctctgggcaggtggttgagcagctccactacagtaggtgggagttgctggtcttgtcctttaaggtactggcgatgaggttctattttctatgtgcctgctggaggcccatcatggttttcaagtaattatgcttctgctctatcttgactttggcattgtagaaggagatggaatcagggccctcaggaagcaccctctgctgcagctggctgaatttttcctggtcatcttctcccagagacacaatcctgttcacagggaccatgcctggccggatgctgccgcctggcttcagtgccatctgcatgtcctcagggatgacaaaggactcattgtaccagatgtcaaattccatgagcaggcggtggcgacactgatccactaggtgctggcaatactggatctc

SEQ ID NO: 126431 - DNA, 1852 bp, Homo Sapiens
  misc_feature (75)..(109): n is a, c, g, or t
aagggagccacgaggagctttatttatacatgaacgaaggtagatttccctcacatattacaaaatacacataannnnnnnnnnnnnnnnnnnnnnnnnnnnnnnnnnntatacatactttgcatctagaaagttcctcagaggtaagactactcctgggctggggcgggcgcacacaggggtgaccactgggcttgtggtccaggttgctcacactcctcaggtgccagcagatggagaggaaattttgaaagaagaaaccgggagacatcctggaggtcaggagtcaggagcggggaactggaagccgctagaggctcttgcaccatgtggagcggatgtgaggcacgatgcctcatctttcctcactgcttcccttggaggcgcctggggctgcgccagtccccagcccccactgcggccatgccaagcccctcagagtgcagcaatggctttagcagccacctggcggcccaggggcaggctgaggtccgtgatggccagaaccaccttggggctggacatggctgacaccttcaccagttccgacacggtggtgaagggcatgaactgcaggacgctgccacggccaccctgctccaggcagtccacacactcctccatgaaccactgcacgaactgggtgtgggggccagcggtgcgagaccccaggatggaggagatgagcaggaacaggttggccaggactcggttcagagggtcccgcatgttgaccgtgtggagctgagaggctgagagggagctgctcatggatcggtctgtggggctcgaaaggatgttggcatcgtcctcattagagctcagcagtcgcatcaacttcgaaggctgcacatcgtccagggggaagaggctgatataatcctcaatgtcttcgcggtgtctcttcttctggcgggtggacgcctgtcccttgtgggaggagtaggaactgagggcacaccacacggccagcttggcaagagcagtgcccggggggtccatgaggctgtgccacttggaggagtcagtgagcaggccaggtaggatgtggcccagcaggaccagggtcacttgctgcatgtccaggcagaagatggagtagagcagctccactgcccgcagcgtgtgctccttccgcgtctccttcagcagctccttaatcaggttgttgcagaaccagtagacgccgcccatgtgcagcagggtgtcaaagatgtggatggagcggctgtccacccagcccttctccagcaccttggcaaaaatgtccgtcagcacctctttgatgggccgcttggggggcagcaggttccagtagggcattgtgtccaccccggtggagggaaacttgatctgcgtggctgtctgctgcagcacgtcggcacacatgcgctccaggatcgagttcatgatcaccaccctctcattgtagaactgcagggtgttctcactaaacagtggccctgccagctggcggatcatctgcagcgacttctcacgctcatccagccccagcatccggacgtgggccacaagccaagccacagcacacaccgccagactgcataccttccctttgatgttatcagtgattttctggatggactcgaaggccaggaccccattctcccaggcattgaggatttccaagatggcggctgagatgctgagacaggcctcatgccacttcatctgcactagcttcatctccgaggagttgttgagcagggccaccagggactccactttggtggagtcggggcggaagcaggggtggtcagggttcaggatcttgccctcctcaggcatgcaggtctgcatccaggtctcgaagaagggcacctcagctcct

SEQ ID NO: 126432 - DNA, 719 bp, Homo Sapiens
  misc_feature (676)..(676): n is a, c, g, or t
actgtttaaatataattgaagttttttatatgatgaagtgctccataatttaaatgtaaaaagccaataggaaatatatgaaataaaataaaattatacgtaaaagtgacaatgcctctattagatttaacagtatcttacaatagaataagttgaaacctacaaaatggaagaaagtttaaaattaggcagatattatcagcctggtgaagaataaatacatatgtcaataagcatttaatgtattttgtcttagattttacatgaaataataaaaagtaagcaaaccaatagcatggtagtttcaccctgattgattcaaactgaaaaaatattaacatttctccatgagaagttggattcatggattggcctcatgctgcattcaaggcactttagccaggatccaacactcattgccaagagtcagcaggctagaagtttgcttttaagatgttccccggcctgcgaccaagacgctttttcctgactacttcttcaactctgatataggttttgctgatataaacgcaaacccggctctatacctaccaagtatctacttggctagagctgcaaatggagcatttaggcactaggcaagagtcttcccacgtttccaagcaactttctagaattcccaaactactgaattgtctttcagacccatctccanagagaatcagagagatggtctggagcatttagatctccagctc

SEQ ID NO: 126433 - DNA, 368 bp, Homo Sapiens
ggctccttccagtgatgaaaacctatgctgttggtaagaaacaatagtacagcctgggttaaaaatggcacagtggtttaatctctagaatctcagacaacagatttgaggtattcattcctataggatctggctgtgcttcctacactgaccaaaaaagattcatgtgttcagatacaacaaagctagctttctaacttactaacttacaatgtatatgcatatgcacatgcctgtgtgtttcccgccatgtatttattcttcatgcttggttttctagcattttcaagtttgcagtaaaaggttcaatacacatttatttctctagtctgcagtggagcaggtaacatatcctaaggagacaagag

SEQ ID NO: 126434 - DNA, 1839 bp, Homo Sapiens
atagatgaaagagggtttatttattaatatatgatagccttggctcaaaaaagacaaatgagggctcaaaaaggaattacagtaactttaaaaaatatattaaacatatccaagatcctaaatatattattctccccaaaagctagctgcttccaaacttgatttgatattttgcatgttttccctacgttgcttggtaaatatatttgcttctcctttctgcaatcgacgtctgacagctgatttttgctgttttgtcaactgacgtttcaccttctgtttcaccagttctggaggaattgttgaacagcttacagcactgcctgaagaagtgatactcagagttcttgttctatactgattcatagctcccacattttcttcatctctgaaaggcctgaattctctatttaatgacgacaaggcaattagatgagggcattcatcttcatactcgtcagagccagcagggactcctccttgaactctctgaccatcttgcctgttgtaattttcagttctgtttttctcctcagaaaattcagttacagagttgttttcaacaacctgcccttttatttcttctaaagcttgattgaattcagtcatttcaaaactccgtgcatcagcactctcttctgataaactgtcttcctttatttgttcagggtctccagatgatctgcaatagcagccctctgattcttctagacagttccgttcactttcattttctgacctgtaaacctctgctttttctgccacttctccatctgaaaatgagaattcagatccctcttttgtttcaatatttttatcatctggacctaatggatgaagcagttcatcatctgcctgcatttcctttgtgtagccactggcagaaacctccacatcaagagtgtcttctctcctgatatccttaaaagttggaaaaagctcactttcgtagctgaaacgtttcataaagaaatctttaatgcatttaacatctctgtcaaaataccactcagcattgggatgagaagttgaaaccatctgtggaaaatcaatcatggtgatatggtcactttcatccaaaatgagattaaattcattaaaatctccatgaatcagcccatgatttgcaagtttgacaattagttccatagcttcatcatatactgatgcaggatcttcaacatggtgtatctgacatagtggataaccatttatgagttccatgaccactgcatgacgattgtaatcaattggctttggaactggaaatttcctctcatacaatgccttcatataggcaaattccttcatggcagagagacgagataaataaagccaagacacattgtgcctatgtttatgataatcgcgtttgtttttcaaatttcgaaacgaggttcttcctagtctgtgaagctttaatgcaaattgttgtccttcttcatttgcaacaatgtaaatatctgattctttgccaacacccatctggtttccaacacactcaactacttgcctagaagaaagtgttttcaaagctaggtaatcatatcctgcatttgtcaaccgatagccctggacagttttggtacgctcccaagctatgagtttatgtttcactaattctcttaaaactttattacagccaccatgtttaaggctggctatagaagcaatcaaactgccgggaacaatttcatggttcttcatgcccatttcaaccgcggtcaagaccctgaagtcatctcggctcatgtaacgcaacttggccacattcactttccccatggcggccccagtccgaacccagatgcctctccgacgacagccgcaaagcgtccc

SEQ ID NO: 126435 - DNA, 1406 bp, Homo Sapiens
tttttttgcctgtgaaaatgcactttattggctcccagggagtgggatgcaggatcagagtggacacgcgcagggggctggtgtggggagcaaagcgccgggcctgccccggaccctggtttccctgaggaccaacgtgaatgggggccccactggaaagatgcttggggctgcagagcggatggaatgcaggcccaggttgctgggtggtgccctcagctcctggcagggttgacgggtggtggccgctgggctctgccagccgatggtccgctggcacctgatcctgtcttccagcttcacttccgggcctgctcgtagttgtcagtgaaccaagcacaggtctccttcaccgcctgcttgaagggtgtgaaccggaagtcgggcaggtaggtcctcagcttgctgttactggctgtcttcttaaactgcccatccgacttggttgtatcaaaggtgacttccccatggaagtccatggcctccaccaccgcctcggctgcctccttgatggagacctcatcttcctcgcccacggagaggatgatgggctccacttcattgtactcccgcaggacccagataaagagctgggccaggtccagcgagtatatgaactgcctccgcggattccctgtaccccacaccgtcagggccgagccgctgctcttggccaggtgcaccttgtggatgaggccaggcagcacgtggccatcctcgatgttgaagttgtcgtggggcccgaagacgttggtggggatgacagcggtgaaggtgcagccgtactgctggaagtaggccctgttctgcacgtcgatcatcctcttggcatacgagtacccaaaattgctgttgtggggaggcccattgtggatcatggtctcatctatcgggtaggtcgtcttgtcagggaagatacaggtggacaggcaggacaccaccttgcgggcgcccacctcaaaggccgagtgcaggacgttgtcgttcatgtgcacgtttttcctccagaagtccaaattgtatttgatattccggaacaggccccccaccattgcagcaagatggatgacgtgtgtgggttggaccttctcaaacagggcgcgggtctgtgctgtatccgtgagatcggcgtctttagaggagacaaacacccagtcctctccaggaagtccagctccatctgctaccaccttctggatggctttgcctaccagcccagagccccctgtcactagaatccgcatggatccctggggttcacccatgtcagttgcacctgcgtccagccccaccgccggctccccgacagcggcttccggccgggtgcgctccggctgcccgcgcctcgtgccgaattcgccacccaggcctcgctaccttagaaccgttatagttactgccgtcag

SEQ ID NO: 126436 - DNA, 1002 bp, Homo Sapiens
  misc_feature (15)..(15): n is a, c, g, or t
ccaaatacaaacaancaaaccaaccactgtccaccccaacgaagcgtcctaaacaggattcccgggatgggagccggcggtggggctggacgcaggtgcaactgacatgggtgaaccccagggatccatgcggattctagtgacagggggctctgggctggtaggcaaagccatccagaaggtggtagcagatggagctggacttcctggagaggactgggtgtttgtctcctctaaagacgccgatctcacggatacagcacagacccgcgccctgtttgagaaggtccaacccacacacgtcatccatcttgctgcaatggtggggggcctgttccggaatatcaaatacaatttggacttctggaggaaaaacgtgcacatgaacgacaacgtcctgcactcggccttcgaggtgggcgcccgcaaggtggtgtcctgcctgtccacctgtatcttccctgacaagacgacctacccgatagatgagaccatgatccacaatgggcctccccacaacagcaattttgggtactcgtatgccaagaggatgatcgacgtgcagaacaggtcctcgcgcccatcctgctgaggcccagccaggagtcggggagagggcccccagggggcgggtggggccggctggtcgggtcttcgtgccagcctcagtaagaggccagcggcagccttggggtggggatcgcgggcccaggacgagggcaggagacgctgtgcctccgcagggcctacttccagcagtacggctgcacccttcaccgctgtcatccccaccaacgtcttcggggcccacgacaacttcaacatccaagatggccacgtgctggctggcctcatccacaaggtgcacctggccaagaacagcggctcggccctgaaggtgtgggggtacaggaaatccgcggaggcagttcatatactcgctgggactggcccagcctctttattggggtcctgcggggaatacatggaagtgggagccct

SEQ ID NO: 126437 - DNA, 1696 bp, Homo Sapiens
  misc_feature (36)..(36): n is a, c, g, or t
  misc_feature (69)..(86): n is a, c, g, or t
cggccaagtgcctaagcgaaaattaaccctcactanaagggaataagcttgcggccgcatacgcggtcnnnnnnnnnnnnnnnnnnatcattcattctattttatttaactttaagcagggcttgatcagaaagaagagctcagaggagtgaggcaacaccaacaccagggcgtacgatacacccgaggctcctccgacaccagttccagcccggaagggcttggaatggcctgccacgccggggcaatggagcgcgtgaaagccaaaccttgggacccgaagagtaatttgactgcgaaggcaccgtcatcgtcgggcaccccctgtagacgggcgcataatagctacatctctggagatagtgatggaaactggggtccgatagatggagagaaggacgtaggataaggcttcttgtggggtgaagaggcagagggcacctggagagaggtgtggcatggagaaccaggggttttccctagcagagggcggcttcgtggacttcggccaaccggcgggtgcttccctcgagcggccgctagatggtggtgctgttctggatgcttccagtgggccccgaccaggtctggacaatgcctggcgcccgtcccccgcccctcatctacacacacgcaagaattcggagctccatggggaacagaagcaagatatccgtaaaatcaaagtctagggggtgggaatgaaaagggaaaagtgaggaacggggagccaaacccaggaagacgcctctgttcctgcacattccctctcctttatatactcagctcttggctgtctccagtatgtacccaccctggtcttccaagctgggagccactttttataacacaatcacagtttcacaaaccccaggaaggttccatgtggagagaggttaagtttcgcccttgcccggggaattatgacactcagaatatccccttggtgtaaatggaagacacctgcgctatagcagctgttgtaggcccggtccgggtgggagggcatacttcttatacatcggaatagagtctcctgccttccttggccttctcgagacaccacctgacccatggtgaaagtcacgtcttgaaacaggacctggctatacagcagataaactccagcatcctggattcggacaccatatccttgggcctgtaggcctctcccacgcctaagagctggttgccacatcacctctgtcacatcggagtcatccttggaggtggcgttaatgggaaccaggtgcaggacagagtgctgcttcttctgtttttgggtgagcactgctctccttttccgggatctctccccactctcccaggcttccagggcatcggaactctgctccgggagactctgccagggatacccttccccattctgggaggggcctcctgtcctctgcagccggctcacctctctcctgaggctctgcagctctgtttgttgggtcagcagagccatggcacaagccacggcccccagagctgccccccaactcaaccagagggcaactgagagtgccggctctctgactgggccccccatgttgcctggaggccctttgggggctagcaagaaaggagatgaggctggcatgagctggggaccctgccaacagctgtggtttcaagagtccccggcacgtaatggccgaattcccgggcatatgtccggtaccgtcgactg

SEQ ID NO: 126438 - DNA, 1297 bp, Homo Sapiens
  misc_feature (111)..(156): n is a, c, g, or t
  misc_feature (158)..(160): n is a, c, g, or t
  misc_feature (165)..(165): n is a, c, g, or t
  misc_feature (173)..(173): n is a, c, g, or t
  misc_feature (177)..(287): n is a, c, g, or t
  misc_feature (1114)..(1114): n is a, c, g, or t
  misc_feature (1118)..(1118): n is a, c, g, or t
  misc_feature (1124)..(1124): n is a, c, g, or t
  misc_feature (1127)..(1128): n is a, c, g, or t
  misc_feature (1130)..(1217): n is a, c, g, or t
  misc_feature (1238)..(1238): n is a, c, g, or t
gggggggaggcccccccagggcccttttcaggggttctttacaaacacttgttccccgccgtttttttcttgggggcccggcggcccaaggaaagttcaagaaagtttttnnnnnnnnnnnnnnnnnnnnnnnnnnnnnnnnnnnnnnnnnnnnnntnnnggagnggtttttntaannnnnnnnnnnnnnnnnnnnnnnnnnnnnnnnnnnnnnnnnnnnnnnnnnnnnnnnnnnnnnnnnnnnnnnnnnnnnnnnnnnnnnnnnnnnnnnnnnnnnnnnnnnnnnngactgttaaaagagttttaatagccacaaacatggttcaataggatcccaaacaatacatatcagattttatccattttgttttctacatgttctttgtgactcaagtttgacattagcatttgcaccccaaatgagttcccctacaaataaaatttgttcatgttgacacaaagaacacaaagcaagtatagatccctcaggaagttgtcacaactcttgataagattaactccaccactatcatcactttttgctttgtcccctagtttgaagcctgctggcttttataattcaatgagaatgactccacactcttctccaaagcgcccattatttttagtttttcggtgcgcgactcaacataaagacctgtggctcttatgagctgcctgtttttaaatggtgcagtagtttcagtttccatttaataagttcccagataacaaatggagaatgggaagaatcttctcaaggtcacagtgaaggtaaaaataaattatctccatcactgagaggctttcttcaggttttctatcagcactacagagtcggtttcctccttggtttgcttctcatagatgtcgtacttcttccagtgcagagtatcatcattctggtctccaaacatttctttaaaaatcttgccaggatcaggaattggagggaatataataatcttgaggctttttaggtaaagcaggagtactatgattgcacctgcgacgatgactggaacaatgagtaacatggttatgtagagtgtggaattgcgcttcttacctatactcattttcttggctccaattactcctcgtgccgaattcntggnctcganggnncnnnnnnnnnnnnnnnnnnnnnnnnnnnnnnnnnnnnnnnnnnnnnnnnnnnnnnnnnnnnnnnnnnnnnnnnnnnnnnnnnnnnnnnngagccggagcataagtgtaangctggggtgctaatgagtggctactcacatattgcgtgcgccatgccgctttcatcgga

SEQ ID NO: 126439 - DNA, 1294 bp, Homo Sapiens
  misc_feature (1265)..(1265): n is a, c, g, or t
cctagcattttggttgaaaaaagtgcatctcacccccagtaggtgatccggattctgctgtgactgagcttcaaatggcatggggcacaacctgagctacatgaagtgttcgtggctcccctggaaggaataccagtcccgacactaactatactctcgtactattggcacagaagcctggagaaaattcatcatatgtgaaaacatctttagagaaggccaatactttggttgttcctttgatctgaccaaagtgaaggattccagttttgaacaacacagtgtccaaataatggtcaaggataatgcaggaaaaattaaaccatccttcaatatagtgcctttaacttcccgtgtgaaacctgatcctccacatattaaaaacctctccttccacaatgatgacctatatgtgcaatgggagaatccacagaattttattagcagatgcctattttatgaagtagaagtcaataacagccaaactgagacacataatgttttctacgtccaagaggctaaatgtgagaatccagaatttgagagaaatgtggagaatacatcttgtttcatggtccctggtgttcttcctgatactttgaacacagtcagaataagagtcaaaacaaataagttatgctatgaggatgacaaactctggagtaattggagccaagaaatgagtataggtaagaagcgcaattccacactctacataaccatgttactcattgttccagtcatcgtcgcaggtgcaatcatagtactcctgctttacctaaaaaggctcaagattattatattccctccaattcctgatcctggcaagatttttaaagaaatgtttggagaccagaatgatgatactctgcactggaagaagtacgacatctatgagaagcaaaccaaggaggaaaccgactctgtagtgctgatagaaaacctgaagaaagcctctcagtgatggagataatttatttttaccttcactgtgaccttgagaagattcttcccattctccatttgttatctgggaacttattaaatggaaactgaaactactgcaccatttaaaaacaggcagctcataagagccacagggtctttatgttgagtcgcgcaccgaaaaactaaaaataatgggcgcttttggagaagagtgtggagtcattctcattgaattataaaagccagcaggcttcaaactaggggaccaagcaaaaagtgatgaattagtggtgggagttaatctttatcaagagttngtgacaactttcctggagggatctataac

SEQ ID NO: 126440 - DNA, 2386 bp, Homo Sapiens
gtggggcggaagatcggaggtctttatttccggttaccacccctccccctcgattcaaacacagtgatataaaaggaatagaaacaaaaaaaatcaggccatgagaataccaactaaccctctcccaccccatccccccaatcactcccaaatcaggacacacgattgatgtttgatgtttatccccgactcctcctgttaccctctctgtccaggactctggtcttccctgaagcctccaccaactggtgggagaaaggaaactggaccttggagaacttcctgtgtagcaacttggttctccgagaacaggtggggtaggggacaccaggtaggctgccatcaccccctgtcccttccagccttcttcatggccccatttagccttccaaatgcaacatggtcagacagtgcccaacactatggtccctctggcctctcattctcaccgctccagcctctgtaagactgccagcccttgaaggccctaatgccaaagtaaccattctcccaggctacagttccttcctttggcagatgtccctggccagggcccccaacctctacgcacccctgacctggagttaggggtagaggtttggggcaggggtagtttatccacccctcactcaaggtgggcaatcagcaccatcatgataactccccccagcagccccagcacctccagaagtgattgcaatggtgatgcctccctcagcagctcgggcaacacagacactgttgctacgtagataaagccacctgcagtaaatggcaggacccagccaggacctgcaccacctgcaatttcactgcccactgctcctccttcagtgagaagggcacaggctgtgcctgccagtgcccctactgctgtcagtagttgcagacgcatcgcctgctttttgctgcagccagactggaccaagatggcaaagtctccgacctcgtggggcacttcatgtagcaggacagtcattgtggtcaggatccctagtccccggccccctcgaaaggaagccccaatggccagaccatcagtgaagttgtgtgccaagtcagcagccagattcaggtaccccgacacacgcaggtctaagcctcttttttcttcttcagcgttctgaggtctcactggcccatctttgggtactgtgctccctcctcgcctcttctgaacccctcttgtttccttttcttcttcctctgagctctgcttctccttggtagaacgctcttgtcttccatgtccatgacttccacgtgtatgactgtgagcgtgtccatgtccatgactgtgaccatgtcctcctttcacatgtctcacaaatttctccacgacaagaaaggcaacaattccactgagaacccacagtcccacagacagaatggggccctggccactgtgggagtgtccatgtccgggttgctccagagtgtggtgagaatgaggttcaagagcatgaggaatgaggtgcaggaaagcatctcccaggagcccaccggaagcaaaactgagcaagatctgaagtagagagcgatgccggggagagttcgactccacggggataaggaagaggacaaaaaatggagctgctgagatcagcactgtggcccccagtgcataagcccagagagtgacagcatccaggtcctgcttgatgcctggagccccagactccccatagcctccatggctatgctcatggtcatgtccatgtcctctgtggtagaggctctcatgggagtagccatggctatggccatggtgtaaatcctcatgtgaatgtccatggtcgtgatcgtgggtatgtccatgccagatgctctcgtgagtgtggccatggccatgggcatggctgtggccatggtggaaatcttcatgtgagtgcctgtggctgtggccatggaagtcctcttgcagatcgtcgtgcaggtcgtcatgacccccgagtccagccaccagaagccccaaggtcgcccaggtcagcagtcccacggccacccagtggggggcccccaggcctctggccatcacgctgaccagagggacagaggcagtgactccacttgactcaactctatacctacacagggtccgctttactccaatcgcgccctccgtccacctctatgggccgctctcccattcccttaagttcccacctacattgttcccaagactagttctctttatcccgaaccacctcccggatgtagggccctgggacactaatctttcaccagccactttacagactctctgggccctcgtctctacgactcattaggtgaggaaaaggcctggaaaggatggtagagaaaaaacagagaattctcaccggctccgggatcctctcctttcccggtttgcttgacgtggcag

SEQ ID NO: 126441 - DNA, 426 bp, Homo Sapiens
  misc_feature (49)..(49): n is a, c, g, or t
  misc_feature (225)..(225): n is a, c, g, or t
ttaacgtagatgagacgagattgattggaagagatgcccaaaggaacgntatttccgaggaagagaatctgagccagggtttaagtcatccaaagatcgcttgatgtgctgcttggtggcagtgcagctgggactttaagttgaacccttactggtgtaccgctcagaaacccgcaaggctgtgaaggttcttgaagcccagtttgcccgtgatttggcgctccnaacagaaaggcttgggtgaccaggagcatctttcatgaatggttcacttactttttttgccgttgaaaaatacagtgcccaaaataatctcaccaacaaagcactgctcatactagacagtgcgtcatgccactctgtaaatttgagcgacctttctgataactaagagtagaataccttcaggccaggcgcggtggctca

SEQ ID NO: 126442 - DNA, 1532 bp, Homo Sapiens
tttcaagcaagcagggggtttaatttctcacacacagagtctggggagcccagtgaggttgcaatggcagctagatgtgtcctccagctctgtcatccttgtcttgagggttctgtgttcacggcccctccaggcatggtttcttcatttaggtaggaacaaaaggccaaaagaacatacaagcccagctctctagaggctccagtcagaactggaccctttaactacaaaggaatcttggatgaattatttttagcggggcttcaggagcaggtagcagagccaaagtgcacactcaggccatcttcctcccaatgtcctccccgggggcatttcctttaggaaatgggagtcagtcctcacaaacacagaaagcagctcaaggccaccacacaggtcgccaaaatccacatcctggtcactgcttcttagctgccgagacaagctgggtccccaacatccctggggagctaggaggagcagaggaccaacacatgaggctgagaggcattctgcttggtgaatttttgaggcagaggctgcccccaccacacaaactcactgtcaggggaccttatcctgctcagagagctgctctagaacttaatttacatggctcgttcaggcagacagagttcactgtcttgtattccacagtgtgacagtggtggccccatccctggcaactgagggccgtggcgggtcggggggaggccatcttaaggaagagcaggcagctagcgttccagctttgggaactctggctggaaaaggtggttcacagacgagttctggggcctcaggcggcccgtcatatagacctttccacaggggagggcagaagcaacaggcgggtcccaggagaccccagcaggtcctccaccgtccagccttcacagcaccgggcagaatttacacagagaggatcagtctccaagccaaagtcaggtggaggcatggtggtggtggtagagaaacgctgggctggcttccagctagaagccaggctggaggcaggaaggctcagtcgtctgtttcctgcttgatgttctcgacggagacaggcagctctggacttgaagccttgtcgggcgaggccacgtctagatgctcttccttcacacgcacagcaatgatctcgccaggaacaggctccgacgagatcttcctggcaccctgagggtcgtcctccagcaggggcttcttggacccctgtctgaggggtcgcgtcttagtgggcgggattcttttccttttcttcccaaactgtttctttttcttctttgtggcctctttggccttcagcggtgtggccggttctgcggccacaggaggctggagctggtagccggtgagctcacaccagccgacggggtagatgtctgggactcgcagtccacccactggtcgtactcgctgtcgacgcgtggtcgacgatatcccgggaattcggaccgtacagcctgcttttttaccactgttcatcagtgtagcacgatgcggcgtttggagggggtccttcgtgggtgttg

SEQ ID NO: 126443 - DNA, 713 bp, Homo Sapiens
cacatttccaaagcagagtaccaacatttattaatcctcacaacacccctgtgaggtaggtcagtatgtcctttagagtcgagaactgaggcagaggtcaagcaaacctgccctgggccacagagcagcagatgaagggcctagacctggatccagaagctagggctctcggtccagcattcatccactggtggacatcacatgggcttatttttaccagcgaaggttacgtgaaggacaaaacgcactcagccagcaacggaaactcaacagttcaaacagcactggggaacatgtcagttaaagagacgaaacgctgaccagctcatgaatgaggcaagacaacatgcggctgaggaagtgtggaatcatcacgactggggattagaccaagaacgggcgctcaggagggttcaggaaaatgtaaacaaactaggaacccatccaaggggtgacaggcccaaatgcctacggtctccaaatggtagaaaaattagaaaaagatagtggaaaaatccaaccacgcaaccttaactttaaactaggaatgacaataatgtgtctaatgttcattcacactagaaaaggccgataatgtttgtaatataactactggcgatagtatcctatttgtatgccaactttcatctcaagtattctgcttttctttccccacagacaaacaagtgttgttctttacagcattctctctc

SEQ ID NO: 126444 - DNA, 1010 bp, Homo Sapiens
  misc_feature (613)..(613): n is a, c, g, or t
  misc_feature (654)..(654): n is a, c, g, or t
  misc_feature (678)..(678): n is a, c, g, or t
  misc_feature (706)..(706): n is a, c, g, or t
  misc_feature (734)..(734): n is a, c, g, or t
  misc_feature (757)..(758): n is a, c, g, or t
  misc_feature (820)..(820): n is a, c, g, or t
  misc_feature (857)..(857): n is a, c, g, or t
  misc_feature (863)..(863): n is a, c, g, or t
  misc_feature (918)..(918): n is a, c, g, or t
  misc_feature (949)..(949): n is a, c, g, or t
  misc_feature (964)..(964): n is a, c, g, or t
atttccttcattttgtttttattatagcatgtttgcttaatttacagcaagcagaaaataagctgggtcttgttttgatccaaacattgatgttttaaaggttgtacacaatatttgttaaaaagaacatataaaaatacctttttagaagcctctataagaaagaaaatacaaagtttaaccccacaactttcctctttgctagaactgtaaactactgctacagttttaaatagactttttgttgtttaaactatacatccaggaaaatctaaaaaaattaaagaaacgtgcatataaacgattgcatagcagaacatgaacattaactgcaaacagtaaagaaatgaaagttagaaatactatcaaatatacaaaggttctagaatcaatcctttaaacacattccacaaacagtatttaaaatccatcgttgtattctttacaggcaaagcctagattactaaaaccgaaattgaaaaaagtaatcctctaaaaggaatcgtttgtccataattcttacttgtatctgtaagcaagcaatctgagatttttaaagatgctagctttttattctgaaatgaaattggacatgtcaacgtcacttttgtcnccaaaacgatctttcgagagaaatactagaaattataaatnggtttaagggtattacttcatttnttagtcaggtactacactgataatcganagctcaaaagatgtgactctttgcttanaactgactaatccttttccccannataccttaatttcatggggcacacagatcactagatgagtgtttgtctacaactgcctcgtnataataactgaggtgtgaaagcaggctccctcataanaggcangcaatttgatacaatgcacagcaatgctgtagcacaaattcagtctttaaactangacaaacacaactactttgacattactactnacagcatagaactancatatatggcacacgctctactttaaacctcggcgatctggctcag

SEQ ID NO: 126445 - DNA, 2385 bp, Homo Sapiens
  misc_feature (149)..(167): n is a, c, g, or t
  misc_feature (363)..(388): n is a, c, g, or t
  misc_feature (415)..(470): n is a, c, g, or t
  misc_feature (1315)..(1387): n is a, c, g, or t
  misc_feature (2311)..(2345): n is a, c, g, or t
tttttatgaatgaaattctttgtttttaatttcacacagtttaaaatacaatatgaaatcaggctacagtatataaaaaactctccagcaaaatgatgtgccagcatcagctactaaaataaacaaacaaaaaactccgccataagaannnnnnnnnnnnnnnnnnnaaaaaaacatcgacacttacatcgctacatctctaagctacctcagttctgatttttaaaaagcacctgcttttcctttttttcatcttgcttctaaattttcagcttttaaaaaatataaattatatgaaaatacaagttggaaaatagtcaaacacaatataacatctttttcatccctatacttctcagcttnnnnnnnnnnnnnnnnnnnnnnnnnngttcagtaactgaggcagtattcctgnnnnnnnnnnnnnnnnnnnnnnnnnnnnnnnnnnnnnnnnnnnnnnnnnnnnnnnngttccttgaaacttctttggaaatgtaggtaagaagttcaacgaagtttatatagaccccaacagagtaagcggcatgcacaggcatgactagaagagagatggtgtatttctcaccatgaaggttaggcaggttaatgctgtaaaacccagagtgttcaatctccaaagtgaggaaaagcacatctgatctttgaatgctacctccgatccccacagccacaaaaatcagggctctatgtaggggaagtccctctccagaatggagaagggaacaaaagtgactctgaaccctaaagccaaaccaacaaaggttaaggcatctctgggaaaataagggtttcacccagctagaccagatttgcccatccttccttctgaagttaacgtgtgtttttaaaaagcataaacgcaacatttccagtgtataaaccacccaccactcttcttgggatggtctctggcctttggacaaaggagaaaaaacatctggccagatcgacaaagctgtcttaactaatacactatctacaaatcttgaaaatggtggacttagagagaaagggaattttagcaaacaagcgggcggaggagcactaggaggcactttcttatatcttatctgctataggaactgcaggagttatactcacagaaggagagtttccggcataaatttaataggaacggtggatgatttgagaaagtgattttatgcctggttgcaaacagcaagcattaattgatacccggccctggttctactcttacccattattgaaatgtggaaagacttacctagaaatctaaggtattatttcagctgcagttttgcatgtctgcaannnnnnnnnnnnnnnnnnnnnnnnnnnnnnnnnnnnnnnnnnnnnnnnnnnnnnnnnnnnnnnnnnnnnnnnncttttgccagtgcccaacaaaaatcacataatctaagagaaaacaatgtagtccaaacagttccacccaacactccctgagcagctcctaaaatattttgagagcttcattaaggcacctgcatccaaaagatcaaaataatacagctgggataattctgcctttgctttccatatggatgctccaattcatcagtatggggacactcatgaatcacagagctatgttcctgataattctgggtctgcaagaggatctgggagtaaataacaatcaattttcttaaagatatgctagaaagtagttagtacttccaatttctcatccaaatcccaaaaagggccagccctgagaagcttacctgaaatatttctttccttctctcatggaagtccataaaagccacccctcctccttatcctttcaactgggcaactatagagtgagggagattctaattgtattaggcacttttcctcactagttagatgttgacttttcctctaaaactccattttcagattccccctcacaaccagcagaaagatgactaccttgcttgactatgtttgtatttaaaccttgggggaactaaaaatctattcaaatctcatggacaaccttattttcctcactgaacctccttccttagtttcctttgccttcaagtcattcctctcttctggaattaaccttcacttaccctgtgccaagacatcagacccaagcaagaggccctggcatcacctgtgccattcattttgcatacacagtctcacctgacatcctaccggactaatttaaattcttcaaaggaaagccttgcacttctcttccaaagacagccaagtcacattttattgaaatgctctccccggccgtaatggccgaattcccgggcatatgtccggtaccgtcgactgnnnnnnnnnnnnnnnnnnnnnnnnnnnnnnnnnnncggccgcttcctcagactcactgactcgctgcgctcgtcg

SEQ ID NO: 126446 - DNA, 684 bp, Homo Sapiens
  misc_feature (144)..(162): n is a, c, g, or t
  misc_feature (215)..(278): n is a, c, g, or t
  misc_feature (358)..(383): n is a, c, g, or t
  misc_feature (424)..(464): n is a, c, g, or t
atgaatgaaattctttgtttttaatttcacacagtttaaaatacaatatgaaatcaggctacagtatataaaaaactctccagcaaaatgatgtgccagcatcagctactaaaataaacaaacaaaaaactccgccataagaannnnnnnnnnnnnnnnnnnaaaaaaacatcgacacttacatcgctacatctctaagctacctcagttctgannnnnnnnnnnnnnnnnnnnnnnnnnnnnnnnnnnnnnnnnnnnnnnnnnnnnnnnnnnnnnnntataaattatatgaaaatacaagttggaaaatagtcaaacacaatataacatctttttcatccctatacttctcagcttnnnnnnnnnnnnnnnnnnnnnnnnnngttcaataactgaggcagtattcctgataattttattttannnnnnnnnnnnnnnnnnnnnnnnnnnnnnnnnnnnnnnnnggttccttgaaacttctttggaatgtaggtaagagttcaacaaatttatatagaccccaacagagtaagcggcatgcacagcatgactagaagagagatggtgtatttctcaccatgaaggttaggcaggttaatgctgtaaaacccagagtgttcatctccaaagtgaggaaaagcacatctgatctttgaatgctacctccaatccccacagccaccc

SEQ ID NO: 126447 - DNA, 2044 bp, Homo Sapiens
  misc_feature (82)..(154): n is a, c, g, or t
  misc_feature (169)..(185): n is a, c, g, or t
  misc_feature (203)..(349): n is a, c, g, or t
gcggcgtaatttcccacccgccattttctcttttgggcccgcgctctttctttgtgtgtaaaaagattcccccccgtttctnnnnnnnnnnnnnnnnnnnnnnnnnnnnnnnnnnnnnnnnnnnnnnnnnnnnnnnnnnnnnnnnnnnnnnnnnccggcaacggccccnnnnnnnnnnnnnnnnngctcctgccttcttttcnnnnnnnnnnnnnnnnnnnnnnnnnnnnnnnnnnnnnnnnnnnnnnnnnnnnnnnnnnnnnnnnnnnnnnnnnnnnnnnnnnnnnnnnnnnnnnnnnnnnnnnnnnnnnnnnnnnnnnnnnnnnnnnnnnnnnnnnnnnnnnnnnnnatgggaaaagttttaaatttttaatgaaaaagacttagaacaatgtattatttacatgtaaataagaaaagagagcagaatccccatatcctcttcaaaggaagggagacggcaggccatttatgagaagaaagtccatataaaccccattaagtagaatctggatctaaatacttccaaacaggagtacacagcaggtgaacagtctccctcatcccactgatctgctgcttcagataagatcagcaacgttcatcggcatctcatcaatctgagtggaatagtactgctcgatatctctgaggatgcggatgtcgtcattctttacaaagttaatggccacacccttccggccgtatcgacctgatctcccaattctgtgtatgtacaattctctgttattagggagatcatagttaatgatgagggacacctgagggacatccaaccccctggcccagacatctgtagaaataagcactcggctggcgcccgaccggaactccttcatgatggactcccgctctttctggggcatgtctccatgcattgaggatacagtgaagttggcttccctcattttctccgtcagccagtccacctttcttttggtgttgcagaagatgaccgcctgagtgatggtcagtgtgtcgtagaggtcacacagagtgtcaaatttccactcttccctctccactgccacgaaaaattgcttgatgccttccagagtcaattcatcacgtttcaccaagatgcggattgggtcggtcatgaacttgttggtcatctccagaatctcgtgtggcagcgtggcactgatgagaaccacctgtgtggctggaggcaggtacctgtatacatcgtaaatctgctctttgaaacctttattcaacatttcatcagcttcatccaaaaccaacattttgatagcacgtgtccttaggcttctgcgacgaatcatatcaaaaacacgccctggagtgcccgcgacaacatgctgtccgtaatccagcttcctgatgtcctcgccaacattggtgcctccaatgcaggcatggcactggacattcatgtagtcaccgagagcaagcagccccttctggatctgcacagccaactctcttgtgggagccaagatcaaagcttgagtttcacgaacctgaatatccaaacactggaggactgagatactgaaggtggctgtttttcctgtgccggactgagactgtgcgatgacatctctccctttgatgatctgcttgattgctcgttgctggattgctgatggtttttcaaaaccgtaagcgtagatgccccgcagcaggtcctcccgcaggcccatggtgtcgaacgtgggggtcacatccacctcctcgctggtctcgaattccactttagtcatgtcttcctctttgagcagccgctttcgcgccgagcccgaggtcgccatcgtggccgtggtcgccatgattcagagtccgcggaagagcacagcgcgcgccgctgccgacctcgctgccgctgccgacctcgctgtgccgctgccgacctcgctgccgctgccgacctcgctgtgccgctgccgacctcgctgtgccgctgccgacctcgctgtgccgctgccgacctcgctgtgccgctgccgccctcgtgccgaattaaacacccagcctcgtacctgcggtattggtgtgt

SEQ ID NO: 126448 - DNA, 841 bp, Homo Sapiens
  misc_feature (116)..(153): n is a, c, g, or t
aattttctgccttttattgttatttcaaaaaatatttgatcatttgttccaaaatgtacatttaaaaaatccatacaaaactgtaatttgttttaaaaccagacagaaacagtggnnnnnnnnnnnnnnnnnnnnnnnnnnnnnnnnnnnnnngacacccctccccccaacccttttttacatgaaagcataaatacggcaggtacaaattttccttgagttccttgttgaaatttggtccatatgaacaggctagagtagaaaacagacactttgtccacatttgcattatcagttgctcagggcaccagcagccttagttcatccttcagatgtttttttaaacagaggaaccgaaaaatgaggtttacagtctcatcacatgaacactcaaatctgtacccaaggaaacagcggtattatatttactgtcacagctagaccctatcaggtgaacagggctctccacctgcggctgttgcttcgcaaaatatccttcctctccacgtgaacaagtagctctagagtgcttttaggcagagtgacggtgatgtcatgggcaccacgccaatcttattcctggacaatgacttaagccccatcgtgagaatggttttttcctcttcaacacattttttaaaaatagacctctaagatgatgctacatgttctaaaggagtgccacagaaacccacccaggatcacaagaatgacaacaaaaggaaagtggctatttcttgtgtaagggatgacgactccccctcccatgggtcccatttctcccccagttgcaggtgttttaagggacagaaaggctgtggaaaggaccactggctgggag

SEQ ID NO: 126449 - DNA, 1233 bp, Homo Sapiens
  misc_feature (230)..(230): n is a, c, g, or t
cttggtgtagaacatttatttatttttcccacaaatcactgaaagtttaggtcagtgggaaataattttaatcaaataattgtacatattcttcccacatatcctgccttgtattaggaaatgacattgtgatccatttcattacaagtaaaatattacaaaatatttacaggaaaatattaaaaataactcaaacacaaaaggcaagatgaaataaactgttttttttnctccagaaatctctactccagtgcccacagcacacaagagtcaaaacaaataagcaactaagatcccccgatcacaaatttccaaagaactggaggaggggaagaaacagggtgaaaatggtggtatgaaagggaatggatgttagcagcactgcttcaataactgatctattctggatgaaatacccttttttatgtgcagtaaattctgaacaaggctaaattttaggatattccttgaactgaaattagaaaataccctgacaatggaagcagctctttcatctaagtttaataagagcctctttctccatgggccactgttgtgaacagaagccttttctggcatcaaaagctgtcacagtagcccttccatctctttcatgaaagcctcatagacatcatccttagtttgtactgagacaggaacagaaggaccagatttgggtgctgctttggcaagaggcacagcagaatcatcctctgactttctttggggagcagcagtagcccctttattctcccgacgtactctcagtgcagtgggcacaaatcgagtaatctctgccttgggattagtgatctgtggcttggcactgatggttgctgtggctttcttctcaatggtggctgcacttgtatcatccgccttgggtcgctgaatcaagttgggtggggcacttaaaaccccagggtttggcaagggagctggtgggaacagcccagggggggcaggtccaaggggaggcaccaaaggtgggcgcatcatgccaggacgaggtggaggaatacctggaggtgcagggggaggtagccttggtgggggtccacgaggagggggaccaggaggcagacctggaggtggacctgggggagggccagggggtcggcctggtggtggtcctggaggtaaaagtcggggtaagggccctcggagtcctggcattccaggtggtctcaggaatggaggagctcctggaggtggaccaggaggaaggcctgt

SEQ ID NO: 126450 - DNA, 643 bp, Homo Sapiens
tttgtttctccacccacatagactgtatttgtcactattatacacaatatggtgccatcatgcatattttgtacatttgatcaaccaatatttatataaaactttcataaacactttcaaacagttttaccccacagggtgggcagaggtgcttgtcaatataataaaactgaacaacagtggtagaaaaaggtacacttgtacttatcttcaagtttaagatgtaaattttttctgttcaatggccactacctcatattatttttaggatctgggatcggacttagcaacacattatgactttcaagaagttgagctcactgttttgtggcgttctttgcagaacaccatgaacttccgggtgccccatgtgctgacaagtgtcagaacagctggtgtccagctgacgtgaggctggacttgtgtgataggcacgttgtggccatagctccccactctgtgaaatgatgagatcgacatgcctccatccatcagtaggatccccagcatggagaatttacaccgtcacccttcacagaaaggagccaagtcctgggcacctcctctcaccttgactttcctacaaaaacccttctttcttggcaccagtatagcacatgtgtattggtcatttaggagccca

SEQ ID NO: 126451 - DNA, 1649 bp, Homo Sapiens
  misc_feature (1337)..(1368): n is a, c, g, or t
gcttttagaatactggtgcattttttattaaagaagagaataaagcatttgtaaatatatttctctcacgtatacttcaaaggtgacgctggtctgccactacagagctggggagcagacaggctggagctcttcccccaacccttccacactcctctcccccagataacagacacacacggagggcagggagctgcctagcctcaaaggacaaaagtttcccagttgcacgtacagaaggactcagtcgccaccagctcccatcacagtgccgcccggaaagcaggtggtgtctccaggaggtcagggatgcttggtaagaaaacccctttacccattagaaataaataaggcatgaaggttcccactgggatcccggtgcagaggccagggcccccccgccttccactgactgtatggctcttctggtttctaaggtctcaggaagggcggcagaaggaaccagaagccctgaagggctgctcagggcaagctggggacctgggtgtctcttagctgaacttgactttctgacatcttgaagcaaaactcctgacgcagctgggtcctcaaaagccccccacaaaggtgggaggtgaagagcaggcattttatgggagggagggagggagcatgttcctcagccccatcccaatacaacacgatgcagcatggggcgaaaaccccagtccccagtgaaggggaggcaggggtggacattgggaccaccggctggtggtgcatgtccagaacattctgggggctgcagacatgacctgtgccagggttggcctgtggggagcgtggagtgactgagacatcatggtccctgagatgggggcaagcacagagacgggagtcagaggccaagcttggttagttggtggcggtgtgaagggatgggggctccccactgccccggcccctggaaagcttaaggcccagcaggcatttctggggttggaagccaaggagacaagctctgagcgaaactgcaccactctgctgaggggctccttctcctcctcctctgactggctacagatctgcggtgggccaagagtatccagggagaaacctgtccctggcagggctggagcagggacactccaggcccagctgaggcttcctgctctgcatggcaggggacatctctgacctggtcaggaccctggaggtgggacagctggtgctaagggaatgtcagcgcatcagggttggggagaagcagtgggtggtccaggaaacccctgaaacagctggccctggggtcccctttcaagtgtttccagttgtggcaaggggtcaaggagaccttgcattgcaaatctcttagnnnnnnnnnnnnnnnnnnnnnnnnnnnnnnnngccaactgatccagaatggctttcagaagcctggtcaccagtctgagggtgaggcgcagggtcaggaagccaggggctgggggagctgggggatccctggggtagtggggacatttggctttgaactcagagctgcgcctttgggctggcgcgaggtggccaagggctcctgggaggcaggacaggtgggctgcctccgctcagcagggaacatgctgcgtgcttccggatcaggaggccgcgtgctgtggtggcaggccgctaaagggcgctcgctctct

SEQ ID NO: 126452 - DNA, 716 bp, Homo Sapiens
ccaggttttaaatacttacagctttattaggagaaggctgtggtcacctcagcagccagctcccttgtatacacagtatacacagcccagccagcacccaggtccttccatccttctgcagtacatggagtgcaaaagaaccaaacacaacggcggggagggagggtctaccaatgagtgtcagtgtctagtgcttccgggagccaactgccaggctagggacactcaagtccctcaaactgtcatcagctcctgccagaccccactccagcatgtcgaggttcatatgagagtgtttgggccagactcctccaatcagtgcacgcgatgggcagaggaggctagggaatcctgagcccaaagctgtattggtccatccccctcaagaagttgttggagctttcagaacgttcctcttcttgtgtagacatgagataccgctgtaactttactccatcaccagaaacctgtgccttgagtctagtctctgctcagccctcgagagcatggttggattaaggaaatagtcaaaggcaagcaagacaaactccctaggttgtcttggtcatgcgtcttttaaaaagggaaagaagaaaaaccaccacaacagattaaagcaccgagggctggcttgtgtcaggagccagagaggttgtccttccttgaaatggtttgtaaagtgactgatggcaaaagctgctctcctctcctcgtgc

SEQ ID NO: 126453 - DNA, 1224 bp, Homo Sapiens
  misc_feature (62)..(79): n is a, c, g, or t
gtgccatagctaaaattaaccctcaactaaagggaataagcttgcggccgcggctgtaggcnnnnnnnnnnnnnnnnnngtatcaattaatttttttattcagaacctggatctttaagactggtataaacaaaaataaaatacaaacaacttgttattaacataatagctgcagttattaactgcaagaatacagtaaaaaggagtcatactaaatgttaatgttcttgcaacagaattttcccaatcaccttaaggtagcaaattctggcaagaaatgataattcatttcttattaaaaatacttaaagaatttccaagattgatcagttgtgccacaaataaaacagcagtttattcaaaagagcccttacctttctcttattttcctaaaagatctgccatttacaggtaactactaatttcagatcagttattcaaaccagggttcttcctgtaaatccacatcttagctttatatatagtaaacttacactcatattccctttccagtcttgaagctaaacacttttgtaaaaggaacaatctaatatcacttcatatgaatcttggttcttacttttcttctatctcatttttattttcttctattatttgttcttcctcctcatcaccaaaagtctgttcctgcatggtggtaaaggagagagatctagcagccacttctgcagcaaggccagcagtgaaggtaaaatctggtgacagctgtagccgtgccagcctctgcttaatggagggctgtaatgagtccctgggagttggaggggcagtggtcagaccacttccatctgcttgtggttcatcttcactctcacattggtaacacattctttcttctgctccttgggggaagacttcatttgaagaattatctttatttttaccttctagagagttttcacataaatactcagtcctacttatttcattgtctgttgtggcggatttattactttcactcttctgtagtcaatttttattgagttttcccatatcttagtggttgccagggagcaaagtgttggaaggtgtccattttcctgttgttgagattgccctgcagacaggatactgggatcaagtagctcaatcagctccacatcctcttgtaacaggacttcctgttgcaggatggtatgtaatgagtcgagtcggaatccaatatccaacttgtgaagtaagtcatctttcttattgcactga

SEQ ID NO: 126454 - DNA, 612 bp, Homo Sapiens
cacacgtacattaggtcctgggtggaggaagaagtggtggagcctcagggccagggcaggcaggagcaggcactgatgctagagggtgatgaccctgccctctgccacccaggctgcgtccaacagcctgtgactcttccctggagaccccttctctcacacttttatctactggcatcacccaccccacatggcatataccacccatctctggtctggggctgagggcaaggactgcactagtccagggagtaggggacccttgaacaccaagagcaaccttgagaggtgccaacaatggtgtgctgggggtggggttactttagaaaaagtggacacagaccagactaaggaagaagtctgaggcagacggtgagggtggcccaggagccatggcctcacacagacccgaggcagagaacagctcattgggtcactggtgatcatccagctgctgtaggagtgtccgccgccgcctctccagctcaccctcactcagctcactttctgacgtgtcccagcctgtcttctccttcttgattccaaagcctggggaacggttagggagctctgcctgttggagcccctgtccttgtcctgttcttgttcttt

SEQ ID NO: 126455 - DNA, 1013 bp, Homo Sapiens
  misc_feature (81)..(179): n is a, c, g, or t
  misc_feature (182)..(347): n is a, c, g, or t
gggccctccccgcccccccggtttccctcgtgtgtgcctttttttgcgccgggggggtccccccggcgcggttcttctccnnnnnnnnnnnnnnnnnnnnnnnnnnnnnnnnnnnnnnnnnnnnnnnnnnnnnnnnnnnnnnnnnnnnnnnnnnnnnnnnnnnnnnnnnnnnnnnnnnnggnnnnnnnnnnnnnnnnnnnnnnnnnnnnnnnnnnnnnnnnnnnnnnnnnnnnnnnnnnnnnnnnnnnnnnnnnnnnnnnnnnnnnnnnnnnnnnnnnnnnnnnnnnnnnnnnnnnnnnnnnnnnnnnnnnnnnnnnnnnnnnnnnnnnnnnnnnnnnnnnnnnnnngagcttttgtcactttattgttaaccaatgaatattatccaaaattagagatgtaattgtaacttaattgtacaacacaaaattatgctaatggtaaaagcctactgggatttaccaaatactcattagtgtatttttacattgactatatgaacatgtgctcgcgactgctaataagttataattggtttaatctctaagaaatccatattgcaaatggttcttgtttagaaaaattcacacagccttaaaaatggattaaatccattttaatcctaatctacaaatagatcataaacagcaaaatataactgataatttttcaatactgtatcaaactgatgtagctatggtagtgcacataattcaaaatgaggaaaattaacaaaaatccaatgaaagttcaggtttttatctattatgcaattgctttaaagtgaacatttatgtctcaaaacatgaatagtagggtccaccatccattcctttgatgtactgcaagtaggaatattctcttccataggattctgaagcatgtgcacaaccagtggtacaacagtcacttcaaggttaaccagctatgttttgtcctacaaagttcaaaaaatatattagacgcaacctttccttttacataatgtctgcccagattaatccttttaaagt

SEQ ID NO: 126456 - DNA, 2806 bp, Homo Sapiens
  misc_feature (2585)..(2644): n is a, c, g, or t
gtcccccgtctgctcaagagggattatattactggtggtccagttccatgaagctttcattgcttgccgagggattttgaaacctggcccaggaacccggttctgaattaccacttttccccgtcgctgtcccacagggccagtaggaacttaacgtgttcccatcctgtctttggagcagtttttgggccacacatctgcttttgcttttccaaccctcagcatctggcaaaggaagggaaggagagtcttcttccagactcccacgcagaatgagggactgccctgactgcagtgggtgacagaggggtcaccagaaagtctgcatgggaacctggacttctgctgagaggagaaatggagagggccccatggccctcggtgctgggtggacccaaagcagaatcagaggagcaggtataagaattgaaggcaggaaactgctgtagattctcgaggggaatgtggactttctgggtacttgccctgtttcttgttctcctctatctcaatcctgcgctctcggcggcgttcctcccgagccttcttttggcgctgacgtttcctcttctcaatgtcatctgagaacatctctagggtttccttagagaccacaggaggttgcaaagccagttcacagatgctgaactcacaggtgagtggcaagtgagagagatatctgtgacgctgtcgaacatcctcagacatggagtagccagcaatctccaccacagttgctgagatcttctcggggctcctctccaggctgccgtactcccgcacgaggcagcgcacattcacagggtgcaggaacatatgctgtccatcttccgcttggtaaaagtagtaacaaggagagctgctgaggcgtgtgaagcctgacttggtgatgggttcctgctggctggactcagtgcaaatggtcccctctttaagattgtcatctgctaactccaagtcatcacaggcctctggcaacccctcaggctctggttcagacactgcttcctcctcttctaccagagggagagcaagaggtctagaaggagtgtccagagaacaaacttccgtggtttcttcatcgaaggcagacagatactccagcacacccttcctgggttgaaaaacagactccttcgccaagggagccatcagcaccagttgttccagagcagccacaacaccagtgacctcccttctgcttccggccaatcccgacagagcctcttcccgagtcttgagctcctggatagctgcctcaataaagcaggactcgggagtgtgcttctcctctgccagctgctgctctagtgctactttctcctccagaactacccggtgcagcacctgctccttagaggccagcagcaacttggagtactggctgtgctgttcatctcctagatgaatgggatggtctacattcatccatttggatttgggcaaagccaccaacacccctttctccctcttcatcagctgcatcgtaatggtatcaccaacaacatactgatgtgactctgtggcaacaacactcttgagatccttcttatgcacagaactgtaacagatgggacatttactccacgtcttctcactcagtgaaagatagtgcaggatgcatgcccagcagaagatgtgtccacaacgggttatcttggctgcagtaggtggatagaggcatattgggcaagatggcacttcatggctacaaatgcgcacttgttccacaaagtcccagttaactaatgtatcaggatcagcaaaatgagctgtgtagtcttggtcttcagacaccacaaattggcagttggcctgtaaaaagagttccttgttaaaaggcttatgtccccacttgttcctctttccccagctaccatgtccactgccttcaaagtgacccgtctggccacggggttcaaaagtgaaattcaacaagtggttcaggttgatcttcttaggaccagagaactgggcagggctaaactctgcccgttgagcctctgctacctcatctcgtcttccaccattaaaagaagagctaaagagtttgctgctgccgccgcccctttgaggaggcatcttgttaaaagtcttgcttttctgtgaactggagcgacgggactggttgttaaaactttcatttttggggtaggaaagttcacgtttgcgattataacgcttggatccactggagttctttccatcgctcttgggtttagactcgccggctggccccgccgaggcggagcggggcggctgttgccctttgctgctgcccgaagaggcggaggagctgttggagccgctgttcttgtccatgtcggaggcggtggcggcggcgttgggggagctcagcggcatcaacgggggcctcggcggcgacggcagtcggagcggagcgggcgcggcggggacccaggctcatggcgttcagggccggcgggggtcggcggcggcagcggttctcggccttcatggcgacatttttccctgtttccttccttggcttctcaaactaggaagagaagcggcggacggggctgttaagcccggcggcagcggcgaccgaggacgaggaggcnnnnnnnnnnnnnnnnnnnnnnnnnnnnnnnnnnnnnnnnnnnnnnnnnnnnnnnnnnnnagggaggttgcgcgagccccgccggccggccggccggacacgctctcccgccgcgaggcaggggagagggctggctgtctcggtgtcggggactagtgtctccgacacagcaacggatactcgcccctgggccgaggccgacctgctccgggaatggcgacg

SEQ ID NO: 126457 - DNA, 571 bp, Homo Sapiens
ccgaagaggcggaggagctgttggagccgctgttcttgtccatgtcggagacggtggcggcggcgttgggggagctcagcggcatcaacgggggcctcggcggcgacggcagtcggagcggagcgggcgcggcggggacccaggctcatggcgttcagggccggcgggggtcggcggcggcagcggttctcggccttcatggcgacatttttccctgtttccttctttggcttctcaaattaggaagagaagcggcggacggggctgttaagcccggcggcagcggcgaccgaggacgaggaggccggggctcgggagtccgggccgggcctggcggggcggaggctgcgggggaaggggaggcgagggaggttgcgcgagccccgccggccggccggccggacacgctctcccgccgcgaggcaggggagagggctggctgtctcggtgtcggggactagtgtctccgacacagcaacggatactcgcccctgggccgaggccgacctgctccgggaatggcgacgagtcgcctcgtgccgaattcggcgcgccgtcgacttcatactct

SEQ ID NO: 126458 - DNA, 1173 bp, Homo Sapiens
  misc_feature (103)..(113): n is a, c, g, or t
  misc_feature (195)..(195): n is a, c, g, or t
  misc_feature (361)..(381): n is a, c, g, or t
  misc_feature (456)..(491): n is a, c, g, or t
gcgcttttccattgggggaggaattccaggccccaagttcatggcccaggggtttctctatgggaaccaagctatggaccttgttcccctaaccttctggggnnnnnnnnnnnaaaagggaaaggtggtagaaagcttttcgcaggggccgagggcggcccaacagggttggtttgtagtaagcgcccctttttngggggtcaatactttattttggtgtaaagacaggaagctggaaaatacactgtatttaaaattttcttggttccccctcacattgtggaaaccccctccccccagagctaatctgttcaaactcaaatacttaaaaattacagcagccaaacaaaagcatgggggnnnnnnnnnnnnnnnnnnnnnccagatggagaaggtagcctgggccagtagtgtcacttggtgtggacgactgaggtgctgaacaggagcttctgnnnnnnnnnnnnnnnnnnnnnnnnnnnnnnnnnnnnagagaggggatctgaagtagctggtgtgtccagtttcatgaaggctgcttcaatagcttggctgaaggaattttgaaaactgggcacaggaacacggtctgaattatcactctccccgtcgctgtccacaggggcaggaggaactaagctgttctcatctttctttggagcagttttgggccacacatctgcttttgcttttccaaccctcagcatctgggcaaaggaagggaagggagagtcttcttccagactcccaacgcagaatgagggactgccctgactggcagtgggtgacagaggggtcagcagaaagtctgcatgggaacctggacttctgctgagaggagaaatggagagggccccatggccctcggtgctggtgggacccaaagcagaatcagaggagcaggtataagaattgaaggcaggaaactgctgtagattctcgaggggaatgtggacttctgggtacttgccctgtttcttgttctcctctatctcaatcctgcgctctcggcggcgttcctcccgagccttcttttggcgctgacgtttcctcttctcaatgtcatctgagaacatctctagggtttccttagagaccacaggaggttgcaaagccagttcacagatgctgaactcacaggtgagtggcaagtgagagagatatctgtgaccc

SEQ ID NO: 126459 - DNA, 632 bp, Homo Sapiens
  misc_feature (167)..(187): n is a, c, g, or t
  misc_feature (255)..(297): n is a, c, g, or t
cttgggtcaatactttattttggggtaaagacaggaagctggaaaatacactgtatttaaaattttcttggttccccctcacattggggaaaccccctccccccaaagctaatctgttcaaactcaaatacttaaaaattacagcagccaaacaaaagcctgggggnnnnnnnnnnnnnnnnnnnnnccagatggagaaggtagcctgggccagtagtgtcacttggtgtggacaactgaggtgctgaacaggannnnnnnnnnnnnnnnnnnnnnnnnnnnnnnnnnnnnnnnnnnaaagaggggatgtgaagtagctggtgtgtccagtttcatgaaggctgcttcaatagcttggctgaaggaattttgaaaactgggcacaggaacacggtctgaattatcactctccccgtcgctgtccacaggggcaggaggaactaagctgttctcatctttctttggagcagttttgggccacacatctgcttttgcttttccaaccctcagcatctgggcaaaggaagggaagggagagtcttcttccagactcccaacgcagaatgagggactgccctctgtcacccactgccagtcagggcagtccctcattctgatgttggagcggccgc

SEQ ID NO: 126460 - DNA, 412 bp, Homo Sapiens
ggcacgaggtttattactggtaatttattgcacaggtttttctgcatcaaaaaagtatctgctaaaatagagaaacagttgtgtctgaattcacatttccccccaacttctaaaaatatttcccctaaaaaagaatccactcatctaattttaaagaaaatatacttcttacacaagacaatccaaactgatgcaaaatatttattccaagttagttattttatgcagtagtttccccctcgagacttgtgataaccacatcttttaaatctgtaaataatgttatcaaaataatcttaatctttgaaatctcacaaaaatttatattttacaatccaccctgaatatcaaggctgcaagaataacacaacatttcctatatccaaatattttacagctgtacccaaaaagg

SEQ ID NO: 126461 - DNA, 973 bp, Homo Sapiens
  misc_feature (840)..(840): n is a, c, g, or t
  misc_feature (871)..(871): n is a, c, g, or t
  misc_feature (873)..(873): n is a, c, g, or t
  misc_feature (886)..(886): n is a, c, g, or t
ccgttttgttatttaatcatatatttttacttgtatctaagccaggtcctttggcaatgaggaggtgtgcagggatcggggtgaggaagtgcaggactggatggacatttaaggtagggcagctttgggggatgccacttccaaatgcaatggggaccatcactgtgtattccccatagttgtgtggtgagcagctctggataccctgaccacaaagctttggggacaatttgttcaccagaggatgtgaggaggacggaatactcaaaggcactcagggatggtggagctttggagctgaggcgggcaaggcctctcagatggtcacgctgttctctaccatgctgggtcaaaggtactcacagggcaggtccaggactgcattccggacctcaatctccttgtccatggaagccagttcctcctggaattgtctcagcacagcttggggctcaggaccagagaaatatttctcctcatgctggtggagattgggcagtaagtccactatatccttctctgtcacatccttagagatgggcgggggcttctgcatggtgcatgggccattagggatccaggagtaccagtccagctggcccaggtggttagaagcatgctgacctgtgcatgtgaagatgcacatggtgacaaagtggcagagctgagcccgggactcctaggagatgaggacccctggtcttgggcctctgcagtcagtctcagtctctctctgcacaggctgcactctaatcatcttcatggctggcactatgtagaaagccaccatccctcacgtacggctgagatcccacagctgatgcatctagccataaagangattcaatcaggagcacgtcagcagtcacangngacaaggatgtangcaacagcatgtctcgagatgcactgctcacacatgtcaacagtcaatccatcggaaacatcggcacgtatccatggacgatgggtc

SEQ ID NO: 126462 - DNA, 758 bp, Homo Sapiens
gatagaacgcttgtaagggctttgttttatataaaactgctttattaaaaagtcagctattaggaaaacaaagcccttacaagggttctatcaaaaagtacaaattttaaataaatgcatcagaaaaatggcagccagatataccagccacagtcacaacctcaaaggccttgtggggaaggaagggagaattagggaggaggttccgagaactcaaggaagaggctgggcacagagggtctttgggtgcctgcagagctgggtcctggagctaccaggcaagaaccctgcttccgttttcctttccttggaaaaatgtaaagaactggcaggtgtaggaaattttgagactggagcagaaaggcacaaaagtcatttataaggtatgattgctcactctagtcctgaggcacatggggtggataaatgggggatcagagccacagggtccctggctctggtcatgcttgcccctggctggtaccatctctgagtttggccacaggttaaattaaggtagaccaagtggactgcataatcctggcagcccggggtctggagccagtctttagatcagatgtgttgcttcattggcaaactggtgtctgccccccaagagatccccccaatgaggagcagcaggtctcctgcctagccctgtcctctgagtcactgtgggtgcccacctggacaaggaacttctgagggcagtctctgccatccaggatcctgagaagccccaagccccagagccagag

SEQ ID NO: 126463 - DNA, 2459 bp, Homo Sapiens
tcattcttactggtaaattcattttaataatgaggggaaaaaactttagttattaaaaacaaaagaatgaatacacatacacacactaaatgtggcagatgtttccaggagagattagcaacagagaggccacatgatcaaataaaatttacacttttgatgggattgtcccctcgtggccacccaagtgtttgtggaagaaagtctggagttgtttccaagcatccacctgagccatggcatgagccctgggctcccctccccagataataggactgcccaccaaggcatgcagggaagcccgacacagggggaagtaaggaggctcaatatagtgccctgtctctgggtaacagatgatctggggctttctcctcccatgggcctgcaagcgtttacaggcctcattagcatagaactcactcttccagttgtggtcatcctgacctaccaggaacaggaaggtgctctctgccctttccacaggaatgaagctcttctggtcaggtccttccaaagggctgttcaggacatccacaatgtctgcatagccatctttggtcaccttgatgcgatttctgttgacgcccacagggggcagggtctcgcccttgtagcgtaaggttcccccaacattggccacagagccgttgatgacgacagcagccgtgatgcccttcaggaaagaggccatggaaaggcagagctcaccccctttggaaattccaagcagcccaactcctggaccttttacctcaggatgactgagcaaagtagttcatggcttcttcaaagtactccagatggagcgtctcccatggtcttggggaggtcttcataggttataataagccagagccatcacagcaaaacccttcccagccagcagactagcccgatactccagcaggccacctccagttccgaacatgtccacaatcccaggaaagggcccaggttctggcggcaggaagagcgtgcctcgcacccggcccacgcgcaccggctcgcgccgcaccccgggcgggaggaagtagcgctcgtgccgcgtctggcacagcagccgcccggggtcggggtcgtggccatccagcacctccagctccacggccaagggcgttcgcacgtcgcgcttcaccagccgcaccaaaggtttctcgggctccaaggcccagagcagccccatgggctcaagccccgcgaagctgccgcccagcgcgggcgcgcgctccaggtccagctcgccaagagtgtcggcgcggtagcgcgcgtgggcctggaaaagcgcgcccttctcgtcgcgcagggacgcgcgcagcgtgaccggctgctccggggctaggccgcgcacggcgattcgcaccggttcgtcccagcagcagcggcccgcaggctccaggatcagcgtcgccgccatccgagcaggaaccctaatgatctgaccaacctgcctcagctgtggagaccccaggaactgcgccgaactcttcaggctccattggtacagccgggacgctcgaaggacagcaggagatgaggccattttgaattcagacctgagaacaactgaatgggggtggggagaaagaagcttgttagacatcctctcgggctgccgtcgcaggctaagcgcccactagggcagagctgtctgctaacgtgagcggggaaggccagagtccagccgatcagccagaccaaatatagacacactggaacttgcttaaagtctcctgtgttgaaacctccactttatgttggaaagctacttcctaggtttgcttttcagaagcttgctggcctgcggaatgggctggaccagggctggttcttaaagaaccaggcagctagcagtctccaggctccaaactcctgatggcgaagaggaatgcagagctggagttagttttgatcactttgttgaataattcacactcattactaatcttagggcttttctttcaaaatctgcaccatggcgttttgcttttgtgttctctgtatatgcctatcctccacctcaatcccacatcgaaaggtgctggcttcttactagctgtgtgacctctgagcttccttccttacaaggggaaaaataaccaaatggggtaataggtaaataatttctccaacctcctgaatttggaaatccgcccgcctccagcctccccaaaatggctaggatttaccggggaatgaaccccccgcgcccccggcctaaaaggtaaataaatttgggctctacccgggtccgccccacatcaatgggcccccacatccggggccagggggcgacaccttttttgtttatctccacggaacaccggcgattcttaccacacacattgagcccacaaacgtgagagattaccaaaaccgcagaagaccatgcacccacccttagcgcgcacacttcagacacacccctattccagtcgatcccctgtgcgaggcctcag

SEQ ID NO: 126464 - DNA, 680 bp, Homo Sapiens
  misc_feature (434)..(616): n is a, c, g, or t
tttttttcacaaaacaatatttatctttattacatgtgatgtaccattttctctattccattttttcaaatgttcatacctagtaaatttttgtgttctgtgaatcaatttaaacaaaaaggggaaggggggaaaacagacaaggcatactattaggttaagtgagaagcacccaacatgcatagaagaaaatcctacccaaggcaggaaacacaagccttagtcccagctttgcctgagactttgcaagcctggacatatgctcaggtttgtactcttaggaagcacaccacatcaggaaaacagaatgtaaggcaacatctgcacacctccactcctaacacctagtgttgcctgacacaaggggaaattcctgctcaggaaacaggatagtaaggcagacgctgactctgaagtaatctgcctaggttaannnnnnnnnnnnnnnnnnnnnnnnnnnnnnnnnnnnnnnnnnnnnnnnnnnnnnnnnnnnnnnnnnnnnnnnnnnnnnnnnnnnnnnnnnnnnnnnnnnnnnnnnnnnnnnnnnnnnnnnnnnnnnnnnnnnnnnnnnnnnnnnnnnnnnnnnnnnnnnnnnnnnnnnnnnnnnnnnnnnnnnatgcatcacacaaaaggaaacctcctctacctaaatcttacaacaatggttttagatattaaaa

SEQ ID NO: 126465 - DNA, 649 bp, Homo Sapiens
ttttaagggatatataaatacatttattggtggtattcctgaatgatgaatgcagagaacagaatacaaagaaatcagcacataaaaggaaccattaatctttaaaaatgctatatacttacattttgaccaattttgcatatttgtttagatttacaaacaaatgtaaagctaattccaaagttttcttctgaatatacttcaaatttgaattgtagtgttctccattccaaagccagctgttttttgctggatttacaccaactatgatttactttgtttgtatctaacctaaaagcaagactctgcaagctgatcctgaagcagccagttactcaggaattttacaacagctattaaagagaggataaagccacatgaaagagcaagcctcaatactagatacatagatacaagagaaaataccaagaagcaaaaagaatcacagaaataccaattctattctaaagcataatttctaattctagcagcaattcaattagcaatagcttaggtgcctttattccaaaaaacaaaaccattagttctttcactacaatttcctgactttacccaataaataattatcaagccttcatattcttttttaaccactcaagaacataattcatacattacagaatcatta

SEQ ID NO: 126466 - DNA, 1308 bp, Homo Sapiens
  misc_feature (64)..(64): n is a, c, g, or t
  misc_feature (66)..(66): n is a, c, g, or t
  misc_feature (142)..(142): n is a, c, g, or t
  misc_feature (954)..(970): n is a, c, g, or t
  misc_feature (1127)..(1128): n is a, c, g, or t
  misc_feature (1131)..(1131): n is a, c, g, or t
  misc_feature (1134)..(1134): n is a, c, g, or t
  misc_feature (1144)..(1145): n is a, c, g, or t
  misc_feature (1220)..(1220): n is a, c, g, or t
catctagaactaaatttgatattctcccagtgatgcacgcaagtgaaacccgatccagtgacantngcttgagtcctctagacatggatcacattcgtgttatcactctcccgatagctgtaccaggaccacgagatacacntgagactgtgacctctcataatattatctgcactgagagtcacgtagacaagaccgttgagcagagaaaagtcagaagcatggctcagtcttctgtgaggaatctggattgtcacctttgctgcaaaaaattacggactgggactcttcaattaatctgacatttcacaaatccaaaattgccgtggatgaactctttacttcacttcgggatattgctggagctcggagtctcctgaaacagtttaagtctgtatatgttcctggaaatcatacccaccaggcatcttataagccattgttgaagcaagttgtggaggaaatatttcatcccgagaggccagattccgttgatattgaacacatgtcttcaggcctcactgatctccttaaaactggatttagcatgttcatgaaggtgagccggcctcatcctagtgactaccccctcctgatcctctttgtggtaggtggggtcacagtctctgaagtgaaaatggtcaaagatcttgtggcatcgttgaagccaggaacccaggtaatcgtgctgtccacacgactcctgaagccacttaacattcctgagctgttatttgcaactgaccgactgcatccagaccttggcttctgagcatccgctaagaagataagacctactcaagctggaaatgccgatgcaattttctgccaccactccaaatactcctccacaaccagcgtccctgtcactaattgcgagaatgatggaattctgcctgaagggtcttgatacctactcagtgaggtactttgcttggattgctgtgattcttnnnnnnnnnnnnnnnnngtttttttattttcctgaaggcgacagtctgtcttttggcgagtccaattagtgatcgtttccatttatccttaaccctctgtttgtgatcttcctgattccacctacaagttcattagttctaaataaaagcctgttggcaagtgttgggtaaaannaanaancgaaaaaaannaaaaaccttgtcggccgccctcggccctccgaaaagctttttaagaacctttcgtttgggcgcggcgggccccgnaagggtaagtgaaaccatgggtcatagcctggtttccctaagaaaaatccctggcccatgaacttagggccttggggattcctccccc

SEQ ID NO: 126467 - DNA, 601 bp, Homo Sapiens
  misc_feature (403)..(403): n is a, c, g, or t
  misc_feature (452)..(452): n is a, c, g, or t
cttttcattttgaaaatgctttaataagtgttgacaacactgttttgcaaaatgtaaagatactatacaaattcttaatacaaaaagaataaattaaaagcagatttctttttttaattctgcaactttgtctacaacgtacatctttttcattgattacagttgaacagaatccagtaaaatcattttacatgctctacagtcagtttcaggagcaacctaatcttttttcccccattattaaactagagtccattttacacaacttgtaataaactattgacattaatgtatatgtaaaactttacacctagttaactaagcagtaactggtcatctgatagcacctggatggggtttgctatatttagaactaaactaatactggaatgaaaacaaattnggaattttaacagtttcaacactcacctggcatataataaaataaaaanatccacctgggctcacaacatagtctgatgtatgtgttttcaccagtcttctggctgaaacaggcaatttcttttacgcatccgaagaatccaataggggctttatatcagaccaaggacttcgtatttcaccttattttgttttaaag

SEQ ID NO: 126468 - DNA, 1281 bp, Homo Sapiens
tttttttaaattcatgcacttttactatgcccattgcacttctcatccatggatttgccttgccttaagaattaaccatggccttgtggcctgggtgacccaggctgcttttatcttgcacagctaaagagggtctgatgggtggctcaacaccccacccactcctataccatgtcatcagtgttcacattttccaaatgagttgaagtgccttgatctgtccactgccaccaccaccagtgctgagttttcccatgtggttttgcttttgtggtgttactgccttgctgctagagcagcaggactgtctgcgtagcgcctccagcctgggacctcactcagttcccagggtattcaaagacggcagcggctcccattccagtcccgatgcacatggacaccactccgtatgccctcttcccacggcgcttcagctcattgagcagcgtgatgacctgtcgtgccccagtgcagcccagtgggtgccctaaggccactgcaccccccagggggttcaccttctcaggggggagtcgtagcttctccacacagtaggcagcctggcttgcaaaggcctcattgatctcgaagatgtccacgtcactcactgtcagccctgctttttgcaaagctactgggatggcataggcaggtccaatgcccatgatgtcaggtgggaccccaaccactgcataagactcaggaccccaaggatgggaaggcccaactcttctgccttggacctccgggccagcaggatggcagctgccccatcactcacctggctagagtttccagctgtggtagaaccatctttcttgaaggcaggcttcagtttggccaggccctccatggtggtgctggggcggataccctcatcctgggtcacagtgatgctcctcttggtgcccttgtcatcatggaccgtggtggtcacaggcacaatctcagcttggaaacagcccttgctctgggctcttgctgccttctgctgggaagccagggcaaaggtatcctgcttctcccgtgaaatgccaaaccgctcagccacattctcaaaggttatcccacaggccatgccaatgtcataagacccatttctgatgccacctgctatgctggccactgcctgtagccccgacgaacactgtctattgacagtggacaaaggcacagtctccgggatgtcactcagaaactgggcgattcgggccatgattgccccggccccaggctgcagcacatttccgacacagatgtcccccagctgttccggcctca

SEQ ID NO: 126469 - DNA, 936 bp, Homo Sapiens
cgttagacctgcttttgaagcagttcagttgccagcccctcatgtggtgtggccggataccttatcgtggtcacagtgatctcctcttgggcctgtcatcatggaccttggtggtcacaggcacaatctcagcttggaacagcccttgctctggctcttgctgccttctgctggaagccaggcgaaaggtatcctgcttctcccgtgaaatgccaaaccgctcagccacattctcagaggttatccccataggaatcaggcaatctctgccttctccttctccatcaagcgcgaagtaatatttccagggttccctctgtcagccagggacatggactccaccccacaggccatgccaatgtcataagacccatttctgatgccacctgctatgctggccactgcctgtagccccgacgaacactgtctattgacagtggacaaaggcacagtctccgggatgtcactcagaaactgggcgattcgggccatgattgccccggccccaggctgcagcacatttccgacacagatgtcccccagctgttccggcctcagattcacgtccttgagaaccgcggtcatgactgccgagagaagctcgtcgggggtggtgtccttgaagccgccgcggcccgcccggcagatggccgtgcgccgcccgtgcaccaccaccacgtccgcggccgaggcctgcggggcaccgctcaggcaaggcgcggcctgcggcatccagccggaatcggccggacccctcaggtggcccagcactacctgcagcctctgcattgcgcaggtcaacccctgcagaccagccaccagtccgggaactgaccgcggagttaacagacagccgtccgcacacgcgcagaaccacatcctcgtgccgaattcgccacccaggcctcgctaccttaggaccgtatagtactgccg

SEQ ID NO: 126470 - DNA, 696 bp, Homo Sapiens
aaattcatgcacttttactatgcccattgcacttctcatccatggatttgccttgccttaagaattaaccatggccttgtggcctgggtgacccaggctgcttttatcttgcacagctaaagagggtctgatgggtggctcaacaccccacccactcctataccatgtcatcagtgttcacattttccaaatgagttgaagtgccttgatctgtccactgccaccaccaccagtgctgagttttcccatgtggttttgcttttgtggtgttactgccttgctgctagagcagcaggactgtctgcgtagcgcctccagcctgggacctcactcagttcccagggtattcaaagacggcagcggctcccattccagtcccgatgcacatggacaccactccgtatgccctcttcccacggcgcttcagctcattgagcagcgtgatgacctgtcgtgccccagtgcagcccagtgggtgccctaaggccactgcaccccccagggggttcaccttctcaggggggagtcgtagcttctccacacagtaggcagcctggcttgcaaaggcctcattgatctcgaagatgtccacgtcactcactgtcagcccagctgtggtagaccatctttcttgaaggcaggcttcagtttgggcaggccctccatggtggtgctggggcggatacctcatcctgg

SEQ ID NO: 126471 - DNA, 1048 bp, Homo Sapiens
ccccataatgtccaaggttgggaccccccaaacccctttgaatataagcacctcaaggaccccccaaggagtggaaaggccccaactttttcttcccttggacctccccgggcccaggcaggatggcaggttgcccccatcaattccacctgggttagagtttcccagctgtggtagaaccatctttcttggaaggcaggcttcagtttggccaggcccttccatggtggtgttggggcggataccctcatcctgggtcacagtgatgctcctcttggtgcccttgtcatcatggaccgtggtggtcacaggcacaatctcagcttggaaacagcccttgctctgggctcttgctgccttctgctgggaagccagggcaaaggtatcctgcttctcccgtgaaatgccaaaccgctcagccacattctcagaggttatccccataggaatcaggcaatctctggccttctccttctccatcaagcgcgaagtaatatttccagggttccctctgtcagccagggacatggactccaccccacaggccatgccaatgtcataagacccatttctgatgccacctgctatgctggccactgcctgtagccccgacgaacactgtctattgacagtggacaaaggcacagtctccgggatgtcactcagaaactgggcgattcgggccatgattgccccggccccaggctgcagcacatttccgacacagatgtcccccagctgttccggcctcagattcacgtccttgagaaccgcggtcatgactgccgagagaagctcgtcgggggtggtgtccttgaagccgccgcggcccgcccggcagatggccgtgcgccgcccgtgcaccaccaccacgtccgcggccgaggcctgcggggcaccgctcaggcaaggcgcggcctgcggcatccagccggaatcggccggacccctcaggtggcccagcactacctgcagcctctgcattgcgcaggtcaaccctgcagaccagcccctcgtgccgaattcgccacccaggcctcgctacttt

SEQ ID NO: 126472 - DNA, 1015 bp, Homo Sapiens
gggtttattccacttttatttcacatatataaaaacagcttataattgtactgaacacaaaatacaaacaaatacattttattgcacataaaaatattttaaatgaagtattgaagtattgcacgtaataaaattgatttaggaaagtcacaaacctattataagactagtattattctaggtctgaggattacagaatatttcctaatagagatttgccacatcacatattgcacattttccaacactattctatgtcttgcaaatattcctcaaagtctttgcttatgtcttttctctgtaagacactgtataaaagattataaaggcaaagaaatatgtaccatcgaaaaggacctgtctacagctgaggaagtaaaaaaataaatacacgatcatcccattctttttggggaaaaataacaaagtaaattggcaaatttctctaaaaagagagaaatattacaaatcttagtttcataagcatttgtccatttataaatgctccctgagtttaagggattcaattagactaaaaacctatgttaccagccataattcctttgtttacattcagtatctagtaccaacatctaactccttccagtagtgcaaatgcatgaagggctctcactgttggtagtcattcagcaataaatagtaagtccacgcctagttatttcattatttctggattcaaaataatataaagtgcatccaaaggttgcatagtcattcttctcattcttgggcatggttattggtcaacctgtgatgcttctagctcatggcaataaaagcccacagtgcagattttcctggaatttcttcctttttttccatagttctgtttggaagaaaattcccaagacactataaaattttttttcacaaagtctctatggaagacttcggaccacagagcagcatccactgacacagatttccttgagttccattctatacccggccgtaatggccgaattcccgggcatatgtccggtaccgtcgactg

SEQ ID NO: 126473 - DNA, 829 bp, Homo Sapiens
gacctgagtcttagtagtagcgttttaatggcagcagccccaagaggagagtcagagtctggtctgcccccggagcaggaggcttgggcttggagggcccatcccagcagacctaaccatccacctccttccattgaactgaggccaggaaagtgcggatttccatgggttccagcgtgatgttggccgggtccagctggtacggagtttggtggggtgtggggcctgtgtttgttgtccacttgagcctggaggctgcctcgcggagctggttggccaccagcgtggtctcctgcaggcgggtgatggtgaaggtggagaacaggtccctcaagttcaaggtaacgggggcgctcaggttacgtccggaatcctctcctacggcaaactggtgctccaagcgcagcagcaccatttcggggccccagctggccagcgtgagcaggtgcaccgagggcggcaggtccctgcgcagccctgagaactgcgtgcgcggaggagccccgagattgtaggcggcgccgccacccggggccagcaccacctgaggggccaggacctcctgctccgccaggagccggtgtccggcggctgcagcctgggctgtgtccagcagcaccaggtggcgccctcgcacccacgcccccgacccgttctccattagtggctccgatactccgcgtccatcgtccttcagcagccttcggtgcaccatgagctccagcgagccatctctcaggctgctgccccctgggagcggtcagtcagcacagtcagctgcatgtttccatccgtgatgtaatccgggtgttgactggatagtagttcc

SEQ ID NO: 126474 - DNA, 2613 bp, Homo Sapiens
gagtcttagtagtagcgttttaatggcagcagcccaagaggagagtcagagtctggtctgcccccggagcaggaggcttgggcttggagggccatcccagcagacctaaccatccacctccttccattgaactgaggccaggaaagtgcggatttccatgggttccagcgtgatgttggcatgtttccatccgtgatgtaaatccgggtgttgactggatagtagtttcctgccacgggctccgtctggttcagtttccaggtgggtcgataatcccgcctcctctccaggatctcccggccattgctgtctgtgtagaagcgtccctttgtctccagcggtgtgtcaaaacggctgatgacttccttcccccaggtgtcgcccacaggtatcggccccaccgaccactctagctccaggtgccgctgtcctgggtacaggcgaaccacctgggaacaccaagctgagaagttctggtgcacctcctgcaccaagggtgtcttcaccaggtggatctgagcccagcggctcacaggcagcggtttctgttggttgggtctgaagatgtaggcacctgaggcctggtcactttcgttgtcacctatactggcgttgtaccagaagaaggtctggcgaacaggcagcaggagttgctgattcatgttcataatctccatcaacagccctgtgtcaggatcaaacgttgcccggatgtgctcattttcgatggttaaagcaggggaccaggatcttctggggatgggctgtggtgcgcgggcctggggcttccagcgaggcacctgggctactgaataggtgctgaagcccagggcgggcagtgaggctgagaacagcagctccggagggtgcgcctggctgtctgagctgggaaatattaccacatcgctgggcactgtcctgccattggggtccttcacaacgaaaacgctttcgctgaccggcagccgtaccatccaattcaccttccgccccaggggattataaacgatgacctggaagcgcgccgccgtctggctgagcgggcagatgctgatgtttagctgttggcaaaaggtgaagtgatctttgaagcttctgagccgcgccagcgcgttgctcagaagaacctcgcaaggcccccagcctgccgcaagctggcgcgcgtagtcgttggccacgtgctggcgggaggtgccgctgacggcgtcgtgatgctggagcacagccatcgcctcattgaggggtgcactgtctccggagccatagggtcccacgttggctgccaggcccaccagcgcctccagctggttgcacacctgcaggaagttgtagctgaggcgctcgtagcgtttgagggccggccgactggaaaagtaaccggtccagaactggtgggggccatccgcgtaagggaagaagtcgtcatgtttcactgaccaggtgaggttggccttgttcagctcccagaggtaacaagcgggggtggagtagagaacatggacactgcttccttttgcctgctgcgcatttaccagctggatgagcttgtcaaggttcttgaaccacatgttggcattctcatattggaagtccgagcccatggtcatcacagtgtggttggtgcggtaataccggccctgtgcagtggccacatttaggaagtaatcgaccagctccttggcgttgtactcggggctgcgagggtcctccaccaccggctgatcgacacacagcacatcccagcacagattccttggcgggttgtaaccattgggaagcacaccagtgaagaggtccgcggtcgggggcttcaggctggtgctggcccgccacacctgctccatctccagcttctgcatccgtacccacttatcttgataatcaaggcgcccaaagaagaagccgtcgaagcccatctgcgcaaacagcgaggcctgctcccgagagtggccgaaggggtcaatgtgccaggccacacggggtcgcccatcattgccaaatgtgtcctccagaaagcgcagcccaagtgtcatctggtccacgatggcaccgtagtgggtggctgcctcatcgttcatcacccagccaccattggcgaactccaggcgcccctggcgcacaaggtctcgcacgacttcctgtgtggcatttgtctgctggtgccaccaacgggagaagaaggcaatctccacgtaaatgaagcgacgggtgggatctgccagcaaggcagagatgaccgagtccaggatgtactgcacaccggcgtgctggatgtcattcttgattccataaaagtactggtccacggttttgagccagcccacgtcatcatgtgtgtgaggcagcaggtgcacgttcagcatgttcggctgcactgtggggcatgtctcgtatcccccggcccgagcaccggcagccgccagcaacaaaaggaaaaagcagagaggcgggagcggtggccgcagggcgcgggacatggtccaggggcctgctgagtccaggcagccgcgagcgcagacccccgaagcccgcgcgtaggcgcccatggctcagcagcttcctcccctcgtgccgaattcggcgcgccgtcgacttcatactctctccccccta

SEQ ID NO: 126475 - DNA, 1171 bp, Homo Sapiens
tacagaaaaaaaacatccgaaagggggcctccggaaggaaaagtagcgattcccaacagtaagtgccttgtccattccagggaacaaggggaggggagaaaacaatgacctgcctcttttggctgactgagaataacagctggagagttgtcaaggttttaaacacaagtggctttttcatatggaagttcgagccccaggtcatcacaatgaggtggtgcggtaaaccggcccggggcagggccaccattaggaaagtatagaccagctccttggcgttgaatcgggggtgcaagggtcctccaccccgggctaatcgccacacagcacatcccagcacagattccttggcggggtgtaaccatgggaagcacaccagtgaagaggtccgcggtcgggggcttcaggctggtgctggcccgccacacatgctccatctccagcttctgcatccgtacccacttatcttgataatcaaggcgcccaaagaagaagccgtcgaagcccatctgcgcaaacagcgaggctgctcccgagagtgcctgaaggtgtcaatttgccaggccacacggggtcgcccatcattgccaaatgtgtcctccagaaagcgcagcccaagtgtcatctggtccacgatggcaccgtagtgggtggctgcctcatcgttcatcacccagccaccattggcgaactccaggcgcccctggcgcacaaggtctcgcacgacttcctgtgtggcatttgtctgctggtgccaccaacgggagaagaaggcaatctccacgtaaatgaagcgacgggtgggatctgccagcaaggcagagatgaccgagtccaggatgtactgcacaccggcgtgctggatgtcattcttgattccataaaagtactggtccacggttttgagccagcccacgtcatcatgtgtgtgaggcagcaggtgcacgttcagcatgttcggctgcactgtggggcatgtctcgtatcccccggcccgagcaccggcagccgccagcaacaaaaggaaaaagcagagaggcgggagcggtggccgcagggcgcgggacatggtccaggggcctgctgagtccaggcagccgcgagcgcagacccccgaagcccgcgcgcctcgtgccgaattcggcgcgccgtcgacttcatactctccgcc

SEQ ID NO: 126476 - DNA, 689 bp, Homo Sapiens
cagactgagctcctggcacaggagcttttccatgaaaagtttattagaagggcacttacaagaggaagagagggaatgagaggacacaaatctttaacaataggggtacaatgcttaaacaggtgctctgcttttaagatataaaagttagaaaaatctaaaacactataaatacatacatgctttttacaaagttattaaaaggtcaggctggccgaatagtgaaggtaatcaacacagtcaatgttctattccccatccctccacacacatcagagtccagaacagccgagttgcaacagcagcagtgaaggtgagtgaaggcttcttggatagatggctccatctctctgtaatgctttcacccctagcaagggagtggggcttggttcagaggacccttgtggaagggcccagatttgactcagagctgtctgtttttacacgcggccacttgtttagccagcctggtttggtgtttctggatgctgagccaaaaagccactacaccctccaccaacattcagaactggctgtgccccaactcttccagccactgtccttgggaggagagacctttccaactttcttaaaaaaaattaaatagttatctgtctgaatggttttacgaaattattacataaatatacaaacaccagaatactagagtatacattacttcctgcatt

SEQ ID NO: 126477 - DNA, 993 bp, Homo Sapiens
ttttttttaccatgtaaaaccaaaagaacaactttaataagcttttacggcactgcaattacaggaacatcgacccataacatgcaacaaaaatgattttgccttttggacatatttaacagataaacttgacattacaagtaacagcaacacattcccattctactgaagaaaacaaatgcgatttaactttcaggttagaaaacgtatcttcttactgcaatctcaagtagcatttagaaagtttagttttcccttttctaacctctaaaagatgatatgatttttaatgcaatcatacacaactgttttcacattggaaataatcacgaggaatcaataggtttaggctaactgactgattggttttatttccattgttaatttcaagagggctcctgcagtattgtggatttcagatggggaaaataatcagaccaggagtaaacggccttggtctttaaagtgggggagggaacatgcagcggcacacggggcaggtgcctgacttctgaagccagatggacacacacggcttgtggaaatagtggtggcacggcagctcagttgccacatcccccttcacatattcgctacagcagatggggcagcacatctcctgaccaactgcgccatgatcttcagtgaccaggatctcgggaagagcgtcaatgctctccttgcttgctggtggattggccacctctacatccactgcgagagactccaagtgcgcaagggcagtttccattgcctgggccaggcgttcttcaagtgccatgtaggtgaggaactgagggtccacataggaaatggcttcagccactcctaacccatctgcaaatccatcaaagaggctccaatccacttctaggtcttcgctcacactggagtcatcttcaaggttgttgtttccatccagcatgaataccccaggttgcatcaactcgtgaccagaatcattatccccctcactgctactgtcattctcat

SEQ ID NO: 126478 - DNA, 627 bp, Homo Sapiens
  misc_feature (294)..(303): n is a, c, g, or t
tttaaaattttatttaaaaaaccttcggtgcaatattaaaaagcaatacagccagctggagcgacaatcaacagaaagaaaagagggaggagagaaaaggcccgaggaaccccaacccagctagtcccctaggggctggaggccaggggcagactgagaaggggggcatgggtggtaggggagggaggaaagaccacccaccaaaataaacaggcagatccaaacatttatacaggaaacatctggctgaacggaagaggatcttggggagatgagaagccccccacatttcannnnnnnnnncctaaaatgtcctggactgggtggggaagggtcagccacctggggtttaaggagcaatcccctccccacaccgacgtgctgaggagcagatgtgtgtgagacagacacaaggggcaaagataaggacaagagggtgccctctccttggaatctgttatgagggctgagggtgtccccgtccagctcctggactctgggggatcttgggtgagatgggggccggaatgggctggggcaggggtgaggctgggcgctcagcctaagaagccatcggggtcatcatcctcaaagtggccttgctgaagaccttgatgtggtgctcgt

SEQ ID NO: 126479 - DNA, 1425 bp, Homo Sapiens
aacatacggctaggtcgaggctgggtgttgaatcggcacgaggggaggcccagccagcccgattgtgggctgaggggtctgcattcaagcacgatgttctagaataggagtttaacgtgtctacgtaacctagaatgtggttattaggaaaggggctgtgcatgtgggtgcagctggcggcacacctggtcaccagatggccagaagctgcccatcagccctgcccagatgtcagcctgggagctcaggctgctgccgctggctggatgccctttggtgaaatgcctgttttcagctaagaaaggagaggccaggcaagcaaagtcatgccacaaagcatatcagagacccccgcagactcctggccccgtcccgccccctgtctgagttgtgtttttgttgctgttcctctgttgatggccagctctgctgttggcatgagccactgatgttcatgtgagaattactgtttttaagtgtctctccacttaggtgtcctcagttcccacttttgctctcatttgccttcacagaggccactccacctgtccggatccagctgtctggtcatggtttggtttatttattttgtccttcaggggctgttttgccctaagaatgagggggcttcccctggtctgcagttcccaactttatcccttgctggccatgcgagcccagccctgcctcgggcccctccttggggaaggtttgcgtgcagagctgcaagggagagggttccagaagcattgccttttgcctcgtctaataggatccttaggacactgtgggctttaggaatgactatagatgctcacacgtgtttaaagtgacatttggagatgctctcagtcctgtggcatctggcacgaagtctccaagaagccactttgcctcttctcccttcaagcacaagctttactgcaaaagggccagtcgcgtttctatttctctcgatcccaggcttttgcggaccgacgatacgtttaaatgttgttctagtaaatattcttgaatgtattaaaatggctgaaacaacaagcttgggcttttttagcttgccctccactccctgccgtcccttctctccacagccagtcccaggagtccagggtggcctcccctgggccacagcacatcaccgtgtggcctggggctgtgggacagtgagccctgtaaccactagggttctgtgacagatgccaagaccccagagaccgtggcagagctacccccaggagagcggaagcccctacacagcccagacacatgccttccctgggggctggggagtgtgtctcgaggggttttgtttgttttgaggcatgtatcatcttggaaataattgtcaggatgtataaaatagagaaaaagaaaaaaggtatcctaccccagaggcaacccagataaacttttttgcctgtg

SEQ ID NO: 126480 - DNA, 1229 bp, Homo Sapiens
  misc_feature (43)..(61): n is a, c, g, or t
  misc_feature (82)..(82): n is a, c, g, or t
taccctcactaaagggaataagcttgcggccgcctgctcaggnnnnnnnnnnnnnnnnnnncacaggcaaaaaagtttatcntggttgcctctggggtaggataccttttttctttttctctattttatacatcctgacaattatttccaagatgatacatgcctcaaaacaaacaaaacccctcgagacacactccccagcccccagggaaggcatgtgtctgggctgtgtaggggcttccgctctcctgggggtagctctgccacggtctctggggtcttggcatctgtcacagaaccctagtggttacagggctcactgtcccacagccccaggccacacggtgatgtgctgtggcccaggggaggccaccctggactcctggtcaggatctgcccacatgaggaagtgcgccttggggtagggccacaggctggctcagaggtgcccttctctccacagccagtcccaggagggagctgggttctggtttatgcgacgtcagagggacggcagggagtggagggcaagctagaaaagcccaagcttgttgtttcagccattttaatacattcaagaatatttactagaacaacatttaaacgtatcgtcggtccgcagaagcctgggatcgagagaaatagaaacgcgactggcccttttgcagtaaagcttgtgcttgaagggagaagaggcaaagtggcttcttggagacttcgtgccagatgccacaggactgagagcatctccaaatgtcactttaaacacgtgtgagcatctatagtcattcctaaagcccacagtgtcctaaggatcctattagacgaggcaaaaggcaatgcttctggaaccctctcccttgcagctctgcacgcaaaccttccccaaggaggggcccgaggcaagcctctagataggcggggccaagccctccccgtgcccaccctctttccctgttgctgacctcaggcctgatgctggacccatgagactcccagagggaaaacacagatacagcccatccatccatggccaccttcctccagaagatcctggggacccctacccccccatcccatgaggcaccagggctgggctcgcatggccagcaagggataaagttgggaactgcagaccaggggaagccccctcattcttagggcaaaacagcccctgaaggacaaaataaataaaccaaaccatgaccagacagctggatccggacagg

SEQ ID NO: 126481 - DNA, 2646 bp, Homo Sapiens
gccgagcaagaatttttatttaaatacatttatttgaaccggcctgggggaggcttgatgttgatgggttggtgattaaagcctcccaaagccaatccttggcatggcctttgggactcaaaacacaggatctgactggtgggcacaataccatcttgaacgcccacaaaaaggtttggttttgttgccaaagggcaggtggctccaggcagggctgatggtggcagggtggggtgaggacaggacaagagatctgggtgtggaaggatggccgggtttctgcagcagcaggaggaaagggtgggagcacacaggcacagaacactgtgagcaggactgccaggccagtgtcacaagcgctaccatctgggtgtagacagacctgagctgacaaagctgggggagcaaggccaacggctttaaacacaagctcaggggcttggggtttatcccgagggcacagggcagccatgtagggtggagttggcatgagttaagcctgggctgggtgtgtagactggacagaggtgggtagggcaggcagtgacgagctggtgtgcaagagactttagggccaggcatggggggacagaactcccacctcgttcgtgctcccaccctccccagctccaccgcctggtcttcagtctccggcatagcaaggaggaacgggaggacctggatgctgatgagcagcaaggctcctcacttccctgtacagaatgggtgcccagagagtgccatggagatgaatggtagggcaccatgctgggaggtggggctggaggagctgagttcccgcaaactaactgcagggcctcaatttccctcagagccccaggccccggcaccaagcctcttccgccagtgcctgctctggttttgtggaatgagcagaggtggggtgggcagtcctccgccccttacccaggaggaggcagcggcagcagccaggcggctggaggacatcagcgaggacccgagctgggcccgtgtggtcaacctcaatgccctgctcatgatggcagtggccgtgttcctctggggcttctatgcctaagaccaactgcgttggacaccataagccacagcctcacaggaagtgggggtgaggagcctgcggtgctccccagaaaaggggaaggggcagtggggtgagaaggtcctggctccccttctcccggccttcctctgcctggggcccactgcatctgattggcagtcacttcccatgagggcctggcccacccgctgcagttgccctaaggaaaaataaagctgcctttcccctgtcctgctgtggccaaagtgtccttgctccaggttcctgccctgggcttgggcctccgtctgggctgctcacaagaccttcttttcgggagacagaagccatgtggccctccactcatccacctctagctggtgcttctcggtcttccagccggcatcctgcagtcctttcaagaactttgggaacagcatgtccaacacttcgtgtgtctccttgacgacgacccagctctctttcttaggacctgcccgcacccggttcctcagctcctccagctctgctggaaggggtccatctccctgcagggccccaagcatcagcccatgtgtggcggcccttaggatggtcttggggcctgccttctggttcagaactacctgtacctggttttgtgactggtcccagcagaggaggtaggattcttggtgcccctcaaccagctgctgcagctcaaagacactggagaccaagcggtgtaaggggacccccagggatagagacggagctggccagaaacctgtccaccctcaagcggctccatgcgattggctgcagttgggtcgagtacctctcccctctgaaggtagtgcttcaggaccagccggagccggccttcgttcaaggtctccatgaccagggctcggaccgcgcggtagttggcgtagatgtggagggcagtgaggaagaagaaacatcacaagcgctgaagccagggcaacctgacagccagagggagcatcaggaggctgaccaagagccccgccaggttcaccagcgtctcctggctgctgtccttggctgacacgtcagccatgttgttcctccgagcctggtgcacggtcagggcagcccgagtggccccaccagcaacactcacgatgcacctttccaccaggcaaagacgatgcggcccagcatgccagttgaatctttcacgagccaggtggccgtggcagctgaaacagtggcttttgcgttccccacccctatgcccagcaagactgcctgggtggctagggagccggagaggctggaagcaaacgcctgcacggaatcccacagctggtagggcaagtagtccgggctgacgctatcagggaagccctgaggcaggaacacggcctggagcccggagaggggcggtgagggggccccggaagcccccacttcgcccgcatctcgtccttcaggtttgaccgtgaaggccctggagagcccccaccagcgccagcccccgacctcccactgcaggctcccgtccgcggcggcgcggcagccccgtgcctccccggagccgaactgctcggaacacagcggggtctgcaaacccgcgtcgtcagccatgcatctcgaaa

SEQ ID NO: 126482 - DNA, 1015 bp, Homo Sapiens
  misc_feature (20)..(20): n is a, c, g, or t
gagacgagctgccagaaccngtccacagcgctccatgcgattgctgcagtgggtcgagtcctctcccctctgaagtagtgtttcaggaaccagccggagccggcctttcgttcaaggtctccatgaccagggttcgggcccgcgcggtagttggcgtagatgtggagggcagtgaggaagaagaaacatccaaggctgaagccagggcaacctgacaccagagggagcatcaggaggctgaccaagagcccccgccaggttccccagcgtctcctggctgctgtccttggctgacacgtcagccatgttgttcctccgagcctggtgcacggtcagggcagcccgagtggccccaccagcaacactcacgatgcacttggctaggttgctggtggagacggtcatggtgaaacagattgggtatacaggagccataatctcaaggaacatggctacgtcattgaggatgtccgcaaaaagcctccactgcttggcattgcagtccagtttgctccctttccaccaggcaaagacgatgcggcccagcatgccagttgaatctttcacgagccaggtggccgtggcagctgaaacagtggcttttgcgttccccacccctatgcccagcaagactgcctgggtggctagggagccggagaggctggaagcaaacgcctgcacggaatcccacagctggtagggcaagtagtccgggctgacgctatcagggaagccctgaggcaggaacacggcctggagcccggagaggggcggtgagggggccccggaagcccccacttcgcccgcatctcgtccttcaggtttgaccgtgaaggccctggagagcccccaccagcgccagcccccgacctcccactgcaggctcccgtccgcggcggcgcggcagccccgtgcctccccggagccgaactgctcggaacacagcggggtctccaaacccgcgtcgtcagccatgccgagcttttgatcccagccatcccgggaattccggacc

SEQ ID NO: 126483 - DNA, 766 bp, Homo Sapiens
caacggtagaaaagttttaactgagacaaatgtcaaacaagcacatcaacttcttaaaaaacaaagaaaatctgaaagtttaattacaaaaacacttatacagaaaacttggcatttcaacagttccaaacacatgtacacaagttttttctaaaatcagtcagaaataaaataccttgtctccctttcctcagctgcttcttgtattttaattaaaaagaaacaaagaaatctgtaacactgaataggcaacaacttatttcttgagaacataaaagtacagtaatatctacaggtgtactgggaaacatgagttaggtattgtgctagcctgtaacttcatttactgcctcctcactgagcacagaggagagaggaggtggcacagacctggtctatagatactgacagttttgtggcatctgaatcccagccaccagaggcaggtgagtagctactggggaaagacagctatttcagaagcaagctggcttattgttggtcgaacaatgatttcatactggtaggctctcttgaaatctcatgcattcctgaatatgcaagtgtttcaagtccctgtcaagtgtcccatctagagtcagaagacttgatgatcctggaccatgttaatggccttttctggttcacaaaagcagctgctagacaaggcttgcacaaaaattgaacacaaattgagaacccgaaatcctgagggcgcaaggacagacgggaccaaaaagcatctggccaaaggaaaaaacaactc

SEQ ID NO: 126484 - DNA, 1120 bp, Homo Sapiens
  misc_feature (730)..(739): n is a, c, g, or t
tttagtttttttctctttatttcttatggataaaatgcaacatacatattctacttaacaatgaaagctgatggaacagaagaatcaatattagcttttgagatgggcaaagacataaaacattggcgttttctagtgtcatgatttgtcaaattagttttagaaaatagttggtaaatgtctgacagaaaaaaatttttaattaaggtgtatgtaagtgtgtaaaactgttaaaaatgcttgaaaacaaacattttaatcccatgacatattatttttatttgtggaaaacagttaaaaactgcctgtcagagaaactatttaatcctttaacataaagtcttttaaggcacataaacatttatgaagaacagttgaaatatgctcgctaggaagaagggacattttaactcatatgagctttcagtcaagtgaaatacgtggacagcagatgaaaatgcctgaaagaaaagatggacattaattcctactcctgaacgcttgcatctgcacatggttagaaactcaagacaatgagcaggacacagaattctctcagagtataccacatagatcacagttacacagtatttctggttttaaagctttgctgaaaatatttttcatcattaaatgtatattattaaacatacactgaaagctaactgaagtgatttaaataataagattcaggcacagtttgtaacaacaattgttaaagtccattcannnnnnnnnncccaagaaaggcaagtgaggtagtttatactgtatagacgttgtaaatagttgataatccagtttgtttagagatcattgactccaagaatcatatttccaagtgagctgcttaacaaagggatcttcttttgcaggatggaggaaaacaatgaatcaactctaggatttttttctgaataagcattcctaaaatgttagttccctctaacactttctcctggaggacattattttcccaagtgtataccaagagcactaggaatgggtgagggggagaagctcttaaggatagcatgtagaagcccagtatctgcccttcttttgtttgcaaagatatgagtcttttttatgaatttattaaatttttaaaaaacaactc

SEQ ID NO: 126485 - DNA, 1481 bp, Homo Sapiens
acaataactgacttttgctttattgtgtaatttacacaggacaaccccaaattccacacttcgtttttctcttctgccttcattattctttcaatatctacgtcaacagaaatcgtttctcccaataacatatgtggtttgatcctcagccaggacgcacaggccctacaagatcccagccctccaacacggacacctggaccctcccatttgactgcagccttgtctgtttgtaccggggctctgccctggtcctgtcacccctgagacgtccgtaaggtaggaatgccaaacaggatctgtgtgatgtgtcaactctgagtaaatacaagaggctgctaggagcccccagctgaggattgagaggcaggctgtgtctggttccatttcaaagaatgctgtgatgcattagcagcgtctgctatggcaacacccattagaagcacctggaaggggggttttgggaaacgggctcagaaaggagcaaggtgtgtccgttccattcttgccttaggtggctgttccgttacccaggctatgctgtctcagtggccaggtggctgaggaggaagtctgaaggccgcatagttgcaagtggcttccctagggcctgcaggggacagcataggcccaaagctagaggaagcttggaagggcgcccacgctgggtcctgcggggctctgcatactgcaggccaccatggcgctagctccttaccctctggagtctgtctcatccaggagaagacagctggctggcctcagagcgttacatgcaactcgggtgaaaacatttttacatgacacagacacacaatgggctttacctctggataaacttagaaactttccatccaaacgaaaagggtgtatcttctgtatgttgccaagaagcctaaactgagtacaaggacgatcttactttaatcaagttccagaatgagggtacacagcttcgaaaagcagtctgtagcagaagatgcaagggtgtgtgtagccatgtttccagaatataccaaaggaaacacacacaaccccagtgtggccttttgcgaaccctcgatgctgctccatactgggggcaggcggctacttcgtccagctgactttgggaatgtcgtaatgctccgtgagtgtgtccaggtgtctgttgaagtcctccactctctgcttgtgggttttggatgccttctttaggatcctttccatttgccgcttctcctgcattttctcgaaggccgcctgggccggggtccgcttgtccaggccgcgccgcttctcctcctcgttctttttgctcgttcccattgcttccaggagtttcgctttgtctttgtccttctttttcttcttccgcttggtcactcccagctctgcgacgcctttcagcttcaggggtcccttttggacctgctcgtaggcctccatgacactctcccctcgtgccgaattcgacacccagggcctcgtacctagcctaa

SEQ ID NO: 126486 - DNA, 926 bp, Homo Sapiens
gccaagtagaagaagcatgaaggcgcccacactgggtcctgcggggctcagcatagctgcaggccaccatggcggctagctccttaccctcttggagtctgtctcatccaggagaagaccagctggctggccctcagagcgttaccatccaactcgggtgaaaacattttttacatgacacagacccaccatgggctttacctctggataaacttagaaactttccatccaaacgaaaaggggtgtatcttctgtatgcttgccaagaagcctaaactgagtacaaggacgatcttactttaatcaagttccagaatgagggtacacagcttcgaaaagcagtctgtagcagaagatgcaagggtgtgtgtagccatgtttccagaatataccaaaggaaacacacacagccccagtgtggccttttgcgaaccctcgatgctgctccatactgggggcaggcggctacttcgtccagctgactttgggaatgtcgtaatgctccgtgagtgtgtccaggtgtctgttgaagtcctccactctctgcttgtgggttttggatgccttctttaggatcctttccatttgccgcttctcctgcattttctcgaaggccgcctgggccggggtccgcttgtccaggccgcgccgcttctcctcctcgttctttttgctcgttcccattgcttccaggagtttcgctttgtctttgtccttctttttcttcttcctggaaaaagacatgaggaggcggcgggtcggaggatcagggccaggggtcccgagaaaaggtctaagggggatgaagacggaatcccgcgggccctcgggcctcaccgcttggtcactcccagctctgcgacgcctttcagcttcaggggtcccttttggacctgctcgtaggcctccatgacactctccagtgc

SEQ ID NO: 126487 - DNA, 706 bp, Homo Sapiens
  misc_feature (564)..(564): n is a, c, g, or t
  misc_feature (678)..(678): n is a, c, g, or t
gagcgttaattacataagaggcactgatccttgctttattcatgtagaaatatccaacattggggaatcgtgtggggtgtagatacaaaaaaaggaaaatgggggcataaacagcagttgggttcatcgtggcagttggtggcagtttcagccagtgtgtgggttgagggccctctactgctttacccatcaccctccactgttttagccaaggtgtttgacaacacttggcctgtactttaagggtcacagtgattaaaaacaacacagtcaagacatttgggtctgagtgactgctcctgagctgcttagtacgaagtcgggcaacaagaaagcgaggagcagcgtgtatgcccttatcctcagcaagtgagaacaaggcagatcacagcaccgacacagaagatggccttctcccatgtgccagcggagaatccccttccagccaaatcctcaggaagcagagcaccacacaagcagcatttcttggtttctcatggtcatattcaaaagcgacttttaaatcagaaaatagaaaaagcatttgtggtgggtctttttcanacccagaacacaagttggctaggaaaacggaaagcttcctctggcatccctgtttggactcctcctcctcttggaggagtttcctgaatcgcacacacatcgcttcctcaccangagagatgctcaactaggatctttttta

SEQ ID NO: 126488 - DNA, 461 bp, Homo Sapiens
aaaataattttcagcaagtgccattttacaccatcttaggaagacatctgagctgagcccaattctgtccccaccacccaccctacaagcgacctgacgcctgtggccagaatgctgactcttcattccaggatatttatgttttctaataataaaagcaataactaggccagaaagaacaccacctcagagcccccctttcctgctgccctgggtccaccccgtctcatcccgctgtggggcgagtggggctctgctgcaatgtgactgcagtctgaggggcagaggctgcagggtacagccccagcgagtcactctctgtcacctggaatctgaaacaaggtgcttctgtgcccctgggctgggagtttgttatctgaggctgcctacctgttagaagctgtcaccagcaggactttatgtgcataaaacagctttccttccaccaggaaggtcacaaa

SEQ ID NO: 126489 - DNA, 696 bp, Homo Sapiens
  misc_feature (22)..(22): n is a, c, g, or t
atcatggggcatgccatggggntgtcctttccctaccggttcactgcttgaccttcgcttcctcagcaccttcaagcccccagcctacgaggatgtgttcaccgcccaggcaccgcccaggccgccccttgactgcttccagtgaacaaacctgctgttcctcctcatccagctgccctgcccactttgaaggaacaaatgtggaaggtgtttcctcccaccagagtgccccccctcatcaggagggtgagcccggggcaggggtgacccctgcctccacacccccctcctgccgctatcgccgtttaactggcgactccggtattgagctctgcccttgtcctgcctccggtgagggtgagccagtcaaggaggtgagggttagtgccaccctgccagatctggaggactactccccgtgtgcactacccccagagtctgtaccgcagatctttcccatggggctgtcttccagtgaaggggacatcccataagtagttttgagagggtggatgggttacttgcccaccagaaacagccctagtcccaactccttgcgttcctttggcccctccctgcctacctagaatctgcctgaaagggctggagaggggcagtattgggggactgtgctagctttacccccgcaggacatacacaggagcctttgatctcattaaagagatgtgaaccagc

SEQ ID NO: 126490 - DNA, 1166 bp, Homo Sapiens
gtagcgaggcctgggtggcgggtacgatggtggcctcagcgaagatgggccgggcagggaccatggcggtggcagcagaggtggcaggggcggggcggctggcggtagaggaggctgtggtcctcagggggctgtaggtggaggtatggctcgggccagcagcgggaacggcagcgaggaggcctggggggcacttcgggcgccgcaacagcagcttcgagagctgtgcccaggagtgaacaaccagccctacctctgtgagagtggtcactgctgcggggagactggctgctgcacctactactatgagctctggtggttctggctgctctggactgtcctcatcctctttagctgctgttgcgccttccgccaccgacgagctaaactcaggctgcaacaacagcagcggcagcgtgaaatcaacttgttggcctatcatggggcatgccatggggctggtcctttccctaccggttcactgcttgaccttcgcttcctcagcaccttcaagcccccagcctacgaggatgtggttcaccgcccaggcacaccaccccccccttatactgtggccccaggccgccccttgactgcttccagtgaacaaacctgctgttcctcctcatccagctgccctgcccactttgaaggaacaaatgtggaaggtgtttcctcccaccagagtgccccccctcatcaggagggtgagcccgggggcaggggtgacccctgcctccacacccccctcctgccgctatcgccgtttaactggcgactccggtattgagctctgcccttgtcctgcctccggtgagggtgagccagtcaaggaggtgagggttagtgccaccctgccagatctggaggactactccccgtgtgcactacccccagagtctgtaccgcagatctttcccatggggctgtcttccagtgaaggggacatcccataagtagttttgagagggtggatgggttacttgcccaccagaaacagccctagtcccaactccttgcgttcctttggcccctccctgcctacctagaatctgcctgaaagggctggagaggggcagtattgggggactgtgctagctttacccccgcaggacatacacaggagcctttgatctcattaaagagatgtgaaccagctaaaaaaa

SEQ ID NO: 126491 - DNA, 510 bp, Homo Sapiens
gcccagacacacagagctcatagtagtaggtgcagcagccagtctccccgcagcagtgaccactctcacagaggtaaggctggttgttcactcctgtggcacagctctctgaagacaatccaccctgttaaccaagttcagcttggagagatgggggaagtggaggatgctgagaggagtgttgaaatatccttgaagggcagatgggattgctgtggatgataaaggatggcatccagggcgcgagtctgggttccagctcttctccaaattgctccctcaagagaagacgctgccggactctgttgttgaccaatagggccatagaaaaagatcacaaataactgttggcagacagagggagcctccctggggacctcactattcctcttgtcactggagaggcaccgcaagcttccactgcagccatgggatgggttctatgaggctacaggcaaagtcagctgcatctgctgttgcggcgcccgaagtgccccccaggcctcctcg

SEQ ID NO: 126492 - DNA, 637 bp, Homo Sapiens
ggccatcccaccccccatgtcagcagcccaccagctgcaggccatgcatgcccagtcggccgagctgcagagactggccatggagcagcagtggctgcatggacacccccacatgcatggtggccacctaccaagtcaggaagattattacagtcgactgaagaaagaaggtgacaagcagttataagttatttatttgttaacgctggctgtggaaaccccagttcttggggggagaaacaggactttttacataaaataggagctgcaaaagcaaaaagaatatcttctaaagatttctttatatatttaaaaacccacaactaaaaatgtatccacatagtagtgttcgtttgtcgagaggatttcctgagactggtttggatctccctgcatgacagtcccccagaaacttagtgagtcctggactggactgaacatccagaaagcttccctgcaatcttggggtttggctttagttttcttttccttgatttctcagtaggtgctagaatccagttcacacccttcactgtgcgtgcagacacactgacacactccgccacgagtgctccagagcccacgaggcttgcagatcgggggcataggaatttggaatccaagagctataattttt

SEQ ID NO: 126493 - DNA, 580 bp, Homo Sapiens
  misc_feature (128)..(153): n is a, c, g, or t
  misc_feature (567)..(567): n is a, c, g, or t
tttgtattccctcaaatatttaagggtttgttctgaaatatacttcattaacttggaaatagtttaatctcttcaaaatttgcttttaaactttgttaggctggtctagaacagctgttagtctagannnnnnnnnnnnnnnnnnnnnnnnnngcctctggttccagttcttgtgatagaattaatttgatcccattactgtggactctattcaatgcctgtcatgttaagaggtatttccatacagactggtgagaacatgaatgttctctgtgtgagctctggaaactgttctgtctgctgctttccagtgattttttccctgacttccagtagtctcctcacacaaaagggctgatcaacgctcagctgctgactcatgagcaagtctatgcagctccccagagagttctctctgtgcagatctttcctctcccgtactctgacctgcaaaattatcgccatctcagcctccttgaaagatgaactttgtttcttcaactcaacaacatctccagcctctgtgtgcccctggaattcatccaggcataaggtggagtgtcttanggccatctcattg

SEQ ID NO: 126494 - DNA, 642 bp, Homo Sapiens
catttggacaggtttattgaagctgagcagtttccccataatctagatgacttcaggttacacgctgtgtggctctctccagccacgagtcctcgtcgccaaatgggatagataaacgtctgttcagtctgcaatataatttggcataaagctgcagccacaagtgggctctgctgctggatgtggatcaggctctctggaatgtctgtttgcacacttgaccttcacagaacatttccaggtggagtttgtctccttcgatccaatgggtccagcctctgttcttcttttctcccttctggatacaggtgagcctgtcattgtcccagataaccaaactcttgcattttctgttgtccaggcctctgttatcttcatcaaattcttctccaactttaaatttcacaaagtagttccttaggctgctgttcgtgtggatggtaaaagaatccccattctgctcaatcactttctgtggcttcagcaacttggctattttacgagtggcaaagtcaatacctagggccagcatgtagccctcgaagttgtcgctgctgagcagggtccaagtaccgctgaggtcggcgggcatggtcggggatcgcgggacaacccggcgggcggccggaggctcgggccggg

SEQ ID NO: 126495 - DNA, 653 bp, Homo Sapiens
ttttttgctgtgagggcaaggtctagttctcagtcatctgtatatccccaagggctcagactggcatagaataggtcttccagaaatgtttggtgaaggatgattaaaatgttaatgtactttttgcaaatggaggccacagaggaaaccagcaatcagactatgaagacgttcatatgcagtttgcaccagtgccatgaagaaggcagaaaaaaattttgtatcactgttttggaaatgagcagcctgagactctgatatcgtgtgactagagcccaaggtcacagctggaaagcatcagggcagaagttgaatcagaattccagagttctgcctagcaggctaaatgactggtgagcgtagctctgtccctagctggggaagcactgatgaagtaactatttgtgcacagctactcattatcctcagcagtgaggctgagaccagcggttgagatattatggtccaccacctatttttgtatggcccatgagctaagaatgaattttatattttgaaatgattttttaaaaatcaaaaaaggatatttcatgacgtgaaaattatatgaaattcaaattgactccataaatgaagttttatatggatgcagctgtgcttatttacatactgtctatggctgctttcatgct

SEQ ID NO: 126496 - DNA, 1998 bp, Homo Sapiens
  misc_feature (134)..(179): n is a, c, g, or t
  misc_feature (294)..(294): n is a, c, g, or t
  misc_feature (309)..(309): n is a, c, g, or t
gagagtaaaataactttatttttatttttgcaaatcatcctctgctcaaactactataaactggcagctgtaatttctagaaatatgggttgaaaaaactcccagagatggaaggacctgatgaaacactgaannnnnnnnnnnnnnnnnnnnnnnnnnnnnnnnnnnnnnnnnnnnnngactgcatgagtcaaaattacttcatgaagtatgagatgtcaacattatgtaaataaaatttaatattgaaaaagtgatctggaagccctgtgaatttttaccctacacattttnggaggacatcacatngggttaaagaaaacaccacaaaatctcatttgttcagataatcatttgaatgtttacatacatttttggttatttatttataactaatttaatttacatttcctcatattaacatatcctcttatttagtatgtaatcaaattatgtcagtgagaaaaatcctcatagtaccttgagttgctgattctgagaaaacactaaacatgaacatgtacaaaagaggcatttgaataaaacagcatgtgcatttttttaatatttgcacagtttgatctttgcatttctgtctggagaaaatatgaacaaaacccaggtttaccatgctaagataatggttcatatgactgccataaaagtagtacatacaaacaatgaaaacaaatcacatccttaggttccatgattaccgagatgatttcccctgccctaagtgctttattatatttcttaaaaaatataggagcagcagcttatcacaagtctccacaagtgcattaatgatggaatcaaaacaacacaccagattcataaggatgagagaactgcagaacaaccagaagtcagttttatgcttcttcttgttctggataattcagaattttgcggtgtgcctgtcgtaaatattgctgctgtttgaagtaaactttaaatgctccttttatggcaacaaacgcaattccacccaagattgtcctttgtaaattagagttaacactactgaacatcaatttaccaactattgtagcaatagtaggaaagacaagggctccacacaagattcgagtagcagagacatgatctgctaaaggattggcctcagctggaattcgaggaacaggacaacctatccctggaaatatactatttaaaatttgtagtttattcgagtatttgcgccacagtctaagcacatagtcctcccagcgaatcatcttgcctaatatcagcatgacaggaatagtaggaagtccaattaaaaggaataaaggatcagctctctccataacatccagaccttctttatgacctacaacctgcatcactgtcactgctccataagtcacagctgtccaatagatagagccgaccattattcctgctgcagcaaatggacaggcttttgagatcagtctatctgcaagatccaagacgtaaaccactggacccaattttggaaaaactattaggtattcagcattgcactgaggacatgccactctggctgtactgtttcctctttgcttttcatccacccagcgttgtagacaggcctggtgaacccattttgtagatcctctgcacctgcatggtctcacccattcagctgttctatcatcgttcatcagtagcaaaacaaacccagcaacttctgtccagcatctgctgtagggcttggtccggcatcttccgcggagccggcgcacacggccttccccagtggacccgctcaaggccaggcccagggacaatagcactgagaggcggcggagtaggccgcagtccggcggcagccgcgaacccgtcacccagcttcccggggcagctccgctagcctggcggcggcggtgcagggcctgcgggagtccggcggaggcggcggagagcgaggaggaggagcctgaggcggggaggcggcgatcgcggcccgggttcccgtccgtcggccggagattccggtccatggaccgc

SEQ ID NO: 126497 - DNA, 1139 bp, Homo Sapiens
  misc_feature (235)..(250): n is a, c, g, or t
  misc_feature (252)..(257): n is a, c, g, or t
  misc_feature (259)..(263): n is a, c, g, or t
  misc_feature (265)..(269): n is a, c, g, or t
  misc_feature (271)..(362): n is a, c, g, or t
  misc_feature (364)..(364): n is a, c, g, or t
  misc_feature (384)..(565): n is a, c, g, or t
atggaacctcgggccacacagctcaggcacacaccatcggggctactggctgcttggagtttattttccgcttggtgccaggtgcacagttccaggtgtcaggaaagctagcgagtgctggggccgggcggtagagagcggggctctcactggtttttggtgtctgctgtgttgatgcgaaggtctgcttgctgcagccgcctagtttacagggtggggggtgggaggtggggannnnnnnnnnnnnnnngnnnnnngnnnnngnnnnngnnnnnnnnnnnnnnnnnnnnnnnnnnnnnnnnnnnnnnnnnnnnnnnnnnnnnnnnnnnnnnnnnnnnnnnnnnnnnnnnnnnnnnnnnnnnanaagaggggaaaaagaagaannnnnnnnnnnnnnnnnnnnnnnnnnnnnnnnnnnnnnnnnnnnnnnnnnnnnnnnnnnnnnnnnnnnnnnnnnnnnnnnnnnnnnnnnnnnnnnnnnnnnnnnnnnnnnnnnnnnnnnnnnnnnnnnnnnnnnnnnnnnnnnnnnnnnnnnnnnnnnnnnnnnnnnnnnnnnnnnnnnnnnccaagaagaggagcacagcccaccagatgcgtgaggggacggcaggcacagggcgcccgcaaccagaaagcccacgcgcggcgccaccgcaaacaaccccacagaagacaaaagccacggcgcgaaagacggagaaacgggggtggcgccgaacaacaggcgggccgcgcacagaacggagggcggcggagcgcgcgaccccacgtgcgaaacgcgcgcgaggaaacgacggatggagaagtggggagtgcgcggagggggacggaggccgcgacactactgggcgagggacagtgaccgaatatgtagggaattcggggagacaacgtcgcaccggagcgagaagtggcgaacgaggagcaatacagatcatctgtaatagatcgagtcgagacgtgcctccgcaacctagtgagagtgactagaggttacacctgcgggacggtagcgccaaggagcgggaggtcgtgagcgcgccgtctgcagacggaagcggcaggacacggccgcgagctatcggacctcaggatgctacgccgccccgatctacgtcagaacgtcacgcgcaccggct

SEQ ID NO: 126498 - DNA, 718 bp, Homo Sapiens
  misc_feature (19)..(19): n is a, c, g, or t
  misc_feature (31)..(31): n is a, c, g, or t
agccggcccgacacggttnttttctttgttnttcctccccccccgggtagtttaaaggtccaatttattaggagattaagagatgtatttattatacatggactataaatactgcacagctgactttattcacagtcaagcagagatatagtcagtgccaacctattttgtggatactcttgttcttttgttccaagaaaagtttgcaccataagacttggacttgggttttggaaccttcctctcttcaatgtcatagctccatccatttttttctgcaaaggaaactgcatcttctttagtactgaaggttagaaccatgttggataagggatcagccgttgatgcccaacccatcaaaggattttcccatcgctccctggtatcaaactccatcttccatttctttgtgttgtttactccagactgcatgttattgcgagcaggaacaaagatcctgacttttctagtttttatatgctcttctggaacgccagttaaagtagtgatatccaatttttcatcaactgttatgagttgtgtgtcttgagtctggtcctgtgccaatctccatgtggaagtcctcaacgacctggtcggaaccctggaaacggaaagggcagctacagccactgcccttctccgccacaacgtctgcctcagtaccactgacattgagaccgccgccatcttgctgcaggcaaacgccaggatcccc

SEQ ID NO: 126499 - DNA, 1403 bp, Homo Sapiens
gtgattcacagtgcactgattttatttacagatcaaaagccacttaaataatctgcagacacaagtgctgtccagggcagaagcctggggtccaaatcagccttatccctcctcatgcccacagtcagcccaatgctgtctccgttccatgggccagcacaggcaggcgccactctgctgacatgaggacctggggtagctcagacatttgactacccaagcccagaaaggagctgggtccagcccttacggggaattcctttaattcccccaggccaggtgagtgctgactcagtgatgacaacagctgtagaagtaggggtttggcttctggcccagatccacgcccttgtcctctgtcatcacctggaaggcagccacactgacgtaatcctctgccactttctggaagagctcgtccacactctggcctgtcttgctggatgtttcaaagagctgagctttgatattgtctgcatagtcctggacgtcgtggaagtccacacgtcgacgcctccggtcttcttccagcaggtcactcttggtgccacataagtagatttggcagccctcctctaggctgcgcagttccttcacccagaactttgctcgctcaaagctgctgctgtctgtgaggtcatagcagacgatggcagccttggcaccccgatagtagattctactcatggcctcatagcgctcagagcctgctgtgtcccaaatacctaatgtcacagtccggtctccgaccgacatcaccttggccacgaaggcggccccgatggtgttctgataaggccccaccagaaagcggtcgtgcacgtagcgctccaccaggctagtcttgcccacgtactccttgcccagcatcaccaccttgacgtccacgcgctgcccgctcatgctcccggggccgcttcagccacgtcagggtcctgagcggggacgggaggcaaaccccgatctccgctcggcccaggcagcgcccaagcctcagaccccgaccccaaacggcgccaacctacgactccagacagcgcgtcgggctcgagctctggccgtggccttgcacttcggcagcgccccgtgtgcccccgctgttcggccccgggcgccgattatccttcgaagaccccaagcctcggggcggcctgggagcgcgcgggacagcgtcctcaacagcgcagcacgccgccgtgcagctcgctactccgtcattcgctcgcctgcccggcttaagctccgttctggctgggaatcccaaccgaacctggggtctcccgcaacccggctcctacccgcagcgccgcgactcccgccctcgtgccggaaagccacccaggcctcgctacttattttggtttgttgggtttaggcccgcccagtggtgtgggggtggttgg

SEQ ID NO: 126500 - DNA, 1045 bp, Homo Sapiens
  misc_feature (669)..(669): n is a, c, g, or t
  misc_feature (672)..(672): n is a, c, g, or t
  misc_feature (717)..(717): n is a, c, g, or t
  misc_feature (775)..(775): n is a, c, g, or t
  misc_feature (798)..(798): n is a, c, g, or t
  misc_feature (835)..(835): n is a, c, g, or t
  misc_feature (859)..(859): n is a, c, g, or t
  misc_feature (862)..(862): n is a, c, g, or t
  misc_feature (868)..(868): n is a, c, g, or t
  misc_feature (887)..(887): n is a, c, g, or t
  misc_feature (937)..(937): n is a, c, g, or t
  misc_feature (976)..(976): n is a, c, g, or t
  misc_feature (979)..(979): n is a, c, g, or t
  misc_feature (984)..(985): n is a, c, g, or t
  misc_feature (1008)..(1009): n is a, c, g, or t
  misc_feature (1021)..(1021): n is a, c, g, or t
tttttttacacagtgcactgattttatttacagatcaaaagccacttaaataatctgcagacacaagtgctgtccagggcagaagcctggggtccaaatcagccttatccctcctcatgcccacagtcagcccaatgctgtctccgttccatgggccagcacaggcaggcgccactctgctgacatgaggacctggggtagctcagacatttgactacccaagcccagaaaggagctgggtccagcccttacggggaattcctttaattcccccaggccaggtgagtgctgactcagtgatgacaacagctgtagaagtaggggtttggcttctggcccagatccacgcccttgtcctctgtcatcacctggaaggcagccacactgacgtaatcctctgccactttctggaagagctcgtccacactctggcctgtcttgctggatgtttcaaagagctgagctttgatatctgtaaagagaagtgactaaagcctcatacctgagaattagataaacagacaaaagggagggctagcagttcagggagtctcctggaccccacagttcaaggaggccaggaagacctcctagagcaccttgccctggcagccaaggcagtccctattttctttgattcacccagacagccacacacccccacccccncanagggctgaggagcagctactgtctgcatagtcctggacgtcgtgnaagtcacacgtcgacgcctccggtcttcttccagcaggtcactctttggtgcacatangtagattttggagcctcctctangctgcgcagttctttcaccagactttgctcgctcaanctgctgctgtctgtgaggtcatancanacgatngcagccttggaccccgatngtagttctactcatggctcatagcgctagagctgctgtgtcccaatactnatgtcacatcgggttccgacgacatcaccttggcacaanggngcccnnatgtgtctggataggccacaaanncgtctgcactangctcacagctatctgcccgtatcc

SEQ ID NO: 126501 - DNA, 789 bp, Homo Sapiens
gggagtcgcggcgctgcgggtaggagccgggttgcgggagaccccaggttcggttgggattcccagccagaacggagcttaagccgggcaggcgagcgaatgacggagtagcgagctgcacggcggcgtgctgcgctgttgaggacgctgtcccgcgcgctcccaggccgccccgaggcttggggtcttcgaaggataatcggcgcccggggccgaacagcgggggcacacggggcgctgccgaagtgcaaggccacggccagagctcgagcccgacgcgctgtctggagtcgtaggaccctgacgtggctgaagcggccccgggagcatgagcgggcagcgcgtggacgtcaaggtggtgatgctgggcaaggagtacgtgggcaagactagcctggtggagcgctacgtgcacgaccgctttctggtggggccttatcagaacaccatcggggccgccttcgtggccaaggtgatgtcggtcggagaccggactgtgacattaggtatttgggacacagcaggctctgagcgctatgaggccatgagtagaatctactatcggggtgccaaggctgccatcgtctgctatgacctcacagacagcagcagctttgagcgagcaaagttctgggtgaaggaactgcgcagcctagaggagggctggcaaatctacttatgtggcccccagagtgacctgcttggaagaagaccggaggcgtcgacgtgtggacttccacgacgtccaggactatgcgacagtagctgtcctcagccttggggggtggg

SEQ ID NO: 126502 - DNA, 1131 bp, Homo Sapiens
gcgccgggttgaaatcggacgaggtaacgggagcagagtcgggggattgagcattccacagaaattacagttggtccttttgaaaaaatagaactgtatttcagaaaaaagaaactacagttttagcatgcagaaaggaaaagggagaacaagccggatcagaagacgaaaactctgcggaagttctgaatcaagaggagtgaatgagagccacaagtctgaatttatagagctgaggaagtggctgaaagctaggaagtttcaagattcaaacttagcgcctgcttgttttccaggtacaggaagagggctgatgagtcaaacatccctgcaggagggacagatgattatttcgttgcctgagagttgcctgctcaccacggacacagtgattcgaagctacttaggggcatacattactaagtggaagcctcctccatctcctctgctggcgctgtgcacctttttagtttcagaaaagcatgctgggcaccgatctctttggaagccttacctggagattttacccaaggcgtatacctgccctgtttgtttggagccggaagtggtgaaccttcttcccaaatctttaaaagcaaaggctgaagagcagagagcccacgtgcaggagttctttgcttcctccagagactttttctcttctctgcagcctctgtttgcggaggctgttgacagcatcttcagctacagtgccctgctgtgggcttggtgcaccgtcaacaccagagccgtgtacctgaggcccaggcagcgggaatgcctttctgcagagccggacacctgtgcactcgctccgtacctggacctgctgaatcatagcccacatgtccaggtaaaagcagcgtttaatgaagaaactcattcttacgaaattagaacgacttcacgttggagaaagcatgaagaggtattcatctgttacggccctcacgataatcaacggctgttcctggaatacggatttgtttctgtccataatcctcatgcttgtgtttatgtctcaagaggttggaatcaactttgttcttaacattaacactatataatttttttccccatttggagatgtgtattttcagttttaataaaaatatcaaaaccttcctgtgc

SEQ ID NO: 126503 - DNA, 780 bp, Homo Sapiens
caacattatagagactttaatatagaactggattccaacaaaacagttttattaaaataaggcacaatgtttgatatggcaaaattcacagaggattggttaatataagatcttttgtacgtcctgggggagggggaagaaggtggtagaattgaagtagcccatatattcttttaagagcatttagcattacaaggcaatatataaatttgatattaatataataaacaataacttatcctaaatataaaaattgttgaatcatgttgctgaattacacttatttctaccattaagttttacttatttatctatagatgtagatattcctaatttgcaagatttcaaatacagaaaattaagaaatcagatcataaaaagtaatttgacccaagtaaaagtatgttttcagtacccttcgttaatactttgacatcccaaactttacaaaaacttacaatgctgcttatctaaaacttttctcccattatgtttttgtttctcatgaatacaaagcaggctcagaaatgcaaaaaacctcaactgcaggcacacgtctttacatgattgttgtaaagtgactgtttaggttaatattctttctcaatatcacaacaatgttaacaatttaagttagtgaaaggattctcttaaacataagcggtagacataattaaccaatttagtcatgtttttgcaatactgcaacagcaatgtcaatcttatccccgtatcttcaacagctggaacttacaataaaaagtcttatccaatttattt

SEQ ID NO: 126504 - DNA, 1215 bp, Homo Sapiens
  misc_feature (365)..(373): n is a, c, g, or t
  misc_feature (1078)..(1112): n is a, c, g, or t
gatattacaccttttgttttattaacgataaatgtttgcattacttttaaaagcttagctcttactaagcattctttaacaaaagctaataagcaagaaatcatttgccatacggaaactatattcacaaacaagactttaatccaatattgaaagctaaagaattagaaaaaatacaaaacactgctatgagtcaattgaactgctatcattgaatttgctgcatttagaatgacataaacatactgaacataaaaacaattttatggatttattctataagactagcattaagaatgacatacaatttgtgatttcctttaaaaataattttttacaacagaatccatttgaacaaagggtcnnnnnnnnncccctcatttgaggggaagacaatctatgtttcccaaacagatcctcctttcatactaaaatagcaaactgtggcctcgatctcctcttcccagatgctacttatagatgactttgcataataacttaattagaattacttttctggtaacagtgtcacggccataaataatcagtttttacaaaacaaacatcaagtgcaaatctagaaaacttcctttaaagaattacccaaacccagcacacatgcagaatcattattaacaagctaagcaatatgactttaaaacgtgtatataatgatacacgtgcactaaagacatcttttataaagttttaatagtgttgccaagttaataattctttcaaggcactggagaattacacagatggagtttccaaaatataactgacaattgcttgaactgttaaaaagccctgagtcagaactttcaataacttcctgaaattatagattgcagacaaaatggcacgtttattttactttaaaaattacaggaccattttgctttttggaggaaataagctgggtttatgaaacaaatcatgcagactatacaggaaaagtaaaatattcagcatatgacctttcttagacattttgtacatgtcgatcacaacttgtagttacagacccggccgtaatggccgaattcccgggcatatgtccggtaccgtcgactgnnnnnnnnnnnnnnnnnnnnnnnnnnnnnnnnnnncgccgcttcctcgctcatagactcggctgcgctcgttcgttcgggcatagactaaaaagacggcgggggccggctcccttattaaggtgagtcggtagtagca

SEQ ID NO: 126505 - DNA, 710 bp, Homo Sapiens
ttttttgacaacaaacagtcaaagtgcattttattgccaacagaacacttcaggaggaaatgctaacacaaagccaaggcgctggtgctggctcatttttgctcctcctgaccttggccagtatttggtagcctttccagagcacagggtgaaaggctaaagggctagggctggggtggggggagcaggagggcatggcagctgctggctctgtcctcccagcctggtcccacccctcctgccgctctccttgggctcaagggacacacattcgttcaaatctgacgggcaaagccagggcctagcccactctagccgcagggtcccctccctgagggccctggtccagcacctgggtttctgggctttttctggctgagctggagggcctagggccaagcccactctccggagggctggaaaccaccccttcaggtgggcagtggggcgcggccagaacgggggaatggaaaacaggaaatgggggtggctgcagattccagctggaaatggaaactccaggagtgaaggcagcgcctgggccgctatgtctcacctcactccccagaaagcggccccttccagcatctgacccctcctggggggctcccatcacggaggcccgagggccaggcctgaggagtaatgggcgacattcctctagcccacacagagcctggtctgcggagacacgcagctggagggctggt

SEQ ID NO: 126506 - DNA, 1063 bp, Homo Sapiens
  misc_feature (43)..(63): n is a, c, g, or t
  misc_feature (386)..(411): n is a, c, g, or t
  misc_feature (677)..(782): n is a, c, g, or t
ccctcactaagagggaataagcttgcggccgcggctgtaggcnnnnnnnnnnnnnnnnnnnnnaatgttactgctttattcacactaattagaatacatacacaaaaaatgtgtatcatatatcactttcaaaaatttccatgttccatgagaactatgtaaacaatgcaaaatgtttccactacgtaacaaaagaaaatcagcattcccacatagtattaggaaaatatttggataatctgaatttatagtaaaacaaagtgatctgaatttgtagtaaaacaaagtgaaatattacaaagcagtcttgtcatgaagtagccttatataactcagaagcaacacatttcatactttcaaacactttggtataagtgaaattaatnnnnnnnnnnnnnnnnnnnnnnnnnncctctactttggttttcacattattggaacttcagcaacaaggcaagtgcacagctaccttggatgacaaaatggaaaacctctcatctgcttgcttctcctcctgtaaatggacgtgctaggagagcgcttcccaggacttcttgaaaataaggtgcatctcacttctttccacaatcaggctctcagcaatcgtttgagggatttatagaacctcagattcacctcgttccgcctcgtgccgaattcttgggctcgagggccannnnnnnnnnnnnnnnnnnnnnnnnnnnnnnnnnnnnnnnnnnnnnnnnnnnnnnnnnnnnnnnnnnnnnnnnnnnnnnnnnnnnnnnnnnnnnnnnnnnnnnnnngttggtaagcctgggtggcctactgagtgagcccacccacatagtgcgttgggctcacggccgggtttcagtcgggaaactgtcgggcagctgattatgaatcgtcagctctgtaaaggggtttggtttggggttttcgtgtctctgctactacttcgctgtggtctttgttgcggtgtggtatctttatcaggggtgatgggtgccacaaccgggaactcgaatatgttttcttggcgcaagctcacgttaaagcggttcggctgtcactgccccccgac

SEQ ID NO: 126507 - DNA, 619 bp, Homo Sapiens
  misc_feature (506)..(506): n is a, c, g, or t
tggtttcaccagcgtttaatgtgctctgatgttgaccgtccctctgagtgttctggggaggagggggtggggcggagggtcaggaaagcaggctcagcttccagggtcagggagttgtgggcccagaggggctgtcacagtggatgcaccctgccccctccctcgccagacccgagggtagggcagaggcacctcctcgccagcctgtgggctgcacccacagggaatggaggggaggggcaccattaccactggacccaccaagaccccgccgcctgggtgggctgtccacaggcccttccgcccagcagcagtgacgctcagggccttcccagctgtcagccactgcccgttcctgcgcctctcgtgcacctccacatctggtttgaggtcaggtcatttcctgtctgtgggcccagctgctgtgacacccaaggggagggccggcgtccccgaagccaggtcagccgtgcacccggcagagccccgcagattggccccagcanagcttggggtggggggagctcggtgtcaccaacaggcccttgaggacactcgtgtggagaatccctgggacacgtggaggaccccaagtcctgagccccgtactccgtactgc

SEQ ID NO: 126508 - DNA, 711 bp, Homo Sapiens
aggtgcaagttcatgctggtgatttttcttttttaaaatgtaagccactaatattttaagacaaaaatttaaaccaaaaattgcatattaatattatacacaaactgaaacatgtgacttttagcacagtgtatacatgcttacataaactcaaacacatttaaaacaatttccatttaacatatgaaagttttgaaatacataaaagcattaatactttctataaaactacagttagaacatcaatttgctacaagcatataaaaacatcaagtgctttcttggagtttcaagtttcctctctaaaacacaatcttgctcacatatatagtccttttccaataatcagtatgaacttttctttttctcaagaggtttattttccaggtacattataagctcaagaaaaaagacccaacaattaggcaatataattatgtcataacaacttaattgcacataatgctttaaagtaggtttggatgaagttctcaaacactttggtatatgatcttcagggactttaattagaaacaacagaaattataagtcccttcaatccccattttgctttaaaagggacaagtctttggttaaagttctacattttgggcatttatttttaattaagatggtccccaaaccaataaatggtactgatctattacaaattcacaagacttcatttaacctgcttctgatgcagtggga

SEQ ID NO: 126509 - DNA, 1426 bp, Homo Sapiens
aatttagatctgaggcctttaagaaaaatgctcagaaacaatcatcctacccagtgctaaatatcagatgagtcagcctctgggcagctgtcaccttcctcccccaaattccctggcaaagcagggaggctggcttggggctgcctctctgactctgacagcagttggaacccacagctaccctgcggtccccctcttgcccccaatcccaggatgctcgcttccattttactctacttttagggaaggagccagggatgggcctcagtgttccctccctactcccgaagggacagtatttgtccccagtcctttctcctgccgatgcttttggatttaggaagtgatgccttgaggacatgggcatctcccacccttcgtgctcaccctcgcaatagtggatgtgcctggagggtacatttctgaagaactaccagagctgagaagaaaaagcagactgcatagcttagcgcagattcacgcaaagccacttgtgcattccagagccagggccatgtggttcggcccacgtgttggcagtaagcatgttgttccagccaggtgagtcagcagacatgggatgttcgtttatttgggcaaatgtgtctcgttagggtcattctgaaaagaagcccagtgtgcagtcattagcccctggggtagcgttgctactaagtggttggggagaagtcagggaagaggaagaggtggcgttccccagcctcacccgtggagaccccagcgaagcgggggcaggcaggcactgctggaggagcgaaggccaggtggacacgaggacagattccagaggcttggttttattgtgcagttttctttgtcctcaatgagatgccataagctgtggtggcactatacacagtcacagaacaggaagaaccaccgggtgggggctgggggttgggaaaagccatttcctgagaagtgtccggctcctgggtctcactccatggcttgcctcaggccccgcagaagtccctgagaaggcaggcctgcggggcagggggctgtctgaggggctcaggcaccagccagcaggggctggcactgatgggcgaggggaggaagtgcctcccttagaaacttgggccaaaccctgtgcagctctgggactccaccccacctgacttggaggctgtgggtcagagctctggaagctcttgggagcttgggacagcctgagagggtcttgtcctcctttgtagccctctccactgtgggtggaggcagggaggggcagcagggccatgcttttagcttccttaggcagggagggatgatgaaccctcatcctttacctccttctccaaccctccactagcgctgctttcctggtcaaacctgcatcttcactgggtcatgccccaaggcctctgagggacttccacagtggtaaggagggctgccc

SEQ ID NO: 126510 - DNA, 1296 bp, Homo Sapiens
  misc_feature (1237)..(1246): n is a, c, g, or t
aaacaattaaaagggatttaaaaattactcttttacttttattacaataaataattatcaataatagaattaaacaattttcaattaaaacctactgcattactttggggtttcacagcagcagaaacaaacataaatccagttgaaagggcaaggcttccagaatccagtgacaagaaacagtctggtcttgattattcgggctagcaatgggaaatactgatacagataatgcaaaaacaatgaaatgcatcggcatactctctttgtacatcacattatctgacactttaaaatattccagctaagtaatttaagcaagccatgaagctctgtttctgcaacagttagagttctcccccagcaagcccgcagcacaactgctcccagagccaccctctggccagaaacgggccccatcatcatgcagacctagaagcctccaccctgggtggaagcagccatctttctcaaagctctttctggctcacacaacccatggttaaaggaaaatgggaaagtgacatatttaaagggcctttctcgaggactgagatgaactggaagacagacagactgtggctccagatcaggaagaggcttcagagtaagggccacatgcagatgaactccacatgaagaaactatctgataaaggctgaccattttgctgataatcaagcagactgcatgtatatatgaatatatcatacatacatatgtagtgaatatatgtgtacatattaaataggcatacacacacatcacacacaaccagataaaataaatggtacatacattgctactatgaacactgcacgtcccagacagaccaatgactaatatgttcaattaaactacttgaattaaactactcttcctctccccaaaatattctgcttgcagcaaacatattccagttgctcaagcggtgttgtttctaggttcctgagaaggaatggaatcgtcctcttgtttcagaacactacagaaagccaactgcaacaggaccaagctaaacaattcatatttgatttggccatgattcctccacctattcttagtcacagggcatgaaaccttactcagaaagatatcaatttctttttctacaactggctacaaatttactgtattatgttagatggaggggactgggggaaggcgggcagcagggagtttacatgttggcaatcattcattgcctttccctttacccagagaaaatgctactttnnnnnnnnnncccacgcgtccgcggacgcgtgggtcgacgatatcccgggaattccggac

SEQ ID NO: 126511 - DNA, 928 bp, Homo Sapiens
  misc_feature (60)..(60): n is a, c, g, or t
  misc_feature (104)..(201): n is a, c, g, or t
  misc_feature (313)..(328): n is a, c, g, or t
cgcggcccccgcaagagggatagaaattttttttaatatcccgcgcggggcgagggcccnaaccgtttttttgctgtgttccttaaaaaagggtgtttaagaannnnnnnnnnnnnnnnnnnnnnnnnnnnnnnnnnnnnnnnnnnnnnnnnnnnnnnnnnnnnnnnnnnnnnnnnnnnnnnnnnnnnnnnnnnnnnnnnnactgtttcaatgctttattaacagttggaaacaaaaccaacaaactggaggtgatgacatcccagaagcctatgaggcaagggaaataggtttgcattttgtccctcacacnnnnnnnnnnnnnnnnttttttttattaaatgcatcttagcaaaagtagattaaaaaagaaagggtcaaagccccagatgtcagcgagcagggaggaggtgacccaggggagcaacagacgccctgcatcagagtcctcccaggaatagtccaaaggagctgctcttgcccctttatacacaagcgccagcaaccaaaaccctccctcctggcaataaggcctcactatagttgccctcatgcttcctaagctctctcttgctctaataactctaattctgggccaagcccaagagtgccattctttcttcctagctggggatggaaagctgagaggggcacaaggagggcaaaagtatcaccctaagccagagaattgcagcttcctgtggttggggccaccaaacagttcagtgtgcccacccacttctcttttagaagagagctggggtacagtgtatgaaggcactcctggtgcccagttccccagaatgtccagttagcatctgcacatttggcttgatacatttatacatttataaaaaactctgtggtcttagagttcctgctactcttagcctggcccagctcaaccagagaaggggttcctcctgtg

SEQ ID NO: 126512 - DNA, 1096 bp, Homo Sapiens
cagagaagtaagatatatttgctttattatgtacacactatatttacatcacccaccctgaaaacagcaggttctggcttttccgtgaacccccagatgaatataaattggagcctctgagaacagttccttccccagagcggggagtgtgcacgtgtgtgtgtaaccttctgattccatgggacctggccagctcctctggagccacacagcacctccttgccttacaccctggctccagcttcactggtccgggggacgcctcagcctggggcagctgtgatgtaaaccagtcactccacctccatcttcctcttctgcaaagaatcgaggaagtcttgccactctgctgggtaaaagcgtttatagacgttgatcttactccgaatctgttttggggtatcttgatagtaattcttctcatcacgggccatggccttatagtcctccccgtggttctctaccatgtagcgtacatagtcaatgaggtcccgagacagagtatttcctttcttttctggaaggctggcttctgcctccaggtcattcagcacatagggcttccgtacaagctctttaggcctctcctctatgtccacctccatggccttcacctttctcttacggaggggcaccgccctgttggggtccacagccaaccccatctcggccaggttctgccgtaccgatttagcgtggtcccaggcatgtcggatgtgggagcattcgatccgcggcgctgccttccgtcgagcattccggttcagacgctttcggttgacactgtaaccaaacttctgcctccgggttttgcccttggccttgggcatcgcgctgaccaccgcaccagcagctcaaacacgctgcctctgtctctcagacctcgtgtaacaaactccttccggaaggcgtgcacaaggctttgcgggcatttggggaaatgtagtccttttgtagcactaccgtgctgagcactacgactcccaggatgcaacgagcatttgcgcctgcgtacaaggctcaatttattcgtttccccgcccctttcatgacctcgtgccgaattcaacacccaggcctcgctacctagccttaa

SEQ ID NO: 126513 - DNA, 798 bp, Homo Sapiens
agaagtaaaatatatttgctttattatgtacacactatatttacatcacccaccctgaaaacagcaggttctggcttttccgtgaacccccagatgaatataaattggagcctctgagaacagttccttccccagagcggggagtgtgcacgtgtgtgtgtaaccttctgattccatgggacctggccagctcctctggagccacacagcacctccttgccttacaccctggctccagcttcactggtccgggggacgcctcagcctggggcagctgtgatgtaaaccagtcactccacctccatcttcctcttctgcaaagaatcgaggaagtcttgccactcttatagtcctccccgtggttctctaccatgtagcgtacatagtcaatgaggtcccgagacagagtatttcctttcttttctggaaggctggcttctgcctccaggtcattcagcacatagggcttccgtacaagctctttaggcctctcctctatgtccacctccatggccttcacctttctcttacggaggggcaccgccctgttggggtccacagccaaccccatctcggccaggttctgccgtaccgatttagcgtggtcccaggcatgtcggatgtgggagcattcgatccgcggcgctgccttccgtcgagcattccggttcagacgctttcggttgacactgtaaccaaacttctgcctccgggttttgcccttggccttgggcatcgcgctgaccaccgcaccagcagctcaaacacgctgcctctgtctctcagacctcgtgtccc

SEQ ID NO: 126514 - DNA, 2218 bp, Homo Sapiens
  misc_feature (179)..(222): n is a, c, g, or t
  misc_feature (1747)..(1747): n is a, c, g, or t
cccaaaaaactttatttattgtttcaagtggcaaaatgtcattggtctctgtggggtacctggcggggcagacggagacctggggtgaggcagggatacagtcccacccattataaaaatcaaaggcttttataaaaaatgctataaattggtatcaaaagaaaacccaagggaggctnnnnnnnnnnnnnnnnnnnnnnnnnnnnnnnnnnnnnnnnnnnncaaaaccttcaaccactagtgatgaaatccagggaagggaaggtgtggggggagttcggagggtgatacaaagtgcataaatgtgcctccccagacgctcctcagaggtggaggggacagaggctgcagcctggggcatggtggggctccagccgtctcctcacccagggaccccacaggaatgggcactgcctgagactgccaggtgggaagaacctcagtgacttctcagaccttcttcttcttcagtttcagggcttgaagccagttgggcgacgatccttctgaccctgaggatttctctggcttgggaggtaacgtgaggggctttcccagtcctgggaccttgcaggatttcgaacgctggaccgcggactccttctggctcgacttgctctcagccagctctccctcctcagctgagcgattccgggggcgcagcttggccttcagggctgaggggctcaggccaggaaagaggttgactttcagccccttggtgcccaacgacatccgtgtccggcggctctgaggttcctccactacctcttcatctgaagatggcacccgagatgcccgtggctctgtagagtcctggaacaggtgtgcatccgagtctgctgcctccgacaggcccaaggtacccccaggccgaatgaccggggcccggtgcccacgcttgcgccccaagttggcacggctccgatacatggcactgtcgaggatctcggtgtcctcaatgaaggagaagtcctgactgggggatctggcaggagggccttgggagggtcgccgagaagtctgtgctggcccctgatcgctccacctggctgctgaagagccccaggtgccatccacgtcttctgtctggctggcctcaccatcaggctgcggcctccaggagggtggagagtccctgccaggctccagcacctcctcttgggcagcacctgccccggctccttcctcctccaacaggcccccaaggcccgaggccgctgactccctccgagccaccgccttggagctgctggctgccagcatctcctccagcaggccctgggagccggagggtggggggcgggccgggcacctgccagggcttgctccgaagctgagggcttctcctgtctccattccagggtctgcagggtgtggctccaaggaagacgaggagtaatcttcaccctgggtctctggcccacttgtctcaccaacccccagctccctggcctccaaggggtctctggcctccaggccaggagacaagctgccattgtgcctcaggccgggctctgggcactggctcaccccgcccaccccatgctccctggcttcacttggagccccaaagagctccacattctggggcgccaagtcctgggtccagtccatctgccccactccacatccccgtagcccctgagaacctccagagtctgggtcacaggtcacctccaaatccctcaggcccagattgttaccccagtccatctggcccaccccaagctctttggactctccnaggactgcagactgcccctggggccatgtttctcagcccaaggtcaggtgtccagtctgcctgatttaaggaactctccggcctccacacctgaccagtcagtctgccccacgccactctctctggcctggctgtggcctcctccctccccgacctcagccaaatctttgctcttcacattaacatcagaagtccagtccttctccccaactccgattccccccggctcttcagaccctccactttccaaacagccggtcaggttcatgtctctcaagctcaggccacctgaccagcccatctgtcccacggcactctccctggcctcgctcgagcccccagaacccacacagctggacacttccaagttcctgagacccagctggtcagtccagtccaccgagccagctgtgtcttcccaggaggcacaaagtgaccctcgtgccgagaatcgccacccaggctcgctcc

SEQ ID NO: 126515 - DNA, 695 bp, Homo Sapiens
  misc_feature (176)..(229): n is a, c, g, or t
  misc_feature (682)..(682): n is a, c, g, or t
accaattcccaaaaaactttatttattgtttcaagtggcaaaatgtcattggtctctgtggggtacctggcggggcagacggagacctggggtgaggcagggatacagtcccacccattataaaaatcaaaggcttttataaaaaatgctataaattggtatcaaaagaaaacccnnnnnnnnnnnnnnnnnnnnnnnnnnnnnnnnnnnnnnnnnnnnnnnnnnnnnncaaaaccttcaaccactagtgatgaaatccagggaagggaaggtgtggggggagttcggagggtgatacaaagtgcataaatgtgcctccccagacgctcctcaaaggtggaggggacagaggctgcagcctggggcatggtggggctccagccgtctcctcacccagggaccccacaggaatgggcactgcctgagactgccaggtgggaagaacctcagtgacttctcagaccttcttcttcttcagtttcagggcttgaagccagttgggcgacgatccttctgaccctgaggatttctctggcttgggaggtaacgtgaggggctttcccagtcctgggaccttgcaggatttcgaacgctggaccgcggactccttctggctcgacttgctctcagccagctctccctcctcagctgagcgattccgggggcgcagcttggccttcanggctgaggggctc

SEQ ID NO: 126516 - DNA, 1109 bp, Homo Sapiens
  misc_feature (189)..(208): n is a, c, g, or t
gtctgtacccccgccgcgcggccgaaagtaggcgagccccctggggctctcttcgcactaaaatgggggggttttcagatagggggctcttcgcggtggggccccagggggagagcaacaagctgtgcgccctgtgttttccctctcgggggccctcgggcctttttggtggcccttgggtgttacaannnnnnnnnnnnnnnnnnnnatggtttcccctgggctttccactttgggaggccccccagaagaggcttccaccatttttggggggcggccaatgtccttggggtcccagttccattttggcccccatttccactattccccggtagccccttggagaaccctccaagagtctggggtcacagggtcacctccaaaatccctcaggcccaggattgttaccccagtccatttgggcccaccccaagctctttggactctccaggactgcagactgcccctggggccatgtttctcagcccaaggtcaggtgtccagtctgcctgtccaactccacgctcccttgatttaaggaactctccggcctccacacctgaccagtcagtctgccccacgccactctctctggcctggctgtggcctcctccctccccgacctcagccaaatctttgctcttcacattaacatcagaagtccagtccttctccccaactccgattccccccggctcttcagaccctccactttccaaacagccggtcaggttcatgtctctcaagctcaggccacctgaccagcccatctgtcccacggcactctccctggcctcgctcgagcccccagaacccacacagctggacacttccaagttcctgagacccagctggtcagtccagtccaccgagccagctgtggtcttcccaggaggcacaaagtgaccaccttccatcttgctagaagggctaaagccagcaccactcactctgtcgttgccaatgatgccaaactgatagctcctctcactggcctcgatgcagaagtcccggctccagtcctgctgccctgggctaaatgctgcctctcgctgggggccaacaactgaggactaaactcacccctcgtgccgaattcgccacccagg

SEQ ID NO: 126517 - DNA, 1296 bp, Homo Sapiens
  misc_feature (70)..(88): n is a, c, g, or t
gacggccaagtgccatagccgaaattaaccctcactaaagggaaaaagcttgcggccgcggctgttggcnnnnnnnnnnnnnnnnnnnaaaattgaataaagattttattataccacacacacaaaaagcaatcggtacagaaaaggcagttttcagttattctgttgagaatttctttccatgatttctcccattaaagtatagttttcaaagcaaccaccacgacaaaggaagcatctaattagtccgttttcttctgatccaagaatgctgaacatttactgtcccatctgtagttgtatcagcagtgtaatgaacacagtttatattacttaactattctttgaactccaagaactgttgaagtcttttctgatgttctgcagatgcttgcacagcattcagatgttcaccaaatgtagtagttattcgatagatggcagttttcagtgatgctctgaatgcaaatcttaatgttttatatgaagtgtccacaaggcttcctgaaatccggggtggtttactggaagcatgaggaagcttaaagtacttgtcgactgcctcttgcagtgtcaacaaagtattaaggatagctggtagtgtcgtctggacaactccaaatctatcctctgtaaatgatgctgctactaagtgcgacagaccttctaatgcccaaatatgcatttgggcatctgaaaaaacagcctgaatggaggcctctgggtgcttactgaaaaaatacattatcagcacccgttttgacaagaaattcttaatctgttcacgtttattctgaatccatgaataaatcacactgggttgtctcattgtcttaccctcagcactaatagaggtagatggagaaggattagaaaattcagtcatttgctgatcagaagctgatgtccacaatcttggcccccttcttattagctgaggactttgcggtgacccatagcaggtgtttacatcaaaaattccagccatccgattcattacactagagccaaatggggtcccaaatgggctcacaacatcaggtgtagataattttgaagaaaacagtgatgttttaactaatggtggcactgaaggccgaggcatctggctagattttggtgtctgaaaagcagtttcttctggagaatttaatttcttaggttccactgggtaagatgaagacactctcccattcgtagcagcagcttcttgatagagaatcagtttctgagtcataccatttaaaagattcaaacactcccttgaaatggctgtccaattgtggggatgtccac

SEQ ID NO: 126518 - DNA, 2312 bp, Homo Sapiens
  misc_feature (83)..(83): n is a, c, g, or t
  misc_feature (600)..(608): n is a, c, g, or t
actatatgtcagtaaagtctgaaaacttatattagcagtagcacccaaaaccaagccttaaccccaacaatgtgtgtatcttntgcacagcaaaaactgcgaggccagaactagttttacagccatttctgttcacacttttcaccccacaacttggggatctagctgagacatttctacctcgaacaagtcacatgtaccacaggttcctgaataattcctgcagggctggtgacagacataacagctctggttttataatatcttgggtatctctaaggccaataaggataacattatctacccagagagtttagaagaaaagtaggagtccaaaggaagagtaaacaagaatggagctgtgttcacactgaatttggggtcaatctatttcccccaccctctctcctccccaacccttcaggaaccctttagtttattaatcttatacagaagaaactaacttagaaacaaaggattcaatatttgcttatttattctttgttaacatgagagtcccatgtctgaaaaccaaagtccaatttctgtctggccttttgtctcatccttcttggcaaaagtagcttttgaactgatatnnnnnnnnntgctgagtaacagaaaagtattaatgtgcttgacaccatgactgaaatactatgatcttgtttgtcaataaaaagcagctatctgtgaaccaggtaactgtgtgttttggaagatctgtttattaacagtaaataaataagccctgtacagaacacaggcactaggttgacagactcgtcttttgtaggacatttcttcctgctaaccagtactgaagggcttgtttttttcgtaactttacacaaggggtactattggaaaatatagctttctcaagacatctgatgtcagtttcccattgttttgcttcacaaacatcaacaaagtaaacctgaacatgcttagcaatttccgaaagtgttctttgctgacattacttttgacatactgtgtcaaaattcttaaggtctcccctcctttggtaaagtaggcaaaaccttacaaggaaaacactataatacacggaaatatactgagttagatttccagtcacctgctctatggctctaagatgcactacatccataatggttcctaggactgtgtccacctgatggtttggagtacggaaaaccagcccctatggcttaagagtcatctcccatggaagacaatgctggccttctgaacgctggggctcatgggcttgttgatgtggctttctggtgtgccaggatctcctggcagctcctgtatacttcaatcaagcagtccagccggggcttggcactctggaagacgggtactacttgggatatcccatgtggttccactggatctttcaataagatgcagaggtagtaaatcaccttctgcatgtaaatggcctcattgatgacaatatccttgaccttgcccatttctatgaaggtagtgctttctttgcctgaagcataagatgaagtcatctgaatgccaagggaatcaatgattaacagagtctcctgatcaatcttcacaaaatggagataaccaagcagacctaagagggtgatgaagatggcagcagagaggatcatgctgttctcgcagagggtgaagagtccgtaggccgccagccacaccgtgcaggtgacagcggtgagcgaacgcagcgagagccgagggcagctgaggcagaattcccggcaggacggggagtagtagcggcgctgcagcgccaggcggccgccgcagatatccgaaaagctttgctcatcctccatgacgcccccactcggccgcccgcaccgcgcggcgccgctactactccccgtcctgccgggaattctgcctcagctgccctcggctctcgctgcgttcgctcaccgctgtcacctgcacggtgtggctggcggcctacggactcttcaccctctgcgagaacagcatgatcctctctgctgccatcttcatcaccctcttaggtctgcttggttatctccattttgtgaagattgatcaggagactctgttaatcattgattcccttggcattcagatgacttcatcttatgcttcaggcaaagaaagcactaccttcatagaaatgggcaaggtcaaggatattgtcatcaatgaggccatttacatgcagaaggtgatttactacctctgcatcttattgaaagatcccagtggaaccacatgggaatatcccaagttgtacccgtcttttcagagtggcctagccccggctggactggttgattgaagtatacagg

SEQ ID NO: 126519 - DNA, 674 bp, Homo Sapiens
caatacaatatttataggcatcgtaattgttcaataaggggatggggtggagttaacatccacagatattgaatagatcagctttataacacaacctttaccttttgccctgggccaatgaacatcatcatcatcatcaaaacaataagatattaatatttcagtgtggagcccatactactcatcaaaatgccacagaagccatgctagtattgagtgcctcttccagcttgtggtctccgtaggattaagtcctaagatggatgtccagttttcattttccttctgttccaaccaagaccaagagggctatgggatctttctctcatgtccactggcactgcagcactgcagtccacatccttctcctatccctttccctctgctcaacaactactacttccattgtgtccagaggtacttatcccctcctgtgttgtgttgtcttcctctcttttccttcttctacagcaactctccaggactgcagaggtggtttcatgaagggttccctggccacatggcccaactaagagatgatgccaacatgtctggtgctgtaggggaaatgatcagagcagtgagcatctggggagattttaatgttcccgcagcccgaggtgcgggagccctcggacggctccggccgccccgcatcccaccggccgcgctgc

SEQ ID NO: 126520 - DNA, 445 bp, Homo Sapiens
gcaacttgcgaaccgggaaaagtttgcggcgcctccgcggggcggcgcgacgcggcccgcccctcgcgtccgcggtcatcgcgggtgactttctcgactcgtcgtcagccggggccgcagcgcggccggtggggactgcggggcgggccggagtccgtccgagggctcccgcacctcgggctgcggatttcaggtactccactgggcattttctcttcatggagcttatagcaacaaaagtgttttacaaaacaccagacatgttggcatcatctcttagttgggccatgtggccagggaacccttcatgaaaccacctctgcagtcctggagagttgctgtagaagaaggaaaagagaggaagacaacacaacacaggaggggataagtacctgtggacacaatggaagtagtagttgttgagccgagggaaagggataggaga

SEQ ID NO: 126521 - DNA, 526 bp, Homo Sapiens
ttttaatgattaagaaaagctttattgtggggacatgctttaagaatcagctctgtatttgtgccaaggagatcaggtattggtgtgcaaacagatcccattaatactctgatttgaaccatgaattccacctactctgcgttgaagccctccagtagactgatagatgtaatcaaatgatcagctaccaagtttaattcctttgcctgtgtgcagcaacagttggtagttttacaagttaagttgatggtctggcttagaacacggaggttgtttgacatctttaaatggatgatttaactgttgtgaggaagagaagttcaagaaaaagccctgctttgtgagtttcttggaaggattggagagagggtaggtgaaatgccaggaacatattccagacactcattaatagtagctgctggggctctcagagcagataaactccgactcccgcttgagaaaagaactcaatcattttatcttgtttttggagcaactaacttgcccacctcacagcagggaaagg

SEQ ID NO: 126522 - DNA, 736 bp, Homo Sapiens
ttttttaatcttgcaatggtatttatttatcaggcaggaggagtggtagttggaaaggaaaacaaatggaaaattacagaggtaaatggtttcaacatgccaataaagccaacattatgattcaaaacaactttttaccaaaccttccgagagtgggcctctactacaaactggtgatctccttaagccaccatctttctcagctagcgtgtgtgtttctagtgtagttggccctccatattcaggggtccagcatgtggtgcttgtagctgtgtctccgtagagctcagtaaatagttcttagaacacggaggttgtttgacatctttaaatggatgatttaactgttgtgaggaagagaagttcaagaaaaagcctgctttgtgagtttcttggaaggattggagagagggtaggtgaaatgccaggaacatattccagacactcattaatagtagctgctggggctctggcactgcagcactgcagtccacatccttctcctatccctttccctctgctcaacaactactacttccattgtgtccagaggtacttatcccctcctgtgttgtgttgtcttcctctcttttccttcttctacagcaactctccaggactgcagaggtggtttcatgaagggttccctggccacatggcccaactaagagatgatgccaacatgtctggtgctgtaggggaaatgatcagagcagtgagcatctggtgagatttt

SEQ ID NO: 126523 - DNA, 528 bp, Homo Sapiens
tttttctattatctcaacgtgtttatttttagattctgataagtgaaatggatgtccttgtggagctctggcctccccagcttatctatcagtcctgctgtcctcacctccttgcctctttccatgcttacccttaagccaccatctttctcagctagcgtgtgtgtttctagtgtagttggccctccatattcaggggtccagcatgtggtgcttgtagctgtgtctccgtagagctcagtaaatagttcttagaacacggaggttgtttgacatctttaaatggatgatttaactgttgtgaggaagagaagttcaagaaaaagccctgctttgtgagtttcttggaaggattggagagagggtaggtgaaatgccaggaacatattccagacactcattaatagtagctgctggggctctcagagcagataaactccgactcccgcttgagaaaagaactcaatcattttatcttgtttttggagcaactaacttgcccacctcacagcagggaaaggtttgctg

SEQ ID NO: 126524 - DNA, 1309 bp, Homo Sapiens
  misc_feature (1198)..(1232): n is a, c, g, or t
ccatgctaaagactgtaggaatattttaattcatatttttaattacattatgtaataatatcacagtctattttacaagttaaatgtatgagaatgtatgaaatagaaatggtaggaaaaaactaaacatgggtcaggaacacggaatttttccaaaaccaggggccaaaggtagatgtgtagcctgtagggcccaaggaggagacaaggagggtgacaggtacagttaccggtttgtggtatgtgtttgttccctgtgtgtatgctgggaaggacttgagacctgtcccctgccctggtctggggttgggagtttagtctggtcagctggaagatggcggcttgggaaaaagagccatctggttacctacacagagctggtcccctggtggctgcaggtaggttctgctgttgagggaattaggggtgtatgtgtcaaaaatcaaacgtgtggaggaaaaaagtaaacagtttcctcctccctccaaaaaacccaaattcttgaaatgtacacacattcttctttcaaacatagaaaagtctcactctggatgtgcttacaagaagatcgtcgtcaaaaaactttgtttctatgataacgttcccagttaagacgcttgctggcatcatctgggactcgggtgctgcctctatcaaggactgccaggtatttgtggagttagggatcacaaagccaaactcgaagaaccattcttctaggcattgccctttgaagtaaactttttgttccaggcggaatttttccatttgttctgtcgaagaaaaattaagttctcgagacactgccttgcacttgaggattttcttgggaacacgggcttcatgctccacaccagggacagacaggtcttctgttccttgccagagtatcttccctgtctcagcatcccgaaggttcatccaatttagtttgaagcccctcaggatctccctggcccgctcgtccttggctgacatgatgcggcggtcgccgcccgcggctttctcactctggtcggcggagcctcgcagacggtgcccaggagccgaggatggagccgcagcccggcttggagacctcgggctagcagccgcagcggccagaccaggaccggcctctctctcccctcagctcccgcttctgatccccggccgtaatggccgaattcccgggcatatgtccggtaccgtcgactgnnnnnnnnnnnnnnnnnnnnnnnnnnnnnnnnnnncgccgcttcctcgctcactacttcgctgcgctcgtcgttcggctgctgcgacgctacgcccatagtgtcatcagttc

SEQ ID NO: 126525 - DNA, 1043 bp, Homo Sapiens
  misc_feature (647)..(861): n is a, c, g, or t
  misc_feature (898)..(898): n is a, c, g, or t
aatatagaaaactaggtttatttgttaagctattacaaaaacaaaacaattaccattttgaagtactttagaggacttcatcccagactcacttgttctgttacagaaactaacctaaaaggctggaaattaaaggatacaacctaagaggttataacagcagactggtaaaacatggcgaaaggagctctctctttcccccgcagtctaccaagctcctgtgcattttcaccacatagatctgctagcttacaaatgatgcacacagtcaaggtaggaattataggcctactcagagggtacccagacacagaaagttttagggtaaatagtaaactacaaataccctcttggttaagttaattcatcaagttaataaaggtcatattatctatcttctgctggtgacaacttgttgtctcagtatagtctgtctcaagaaagaactggttcaggttgggttttggaaaaggaaaaagactttcattaacttcactccagagtggaagaggaccaagttctctcctacacttaggagcagaatcttaaacttgcataaatcattttcagtgatcaacatctgcatcctcaaactgtccagcaactgttggtgtggtatccacctccatcctcgtgccgaattcttnnnnnnnnnnnnnnnnnnnnnnnnnnnnnnnnnnnnnnnnnnnnnnnnnnnnnnnnnnnnnnnnnnnnnnnnnnnnnnnnnnnnnnnnnnnnnnnnnnnnnnnnnnnnnnnnnnnnnnnnnnnnnnnnnnnnnnnnnnnnnnnnnnnnnnnnnnnnnnnnnnnnnnnnnnnnnnnnnnnnnnnnnnnnnnnnnnnnnnnnnnnnnnnnnnnnnnncattatgatcggcaacgcgcgggaaagcggttgcgtnatgggcgctctccgcttctcgctcatgatcgctgcgctcggtcgtcgggtgcgggaacgtacagtcatcaaagcgtatacggtatcaagatcagggataggcagagacatgtggcaaagcacaaagcagacgtaaagcgcgtgcg

SEQ ID NO: 126526 - DNA, 1453 bp, Homo Sapiens
  misc_feature (63)..(86): n is a, c, g, or t
cccaaaacggaaatgtttttagaaagctttctcgagggccggaggccggcccgacatgttttnnnnnnnnnnnnnnnnnnnnnnnnttttgatatagaaaacctaggtttatttgttaagctattacaaaaacaaaacaattaccatttgaagtactttgaggacttcatcccagactcacttgttctgttacagaaactaacctaaaaggctggaaattaaaggatacaacctaagaggttataacagcagactggtaaaacatggcgaaaggagctctctctttcccccgcagtctaccaagctcctgtgcattttcaccacatagatctgctagcttacaaatgatgcacacagtcaaggtaggaattataggcctactcagagggtacccagacacagaaagttttagggtaaatagtaaactacaaataccctcttggttaagttaattcatcaagttaataaaggtcatattatctatcttctgctggtgacaacttgttgtctcagtatagtctgtctcaagaaagaactggttcaggttgggttttggaaaaggaaaaagactttcattaacttcactccagagtggaagaggcaccaagttctctcctacacttaggagcagaatcttaaacttgcataaatcattttcagtgatcaacatctgcatcctcaaactgtccagcaactgttggtgtggtatccacctccatcccatcttcataatctcttattgaatcttctgtcctgaccccagccatattatactggctgctcacagactgagaaagcattccttctaatctctccagtgtggcttggccttctgctgttagatgggataatccttcttcataggtgtaaaatgtagggatgtccccctgtccttgttcatgtgcttccacatcatattcttctccatcgtagtcatctgaatcctcatcctcaggatctggatgcaaggcctggcattcgcacattgcagtgaacattgcctccaacgctgatttatcactaggcacaaatctaaattcagtaatagggttcagcatcatcatcactgtcttcctcttcttcatcagcaacaggttcttttgattcttcttcaaatttggcattcaccataacatacaaatgctctcctagacagtcacttcggtccttggataatgcatgtaaactaatggtggggtattccagtgagaatcctaatccagagccatctaaccaagacagcggctctcagcgatgtaaagggtaccagtgccgaggcccttcccgttcagcacagcctcagtgtctggctgctgccgcaggagcccctccgctggcccaggcggcgggaaacttttgaggaagctcatagcagcagagtgcggcaacacaggccctgagggagttggagcacagcaatgcgtgcaccacaccgcccgccctggaagagccc

SEQ ID NO: 126527 - DNA, 972 bp, Homo Sapiens
  misc_feature (694)..(694): n is a, c, g, or t
  misc_feature (699)..(699): n is a, c, g, or t
  misc_feature (727)..(727): n is a, c, g, or t
  misc_feature (752)..(752): n is a, c, g, or t
  misc_feature (765)..(765): n is a, c, g, or t
  misc_feature (780)..(780): n is a, c, g, or t
  misc_feature (782)..(782): n is a, c, g, or t
ttgttttaacaatacatgtgatttttatttagtgaacacagtatctgcaagagctctgacagccatccaccctccaatcttacttcactttacaaccaagtatcaatagaggctgttccttcatgcgagctgtgggagtatatacatcattgaataacagacactccagaaatcaacagatgtacattatttacatattactatatttaccgcaaatagaaatattttctaagaaaaaaagtcaatttgtggtttctggtctaccacagacctaacttctcagcaaagcatatctatgtagatatctgcgtttgtaactttaaaaataggcattgctttctatgaagcactaagtgctgctccatctataaatagctcctattttcagtttggtaccacattaaactgccccaaaatgttctgtgaccccaaagacacaaagttgctgcttatctgggtccagggtcagtacaattaaactcaaatatgaaccagggcggccagcaagacaggctggaagggctgtgggcagtcgccgccgcctccccgcggggctcccctcactgcctcctggcctctgtctctggaaaaaatatctttggccagagttgggactaacattcaagcctgcgctaaactcaggtgggaggaggaggagactgttattgtgacgcggctgccagggtgagggcanaaacnatgtgtcctgtttcagggcgtctggtancggtggcctgcgcatcactgaccanagtttctggacangctgctcaggatcanangcagatggtcgcaacctcatgctatatgtctacacagctgagtaggcattctttgacaaaatactgagtctaatagacacacctgatgtgcagtgcacactgggactatccaataacaggggagtggtattggatctctgtgttccaaacaaaaagctgaccagcactggtggaaaagaaatgtcacaaa

SEQ ID NO: 126528 - DNA, 1578 bp, Homo Sapiens
  misc_feature (1214)..(1214): n is a, c, g, or t
  misc_feature (1546)..(1546): n is a, c, g, or t
ccaggtaaaacagggatggtatttctggatggtttaatcatgaatggcggtaggcagtgtaagaaaaaagttcctagagcatgataaaccttggtttctggcacaggataaacctttcatttcatggtgtacatttcacaatattaaaaaaaccccagcctggttttcatgattaaagccgtggggaaaggacaatgtttccagggagcaacgactcgcaagcacacccctggggctgtgcggtggccgtcggcggggccagcttcaaagtccaacccacaaggcacaggttttcaaatctttacctctgtgtacaagaacgtacatgaactttaaaaacgtgtgtttcctcgtctgtgtttaacaccctaacgatgatcagtttgggggagacgtacccctccctaatcacaggtaggaccacttcccaaatcaatgaaacgaccgtcctcttttgtgtcttgacttcaggtgtccggccgaacgacggagtcttttcctttcttgtcgatgcagtttctcagcctcctgttgcttcttctgctgttcagacctctttaacgtgaatgtcaattgtttgctgccaacggtggtgtcggatacactcaatgtcccattttttgcttcaattttcaaacgatcttcaagggttttgttcatcagtttctgctttgtggcagaatctttgaagcttctaaattcttctcctgctttgatctcataaaactggggctttaggactgtctgctggtcctccttgagtcgttcctgccgcttcactttttcctcctgctggaggagtctgcgttgcttccctgacctcttcaacccaggctttttcatcatctgaactctccgaactttctgcatcacttggttttccttccggctcttcctcctcttctttttcacgaagttcttgttgctctaagagtcttagtttcttcttccttttttcactaatttttgaaacaagtggattcagaagcctaaattcttcactctcttcatctacttggaagtcagggttctcaaacataactttaaatcgatcatcggtgagaatattaggaagactcttaactttctttttccatgtagatttctgcttctcctcttcttcctcaattaatttaagtgccagctctttgttaacttttggcaatttctttaactggactctctgtgcacgtgtttcttctattttctgtcgnattttatctttcctatattcttcataagcaaatggatttaccatcagtttcaccttgtgatagagtcttatatccatgaaaaacccatgcatatatgcccggaggaaaggagatccaatgaggtgggtgagccctaaattttcaaggtctttcttggtgacaaatttataatcatcatagactgtgctttctggattctcttctaattcttcggtcaagttgtctaagaaggaacaccaccgaggagcaggacccaaaactggaatgtaatagatgcccatcttggggtttcattggccgtcaggagcatgcctgagttggggtagagactnacatcattaaggtcatgctctggctccaagga

SEQ ID NO: 126529 - DNA, 1051 bp, Homo Sapiens
  misc_feature (743)..(743): n is a, c, g, or t
  misc_feature (763)..(763): n is a, c, g, or t
  misc_feature (766)..(766): n is a, c, g, or t
  misc_feature (776)..(776): n is a, c, g, or t
  misc_feature (847)..(847): n is a, c, g, or t
  misc_feature (857)..(857): n is a, c, g, or t
  misc_feature (922)..(922): n is a, c, g, or t
gaaagatttgaattttttttattatcccagcaaacattacactacgagaaaatgattgggaaaatacaaataagttcattaaaaacacaggctgattattcatatctattacattcagaattatgcgaaacaattagttatattgcaaagctgtaattctttttctaacaaagcatgattttataaaactttaatgttgccactgattcaattttaatacaaaatacttatatacacaatacaatataaaagtaaactgtgtagtgccttccacaaagggatatattaaggcgctttacaaatataccaatattttgacccaaattactttttgctttagattaaaatgaacaggctaaatgttccactttaaataccaaagggatgtttattaaaaattttttatctaaaataccttgggtaacagcagcagcaatgtctaaaaatcctcccactgtattctctaatttctaacacattaagtcagaataaaacaattccactcacagttttgcactttgcaacagcagaaggtaataactttttaaaaaagtcaatctcaaagtgactttttagtcatacattctatagtttctattacaaataagaaggtagaaaagatacagcagtagggcctgccttatgatgtcactggacaatgcataacagtatctacaattacataattatagaacacatcttactaatactattgatatgcataaaaagggtaagttatatanagacagcaagtttttaatanganaatattttanaagacacatatagaacaatgtttcactccatttcaatggaagcatctatatttttacattgttttctcacnttttggtcangagcacagatctatactggagagtaatgtagtttggatagatactgatagtaatccaactgttanatgctgatacaaggatgttactgctcagataatgcaaaagctcgtgcgattctggctcgaggcaaatcctaaatgatctataattcgtatcagtcaacgttcctggtgaatgtatcgtcaatcaacaca

SEQ ID NO: 126530 - DNA, 1457 bp, Homo Sapiens
  misc_feature (204)..(204): n is a, c, g, or t
tgatccccacagaagctcaaagagaagaggcaatatggtaagaaacaattttaaagtttgcaataccaagacaacaatgatcaacactttgaagcaagatgaataaattaaaattcttggttagacattaaagcattcttgccaagaataagagtacactgtatggagggatatttgattcctacatacgagtcccaatatgcnccattacatttgtttatgggagatactgcaagtttaaggtaatttacattccttggcaatcaagtcactgttataggcaacgtcttttattgttccatctggcacttgcaaacaccattcttgaagaacctagaaatgaaggtcagttactctgtttatcaggaacagaaccaaataaaaacaaatttttgaaaaagcaaccaagaaactctggttcatcactattttccatatctaatggttccttcaagataaagcataactcttcctttcatgatactttccaacaaagggagattaaagaaaaacagaaaagaaagttccccaccctaccccccataaattgtcattcatactggtaaaagagccagtcttgttagcagctaaatattgcactgcctttcattctgtatacagtcagggtccaatgaaagtggcacactcatggtataagtgacggacgatgacaccgccagctcaagagtaaagactcagtatacagagggacaagaaacacgtcagcactagtcacacatccagttgtaaaagtctgatttccagaagttaaaattcatcactttcagctgcatgaagttgtgtgtcatccgcatctgtcatgctgctctcctgggattcatctgttcccatgatctgttcttcttgggttattggctcctcatcatctggaagataacgcttatcaattgcctctttaatctggttattggctcctttaggatctaaatccatagcccaagagaaattcatcagggcgaggtgcgtttgacctaacttcttgtaaacctttcctattaagaagtaaacgagggattctttgggaacaatttgtttcaattcttcaagttcttgtaaagcagacttatatttttcatttgcaaataaaactgaggctctgtgaaatttgcatagagggttcttgggatcaatgacaatggctttgtttagggtatccaaagccttctctgattttttcagtgcatgttgaactactccaatgtggcaaagtaaaactgaactttgagggttgatatcaagcgctttttggaaatgcatttctgcaaggctgaatttttcttgcttgtaataaatcattcctaaaccataccatgcattataatgtctaggattgactctgatagcatttcgaaaacaagctaatgctttgtccaattcttcagttaagacaaactcatgccctaatagagtataggcataagcgtaatttggatccc

SEQ ID NO: 126531 - DNA, 984 bp, Homo Sapiens
  misc_feature (63)..(72): n is a, c, g, or t
  misc_feature (306)..(344): n is a, c, g, or t
  misc_feature (495)..(521): n is a, c, g, or t
  misc_feature (726)..(735): n is a, c, g, or t
  misc_feature (849)..(883): n is a, c, g, or t
ttttgctacagtctttagactaagcatgcaagacataccgctaagtgcaactgagtgaaatgnnnnnnnnnnaaattttaatcattccctaaaggtttgaactgaggtatgcgtactaacagtttctcatgctgttatctttactcatgtctagctacacatgctgagaatgaactaatctaccagatttttatcctcttttgaataccaaactaaccagcaaccactcagtttagaagcacagggcccccttcccatgaccctgtctggctactgcctgcacatcatgaagctgcctggaaaagnnnnnnnnnnnnnnnnnnnnnnnnnnnnnnnnnnnnnnnaaagtcttgcgtgaccacagactgccctttatacagaaagcagagtgaagcttcaaaagtaactgccagagaagtttttgtcccaagcttatgagtggatgggagtgttacttttttttaaatgaaaaatgctgcccaaagcctaatcggnnnnnnnnnnnnnnnnnnnnnnnnnnncaaactgaaggatatatgccaagataaaccaaaattaatacagtgatcacagcacagttcttaaacaaaagtggcatacaatctaaaaatatctctttttctagaaatactattatgtaatctagttcaattatggaagcttttctgtcctgactctaaactgtctcctttattggatactctaattgcagtggcatacattcannnnnnnnnngagatgggactcccttccttctgtagctcctttaatattgtgtcctatttttatctgcagtagccccataaaatctctttaagagaatgagttttggtctctgtagaggtacannnnnnnnnnnnnnnnnnnnnnnnnnnnnnnnnnngtaacaactttggttccattatctacttggtcttctaaatttacgatgaaggagcagttctctttctcaagttgcaatagcctatcgcttgtcatttgcct

SEQ ID NO: 126532 - DNA, 1011 bp, Homo Sapiens
  misc_feature (129)..(163): n is a, c, g, or t
  misc_feature (277)..(287): n is a, c, g, or t
  misc_feature (492)..(518): n is a, c, g, or t
  misc_feature (669)..(707): n is a, c, g, or t
  misc_feature (941)..(950): n is a, c, g, or t
gtgatcaaaggaggcaaaagaatttagaggcaaatgacaagcgataggctattgcaacctgagaaagagaactgctccttcatcgtaaatttagaagaccaagtagataatggaaccaaagttgttacnnnnnnnnnnnnnnnnnnnnnnnnnnnnnnnnnnntgtacctctacagagaccaaaactcattctcttaaagagattttatggggctactgcagataaaaataggacacaatattaaaggagctacagaaggaagggagtcccatctcnnnnnnnnnnntgaatgtatgccactgcaattagagtatccaataaaggagacagtttagagtcaggacagaaaagcttccataattgaactagattacataatagtatttctagaaaaagagatatttttagattgtatgccacttttgtttaagaactgtgctgtgatcactgtattaattttggtttatcttggcatatatccttcagtttgnnnnnnnnnnnnnnnnnnnnnnnnnnnccgattaggctttggtcagcatttttcatttaaagaaaagtaacactcccatccactcataagcttggtacaaaaacttctctggcagttacttttgaagcttcactctgctttctgtataaagggcagtctgtggtcacgcaagactttnnnnnnnnnnnnnnnnnnnnnnnnnnnnnnnnnnnnnnncttttccaggcagcttcatgatgtgcaggcagtagccagacagggtcatgggaagggggccctgtgcttctaaactgagtggttgctggttagtttggtattcaaaagaggataaaaatctggtagattagttcattctcagcatgtgtagctagacatgagtaaagataacagcatgagaaactgttagtacgcatacctcagttcaaacctttagggaatgattaaaatttnnnnnnnnnncatttcactcagttgcacttagtcgtatgtcttgcatgcttagtctaaagactgtagcaaa

SEQ ID NO: 126533 - DNA, 956 bp, Homo Sapiens
  misc_feature (114)..(148): n is a, c, g, or t
  misc_feature (826)..(836): n is a, c, g, or t
gagatgggactcccttccttctgtagctcctttaatattgggtcctatttttatctgcagtagccccataaaatctctttaagagaatgagttttggtctctgtagaggtacannnnnnnnnnnnnnnnnnnnnnnnnnnnnnnnnnngtaacaactttggttccattatctacttggtcttctaaatttacgatgaaggagcagttctctttctcaggttgcaatagcctatcgcttgtcatttgcctctaaattcttttgcctcctttgatcaacaataagaggatatttggcttcatcagataaagcataaaacagagaacataatttacctttgtgtaatatctttggtaattttagaaaaaaggtacaaagaaagaatataaattaagcttcgaaaggctctcgaactaaaaaaaactacagtcctatataaataaatgacaggaaagtgggtgcagagctgaagtgtggaggggttctaaggactgaggttgtactgacctgtaaccatcacatttctgcataccatgtttgggacccccccaaagcccagggcctacatgatatcttctatgagtttttgtgatactgggttggtgatataatattgcataacaaactgcagtaccaaatttgcatatttgaaattaacactttagcatttgctgaactcagccctcgttaactcccttaacaagttcaatctgaaatcgaatttgcattcaaacagtttaatgccacccagtaggtctgaactaatgtataaactcagcgccgccgccgccacccctactttcagggcagctgctcggggaagccggnnnnnnnnnnnggccattttgcaaacaaaaccaacccacacccgttatcgcagagcacccaagcccatggcaacttggttccacaagggagagccttccaaggccatattgtcagtctaattaatatgagc

SEQ ID NO: 126534 - DNA, 1538 bp, Homo Sapiens
  misc_feature (123)..(123): n is a, c, g, or t
  misc_feature (293)..(515): n is a, c, g, or t
  misc_feature (1262)..(1262): n is a, c, g, or t
  misc_feature (1294)..(1294): n is a, c, g, or t
  misc_feature (1374)..(1374): n is a, c, g, or t
  misc_feature (1432)..(1432): n is a, c, g, or t
  misc_feature (1434)..(1434): n is a, c, g, or t
  misc_feature (1482)..(1482): n is a, c, g, or t
  misc_feature (1485)..(1485): n is a, c, g, or t
  misc_feature (1487)..(1487): n is a, c, g, or t
  misc_feature (1497)..(1497): n is a, c, g, or t
cggaggagaacggggagcagagggggcatgtagcggagatcagggcgtgcgcgggagctgcgcaatatcgcagggtgcgggagctggcagcgcaatctcgtggggcgggaggggcgcgaggtnaggcgagtatacggcggacccgacggggcgggaggacgttacgcgggtcgagggaggcatagctgacggccgagggcgcgaacatgggaacgggccaggaagaggcgggcacgcgaacggcgggcgggcgcggcggaagcaaggacgttcgcgtagcgctaggggaggannnnnnnnnnnnnnnnnnnnnnnnnnnnnnnnnnnnnnnnnnnnnnnnnnnnnnnnnnnnnnnnnnnnnnnnnnnnnnnnnnnnnnnnnnnnnnnnnnnnnnnnnnnnnnnnnnnnnnnnnnnnnnnnnnnnnnnnnnnnnnnnnnnnnnnnnnnnnnnnnnnnnnnnnnnnnnnnnnnnnnnnnnnnnnnnnnnnnnnnnnnnnnnnnnnnnnnnnnnnnnngcgaacgggcgcgagtgagggatgtataaggtcgcgttgtttgggcttggggggtttattaagtgatgctttagtctcagtctctgccagcaactgggagtggggtgactccactcaccccaggatttcccagacttgctattttagaggagagaggcaggaagccaactatcctctaagccacagcttgggaagctaggctagtactggggtgggggcagcagagctgagaccctccaccccgagcccctagcctgtgctatcctcccagcctgagggggaggagctgaggcaatcctggctgcagcctcccacacacagccctgctcttggtgcgccattcactgccctgagctattcatgatctctgctcccagatattcacctcaacactccaaaagccagccccttcaggtcttcagtcctgcggaaggcaaaaggagggacgggggcctctgactgagcagcttcaaggggcctctcctttctgctgcccactgaatgccggccccttgtcttcagccctcccttagataggaaggggggtggtggcctcagactgcaccccctttcttctcttcctggcatcccattctgtcgcagcacagcagccaagagcacaaagcacagcacctgtggggctggtgggcacaggagaccgtgctggcacaggccagactgcctgcagccctaggtggggcctgctccctgccctggaagctagacagagggagacacaaagcaaangtggggcaatgggatgtgcagccctgcagcangaggaggagacacgaaccctgacctgctactcggtgcaggcactccaggcttgcttctctacagccctgtggctgctcanagctgctggtcccataaggggctgaaggagatggtgtctttgagagggaaggtctgcnanatcatcaacacaggtataccagtctccccagactaagggtcaatctgnccnancactgatccncgtgcgattctggctcgagcaatcccaaggatcgataatcg

SEQ ID NO: 126535 - DNA, 2088 bp, Homo Sapiens
cactctgcctcgtgctgctctgggttgtagtgcttgcttgctgcttgcgtcgtctgctgtcgtcggcctgctcctcttcttccgtctgtctcgttccgctctcctcctcctgctgctcgcatgtgcgctcttcgcccgctgtcttctgttgttttgttgttctcgcttggctccttaccgctcttgttccgttctcccctctctcgtgcttcgggcaccttcctcgacccagggtgtcccgcctccattttaggtgtgtcgcggttcgagtgcgcgctagcgccctttggtacttgtgtttcttggttggtctcgtgcgtgccctcttccgggcccttggcctggctatcgtcccgccttgtggcggagacctgaggccttcctgttgccagccttccacactcatcctgctcttggtgcgtcattcactgccctgagctattcatgatctctgctcccagatattcacctcaacactccaaaagccagccccttcaggtcttcagtcctgcggaaggcaaaaggagggacgggggcctctgactgagcagcttcaaggggcctctcctttctgctgcccactgaatgccggccccttgtcttcagccctcccttagataggaaggggggtggtggcctcagactgcaccccctttcttctcttcctggcatcccattctgtcccagcacagcagccaagagcacaaagcacagcacctgtggggctggtgggcacaggagaccgtgctggcacaggccagactgcctgcagccctaggtggggcctgctccctgccctggaagctagacagagggagacacaaagcagaagtggggcaatgggatgtgcagcccctgcagcaggaggaggagcacacgaaccctgaccctgctactcggtgcaggccactccaggccttgcttctctaacagcccctgtggctggctccagagctgcctggtccccataaagggggctgaaaggaggatgggtgatccttgaggaggggaagggtctgcagagaatcactcagacaccaggtattacccagctcttcccccaagacctagagggtccaaactcctggccccaaccaccctgcatcttgggtgaggaagaagggcctcttttgctgttccttcccctcagagatccaagaacccactccagtgaaatgcaggtacccatgcctaccacctgcccctggagacagcaggggagctgaggcaggaaggctggccaggggcccacaagactctcctaatccaagcactttcctcgctttcctaacgtcttggcaacaaagggaccccaccctcccagccggctcctgggcccttcctgcagcctctgagcagctaggcctccctcctgtgtgcgtgcatgagtctgcgtgtggtggggtgactacaggtgctggtcctggctgccagggagggcaggagagatctggagtcagccccactgcagggcctgggggtcagtatcaaccaatttccttccactgcttgtagaagtccagaacattcttgatgtccacactggcgtgggcagcggcctgcagggctgcctgcatggggcctgaaagcacgctggggttgtccagtggaaggcctgtgatgatggtcaccatgccactcggatcctcctcacctgccccctgggccagagtcagctgtttgcagctgtctaggatcttatagagagtccaggcatctgcatcctgcctcttcagcttatgccgctcaaagctctttcccacctctttctggcagcgaatgtacctgtttccttttttaaactctgcctccaggtaccgaatcccatcccgggcccctgggtgttccttcttcagcaaatccaggccatcgatcactgtccttgggatgatgacaatgaagcggccactggtggccagttggcggatgacagggagatggtggcagagggcctgggtgtcagggacgaggtagggagacatggctgactgggccttgggctgctgcaggctgccctccagctgagacacttcgagctgaagtcgtagctgagcccctcgtgccgaattcgccaccaggcctcgtacc

SEQ ID NO: 126536 - DNA, 302 bp, Homo Sapiens
cacaccgggaccttctttaaactctgcctccaggtaccgaatcccatcccgggcccctgggtgttccttcttcagcaaatccaggccatcgatcactggtgggcaaggtagggaaagacaaaacagataagctcagactgctgtgacaaggggctctggaggaagtatctgagctcacctcagtacactcttcaggcagagaagggacctggctccctagagggctcccaaagttctctgaaaacatgaccttctgccagcaatatacttggcagaagtccagtaaccgtgccgagctgata

SEQ ID NO: 126537 - DNA, 676 bp, Homo Sapiens
  misc_feature (234)..(260): n is a, c, g, or t
  misc_feature (652)..(652): n is a, c, g, or t
  misc_feature (661)..(661): n is a, c, g, or t
tttttgtgtccaggagagcttttatttgtacggaacagttttaaaaatacagaataaaatagctttatctctactattattcacaacatctggtccaaatattacatatttttaaaatacttaaacgtttaatgaagccatgttagaaaaacaatatgaaaattctttttaaaaactccataaaagaattacacatctcaaaaaacaaccccaccccaaataccctcggtaatnnnnnnnnnnnnnnnnnnnnnnnnnnnccccagaaaggtatatatagccaaagtcagtcacaaaaactcaaggaaaatataggcatccccactgttttaagaacagtcagaaatgtattaaggtgtcaaatgaagattgttactaacgaacaaaaaaggagagtcatttgaactgtcagtaagatggcaacgtggggaagggtgtcctaagtgcctggaaacacgcacagcaatgctaaggacatgggagggtagagtgatgctgaaacacagtcaacaccaaccagaaaggacgggaatgtctgtgaggctgctgaaaagagacccccaacgctaatgtgccttatgggtccatgggcagacgctgaacgctggcaaaccgggtggccgttcttgcactactcgggttctgactgcangaggggcanagggtggtcgatgtc

SEQ ID NO: 126538 - DNA, 1100 bp, Homo Sapiens
cacatacacacatttgtatttttcataaaataaaggataatgtgcccacccataccctgtaagtttcatagcctagaagtcagtttcatagcctagaagtcttcctagtagtcagattttctgtcccccagagggagaactcccacacccccagttcccagggggcctggtgtttgaggagctgcatcaagctgcatcttcttacaagcccaggggagaaaggatgtgtttaagggtagaagttgttcattttgttttcctttgcaagattttgatagaatctagtataaaggctgtctggcttagctcagaatgcaagaaaaggtgttattctttcgcatttgggcacttcacagagggcatgggcactccccccatctaaacaggcttgaaaaaggacacagacccaagagaggcccttgcggaggcccagcacagagtggttcaggatgcacagacaggctctctggggctgtgggccaggagtgggaaagccaccttagtcctgctggagcagatttgggaagggtcgtgggaacaagtttctctgctctggggtctgggccacagtctaccatgtcccatctctctggttctgcccagtgttccttccttcctgtcatccccagcacctcatcagtgctccccgctcctgaacaccatggtcaatcatcctggggcttctcacatgtgtgaaagaacaggtctctcgaccacctaggggtagacttccaggatggtgcctgcttaactttcctacaatccagggtcatcggggaaatgagccaggtggggagggtggagtctcacttgcagccagaaaccctgggatgtagcctatctgtgacaagggcagatcggcaaccatctgcaaccagaaacaggccgggtgttctatccactgcccccagatgctgcctcccaggttccaagagccaccttgagtcccagctcagctgccacccagacaccgagcattcgaccagggcagtgcagtacatggcggtgccttggaatcactggcatcaccctcccccgacctgcccctcttcttcatccccacctgacatctctcctgtccttcaatacctcctggggct

SEQ ID NO: 126539 - DNA, 1218 bp, Homo Sapiens
  misc_feature (281)..(290): n is a, c, g, or t
cacagtacacagcagttatttatttaaatacttgaaaaggctgatgatggaaaaaataggtttatcatgagagtttatattcattagatttattttatcatttaaaaaattactgcctctaggttatcctagcctgatatagaacacttggtgacacatgcagttactgtaatatactataacagacacagccattatagaatgatttacacttgggatgaaattcaacagtagtaagggtgactctttatttaaactaaaaacattggtaatatacaaannnnnnnnnnatttcattgaaagggctataaaattcaacatactgacaaggaagcaacataatcacatagataacgcctctgctaattgcttttacctaacttcacccttaaaggtgagctgcacactcagctacacaagtttctagactgtgcgatggcttcaaggctggcctaccacaactgactgaaaaaatgtcatgttggtaagctgacactgacttgtatgtttttaaaaatggagagacaatggcaaattgtaccttatgtccttatagaacccaaaggatcattctgagtaaatgtgaaataaataaagtgatccatgagtaaatacaatctctgggctaacttaaacctagaagagtgagccaagtgagcactaacaataccacttagaaatgtctagaaacatcatttctagaactcagcttgggagaccatatcttgcctgaatatgtacatatatttacaaaatattcccttttggcctctggaatttagccattttagtttggctgttagctgttttctttccatatgctagccaatactgcagttataactatcattaaaatactcttatgcatgaattacaaatattaataaagtaactctgcatgtataaatatctcaataattctagcagaacttaaagcattcagaatgtacataaaagtatttgtttttggtagggacagtatttctttttatatcatcgctgtttcaataatgctttgtacatagcaaagcccaaaactgcaaaaacagtagcaccaaaacttgctcgaagccaaaacgtggagctcttgaggtcagcttgtgtcacgtgcctgcagtcagaaaatataattattatttaaaacatgattagtatgaaaaccctataccccggccgtaatggccgaattcccgggcatatgtccggtaccgtcgactg

SEQ ID NO: 126540 - DNA, 572 bp, Homo Sapiens
  misc_feature (529)..(529): n is a, c, g, or t
  misc_feature (540)..(540): n is a, c, g, or t
tgaaaactacagtgtaacacatagtaataatcaaacattgctataaaccaagaatgacatttttcaaaaaggtgttgatttgtacagatttttaaagtcagttaactttactgctattttattacctaatactttttttagatgcaacaaacccttgaatttctatttgtattcgaagacaagtcattcctattattatagaataaccaaaaccttatttatgttttacctttgctttaaaactctcatgtatgttatctacagagaggatcattacagagacagactctcccgagacatgggccacactgatagaatagagaatttgagaaaaatctgggtctttctaaaaactgctttgtaagttactttttctttatgacttctgtgggattttgttgatattttcttagagaatgaccaaatctcctttcttgccataattaacatttagtaattatgtagaaacgcactgcttggtcaggcttcctgcctagctatatattacgttgtcttccttactacatanatgtacttctntaatcttgtgattacagtaactgcaagtgtgt

SEQ ID NO: 126541 - DNA, 872 bp, Homo Sapiens
ggggtcaggaggcggttccaaagttaaaggttgaaaatcctctctaaggtgtaaagtttgggtgccaaggtgtaatgaaatattttcgggacccttttggtatccaactcaggaaatttcccagaggagctctttccctggctgaaaaaagaatgtcccaaggatcattctcccggaaaggaagagggtgaggccctgttagcttgtgggttgcccaatcccatccaaccctttggcattgggatcaatgttgatgaggacaaggctttcaacagtgtccgggtggttaagagcatatctcgccaggatgtaggctccagctccaacaccaactccaattattgtagagaaatttaggtactgcaggacgcaagggatcatgtctgcaagctggtccagagatgggtactgatatcccaaagggaacacaggggctccctcttccattccaggggcatccacatgaacccgcacaaagttctgaatgatttcctgcatgtcctcgaactgaaacagtggctggaagcaagatttatagttgagtcccacatcgtggtaggtaaggatcgctgggcgtttgggtttgggggtgccatagacagtgaaagtgacagagccgtatggtgtctccacagagtgagtctgtccctggtccaggaggattcgggcagctaactcagcctccttggccgcctcaggcgtctgtcctggcaacagtggcttctcctctgtgatctgcacctcctgcagctccgccatggtggctgggctcctattggctggatgcagtgggattaggggtcagggttctcactccttctgactctggggtctgctgccgccgcggccgcttccaccttcactcgaaaccc

SEQ ID NO: 126542 - DNA, 2326 bp, Homo Sapiens
  misc_feature (191)..(191): n is a, c, g, or t
aaaagggggagaagttggggggtttttttgaaaatcccgtgggccttttttcagttcccccatagttgataagggaagtttcctaaggattaaaaaggtttcctttctccccaggcttaaaaaatctttcaatatcaaagcaaccaccgttgtattggaaaagagccagtttctaggtggttcatatttgntgaggtgcctatgccacaaaaggccctctcccagggtttatatcactttgagaagagaatatgagacgtggacagggagaagataggaagaggagcatgatgcaggcacacctagacaaagaataataacggtactcagattcctctacagtttattgttatagcagaagttgtgggagacgggagggcaccctccacacatactacagtgtggtcagagccccagggtagccctttccaccctatgccaagccccaagcagcccagcccaagcttagctccctccccagtcccactctagatgcacactgagctaccaaagttagtgcagccaaacggccccaggccccttcctgttgccccagcaccaatccttccccacactcgttcactgcccgccaactcccattccaacttcctttttacactggatgtttctatcacatcctgaggaccactaacccaccagcaagtctccccctgacacacattcacgtaggtccatacccttcagagtcctaaagggttaatgagaagccacctcagctttggtgaatggagccccagccccaaatcccctccccttgcaaatatgggacaagtagggagagtctgatggaggcaccaggacaactacaacaacctcttacccctcagctatagacacctagatcaggacagaggatgcatatgccctctccaccttaacatcaaaatgggggaggaggagaatttaggggtctgggtccctaagagatattaggacatctcttccaggagctggggggaatcacgggttaaaggtcaaggttagggtagcaatcaaagatcaaggtcatctccccgcatgatctgccttttttcccttgcttacggtggcccaatgccccttcagcacctcccaggttagctctgggggaggtgagggctgggtcccactctagggcaacaagggccattcaacaggagacctccatggtgtgccccgggggccccgaagaaagagttccagactcgctgctctgggacagggtgcgagagcgggaccggttgccatcaacggatgctgcactggtcagagaggctgtacgagaccgggacaggcgagtcatgcaggatgaggccatgtagcccatgccttgcaggaagtacttgaaggcctcggtcagcttgcctggctgagtcagctggggctgacctccggagtcagccatcttgaggaacgaggtctgggtggggtccagttttgagttacattccaccactgcatcttcatgaggtgcttggtctcctaccaccagcatcacaggacacctgagggtgatatcacctccacgctcaaagttcaggtctcggcggttgttgtagctgttccagtacaattcaatgttatccaggttgggtgcatgtgtaatgatatttctgtacttttgtatcaactcagaatttccagagagctcttcctggctgaaaagatgtccaaggatcatctccggaatggaagaggtgaggcctgttagcttgtgggctgcccaatccatccaacccttggcattgggatcaatgttgatgagtactagaccttcaacagtgtccgggtggttaagagcatatctcgccaggatgtaggctccagctccaacaccaactccaattattgtagagaaatttaggtactgcaggacgcaagggatcatgtctgcaagctggtccagagatgggtactgatatcccaaagggaacacaggggctccctcttccattccaggggcatccacatgaacccgcacaaagttctgaatgatttcctgcatgtcctcgaactgaaacagtggctggaagcaagatttatagttgagtcccacatcgtggtaggtaaggatcgctgggcgtttgggtttgggggtgccatagacagtgaaagtgacagagccgtatggtgtctccacagagtgagtcttggccgcctcaggcgtctgtcctggcaacagtggcttctcctctgtgatctgcacctcctgcagctccgccatggtggctgggctcctattggctggatgcagtgggattaggggtcagggttctcactccttctgactctggggtctctcctctctttgctgcgtcccgacgcc

SEQ ID NO: 126543 - DNA, 1149 bp, Homo Sapiens
  misc_feature (505)..(521): n is a, c, g, or t
  misc_feature (615)..(629): n is a, c, g, or t
atgaaaaatccaaagtttattgcaaattgtattttgcttcccttcgttcttcatttttacaggatttattgatatccatgattttttcacagatgtacttgttgactttggagagtctctgtgcaatttcagtttcatccacagtttcttgtgctattctgtcatacaaacactctagacggggagaagaaacaaggccaaggattaatggtgaattcaagtaaaaatcttttaaggagggtaaaagaaaatgtacctcccaacatacttcccaaataccagcttatgtatctggcatagctatattttaaaatttgcatcatagaatgtacttagaaaagagcagatatacactgtaaatgtactctttaaaagtaatgataaagtgtccacgtgtccaccactcagtggagcaggatactattggttcctcccaagcacctgcaggcccctccctaattctttcctctccaccagagataaccattctcctgaacttttgccnnnnnnnnnnnnnnnnnagtgttaacacatgtatgtatccttaaataaaatagtttattttccattttcaatctttttataaatgtgcccactctatcattctgacttgcnnnnnnnnnnnnnnnactcaaatgttatagttttgagatttactcatgaaaaatacatttgtaggtcattcattttcactgatgagtagtgttctattgtatggctctatcacaatttgttttatccattttattgtcaatggatacttggttttgcaattaaaaacactctggcacatgcctctggggaagacatgaaagaaattctccagtatcagcctaggcgtggacttgctgaatgttaagatgtgtgcatattcaactttattaggtgatgcctggtaaattgctttccaaagtggttgtgctgactggcactcctagcaacagtgtatgcaagtagtactggttgccccatttcaatagtacttgacattgtcacattattaaggttctgacaacctggtgggtgtgaagtagtgtctcactgctgtgattactaatgaggctcagtacggccactctcttactgagtccaccatttgctgtgataaagcaaaaagccagctccagacaaggtctggctggagcccga

SEQ ID NO: 126544 - DNA, 1256 bp, Homo Sapiens
  misc_feature (1206)..(1206): n is a, c, g, or t
aggggaaaaaagagagtctatttttgtctaataataaagaatttctataaactttagccgaaattggagtcaacacttattcacaggaaggtcaaagcctcatctcccaggggacgtatctgtgctcaggcctgtagccaggcccatggaacatatgattcccatccctggcccaacattggtccacatctccccatgagcaagctgccttcggctgcccccatccagcagtcctgttcctagcccagtggactagaaaggctcctggttccggccatactgataaatacggaaactccatctttatcggctgtataaacatctctggtctgtacatacatttcatacatcgtagggtgggaagcgagggccaaagggaggcccagcagcacaacagctcacccgctttccctacagccctacccgctctgtgcaaaccaaggccaacagctcctgctgcctcttcctccctggaaaagtcactgttacggggagggggccaggggttgaaggattagaaggagatagagggcttggtggggaggacacatgtaagtgctagaatcaaacactgaagcgaaacaggcaactggcacaagcagcaagctgaggcatgggacggggcaggaaaaggggagggaggggccacgctgcccctctgggcttgctcagctaaggctctggggtcttgccctcacgctggcagggagacaggccccagagcctcagccccaatacccgggagctagggacatgggtggcactggtaaagaaaggatggaaggggagaaaggagtgaaggccctagtgccctgtcacctcacagcccctctctcttaaacatgcaacaggcacccacccatgtgggtccaggtatggggagccagagacctagatcctctgtggtgcctgagcaggttggggtggggagccagctctcaagggaaagatggagagcctagaggagtcttcctggggcagcagccagtgaaaggacagagatgaccaaagagaggtcccctggccctgccaggggtatgacagcagcaactggttcacacaaccaggaaagaaaacaagaaagaggaattcaaggagaaataccatggtgagtaggggagggggctgtctactctaccctctacaaagcatcatgcccgaatagcagctgagatagggtgctcacgcctctccacccacacaggnccggtgagggaaagggggacccagaagcccactgaccaaagcgagtggga

SEQ ID NO: 126545 - DNA, 534 bp, Homo Sapiens
  misc_feature (185)..(220): n is a, c, g, or t
attaaaaaggcattttattataaatacattttagttgtagcagtaaaatacattttgttcccatgaatctttgaaaacaaaagaacttcactgagacaatgagcacactgtaggaactgtagaccccaagttgaaaacttgttctatggaaccaaagtagctaacgtaattccaaaactaagttnnnnnnnnnnnnnnnnnnnnnnnnnnnnnnnnnnnnccctagagagtggctttggggttattttatggtacaaagtcacttttacttttaaggataaactctttaggtattagagcctcttagatgaggtatcgtttactgcaaagaaaaaaaattgttataattttgccataagttatgcctatttagatggctgtataactggtactttgaagagatgaacctgaccacctcagttttgtacagcttccctcaggaagacttcccaaaataagactcagtatgaatttgctaagtaactgatctatgaagttagctgaacaagtttagataagaactatatgtatgaa

SEQ ID NO: 126546 - DNA, 1806 bp, Homo Sapiens
ccagttgcctcgttttatagaaaaacaggcccagggaactactagggcttatccaaatgtacagtttgaggcagagttaggaatggaacccagggcctcctggcgctgtccagagtggagtttcttaggacccctgcaagccagccaagtccaaatctctgggccggggcctggagtccgccctcctcgttacctcctctcctctcggggtgactgaagctcgtggtgcagagctcccagctcctgtcaatgggggcccctgggcctttctcattctgcccctcacaacaggctcctcagctagggtagctgcagggagggtggctccctcctgctcctcagaaggtgtaggcccctacaaagacggtgagcctcagtacagagctggcccggtagctcatgagggaattcatggtgaccatctccaggtccagcacgtactcccgggggcccgtcaccggccgggcgaggaccagcatggcgctgacgttgttgatttgcctaatgtaaaagtccccctgcgagtttccagcacggatctgaaaggcattgtaggcaccggggtagacggaggtcgcctggatctggaacacgtcagcgggcacgctccgctccgaggtgatggtcatgtagcggtgcacaatggatgaaggctgctctcgacatagagggttggaggccgggcagagacagcggttctcagagacctggatgtagggctccacgcagcggttggtgtccacgcagcggtagcccccatggaagttgacacaggtttgggcctcggagcactggtgcgcaccagactcacactcatcaatgtcttggcagaggcgtgtggccagcagctggtaaccctgtgggcagtggcaggagaaacggcctggctcgttgacgcagcggtactgacagaggtagctggagtagctacactcatcaatatcactgcaggagaagccatcccgatgcagctcatagccctggtggcagcgacacaggaaggtcccataggagttgaagcagcgctgctcgcatggggcccccatgtcacactcgttcacatcaacacaggagcggttgttaggccccagctggaagcccggctcgcactggcagcggaaggagccaggcaggttcacgcagcggtgctggcagtagcggtagcggcactcgtctatgtccacacactcgggcccgatcttgcggtaaccatcagggccaggtgcactgataggagccaggcaagttatggcagtcctggctggggcgacagtcgtgcagggcctgggcacactcgtccacatccacacagctgtcctgatcgtacgggctcatagcctggtgggcaggggttggggtgttgagcgggaggcactggtggcgggggtccctcgccgtgtaggtcgttgatgacggcagcggagcggggcaggcacaagtagcccccgtagtggttgatgcacttcatttcccccttgcaggcctcagggatggtcagacactcgttgacatcccggcagtgctggctgtctgggtcccactcatagccatctgtgcattccgtgtagctgtcgggctcttcagaatcctgaggagaagctgatcccaagagcaacagtagcagcgcccagagcagtagagacccgggtaggcaggaggcgcaggggagcatcctggggttgggccccgcgacacccccgcggcccgcggctctggcggctcggctggcttgggcaatgcctgcgggcagacggacgggcggacggcacagctccctgacgcgcggcatcccgggaattccggacc

SEQ ID NO: 126547 - DNA, 1835 bp, Homo Sapiens
  misc_feature (1303)..(1331): n is a, c, g, or t
aacagtccagttgcctcgttttatagaaaaacaggcccagggaactactagggcttatccaaatgtacagtttgaggcagagttaggaatggaacccagggcctcctggcgctgtccagagtggagtttcttaggacccctgcaagccagccaagtccaaatttttgggccggggcctggagtccgccctcctcgttacctcctctcctctcggggtgactgaagctcgtggtgcagagctcccagctcctgtcaatgggggcccctgggcctgaacatatagagacccccatttaggtgaacttggcctgcccccccaagtgccaccctgccccagcctgaggcttcctgcagtgtgacccgcccacctcagccaccaggactttctttctccctttattgcctttctcattctgcccctcacaacaggctcctcagctagggtagctgcagggagggtggctccctcctgctcctcagaaggtgtaggcccctacaaagacggtgagcctcagtacagagctggcccggtagctcatgagggaattcatggtgaccatctccaggtccagcacgtactcccgggggcccgtcaccggccgggcgaggaccagcatggcgctgacgttgttgatttgctgcagggcagtgggtggggggacatatatattgtgtcagcctgtgtgctaggcccctgccccagcgtcacctccctgccccgtggccgtgaggcagaggaacagccctggccaggctgccaccccagcctctcatgcagctctttgacaccctcgatgtctctcctccccacccaggctcctgccctcagaaatctcctgctggggctcttctcaccctctccagcctgctctgtctgacccaggctaactgacgattcaaggccacatgtggctcttgggactggtgggacctttggtgacccaaagtgagcagactcccttcagagcattcaatttcaaaaagaaagagaagggctggtactagacaaaccccttctcctgctgagacccatgcatgcggctgccagtcactgtgagcagctcactgtgagccgcccctggccccctcccacctaacagatccactagcaaggagtggactttctgaccccagggccctgcacacgccattcccttggtttgtgggtgaagaaactgagatcaatatggaaaaccagtaccaggactcaaactcccgtgtccgagtgcttcgttagaattgcatttaaccgttagaattgcatttagagtacccccgtcttcctgcagaaaccccgcctccnnnnnnnnnnnnnnnnnnnnnnnnnnnnncatagcagcctggccgagttcccccttaaggcgtcctggagttcagttttagattgtgcatgtcagttgagggttgcagaaaccttaccctaatgtaaaagtccccctgcgagtttccagcacggatctgaaaggcattgtaggcaccggggtagacggaggtcgcctggatctggaacacgtcagcgggcacgctccgctccgaggtgatggtcatgtagcggtgcacaatggatgaaggctgctctcgacataaagggttggaggccgggcagagacagcggctagagaccccgaggtgggggacacaaatgagctccttgcccgtccccccaatttctcctaccctacaaagggagggaatccccaaagacccttctacccctgtgactggttttcatgaaggactatgattcccatcatcccctcagggcactcgcgggtctgaatagatgccagtcagcccaaagccccctgggaagacctaaatttctgtggggggcc

SEQ ID NO: 126548 - DNA, 710 bp, Homo Sapiens
  misc_feature (494)..(552): n is a, c, g, or t
  misc_feature (601)..(601): n is a, c, g, or t
  misc_feature (650)..(650): n is a, c, g, or t
  misc_feature (692)..(692): n is a, c, g, or t
aatgttgaatttttaagtttttatttaagaaataaacattgtaaaacatcattataaaacccccaactattgcaagttctagagaaatttaaaactagaacagaaatttaggggactagaaagagcagccaatggcacaagtctttacaattaattaaaaaaataaatcattctgaagatactgcatttgctctctcacaagcagcctcctgaggtaggtaaccttgtttactgatggggaacaaggcagtgttctttaccaaatctcagggcgggtagcctgcaagcctacagtgtggatgttggccacttgtgtcacttcttgggacggggcttagggacctgacttacttaggaacataaattttggggttggaggaagcagcagtgctctactgcggcacgacagacaccctgttaaggcaacactgggatccagctcaggaaaagcattattttcaaattgtgcaagccaatgcacagaaaagtggtcnnnnnnnnnnnnnnnnnnnnnnnnnnnnnnnnnnnnnnnnnnnnnnnnnnnnnnnnnnnacctacttcccaggttctgactgcattgatctgaggtgtggctcttcangtaactgatgtgcagtcaagcgcgatgaccactggcacacaatgtttanattctaaatatattttacttcctagtgtattgctactgacanaacgtagttttctggact

SEQ ID NO: 126549 - DNA, 1055 bp, Homo Sapiens
  misc_feature (28)..(28): n is a, c, g, or t
  misc_feature (60)..(60): n is a, c, g, or t
  misc_feature (68)..(68): n is a, c, g, or t
  misc_feature (720)..(829): n is a, c, g, or t
gtgaatttttctccaggcctgttttggncaattttaaaaatcccagtggtagatgtagcnttagcganggtagttttttgttttggctatactaagacttggaaattattctctccagtgtcagcgaatccagaagggtatcagattaaacaccgaattcagccactggacttttaaaagtacttaagatggtttatctcgggttttttcttcagttaacaaaatcataaatatggtgccttataacatgaaaggaaaattagttgtgtatttcacgacgaaagcgacggaccaaaagaaatttcctgccccaagaagcatgggatccaggaaggggcgcgtagatgcttaacggtctcttcggaaatcctgcaaatagaaagataattctagatccggaatacctgtatctggtggaaaccatggatttctacaagctcgaattattcctcattgtatagcctgctttgtaaactagtttacaatttgcaggctgatcttaagatttttttatatctaattgctgctgccttcattttaggttcagcagttacttttaactaccttaatttattgccagaaggtatgagcctaacattctgatgagtccagaaaactacgttttgtcagtagcaatacactaggaagtaaaatatatttagaatttaaacattgtgtgccagtggtcctcgcgcttgactgcacatcagttacttgaannnnnnnnnnnnnnnnnnnnnnnnnnnnnnnnnnnnnnnnnnnnnnnnnnnnnnnnnnnnnnnnnnnnnnnnnnnnnnnnnnnnnnnnnnnnnnnnnnnnnnnnnnnnnntttctgtgcattggcttgcacaatttgaaaataatgcttttcctgagctggatcccagtgttgccttaacagggtgtctgtcgtgccgcagtagagcactgctgcttcctccaccccaaaatttatgttcctaagtaagtcaggtccctaagccccgtcccaagaagtgacacaagtggccaacatccacactgtaggcttgcggctacgcgatgaactcatgtga

SEQ ID NO: 126550 - DNA, 708 bp, Homo Sapiens
  misc_feature (250)..(293): n is a, c, g, or t
  misc_feature (653)..(653): n is a, c, g, or t
agggaaaagcaatggagtttatttcagtgaaattattttaaattagatatgatatattaagctcccatatgccccaacctggtagaaaagttcctctcagtgagaaatcatttattttaatggcaaaatttttacatatcagtaaaatctgttatacttaaaactatgtatacagtacatttctggcaaaaaaccttatacatctttcagttgtcaagacaaagtaaaaatatggttgcataaagtcacnnnnnnnnnnnnnnnnnnnnnnnnnnnnnnnnnnnnnnnnnnnntcatttgcattgcctcccttacctcttcaatattagtaacaatttgcaaacaacaaaaaaattgtgaaaattctgttgcaaccttgacacacttaaccaaaggttgtcatttcaaatatcctagcttaaaaaagaatttactgcaattgtctgtgcatttatcatactatttatagaagtgcaatatttaaatattttcaaaataaaacacagtaactaaaatgaatcacaataacttataagagaagcaaagtttacaaaattaacaatttttaaaaggtcctatttaattggttcctccttttcttcccccctccccacaacagggtatatagcgccattacttaattccatatacanatttgtaactttacaaatacagtcttctgttaacatcaggaacattatgctgcac

SEQ ID NO: 126551 - DNA, 1433 bp, Homo Sapiens
  misc_feature (189)..(232): n is a, c, g, or t
  misc_feature (1332)..(1366): n is a, c, g, or t
ctcccatatgccccaacctggtagaaaagttcctctcagtgagaaatcatttattttaatggcaaaatttttacatatcagtaaaatctgttatacttaaaactatgtatacagtacatttctggcaaaaaaccttatacatctttcagttgtcaagacaaagtaaaaatatggttgcataaagtcacnnnnnnnnnnnnnnnnnnnnnnnnnnnnnnnnnnnnnnnnnnnntcatttgcattgcctcccttacctcttcaatattagtaacaatttgcaaacaacaaaaaaattgtgaaaattctgttgcaaccttgacacacttaaccaaaggttgtcatttcaaatatcctagcttaaaaaagaatttactgcaattgtctgtgcatttatcatactatttatagaagtgcaatatttaaatattttcaaaataaaacacagtaactaaaatgaatcacaataacttataagagaagcaaagtttacaaaattaacaatttttaaaaggtcctatttaattggttcctccttttcttcccccctccccacaacagcgtatatagcgccattacttaattccatatacaaatttgtaactttaaaaatacagtcttctgttaacatcaggaacattatgctgcacttagagaccctaagtaaaattagaatcccctaaagagagggccacataaaaagtaaatacagttttgaactcatatttaaatggaacttctattactttgtacagctttcaaattagaagttgaatagaacaagccctggacaaaaagcagcaagatttttcttttgaattcagtgcatgattctagaagtgcttgagtcaaatctactagagtcaccatttatgcaagctatcatgacatttgagttcattatcatctggttacataagtgctcactgtatttgccaaaaataatcctaaaatatgattcttaaaatagaaaaaatatagctctgttgcaatgggaaaatgattaatacaaaaaaatcaatttcttaaagttaacataaggcaaatataaatgatacaatattatcatacacgataccaattttatctgaggtgactacatcttcatttacatctattgtgtgatgcaattaagaatgacaaaaaaaatatcagtgtaaatcagaaatcttaagaaaatccagtatctttaaaaagtaatttaagcccaaaacaaatgtgaccacttattaatagaattgatttgttccatattttatcaaaataataataatgttatatccacccggccgtaatggccgaattcccgggcatatgtccggtaccgtcgactgnnnnnnnnnnnnnnnnnnnnnnnnnnnnnnnnnnncggccgcttcctcgctcactactcgctgcgctcgtcgttcggtgcgacggcatgcgcccattgaggt

SEQ ID NO: 126552 - DNA, 1030 bp, Homo Sapiens
atggagtttgttttttatttagacatggaattttccttttcatataacttatctaattaaaatattcatctcggtagttaccacaaaaaagtaacatagaaaattgtatttacattttgggaccaaaatacaaatgaagagcaggatgacaccttgctcctttccctcccgcttcccagaaagaaaaagccccaaagaaactgctcagtacaccaaggatcacaaaagggtaatttgtaatttggtgatttgtatgtagtgtagcacagaaaaaaaattgcacaagtttttccataaatgagaccaaaggttccaaattcatcctgtgtcaggttcaaattcatcctgtgtctgctctgcagccattttagtaagctgggcaaggaggtcatttagaaattgggtttttcctctttcccctgactcttcgcaccaagtcacatccctgatgtagatactcttgggggaggggaaaacatctggctctatgcaaacagggctcatcaaaaatctttatgtgccaaaatggatactgacattgctatgaacaaatctgttttttcttccctccctgcctaaagactcctaataagggacattaaatcatacacaactgaatctaagatatgaaaaactagtttcaatgacaaagacttgaacacacagttaagagataaattcaaggtggtagacacctagaaaaagctattctaggcagcagacatctggcacctgacccaaatgttcatttggtttcagttaagaggcttcctaatattagatttgtggggcaggctagggataggggtggaatggtggtacaagtaaccaagagaagtaaagtaatgctttacccattcaaaaatatagcaaattaaaacatagtaacatttgtgtcctgtcacaataggcaccctgcacagcaatacacactgaacaatgtcgagtttctgctgaatagacttcctacgttgctctggaattcgaagttggcctaactgaggtctccagttacagaaaacactggctc

SEQ ID NO: 126553 - DNA, 959 bp, Homo Sapiens
  misc_feature (712)..(720): n is a, c, g, or t
ttttttttatactaaattaaaactttattgaataaagaacactctccagaacacatgatctgatggactaggtctacattacatgcaatgaagctgaacatgaccgtagtttaacatggaatgtcaaacaaattagtaattttcattgtacaaaactgtttatgtagctgacatgcatgcaagaagaaaagtgtcatactcagcattttcaccaatcttctgtgatgagttttaaaaaaggcatttggagaaactggtagatgtcttcaacatatagttcaaataaattagttgtatgtgtactactgaatcctctttcaacctctcttgcattccaaataaaatcttagtgcaaacatcaaagttgctggtcactccaaaagactgctaaactcataatagaatacaagttctgaattactgtgtattaagtaggaaaacccaagaataccagttactgcaaaattcatttaggcacatttaatagtccactctaagcattttttctaagtctctcacattaatgactaaagcctgtttacagtactaaaattctatcattcaagcatcaatgattacatttcagaaaaaggaaattcatttcagtaatagcattactgctatatcctaaaaaaaggagagaaaataaagaatcataattaacaaaaccagtatccataataggatacacagggaaaaacattttaggagnnnnnnnnngtgtgctttacttgccacagcaggaattatataatgtaaacaccatattggcccacaccacaaaaatccatgagaaaggttcaaatttgaacaccatatgtgcattattttcaaatctgtgtttgtgagtttatactgtatctgcttgtaccaatacatgacaaacaaaacaaactcttcgacacacatataagtgattgttaaatattaagcatggcttgattccctgactttagctc

SEQ ID NO: 126554 - DNA, 1355 bp, Homo Sapiens
  misc_feature (952)..(963): n is a, c, g, or t
  misc_feature (1100)..(1159): n is a, c, g, or t
ggatttatatttactttattatttatttacttttgagacagggtcttgctctgttgctcaagctagagtacagtggtgtgaacatggttcactgcagcctcacacctcagcctcaagcgatcctcccacctcagccaccaccacatgccaccatgcccggctaattatatggtgaatttaaatgaccagtgatatcccaggacagtcaatacctacaacaagaaccaaagagcacaaaaacacttgaaatatcattactttactttagtgttccaggcattttaaatattcatacaatcgccttatttcagcagtcatttcctctccagtacagattttgtgtccagaaccagagccatgtacgtcactgaattttctctacagcacccgcatgctacacgggacctactccggtgcccatgtctttgctagtagagcctctcaccacacttgcaagagggctggacctccccttgcttgatgtagcctccactgtgaatgaaaacacactttgtcacttcgatcccagtacatttccagcactcccaggtgttccatgtatgtggcaatcatcccacagagctagtgacacatcatgtcagctggtacctatgtcagcacctgctccactatatcatacagatgctgaggcacttaaatgttcttggtaaaatggagttcataattgccataggagttgagttttggggaaagggactttcaataattaatacccttaatacatatttagcagatttataatttcgtgtctgtttacatttgttgtcaaagcttcataaactatttatgtaaatgaaagcatgtttgagtttccaaatgctgctatgacaagcaaacagagaaactgcttagacaacacctgcttgtgccataaatacatacggcaacatccggtcatccttaaagaaatgcttgtgtttccaaaaagaannnnnnnnnnnnaagtcataagccttatgcaattcttccaagataataatgtgtttgtccttccttctcaagcatggttcaaggcatctcaaggcatattgctgtctgaggttctgatttaactgtccgggggtacaggggaagagtgnnnnnnnnnnnnnnnnnnnnnnnnnnnnnnnnnnnnnnnnnnnnnnnnnnnnnnnnnnnnttggtactaaaggctcttgcatcttcctactgtcacctgtcctcatcaaaagcccttgaggtagtccctgggtcaggcaatgatctctttcatgggctaagaaactaaggcacagagaggttaacaggctcctctgatactgtgcagtcaaatgacagaaccatgattgcaactgacatttccaaataaaccatga

SEQ ID NO: 126555 - DNA, 662 bp, Homo Sapiens
  misc_feature (547)..(547): n is a, c, g, or t
aataaatgactggcatttatatcttgtctcaggctctgcttccaagagaagctgatcttagacctgatgcttctaattttttcatctccaaccagaacccagggaggtcagggtccggctcccccattctccctctccactctttcttgctcctctcctgcatccaaaaggcataaccaccttccaggctccccaaacaacagggagccatctaccggggtccggggcatgtaagaacatccatgaggtctctgaaggaagcagcaagcagcttgtttgccgtggccagcagcaaaagaagccccccaaccataccacgccggagggggatcataaggaggccaggtaggcaaagttaaggcagttgcatgtcagcagcacttcaggaggcaggtggggttggaggttgtctccgatcctgtgtctgcggtaggaggggctctgctggtagttccctctcctcccacaaggagcttctctccacccccatcagttctctgtctctgtaaatcctagaatccatcaccatggatcctccagcaggtcncacagccggctgctgctggagtcagataagtcagcggagaagatgctggggggtgggggaccagaacccagaggaggaccccgctcagggcctccagccagtccagggagtccgt

SEQ ID NO: 126556 - DNA, 924 bp, Homo Sapiens
ttttctatctattctttttattcagatatgtgctttaaaaatacacattaggaactttgcaactgatctgttctatttaatattagaaacatttttcatggtaatacattatttaactttctataattagagggaaaaaatcataaagatcatactttatattttaacctgacagaataaatgcattatatatatctctttgaaaaccagtgcacttagaagtttctaatttatgcactccattgccctaatcaaaaagctatacattttccagtatccacactataacacagtcctagtaaagatgcacattcctttaaaccctttactttcccttgaattttgtgggggagggtggaggggaaggaaggatacagaagttgcagtgcagacctatatttatttagaacaaaacatcatatcctatgttaaaaaaataattttatcaaaaccaaatttcaatcacagttatgtatgattttcagttaatggtacatgttgaaattgcactttgcagatatcctgataatgtccttgacagcgttccccatttcagcctatgtttttttcagtagacacaggttcttccagagttttcttttggctccccttccgtgaatatttgtatttgtctacataggctttaaccagatttgccactttagtagaatttacttctccactcttactatgacaaactttatctactgctttccgtacaatttctttatattcttccttggtgatatctttattttggtaaaatggcttgatggccaattttacctcttgtgctgctttttcttgaatttgcaatttcttgtctgtcttcgagctatctgcgctggcttccactgcaacacttactttgcttcccggccgtaatggccgaattcccgggcatatgtccggtaccgtcgactg

SEQ ID NO: 126557 - DNA, 681 bp, Homo Sapiens
ttttagtttatcaaaagaatttattagaaaattttacacactacatacatatttatttaagagtataatttcagtagacagcactccaacttcataatacaaacaatatctcatggaccctggggcaatcactgtgcttctgaagctacatcttttggatggaacattccagcagtacacatttatctactgctttccgtacaatttctttatattcttccttggtgatatctttattttggtaaaatggcttgatggccaattttacctcttgtgctgctttttcttgaatttgcaatttcttgtctgtcttcgagctatctgcgctggcttccactgcaacacttactttgctttctgccaattttacagcagcattagaggctttgctgtgacttgatgacgaagtattaccagaacttggtccctgaaccattcccgtatttcctggggctgctgtcggagcaggcaaaactggtgtactcatgttattacttacatgagaagaactaggaataccctgcaattgctttccatctggttgtgaagcaatgtagttgacttgttgggatggtgggggagggggtggtggtggtggtagtcccttagatacactggtaggagtggctacctgcatgaggggcactcctgtgtggagatgcaagggtagctgaggatgaa

SEQ ID NO: 126558 - DNA, 1639 bp, Homo Sapiens
  misc_feature (1484)..(1497): n is a, c, g, or t
tttttttagtttatcaaaagaatttattagaaaatattacacactacatacatatttatttaagagtataatttcagtagacagcactccaacttcataatacaaacaatatctcatggaccctggggcaatcactgtgcttctgaagctacatcttttggatggaacattccagcagtacacactgtggccatttaaaggaaggtaagagaaaaaaatgtgataattaccaaaacaaattttaaaaagcacaaaacttttggaatgttaatggataactactattagtctcaaaattctaggcatttctataaaacattggtcaatgtgactagtaagttaacgggaccaaggtttcaaagatcaatactgaaccttgataaataataagaggaaatgtaactccacaaaatgtttctgattaagtttgtgcccatgcaaaattaacataaatttcttaactcaagaatgaggaatattaaagcaatgtattttttcaacataaagcatgcattttctaatacattcttaaacatttcaaaattttaaaagttcgaattctaatcaagtagctattaatgcagtctaaccagtgccccaaatcagacatggaacacacacttgttactgtcacggaaataattcatgggagtgctactaaagatatatgagacttcaactcttgaccacatcactttttctccaaaactttagaacttgtttgcaaaagctaaatggtataaaacacattttaaaatgtcacccaattctcaaatgtcactgaaagaaaatgcaggaaaagtatgtattgtgtgattaatcacgcttaggcttaactcaaaatactttcaatgttcacaaaattgtttctagagttctaatctaaaacaactaaggaggtgtgccttgatattctgaaacactgtcttaatactttattagaagaaatatgcttgaaatttctttaccataatctaaacgcaaactttaaaaatatataccagtagaataccatattacaaatgcccagaaatgtagaataaaggtcaaaaactgcttggaaatatttttatgattacactcataacaacaaagcttatgaactagcacaatcattatgggaccaacatttcaaaatattttgcctatcaaagctagcaccaggaaaagtattatgcacataaaattgagaaacagataatctttactttagaaaagcacagttctacagagtattgctctggctaaatagtttagctagtaaaaaggtcagtttatctcactgaggcatgtatctccttggatctattaacttatctgaagaactttccaggtacttggtatgtactgaaaattcttactggaatcagtttatcatggagaaaacctactgttctttcaagatgccagttaaaataatggcaccataaacattttaaacttaccttttataaaaactgagatattctagtattaaaaagagnnnnnnnnnnnnnncccaaatccctaatccctgaaaggctaaccaggactccattatttaaatttcccctctgtttctaaaacacaggttttactgtctagaattttgcaacatggctaatggctaccacctggtcaccaaattaacacttcattc

SEQ ID NO: 126559 - DNA, 961 bp, Homo Sapiens
  misc_feature (154)..(154): n is a, c, g, or t
  misc_feature (193)..(193): n is a, c, g, or t
  misc_feature (249)..(249): n is a, c, g, or t
  misc_feature (255)..(255): n is a, c, g, or t
  misc_feature (330)..(330): n is a, c, g, or t
  misc_feature (360)..(360): n is a, c, g, or t
  misc_feature (406)..(406): n is a, c, g, or t
gccctatgaccactatgtttcctttatccagagtctgaagagggtcattgagcagtccaaagggagctgggctgagtgttttttctgtcccattacccaatacttgacaggcgccgggaattgttggatagagactcagcagccacctggatangagaggaagagagaggggactttcccgtcagacctctgntgcatagaaaggatctgtgcttcccctgttgcgtgcagcaaggttccacgtgcatngcaatntgcacagctaaaaatgcagcattcccccagctgggctgtcccaaatgttaccatttgagatgctcccaggcgtcntaagagaaatccacccctctctggccctgngacattgcaagctgctacaaataaaattctgtgttcttttgacaanagcgtcattgccaagtgcacatcagtgagcctcttgaatctgtttagtctcctttttcaacaaaggagtgtgttcagaaaaggagagagaggctgagatcattcaggagtttgttgggcagcaagcatggagcttcttgcacaaattctgggtccataaacaacccccaaagtccctgctgatccagtagccctggaggttccccaggtagggagagccagaggtgccagccttcctgaagggccagaaaatttagcctggatctcctcttttacctgctaggactggaaagagccagaagtggggtggcctgaagccctctctctgcttgaggtattgcccctgtgtggaattgagtgctcatgggttggcctcatatcagcctgggagttatttttgatatgtagaatgccagatcttccagattaggctaaatgtaatgaaaacctcttaggattatctgtggagcatcagtttgggaagaattattgaattatcttgcaagaaaaaagtatgtctcactttttgttaatgttgctgcctcattgacctggg

SEQ ID NO: 126560 - DNA, 1651 bp, Homo Sapiens
tttgggaaactacttcaaacatatttattatttttacagactcaaaatacactaataatcctgcaatgcatgctggtgtcatgtgacaccaggcctggaatcacacctctgtccagcaggcacttgtctcaggtgaggcagttttctgagggggctcccaggagcagcatctcaggacacctgagagggagggggctgcaaggaacacctctgtgtgcacacgcctgtgctgtgctggagatgagctgtcaccttgaggtggcgtcagaccttgactctggcttgggagccccaaggttaagggaaggttaagacatgatcaaggtgcccatgagattgtgacagggacatgctgggtttctgtggcttgactgcttggatgaacatctcatttttcaatcacacagttgcagtgcagaaaggcatcaggaggcttggtctggtattaggaactgaagaagcagcccaatccctgaccagaacggtagcatcaaatgccttgtggtttccaggtggctgtggtagtgactcaggagtcctttagtgtgttctcgtgaacaccaggttatgtggatggcaccttatacttttcaaagctctttcaatctgtccgctcattctcttctaggcattgtagcttataccccttcctctcaccgacgctggtttagacctgtcaagttcttgagcgtcactgctgcacccatgagtccttgcaccagtgcctctcctgtggactttacctgcttggcagtgtggcccatgttcattgcatcattaacccggttttccaggaagcgccaagtgtcctcaaagtctggagaggagtcttgcatcatcaccagctctgttgtgttgtagatggcagccagcatggctcggcgggtgtaccagttaaaatcagtggactggtccccagcgtaatgccacatgtcatccaccatgctggtgagcaggctcaggctggacgggatgttgtgagggagcatgaggatgctgagggcccggggccagtgctcaatgtatgggatcagcattctcagtctggtttccactgcatccctcaggaactggtctgtcttcctcttctccgcctggcccaactgtaccagcttctgctcctcttctagcacacgtgtgagccgggtattgcactgggtcacaaaatgcagtattagctcactgccatccttcccgaacatgctggctgctgcactggagagacccagagactgggctccttctgcaatcgcctctgctgtccacccgtgggcgggcacaaactcaagggctgccgtcaggatgcggtgctgcaactgctcctcactttcatagtcctcctcctcctcgccgccctggtctgtatacctggggggtgaatgagaagactctggatcaggtttttctgccccctgtgtctcagaatgctgctgagaaaatgagttgggaggctgctgcttctgctcatctgaagaccttagccccacagctgaagcatggaaggcacgcggcaccagggcttgtcggcaacgggccacgggcaggcatcgcagctgcaggagcctccagcccgcccggccaagcgcaccagataccgccgccgccgccatttggaagcgggcacatgcagggaattccggaccggtccagc

SEQ ID NO: 126561 - DNA, 906 bp, Homo Sapiens
  misc_feature (882)..(882): n is a, c, g, or t
ggtcttgcatcattacccgttttcccaggaagccccaaggtgtcctcaaagtcttgagaggaatcctgcatcaatcaccagctcttttgtttgtagatggcaccagcatgctcgccgggtgtaccaggtaaaatcagtgtactggtccccagcgtaatgccacatgtcatccaccatgctggtgagcaggctcaggctggacgggatttgtgagggagcatgaggatgctgagggcccggggccagtgctcaatgtatgggatcagcattctcagtctggtttccactgcatccctcaggaactggtctgtcttcctcttctccgcctggcccaactgtaccagcttctgctcctcttctagcacacgtgtgagccgggtattgcactgggtcacaaaatgcagtattagctcactgccatccttcccgaacatgctggctgctgcactggagagacccagagactgggctccttctgcaatcgcctctgctgtccacccgtgggcgggcacaaactcaagggctgccgtcaggatgcggtgctgcaactgctcctcactttcatagtcctcctcctcctcgccgccctggtctgtatacctggggggtgaatgagaagactctggatcaggtttttctgccccctgtgtctcagaatgctgctgagaaaatgagttgggaggctgctgcttctgctcatctgaagaccttagccccacagctgaagcatggaaggcacgcggcaccagggcttgtcggcaacggccacgggcaggcatcgcagctgcaggagcctccagcccgcccgccaagcgcaccagataccgccgacgcgtgggtcgacgatatcccggaattccggaccggaccagcctgcttttnttaccactgtttatattcacatgg

SEQ ID NO: 126562 - DNA, 1079 bp, Homo Sapiens
  misc_feature (660)..(660): n is a, c, g, or t
  misc_feature (717)..(717): n is a, c, g, or t
catccgcctgctgatgcatggaaaggaagttggaagcatcatcgggaagaaaggagaaactgtgaagaagatgcgtgaggagagtggtgcaaggatcaacatctcagagggaaactgcccagagaggattgtgaccatcacaggccccacagacgccatcttcaaggcctttgccatgatcgcatacaagtttgaggaggatatcatcaactccatgagcaacagccctgccaccagcaagcccccagtgacgctgaggctggtggtgcctgccagccagtgtgggtccctgatcggcaaaggaggctccaagatcaaggagatcagggagtccacaggtgcccaggtgcaggtggctggggacatgctgcccaactccacggagcgagcggtgaccatctcggggaccccagatgccatcatccagtgcgtcaagcagatctgtgtggtcatgctggaggcctacacaatccagggacagtatgccatccctcacccggatttgaccaagctccaccagttggccatgcagcaaaccccctttcctcccctcggacagaccaaccccgctttccccggagaaaagctgcctttacactcctccgaagaagctcaaaatctgatgggccagtcatcaggtctggacgccagcccaccggncagcactcatgagctcaccattcccatgatctaataggctgcataattggacgccangggaccaaaatcaatgaaattcgacagatgtctggagctcagatcaaaatcgccaacgccacgggaagggtcctcagagcgtcagatcaccatcacggggaccccggccacatcagcctttgccagtatctcatcaacgccaggctgacgtccgaggtaccggggatgggcacgctgtaatcctacccagcacccttcccccgggtacccaactgccagaccttaaggcccccggctccccattcggaaaggccacccttccgtgctcaagaaaacaataaaaaagtttcttaattaacaaaaggactatgccctgtaaaaaaacaccgggcaccggttgctctctaaggaggtggcaggtc

SEQ ID NO: 126563 - DNA, 2413 bp, Homo Sapiens
  misc_feature (66)..(78): n is a, c, g, or t
tgactgggctgttttgtttatttaaaggaaaacctgaatctctgcatcatgtaatttttaactttnnnnnnnnnnnnncatgaaatccctcttaacatgctactgtatgttccattaacgaagaaagcaaagtgaccaagtagaagtgtataggacaagatagtacctcagcctgggccaaggggagattcaagtaatttatttttttgcagcccagtggcagagagtctcttactcaggttgctaaagggagaatgtaacaagagaattgacatcactcccttcttcaaagcaacaaggcatcttgaaaactcaacttcctggtgaagctctgttgttggtagcaggaattatttcatccatgtgaaaagacagctgagtctgggatgaaaactcttcaaaggaaaacctcccctcaacagtcagaatgaagaacttcagccaacacataatcaaattcacttttggtctatcccagaaatttgcagtgggaagagaggtaggtacagtttcccagcccacagtcattgcttcattccttgtctgatcagatggtagttagaaaagaagctctcctacatccatcttctataccaggaaagaggaagagtggcaaaagcagagtcttgtgccttcaaagattcattctggttctgttgtgggctaaggcatcctgttcccagtatacgcattttgagatcagatagagttgctcttccaggagtcagcacccacgctcatgtccgtctttcagttaaatctccttggtttagtaactcttgtggatttactgcagttaagacagaaacttcatatgattgcctccctgactgcatggtcaccaggtgatgtgtcacatcaggcactgaagacagggaacgtggggatccttcagcaagcacctcgtcatcaactcccaggatagaattggtatttggtaggttcaaggactctccaccaaggctgggctgggaattcatagacaccaggtttttactgggtactgaagcctcttcaagcaaactactgcccattagtggctcagcagtttgctcctgctcttgactcccagctgctcccagctgcaggtgatgctttctcatatgcacattcctgcttccactctgagagaaggtcttcccacagacttggcactgatgaggcttctctcctgagtgaaccaccagatgttttcggaggctagaatactcagcaaaggaacggccacatccttgggcttcacaaaggaaaggtttctctcctgtgtggatgcgccggtggttcttcaggtttccagctgtagtacactgcttaccacagcccagactcatggcacataaagggcttctctccattgtgggtcctcatgtgcaccttcagcctctgcagcacatagaagcttttcccacaaccttctgcaggacagatgaaggagcggtcatttcgatgagtcttgaggtggtatttaaagtgagctggccatacaaatgtccggtcacaaccttcaactgtacacttgagcttcttttccacttgaggaaggggcccagaatcttttgactgcccatcaccagaaccaaggtggacattttctccattgctgctggtttttgcattctttgccagttgtgcacgagtagcagcatcaactgtcatgggccactcctgaacccgggaggaaccatggaatgcttctgtctgtgctctcactggagaggaaatcattgccctgaatcttctgcctcatcctgtaccaacactaagtgctcagctgaagagcccagacctgctcttgtttaggttaagaagaataaaagaagtgctatcacttggctgtagatcttgcaacaagctagaagactctgaagtggacaaaactccggggatttctgtacagtctgagctctcgtctcctctccgtctggacccacattcacccgaaggcttctccaaacagctgaggaagggacctccttggaggagttagaatgatttgtagtatcatctggtaacattagccgactgcattctgaggcttcagtcacgggaaggagggacaagcaagtaatatctttagcttctgattctacaagcccctgtcccaatgggatggacgtattctgaacaaactgtaccaggagctctggtttggattctaactcatctgataacattgattcagcttccaaaacctgtagctattcaggggacaagttcaaatttaattcagagccaatgataccttcctgttatgttcatattcctctaggaaatactatgctcttcccgtaagatgttgtactaggtgggtaatcaatgtaaccttccagttccgggaagccggccggccgtcagtcggtcccgacctcgtgccgagttaacacccggcctcgtacctagcgcttagggtgtt

SEQ ID NO: 126564 - DNA, 470 bp, Homo Sapiens
tttctgtgagtcaaagtttttatttgtgtaatgagaatgctgtctgttgctataaggatgttagcttccaagagatgttgggtgctgtgtatcaaaatggtgggctcctagagataggtgctacataaagctgtggtattttccctttactagatgatactacaaatcattctaactcctccaaggaggtcccttcctcagctgttttgagaagccttcgggtgaatgtgggtccagacggagaggagacgagagctcagactgtacagaaatccccggagtttttgtccacttcagagtcttctagcttgttgcaagatctacagccaagtgatagcacttcttttattcttcttaacctaacaagagcaggtattctttccttttttttgggctctgcttatgccttcaaaagccatatcttctggagaaaagaaagggctctctaggaaacacttgctcctctctgg

SEQ ID NO: 126565 - DNA, 1027 bp, Homo Sapiens
gggccaaattgaagggacccggtccattttcgaggatttcttggaggggggtattttaaaggtggaagctggcccaattccaaattgcccgggttcccaacccctcaaacttgtcacactggaggtttcttttcccccttgaaggaaaggggccccaggattctttttggactgccccttcccccagaacccaaggtgggacattttcttccattgctggtggttttttgcattctttgcccagttgtgccacgagtagccagtaatcaacctgtcatggggccacctcctgaaccccggagggaaccaatgggatgctactgtctgtgctctcactggagaggaaatcattccctgaatcttctgcctcatcctgtacaaacactaagtgctcagctgaagagcccagacctgctcttgttaggttaagaagaataaaagaagtgctatcacttggctgtagatcttgcaacaagctagaagactctgaagtggacaaaaactccggggatttctgtacagtctgagctctcgtctcctctccgtctggacccacattcacccgaaggcttctcaaaacagctgaggaagggacctccttggaggagttagaatgatttgtagtatcatctggtaacattagccgactgcattctgaggcttcagtcacgggaaggagggacaagcaagtaatatctttagcttctgattctacaagcccctgtcccaatgggatggacgtattctgaacaaactgtaccaggagctctggtttggattctaactcatctgataacattgattcagcttccaaaacctgtagctattcaggggacaagttcaaatttaattcagagccaatgataccttcctgttatgttcatattcctctaggaaatactatgctcttcccgtaagatgttgtactaggtgggtaatcaatgtaaccttccagttccgggaagccggccggccgtcagtcggtcccgaattcctcgtgccgattcaccaccagcctcgtacctaa

SEQ ID NO: 126566 - DNA, 1052 bp, Homo Sapiens
  misc_feature (658)..(658): n is a, c, g, or t
  misc_feature (690)..(690): n is a, c, g, or t
  misc_feature (757)..(757): n is a, c, g, or t
  misc_feature (765)..(765): n is a, c, g, or t
  misc_feature (788)..(788): n is a, c, g, or t
  misc_feature (847)..(847): n is a, c, g, or t
  misc_feature (858)..(858): n is a, c, g, or t
  misc_feature (907)..(907): n is a, c, g, or t
  misc_feature (913)..(913): n is a, c, g, or t
  misc_feature (927)..(927): n is a, c, g, or t
  misc_feature (950)..(950): n is a, c, g, or t
  misc_feature (986)..(986): n is a, c, g, or t
  misc_feature (992)..(992): n is a, c, g, or t
  misc_feature (1028)..(1028): n is a, c, g, or t
tttacttgtggtaaggaccagtattgtatttgactttttaaaaaaccatttttaccctggagctaaaatacgaggttatactgttctgcttaatacaatactggcagcctaaaaatgcttcaagaaaccatatccccaacagcggcagagcatcgggaggagaccctctgtctctgaggcttcggtgcacttctgctcagacggtggcgggagtggaggtcgctgctgaagggtgacggtgtggccatgacacgggcagcacgggaacggaagacgccggagacccagaaggcgcatgactgcctggcctcgagtcactaaaagcagtttgatttcactcttgtcttacttttctagtatggcttcctctactctcttaaacttcttcagttcgacaacgagttcccagtatttgagatagagccacatgagtctgccattctggcgtttgttggtgttccagacatcaccacagtatgtatcatgctgaaatatgtcggtgagaccggctgccatctctaggtcagcggcgacggggtcgacggacgctcgcaccagtaagctcttctctatctccagccgcttgctgcgaggaagaaacagactgcagtagatattctgtctttctgtgagaacagcttcaaattcctttcagcanaagcctggctctcctttgccagttttcttccnctttgcaggcagctcaaatacgcacttctcaaaggctgcaccctgtcttttttcttgcatcacctgngcccgttncctgttccagaagcttcttttcnttctaccaactttgcgtccttgagagataagggcttctcggttactagcatttctgttnttgttcttttncgagttccaagacactgagcgacagcacgccgattttctgagatcatgnggtggnactggcttcagatnctgttgaaagcaacatctccacngtagctctcctcttttctactcttctgggatccctnacaatncacgaaactctgcgatcttggctcaggcaatctaangagcgataatcgaccagtcacttt

SEQ ID NO: 126567 - DNA, 795 bp, Homo Sapiens
atcaccacagtatgtatcatgctgaaatatgtcggtgagaccggctgccatctctaggtcagcggcgacggggtcgacggacgctcgcaccagtaagctcttctctatctccagccgcttgctgcgaggaagaaacagactgcagtagatattctgtctttctgtgagaacagcttcaaattctttcagcaaaagcctggctctcctttgccagttttcttccctttgcaggcagctcaaatacgcacttctcaaaggctgcacctgtcttttttcttgcatcacctgggcccgttcctgttccagaagcttcttttcttctaccaacttgcgtccctgagagataagggcttctcggtaactagcagttctgttttgttccttttcgagttccaaggacaactgagcgacagcacgccgattttctgagatcatggcgtggtacttggcttccagatcctgttgaaaagcagcagttctccgacggtaggcttctctctctttttctacttctttctgggactccctagaccaatccaacgaaaagcagccatcccagcattggaaccacagggcataattccacctgcttccatcaccaccatccgccctggaattaggccggatattccatttgggggatcatttaggttattcatggagatatacctcggtcggggagcgcgggacctcagcgttcccttaacgccaccgtccgcgggtccgctttgcgcaggcgcggcgcccccactcagtacccgctccgggcgtggcatggtgcgcaggcgcgatccc

SEQ ID NO: 126568 - DNA, 1220 bp, Homo Sapiens
  misc_feature (114)..(126): n is a, c, g, or t
  misc_feature (136)..(264): n is a, c, g, or t
  misc_feature (1207)..(1207): n is a, c, g, or t
ggggggaatccaagccgtggtttagggcccagttttttctgggaaccagtttggcccatttccccttccttttggggccccgcgcccaaaaaaaggttttaaaaaatttttcannnnnnnnnnnnnccccaaaggnnnnnnnnnnnnnnnnnnnnnnnnnnnnnnnnnnnnnnnnnnnnnnnnnnnnnnnnnnnnnnnnnnnnnnnnnnnnnnnnnnnnnnnnnnnnnnnnnnnnnnnnnnnnnnnnnnnnnnnnnnnnnnnnnccaatcattctgctctttattcagagtccgacacaagcccccacgtccatagccaagttttccccggtttcccagcagccagtgacttctgtagcattaggattcttatagtagttattgtctacatttctcagcagattgaatatgtactgcctcttactactggactgtttattcttaaatgtgtacagtatggatttatgtcgtctatatattatgcatttatttgtcttcttcgttgtgatggtaagctcctggagggcaagtcttgcatccactgctttgctggcaacccgactggtaagcttctggaaggcaaggcttgcatccagtgctttgctggcaacccgattgctaagtaccgtgttttaagcttagttcagtctcaagtgtttgcagccacatctgaagaccaataaagcaactgctggtttatcctttgggagctgacagaatttcttctcccaaatacatacacagtaaaatcataagccttccaacatcgttactgttgcactttacgcagtcaagtgtccaactcctcagatgagcaagtggtcggccctaaaaagggcctttgggatcgaaacgtgcaaagctggagcggcggcctagcctccgaagccgtacagggtgcgcccctggcgcttgagcgcgtacaccacatccatggctgtgacggtcttgcgcttggcgtgctcggtgtaggtgactgcgtcccgaatcacattctccaggaacaccttcagcacaccgcgggtctcctcgtaaatgaggccagagattcgcttaacgccgccacgccgagctagacgccgaatggcaggcttggtgatgccctgaatgttgtctctcaagaccttgcggtggcgcttagcgccccctttgcctaaagcttttccgcctttcctctgccggacatgaccgctggagcccgctcgtngcgattcttggct

SEQ ID NO: 126569 - DNA, 1259 bp, Homo Sapiens
  misc_feature (271)..(309): n is a, c, g, or t
  misc_feature (653)..(696): n is a, c, g, or t
aacatgtaatgtggaaggaaagttattttatttcagatttagcaatataaaaggtcagctaggaaaaaacacatgtaccagtaaccaaaagcatttgcttacatcattccacaatttgcaaaacaagataattgtttttcaaaaccagacaacaggttcaaaaatacttcttttcacacccctaagtgatgctgttgggaacaatggctgttacaaggccattgtaggcacatttccagcaagttctggttatcattattctcattttatnnnnnnnnnnnnnnnnnnnnnnnnnnnnnnnnnnnnnnntccctccttcttttattcactggattccgaggatcatagatttcaaatgtatctgagtcttgcatgcttgcatctttcacttttctgcttttatcctcaaactgaagtacatgtgacatccatccttcatcatcttctacttctgtttcaggaatgtcattttcaggcgtttcagcaattgcttgagtgagtttagatttaaactggttcagcagtgcaagggtctgatcttcccgggaagttcccttctttgactgttgcttcctcagagcttcatacttttgcttttctcttctgtattcggcaacagcaccatctggaggggcttcttcctcttcacttcnnnnnnnnnnnnnnnnnnnnnnnnnnnnnnnnnnnnnnnnnnnngctgctaagagttcccgttttaattgtcttgcttcttttctgagctcttcactgcggctgactgatttcttctccacttctccttctccagctgatttaacattcgcacttgtgtccttttttaattttttggcaattctttctctcatcaggttcttttcatcaccatcaatatattcatcatgctctgcactttcatcttctccatcatcaactaaatctggtgcatcacctttttcactttctacaactggaacagaactgagatgtggatcatccttaagcaagtcatgactacttttgcttttgcccttcatgctctgactaactcgatttacttcctcctcttcttcctcagcttcctctccaaatgaaagtaaactaaaattttttgtgcctttgggtttcaatttctttacttcctcctctggtttctcttttttcagccttttaatttcccttggaatgatgtcatcaaaaggattaaacaaaacctcacagctttttattttgtgtggattatgtggtctttcgtcatcatcaatgtctacttctgacagtcg

SEQ ID NO: 126570 - DNA, 682 bp, Homo Sapiens
tttttcttctcttggttttattgtttggtagaaaaacaggctctttaacactgaataaacatctcacgaactgtcgctcctagattacaaaaagtcaaaaccaatttcctttgacgccgggcccttgaatctgacattcaagtcaccgtaatagaaaccagagctgctgaaccttacattctggaaggtgcttgaacaaaggcatgttaaggaccgtttaaaacttctagcatgtaagaagatccatctttccttccaacgcctttggataataacagcagaatcccggagatctgctgctgagtttgagaaggccaagtttaaggattccaaactccagccttcaatatttctgcagaaacttagagaagtaacctccccgtcctctccgctggcttccccaagtacagatgcaggatgcaggtctttcttcctgctacccaggcaccgaggactcaaaccatctcaccgtctcatcactgggcttcttcaatgggctcttggaggaagaagcttttcgtttttgccaatcttcagtccttagaaaagtcctttttgttaagaaaaggcagggagggttaactaagttctaagaattcaataagaaaaggaaagaggtaccttttatgaaaaggacttccaagctctctcacccagcaatttaactcaaatacctgtcctg

SEQ ID NO: 126571 - DNA, 2892 bp, Homo Sapiens
  misc_feature (2859)..(2859): n is a, c, g, or t
tttttttaaggttggaattgcttttattgggggcggataccgcaaggccccgcccacggtcaggttagtgttctgcccttgcagaggcgccagcagcctgacacctccacctgccacccgcccggggttagtggaacatgcaaagctcggagggtggaggcaggggtggtcgctgctgagaccagggctgggtgcaacaggagggtcagcacagagcctggctggtgtccctgggcccaaagggggctggggctccatgggagagagacgggcaggcggcaccccagtgtggggctccacaagctggaggggcccctggacccaccaggaggacaggtctgcagttcccagccatgccggctggaacgtccgcctccccactgggtctgggtcctcggggcctggggttagaggccgacatggaaggcacttactaggggaacagaggctggaggctgacgccggaggccaggggtctcaggagtgagtgtggggggtgagctggaaagcacagatcagacagcactgtgggggctgggcccgagggcctcgtcttcccatggggaaggggcttctctgggtagactgggagagaggctgactggggccccccgtccccagcaaggcccaccgtgcaggccagtgctagaaacaccagggccctctacagacagggttgggcccagctgccctgtgcagctaggactggcaggcgggctaccctgggaagacaggagggtgggctggggcccagcttgggaccctccaaggcacctggctgtgtgagtggcaggtagaagggagtgaggagacccgagggggtgaggcggccagcagggctgggccagccctgtccccccaagatacaggctgtctggacagcagatatatattaatatattagtctggtctttttggttaaactttaggcaccacttgggaggaagacacctttaagcgttgaaaacggcccccgcgcctcggtgggagccgggctgggccgcatgcagagcggggtgggcgcaggcagcctcaggccacggcagactcagggccccccagggaggccgaggaccccgaggcgtagcggcggccgtagcccgaggaggagtaggaggatgaagagaaggtcatggagaagccggagccggtggcgtcaaagctgccgcggcgggagccggcccgggagccggtgcgcgagccggtgcgggagccagcggtagagccggagccgctgacgctgtagggggctgtagtagcccttggttggattgcgcggcagctttcagcaagccgcagccccgtgccctcctccacccatgctgcggtccagcgcgtccttataggagatcttgagcttggtcttagggcaggtgaggtacttggagtaggcgcccacgtcacgcagcttctgtgcggtgcgggcgtccaccgtgccgcgctgcagggcctcgtccaggggcacgcggcccggcgtgtcgggctcgatcaagccgccggtcaggtactgcacctccaggaagcgctggccggcctcgtagtagagccagcccttcttcagggcctgggcggccgacatcttggtcttggtgcgtgggtcctcgaagccgcagaaggccttctgggccaggttgatgcggtccaccatgatcttgtccaccaggcccttgttgacggcgtcggtgacagggaagcgctcaccggtgctggggtcgatgatgcccccggtgcaggcctgcgcctccagcagccgctgccccgtgatgttatccaccaggttccggtgcatggcctcggtgatggacaccttctccagcgtctccgtgtccaggatgccagccacggggcccgtctcctcagtggggtctgaccaggaggccagctgggtcctggagacggcggggctgatggggtaggaggaggaggatcccaccgaggaggaacgggagcggaaaccaccggcgttgcccgagagcatgtcggcgaactcggtgatggagagcgtgccggcgcggtactggtccagtgccgagcggtcgatgaggttcttggcgatggcatcatcgatgtcgtactggcgcccggagcggcggtcgatgatcatggacttgaccacgccgtccgaggaggagatggtgatctcctcccactcgcactcctgctcggacagctccaggtacgtctggtggtcaatcaggcccttgcggtaggcctcgtacactgacatctccttgcccgtctcggggtccacgatgaccactcggcgcttgcgcacggaggacttggaggacgtcttccgctcccgcttcttctccttcagcggcaagagacacaggcccgtctgggggtcagtgatacaacgctccatcagctgcaggtaggtgaggttctcctccgtgttagggtcaaagaagcccttggtgtcgtccgaggggtcggtcaggatctcgttcatctcctcatcgaagaggccgcggcttgtgggccacctccaggggcatcgcggtggctgtcctcaggttggatgatgccgcgcgtggcgatttgggccctccagcaggcggatgccatggtctttcaggatcaggcccttgttcatgtcctggaagagggagatgagcttcccagagtaggggtccttgtacccagtgacggcgcgctcggccgacagcagcttgtccttgaactcggggcccgcaatgcccatacgcacagcctcctccaccgtcagcttcagtcccttgatggggtcgatgacgtaaccggtggccgcctgcgcctccaggagctcaaaggccgtgccggggcggatgatgccctcgtgccgaattcgccacccaggcctcgctacctaggagnggattattgggtgggtatgtggagatgagagag

SEQ ID NO: 126572 - DNA, 1463 bp, Homo Sapiens
  misc_feature (1432)..(1432): n is a, c, g, or t
ttttaaatataatggcaagaaaacattcctaccaattttatttatccaggcatgtcttaaatatggctgtttgttacatacagtgattctgcagacatgttgacatgacagtgaaatacataaatatgtaatgagaaaaggcttaactgtggataaaacaaagtcattacaattaaagactcgagtttttggcatttccagttgtagtcagggcactgaggtcaaatttaactacaaattttgcattgtctacattgaacacatgattcttaaaagcctcatgttttatttcagaacaggcctcaggaagttgcagactgtgcaggaggttgtttagggcacaagtcatttctcccaatattaacttataggcagtctccaaaacaggaatattcttcaagctgagcattgcttgataaacagcatgggctacagcaacaacctctttttctttatgataacgcaagaatagtagtttagatgatggtataaacagtttttctacaaatgatgatggcagtttcgtatttatctgttcaacaatcagcgtgagtaaattcaagactgagatgatataatcggtaccacaagtctggcaattctccagttggtctaatccatatgtaatgaccatgtcacaatgtatagtcatgctaggatccaagctgccgagcaaaacaccaacacactcattagcagctgtcaacacagcctcagaaaaaaacacctggtttgcagccgtcacacatctcattactctgtgacagaacaactgttacgtatgcctcagtaattggaggacccgaattgggctgaagcgttccccaatgctcctcagcacagtactaaatacccggagaagcgcagccagctttggtgatgacactgatggaggagggatgtcttcatccactgattccccagaggccacatggctgaggtcctcagcatatgcttccatgtcttctagaaactgaccaagaagagtcgtaggaaatgcaagatcagctacccaaaatggctccaaactctgcaaccacccagatacctgctgcgtgagcgaaggtttctgagtatgatctctatgccatccaactaatatatcaactgtatccctaaaattagtgctgaaaatatgagggtaacatcgagccaccaaaagaatgcacttaacacatttgcaaagcaattctggtgtatccacattttcaagaattgactgcaggctggtcattacaagctgcattacagatgaaaaggctttcttttctcctacagtctctagtgctttgtaggtggcacataagtagaggagtttaacttcatcttttgcagatgagctaaatttgctaaaaatccacttgaagatcttctcagcctcatagctcagagaagcacaagaagcccagacagcagctccctcctgtctcanctcctgaagcatttgctacagcttattttct

SEQ ID NO: 126573 - DNA, 888 bp, Homo Sapiens
  misc_feature (376)..(428): n is a, c, g, or t
gaacacgtatgtgtctgtttatttcaaggggtggaacacagacacatccccagatgggggaggaggggagacaaggacacgggtacaaaaactggaaacaaagccacccgctacagctcagacggcaccgccacgatgtggtttaaggctctgtacgtatatatatgtgtagaggctcacacacgcgcacacgcacacgcagaggggcactgacacggggactgaggccagacgtgaaggctgactgcagctcgcagcccacctaaaatattgcaattatgtttattaaaaaagtgtaaaatgggaagactgtgcatcggtctgagtaaagtggcgaacttgagcctccccggcctgggtgcggggccagctaagnnnnnnnnnnnnnnnnnnnnnnnnnnnnnnnnnnnnnnnnnnnnnnnnnnnnnccacctgcgtgtgcccccaccagagcgagcgtccaggtgtgggggtggggtggttccaggacctgcctctgtggggctcccatccaaacagcacagcgtggaataaaaaaccaaaatgccttccccagagtggccctaacctgtccctggcacccaccagtggccccaccagggtggtcccggcaatgtggacagggtctccggaaggcaggcctatgcatctgtgtgtggggggactcctgggccactcggggctccctggctgctcctccaaacctgcccactcactgctgctggggtgtgactgtccagggcccccacaggccctcccaccctaaatccatccatcccccatggcaagtggaggccggacagggggtgacacggcaagatggccaggagtgcgtcgcacagcagaagctgcatttggctttagcattaaggccagcgctgggcggaa

SEQ ID NO: 126574 - DNA, 1134 bp, Homo Sapiens
  misc_feature (940)..(986): n is a, c, g, or t
cagtcgacggtaccggacatatgcccgggaattcggccattacggccgggggggtgcacggaaggaggcgcggcggctgcaggccctgcacgaggccatcctctccatccgagaggcccagcaggagctgcacaggcacctctcggccatgctgagctccacggcacgggcagcacaggcaccgaccccaggcctcctgcagagcccccgatcttggttcttgctctgcgtgttcctggcgtgtcagctgttcattaaccacatcctcaaataggagcccttggggcagagctcctggccagtcttgagccttccctcccaggcacccagcactttaagcctgctccatggaggcagagaggcccggcaagcacagccactgtgacggggagtccaggcgcaggagggacccggggccacaaggcgctgcgggcccaggtgtgctgggcccctctcaggggcactggcctctctgcagggccttccgcccagcgctggccttaatgctaaagccaaatgcagcttctgctgtgcgacgcactcctggccatcttgccgtgtcaccccctgtccggcctccacttgccatgggggatggatggatttagggtgggagggcctgtgggggccctggacaagtcacaccccagcagcagtgagtgggcaggtttggaggagccccgagtggcccaggagtccccccacacacagatgcataggcctgccttccggagaccctgtccacattgccgggaccaccctggtggggccactggtgggtgccagggacaggttagggccactctggggaaggcattttggttttttattccacgctgtgctgtttggatgggagccccacagaggcaggtcctggaaccaccccacccccacacctggacgctcgctctggtgggggcacacgcaggtggaggtggtnnnnnnnnnnnnnnnnnnnnnnnnnnnnnnnnnnnnnnnnnnnnnnnttagctggccccgcacccaggccggggaggctcaagttcgccactttactcagaccgatgcacagtcttcccattttacacttttttaataaacataattgcaatattttaggtgggctgcgagctgcagtcagccttcacgtctggc

SEQ ID NO: 126575 - DNA, 639 bp, Homo Sapiens
  misc_feature (130)..(130): n is a, c, g, or t
cattttggagaagctcaaccatggggactgggtgcatatcttcccagaaggtcagcagggctgactgggtcgagcccccccagtatgagcgggatgggctcccaagcctcgcctctgtgctctctcaccnagggaaagtgaacatgagttccgaattcctgcgtttcaagtggggaatcgggcgcctgattgctgagtgtcatctcaacccccatcatcctgcccctgtggcatgtcggaatgaatgacgtccttcctaacagtccgccctacttcccccgctttggacagaaaatcactgtgctgatcgggaagcccttcagtgccctgctcactacctcctcagggatggccgttggccacgtcttccttctgcctgagcttccccccgaccacaggccctttcctcaggcaaggtctggcctcaggtgggccgcaggcgggaaaagcagcccttggccagaagtcaagcccagccacgtggagcctagagtgagggcctgaggtctggctgcttgcccccatgctggcgccaacaacttctccatcctttctgcctctcaacatcacttgaatcctagggcctgggttttcatgtttttgaaacagaaccataaagcatatgtgttggcttgttgt

SEQ ID NO: 126576 - DNA, 2104 bp, Homo Sapiens
cggggtgccagcgcccgccttccctgtttcctcccgttcctgcagcgcgcccacggcctgtgaccccggcgaccgctccccagtgacgagagagcggggccgggcgctgctccggcctgacctgcgaagggacctcggtccagtcccctgttgcgccgcgcccccgtccgtccgtgcgcgggccagtcaggtggccagtgtctcgagcggtcgaggtcgcagacctagagtgcgccccacaggccggccctggggcgctgggagcgccggccgtgggccgggtggggatgcctctgcacgtgaagtggccgttccccgcggtgcctgccgctcacctggaccctggccagcagcgtcgtcatgggcttggtgggcacctacagctgcttctggaccaagtacatgaaccacctgaccgtgcacaacagggaggtgctgtacgagctcatcgagaagcgaggcccggccacgcccctcatcaccgtgtccaatcaccagtcctgcatggacgaccctcatctctgggggatcctgaaactccgccacatctggaacctgaagttgatgcgttggtgcaggaggactgggcccctcgaagtgggccgggccggcccgacctgcctctgcccagatttgccctcctcctgctctgccctaggaggtggcgtccagcagtccaggcagggcatggggacccctgcagctgcagacatctgcttcaccaaggagctacactcccacttcttcagcttgggcaagtgtgtgcctgtgtgccgaggagcagaatttttccaagcagagaatgaggggaaaggtgttctagacacaggcaggcacatgccaggtgctggaaaaagaagagagaaaggagatggcgtctaccagaaggggatggacttcattttggagaagctcaaccatggggactgggtgcatatcttcccagaaggtcagcagggctgactgggtcgagcccccccagtatgagcgggatgggctcccaagcctcgcctctgtgctctctcaccagggaaagtgaacatgagttccgaattcctgcgtttcaagtggggaatcgggcgcctgattgctgagtgtcatctcaaccccatcatcctgcccctgtggcatgtcggaatgaatgacgtccttcctaacagtccgccctacttcccccgctttggacagaaaatcactgtgctgatcgggaagcccttcagtgccctgcctgtactcgagcggctccgggcggagaacaagtcggctgtggagatgcggaaagccctgacggacttcattcaagaggaattccagcatctgaagactcaggcagagcagctccacaaccacctccagcctgggagataggccttgcttgctgccttctggattcttggcccgcacagagctggggctgagggatggactgatgcttttagctcaaacgtggcttttagacagatttgttcatagaccctctcaagtgccctctccgagctggtaggcattccagctcctccgtgcttcctcagttacacaaaggacctcagctgcttctcccacttggccaagcagggaggaagaagcttaggcagggctctctttccttcttgccttcagatgttctctcccaggggctggcttcaggagggagcatagaaggcaggtgagcaaccagttggctaggggagcagggggcccaccagagctgtggagaggggaccctaagactcctcggcctggctcctacccaccgcccttgccgaaccaggagctgctcactacctcctcagggatggccgttggccacgtcttccttctgcctgagcttcccccccaccacaggccctttcctcaggcaaggtctggcctcaggtgggccgcaggcgggaaaagcagcccttggccagaagtcaagcccagccacgtggagcctagagtgagggcctgaggtctggctagcttgcccccatgctggcgccaacaacttcatccatcctttctgcctctcaagatcacttgaatcctagggcctggagttttcatgtattttgaaacagaaccataaagcatatgtgttggcttgtcgtacaaaaaaactcaa

SEQ ID NO: 126577 - DNA, 1105 bp, Homo Sapiens
caccggcgcaggttcgctttccggcggttgcaccgggccggggtgccagcgcccgccttcccgtttcctcccgttccgcagcgcgcccacggcctgtgaccccggcgaccgctccccagtgacgagagagcggggccgggcgctgctccggcctgacctgcgaagggacctcggtccagtcccctgttgcgccgcgcccccgtccgtcctgtgcgcgggccagtcaggggccagtgtctcgagcggtcgaggtcgcagacctagaggcgccccacaggccggcccggggcgctgggagcgccggccgcgggccgggtggggatgcctctgcacgtgaagtggccgttccccgcggtgccgccgctcacctggaccctggccagcagcgtcgtcatgggcttggtgggcacctacagctgcttctggaccaagtacatgaaccacctgaccgtgcacaacagggaggtgctgtacgagctcatcgagaagcgaggcccggccacgcccctcatcaccgtgtccaatcaccagtcctgcatggacgaccctcatctctgggggatcctgaaactccgccacatctggaacctgaagttgatgcgttggacccctgcagctgcagacatctgcttcaccaaggagctacactcccacttcttcagcttgggcaagtgtgtgcctgttgtgccgaggagattggcgtctaccaggaaggggatggacttcattttggagaagctcaaccatggggactgggttgcatttcttccccagaaggtcaggcagggcttgacttgggtcgagcccccccagtattgagcgggattgggctcccaaggcctcgccttctgttgctctctcaaccaggggaaaagttgaaccttgaggttccggaattccttgcgtttcagagtgggcgtaaggggcgtggggtgggctcttgggcccaggcgagtcttccgggccaggagattggccttgtgggggccattggtcccgcgcccccccagacaggctctctcgcccgccacactgcgctccgtcgcccgaccgcaacgggcacgcggcgggcatcgcagcgctcgcgggcctccacaggaccaac

SEQ ID NO: 126578 - DNA, 1285 bp, Homo Sapiens
  misc_feature (1094)..(1152): n is a, c, g, or t
tttttttcagattccacaaggatttattggcaccggacctagcctggtgcccgccccttcaaggaaagacactaacaaggaggagtgccggcaccgcaagagccctcccagaagcgcccagactgggggtcggggaggacgctgccattcgtggccaggaagggaagggcgattccggaggagggtgggcacggcgcagggaaaggccgggtggtgggatgggcagggaggcggggtaccggccccgctagaaggggaactcgcagacgtagtagagacgccgctggcagtcgtggtcccaccaggagccgtcgtcagaggcctgcgccacgcagttctcgagcgtgccaccgttgggctggtccgggctgagcggatgcggcgaggcgctgggctgggcgccgagctcggggcggggtgagcgatgccaggcgaagaaggacacgcgctggccgttttcgaagaggtagaggccctcggcgcgccgatcgtgcacgcccagccacacgggccagttgtagggagcgagcgccgcgcgcaggtaccgagtgagcgcctccatctgctggcggtctgccggctgcgccaggctcccgccccgcgccgtgcaccgcgcctgcgccgccgcctgagcttcgaagtcgcgcgagagcaggaagcacttgtggcccaggcgcagccccttcaggcagccctccaagcggccgtgctcgcgctcggcgcgaccctgcgcctcctgcagggcttgcacggcatcgcgggtgtcgcctgccgcgttccgcagctgccgcagcccctgggtcagctcgaccacgcgggtgtccaacgcgtgcagacggacgtgcagctggtgcaggcctgcgtccaggccggccaggcggcccaggatgtaagtgacgatgtcctcaggggtgggagaggggctggggccggaggatggggttggcgttgcttcctcctcctcttcctccccctggtcctcctccatctcccagtcctcttttccctcaacagttccggcaggattctcatcccccctcccagcaggcagtcctagggcttcctgcagatgcttcagcatcagggcctccctnnnnnnnnnnnnnnnnnnnnnnnnnnnnnnnnnnnnnnnnnnnnnnnnnnnnnnnnnnngagccccatggccaaagcccaagagctgggggaccaccaaagcccccaaaagccaggctgcctgcattaagctggactcttggcacccaaagttccagatgtctggatgtctggggtgggaggggtggcctct

SEQ ID NO: 126579 - DNA, 686 bp, Homo Sapiens
  misc_feature (279)..(334): n is a, c, g, or t
  misc_feature (412)..(461): n is a, c, g, or t
gcagccccttcaggcagccatccaagcggccgtgctcgcgctcggcgcgaccctgcgcctcctgcagggcttgcacggcatcgcgggtgtcgcctgccgcgttccgcagctgccgcagcccctgggtcagctcgaccacgcgggtgtccaacgcgtgcagacggacgtgcagctggtgcaggcctgcgtccaggccggccaggcggcccaggatgtaagtgacgatgtcctcaggggtgggagaggggctggggccggaggatggggttggcgttgctnnnnnnnnnnnnnnnnnnnnnnnnnnnnnnnnnnnnnnnnnnnnnnnnnnnnnnnnaacagttccggcaggattctcatcccccctcccagcaggcagtcctagggcttcctgcagatgcttcagcatcagggnnnnnnnnnnnnnnnnnnnnnnnnnnnnnnnnnnnnnnnnnnnnnnnnnntccctctctgctccccgagccccatggccaaagcccaagagctgggggaccaccaaagcccccaaaagccaggctgcctgcattaagctggactcttggcacccaaagttccagatgtctggatgtctggggtgggaggggtggcctctgggaactgccgagtgcccctgccctgtgtgcaggtcactagcccccaggttccggattatcccagcttctctcttc

SEQ ID NO: 126580 - DNA, 654 bp, Homo Sapiens
  misc_feature (117)..(137): n is a, c, g, or t
  misc_feature (174)..(191): n is a, c, g, or t
  misc_feature (235)..(270): n is a, c, g, or t
ttttttcactttatcttttctactttattacttcaaattaacaaccacgataaagctcaaaaaagtccaatatttacacaggaaaaaagtacaaaattccccccaaagttcttcagnnnnnnnnnnnnnnnnnnnnnaaattacaaagtaataaaaagctttgctctttaattnnnnnnnnnnnnnnnnnnggggaaacagaggtaaataaattaggaaaacacacacacggagnnnnnnnnnnnnnnnnnnnnnnnnnnnnnnnnnnnnggtgttaactaggaaggatgggttaatccaaaacccagccctgactccaggctcctccttcagaaaggtggaaccagggagaggggggaccccaggtgactgtcaggaccagggaagtaatttataactcagagccagatgccttctggaagcagtctccatggattctgccctaaaaccaggaatggaagatggagctgccaccggctgatgacgggctagggggggaccggtggcagcgaggaccctctgagctctgagggatgcggaggtcaccgcccacccccatgtccttgttagtagacacaggagaacgggaattcgggctggcaggcggggcgggccgtggcacctgctgtcttgggaaacacaggtcaatacatc

SEQ ID NO: 126581 - DNA, 735 bp, Homo Sapiens
gcttttgcagatgtaccttcttaaagttttttcttaaagtttgggaaatattgaaatacgcttgcattccttacatacccaatgactgatggctggaggaagtagctagaagctaagtcacaaaattaaccccttcttacctccccatttcacctttgttccccaagaaaataaagttgcctatagttaaatctccaccaatagctaccttccaagagggactctttgctgaggaggtgaatggcattggagcatctgaactcatagactcttacctttttcagcttgccactcttagtccccacaaaaaccacgctgtagccgttgtaaacgtaggaggccacagaggtcatgcggtccctgctggtggtgtacagggtcaggccctccactggagttgagcctcccaggggctggttgatgtccagtccacagaagttatcatcgatggggacaggcgccttggtgcactggacgtccttccccagcagccagttgagctccaggttgccctcgccctggtagcaggactgcaggcgctccttgatctgcaagttgatggcccggatagggaaggcacacagggcagagtcatcgggcgggtggtgatactgcttctgccctttggagaagatggcaaagagtacatcgtcctggctggtgatattgaaggcctgggccagtgagtcccaggcttggccaggtaagcagctgcaggaggcggtattcaccccg

SEQ ID NO: 126582 - DNA, 601 bp, Homo Sapiens
cttttaatgaatataaagagtttattcggtgcgtatttgggtatacaacaacaaatattaaacaacttttttaaactttttgtgcacaggacagaaaactgcctgtacatgctatgtccacttttggaacacagatttttaacaattatgaatgcacaaaatcttacatatcatgcaactctatgccaagaacccaactttcttccatgcaacagatatgaagatctaaatggaaacctagctaagtcttaaacacttttccagtagcaagtataatatatgttgttgagggaaaaccagtcttaacaattccttgtacacaatattcatgtgccaaatacaatgacaggaagactcatacatatacagataagacatttcttattttaacaacacaaaagacaacatcacagttccacagttcctgtctttacacaagaagccacaacaatagtttaacatgatacacaaatggaattaagagaaatctacacttgaggataattttttgaagttctctttactgactggggttgacaatacaactcaatttctacgcacaaagtacagcacaataacttgaccagaataccacaaatct

SEQ ID NO: 126583 - DNA, 317 bp, Homo Sapiens
  misc_feature (143)..(174): n is a, c, g, or t
aaattacaacactttattgcagcatcggcaaaggtcagatttctgaagctggtgaagattgggcagcatttccatgtgaaatgttacaactttacaagttttgttttttatttaaatctacatgcagaaactgaaacatggtnnnnnnnnnnnnnnnnnnnnnnnnnnnnnnnngatgtaatcaagttgtcgcatacagatgtgctctccgactaaatatactacgcctgctggaaagcaaaccaaagacagctgtcctaagaaattaacagattgtcagaaacagactaaggaccctcatttctatttagtggggg

SEQ ID NO: 126584 - DNA, 1413 bp, Homo Sapiens
  misc_feature (113)..(136): n is a, c, g, or t
  misc_feature (1301)..(1335): n is a, c, g, or t
tttcgcattcaacttaaatgcttttattgacaatgtcttggaacaataagcaaacaatgcttaaatttttcattcaaattcactttccacatgtcaaaagacctcaaggtagnnnnnnnnnnnnnnnnnnnnnnnntatctgagaatccatcttaataaataaattaaaaacacaataaaacgttttcatggaaaactgttaatgtcagaacattcagaccacctcaacaatgcatgatcagtaacattacaatgaacattgatgttgaagaaaaactacagtacatggatatagctatttatttctatctaccagaaaataaagtcgtatcttttcttagtataatattggtcatttctaatcagaacacactattgccaggaacacagtagttattgttaaaatcagctgcactagatacaatttgaaaatatccagcaccaggttaattccaataatgaacccaatagattagttaatgctatgagaagactaaggagaaagagaaaagagacacagacccaggcctggctcaacatgctactaactaccagctctctgaagtgtcactgggaacaatacacactccatgcgttttgctacatctccggaagaggtaaggacttgagtccacacatggatgctttcaagtccttgaggcccacagcctggtgtgtttcacgcacagataaggtcctccctaggtctacaggaaccctctagggaagatgtgtttctcctctctgtaatgcaccagctcgggcagtggcacttgtgggtgccggctgcctccccttccctgccccctcacagggccagcagcgtgggtgagctgagcgagtcagaggaaggctcattgctgctgctgcccttgcggtgggcagctgcacagctggggaaggagtcagcctcggggtaggtgaagacgaaggaagacgtgtaagcagtgcagctgggagtacaggtgaccaccggagtgcacaggggctccagctctgtggccatgggccccatccccagggagccactgtgcagaggctcccagtctgctgcatagaaggacccagataggtgcatgtctggcacggagcgggctgtctcagagccactgggcctggatgatgctgggaacaggaagtcatcaaagggctcggtcttcagctccatgctgctgatgctcttgacaggttccactgagggcttgggctcagggtcattgaggagaggcagggtgaaggcctcctcagaccccggccgtaatggccgaattcccgggcatatgtccggtaccgtcgactgnnnnnnnnnnnnnnnnnnnnnnnnnnnnnnnnnnncggccgcttcctcgctcactgcttcgctgcgctcgtcgttcggctgcaacgagtagcgccctatagtgagtctataca

SEQ ID NO: 126585 - DNA, 1560 bp, Homo Sapiens
  misc_feature (66)..(66): n is a, c, g, or t
  misc_feature (1443)..(1477): n is a, c, g, or t
ggaacccttaaggcagaatgtgttctcttgtctgtaatgcaccagctcgggcatcgcaattggggngaccagatgcctccccttcccatgccccctcacagggccagcagcgtgggtgagctgagcgagtcagaggaaggctcattgctgctgctgcccttgcggtggcagctgcacagctgggaaggagtcagcctcggggtaggtgaagacgaaggaagacgtgtaagcagtgcagctgggagtacaggtgaccaccggagtgcacaggggctccagctctgtggccatgggccccatccccagggagccactgtgcagaggctcccagtctgctgcatagaaggacccagataggtccatgtctggcacggagcgggctgtctcagagccactgggcctggatgatgctgggaacaggaagtcatcaaagggctcggtcttcagctccatgctgctgatgctcttgacaggttccactgagggcttgggctcagggtcattgaggagaggcagggtgaaggcctcctcagactccggggtggcaacctctggcaggcccccagtcagatcaagggaagccacagacatctcttctgggaagcccaggtcatcagggatcttgcaggcaggtcggtgagctgccaggatgaactctagtttttccttctccttcagcaggttggcaatctcggtctgcaaagcagacttctcatcttctagttggtctgtctccgcttggagtgtatcagtcagctccctcctccggttgcggcatttggctgcagccatcttattcctttcccttcggattctccttttctcttcttcttctggagataactgttccaccttgcccctcctgccaatgctctgcgctcggcctcctgtcatggtcttcacaacgccagccctggagtaagccccagcggagggggcggggactccgaaagggtgaggggctctggtctgcgatggggccacagaggagacgagggcgggctgcaccagccactgcaggtccggactggtcgagatggcagtgaccgtgggaatgaagttggcactggagacggccaggtccgtgcagaagtcctgcgcgttgacaggcgagcccatgctggagaaggagtctgcgggtgagtggtagtaagagaggctatccccggccggggacgcgctgctgcagcgggaggatgacgcctcgtagtctgcgttgaagcccgagaacatcatcgtggcggttaggcaaagccgggcgaggggccgaggggcggagacaggtgggcgctgtgaagcagagctgggtaggagcacggtcactgctcgttcgctgcgccgcggccgccggctcagtcttggcttctcagttgctcgctgcagatgcggttccccggccgtaatggccgaattcccgggcatatgtccggtaccgtcgactgnnnnnnnnnnnnnnnnnnnnnnnnnnnnnnnnnnncgccgcttcctcgctcaactgacttcgctgcgctcgtcgttcggctaaagcgcgctagcgcccatagtagctatatagtcttt

SEQ ID NO: 126586 - DNA, 714 bp, Homo Sapiens
taccgtctagccgttccactgaggcttggctcaggtcattgaggaagccaggtgaagcctccctcagactccggggtggcaacctctggcaggcccccagtcagatcaagggaagccacagacatctcttctgggaagcccaggtcatcagggatcttgcaggcaggtcggtgagctgccaggatgaactctagtttttccttctccttcagcaggttggcaatctcggtctgcaaagcagacttctcatcttctagttggtctgtctcctgtatacagagggataaaggaaagcataagacacagtcttactcaagggcccttatgctcaatctccaactttcccttaagttttaaaaaggagcaacccacagagtacctaccgcttggagtgtatcagtcagctccctcctccggttgcggcatttggctgcagccatcttattcctttcccttcggattctccttttctcttcttcttctggagataactagaataatcacaaaaaaagaccgacattcagtaaaagtgtctgccatcacctccattcacccaccccagtagaactggctcctgcagcttccctgcttcctggcaccccactgtgaaaccatttctgacctgcagttgcagaataggtgtgacttgcatttaaaataagatcctcagcaagagaacaaagaagagcccagccgtctagagcgtatcgtacc

SEQ ID NO: 126587 - DNA, 580 bp, Homo Sapiens
  misc_feature (170)..(178): n is a, c, g, or t
  misc_feature (458)..(519): n is a, c, g, or t
tttttttgtgcaaaacttcctctttactgttcaactccttacaacttgcataaaggcgtcatttctacctcagagctgggggaagtcataattagtgtaccacccatgtgctgggcacagtgaattttaatgcctcccctttagaggagaggttatgataatgtgaagannnnnnnnnaccacaaaggttgtccggcactttggtgcaaaaaggattggtccaatcttgtgctggcttggggtacagaaaggcactgaagttggtggctcaaactcctctgggctggggtggggcagaggtgaacagggaagtaagtggtttgggacaggcaggtttggatgtgggcttgggttcttgctgacggaggtagttggtcctgcgtgggggatggggtggtaagggcagcttgagcctcaggctgggtggatgctgctgtgctggcccccatctgcccaannnnnnnnnnnnnnnnnnnnnnnnnnnnnnnnnnnnnnnnnnnnnnnnnnnnnnnnnnnnnngctggcgtggatgacattcctgctgatgtggacgctgaagtcccccttatggttcctgggg

SEQ ID NO: 126588 - DNA, 928 bp, Homo Sapiens
  misc_feature (65)..(73): n is a, c, g, or t
ttttgctgggcacagtgaattttaatgcctcccctttagaggagaggttatgataatgtgaagannnnnnnnnaccacaaaggttgtccggcactttggtgcaaaaaggattggtccaatcttgtgctggcttggggtacagaaaggcactgaagttggtggctcaaactcctctgggctggggtggggcagaggtgaacagggaagtaagtggtttgggacaggcaggtttggatgtgggcttgggttcttgctgacggaggtagttggtcctgcgtgggggatggggtggtaagggcagcttgagcctcaggctgggtggatgctgctgtgctggcccccgtctgcccagctcaccagctcactgctctggaaccacagctggatctcccgctgggccccctccacggagtcgctggcgtggatgacattcctgctgatgtggacgctgaagtcaccccttatggttcctggggcagcctcagccgagtcggtgtgtccaatcatggccctcgaggcgcggacgacattgtacccttcccagaccatggccaccacaggcccagagctcatgtagcggatgagggcagggtagaagggcttcctccgcaggtcctggtagtgctcggcaaggacgctctctggtgcctgcagcatcttcatccccaccagcgtgaagccccgcctctcaaagcgctggatcacgtccccaacgagccgccgttgcacgccatcgggcttcaccgccaccagggtccgctcccgggtccaggagggccctcccgagccgtggcgcactagcaggctcgggcccggggcccgcgggccgcagcgcagcccccgcagcgcggagcgccagaagaggccgcccatgacgcccggcccgcgggccgcgtgagcgcgatcccgggaattccggaccggtcca

SEQ ID NO: 126589 - DNA, 945 bp, Homo Sapiens
ttcttgtgctggcttggggtacagaaggccactgaaattgtggcctcaaacttccttctgggctggggtgggccagaggtgaacacgggaagtaagtgtttggggacaggcaagtttggatgtgggctttgggttcttcgctgacggagttatttggtcctgcgtgggggatggggtggtaagggcagcttgagcctcaggctgggtggatgctgctgtgctggcccccgttctgcccagctcaccagctcactgctctggaaccacagctggatctcccgctgggccccctcccacggagtcgctggcgtggatgacattcctgctgatgtggacgctgaagtcaccccttatggttcctggggcagcctcagccgagtcggtgtgtccaatcatggccctcgaggcgcggacgacattgtacccttcccagaccatggccaccacaggcccagagctcatgtagcggatgagggcagggtagaagggcttcctccgcaggtcctggtagtgctcggcaaggacgctctctggtgcctgcagcatcttcatccccaccagcgtgaagccccgcctctcaaagcgctggatcacgtccccaacgagccgccgttgcacgccatcgggcttcaccgccaccagggtccgctcccgggtccaggagggccctctttccccaccaggtgagccctggaaacacggacaaaaaggggcctgaagattgaagagggaaggtagcagggttctgtccgagccaggagacggggcctgtgctgctgtggagtttcaaggcctgtcgcttccagacccagggtcagcgctgagctccgccccagccgtcctcctctggaggggacgccgagccgtggcgcactagcaggctcgggcccggggcccgcgggccgcagcgcagcccccgcagcgcggagcgccagaagaggccgc

SEQ ID NO: 126590 - DNA, 1771 bp, Homo Sapiens
taagattctccttaaagagtctctattatagttacacaatatcaagacatgcatgtaggtctcgatcacaagttaaacattttaaactcatttttaattgacaatcttggaatgagaggtcacaaaagggcactaatttctatttttcaactgcagccaagcaaaataaacatgtgttgtggctctatataccccactctttaagctacctgccaggaagaagaatttcctcataaatactaagcaactttttcattacactgaaataaattgaagaaaacggagatttatttattcaatcagtttactttctgcaaaggtggtcattgtcattggtcatcttaaacctaaactgttgtattgaaaaatatttaaaatcaattaaaacttgaggattgtaagtaaaataaatattctgaaggataaggaggccaggcacttaagaccatatatacaatgctgatgcaggatcagccattacttcaagagtctcaggatcaacttcaaacagtcaaagttcttgtgaatggcggtggtcattgatggtggtgctcattgtcgatgtgtcttggcttactttacacaaaacaaactggcccaatttcaacgccgaattcctggtctgtgccgccaacatccacaggagcaagatctatgatgggcaagcgtgccacattctgtgttctatattcaaagacagtcttgcccacatttccattccgcttagagcaagtgtcttgaagaacgatataccggaatctaatatttccctctgctttgatatctaagtcatttgcccctttgagaaccacagcttttttgaggttcttagcttgatcgtccatgtatcctacactgtttttacagatgtaagtgatgttctgggaggcttcttttgataaaaggcgcaaaaaagtcatctgagtaatggctgtattaggtgattggtggtctccataagcgaactgagaccctctgttcatatcaagaccataccaaacaggtttattgtcaggagatttactggcccaccaggttttacgtggtacactggatgggtttgctgaaatacatgtttctcctgtttccatgttgcagtaaactttgattgcatcttcaacagatccttggttaggatcaatccagtattcaccactctgctttgcggaatggcaaagctttaggtcatcacacgtgcgggctgggtgctttttcgagccatcggggctgcgcatggtttcaatctgactactgagtgacttcagggtagcatgaacccctgggtccgttttgtttttgtcatcaggagccgcctgatcttcagtaaactcaggaagtggatctggcatgctttcatcatagtgccccatgatatccccaagagcagctgtaaggtggccagggggacccggagggccaggtgggccaggctcaccaggagggccctcaggtcctgcttctcctacactgcctcgtacacctggaggtccaattggcccaagtggcccagggtttccttctttacctgaaggaccaactgggcctggaggacctcttgggccaaatggtccagggattccagcacttccttgttcaccatttggaccaggagggccaggaagaccctgaagaccagtaaagcctctgtggcccttctgacctctgtcgcctcggtctccatgatcacctttgtcaccacgaggtccttggggtccaggtaatccacgtttcccagctcgaccaggtggtcctataggaccccgagaaaccc

SEQ ID NO: 126591 - DNA, 1084 bp, Homo Sapiens
ttcagattgtcaaaagcaatttaatttttggaggaaaaactgcatacgcagtacaacttatatctcaggcgaaatgtctcagaatcttcctgctcattggacagaaactcagcttcaccacattgccagccgggagaccatggaagggaactggcgccactgcccccagctgcccttcccaggggcaacttcaccaagatgtggaaatcctgggcccaccccacagtcagtcatcgctccatttcttcctggcaccaccacctccatctggcctgctccccaaccccccagaagcaggtgggcccaggctccaggccagtgcccccatcaagatcagacgtaaggcatcttcccaccgtcgctgtgctgcggggacttttccaatccttccttcctctctgtccagaggctgccaggctgagggggccaccgtccaggtggaacaggcacaggcatcggggaatcagatggtatcagtggggatagggcacagcactttcctgggagccatgtgacgccagatcttcctctggcagttcccactggctgtgggaagtggttttcataaagggggccaacttccaggaacatctagggctcgggagcaacccagcattgacagtgaatcagaatccacctagagctggccatggcccaggcagggggtgtcttccccacagcccccaggagtggctgcacctagtgggcgcagcatttggcctgcctcgcgggcccttgttcagagcacagctgcatcccccgtagagctggcctcctcgtcgctctctgcagtagctcttgggccactgtattgaacacctccgacacctggtggttcagtttggccgaagtttccatgaacagcaacttctggctgtcggcaaactccttcccttcctgaaggaaacagccacaaaatccagcgctgtttataagagagtttcctaaggacacctggttcacttccaacagtaagatccgagaaagctgcagccgtggagcccgcactcctccacgtttcgtgtccaagtgtgtttcttggcactcctgagcagccaggaccagggaggggcggggtgtgctc

SEQ ID NO: 126592 - DNA, 1016 bp, Homo Sapiens
gagtcaatcattcctgctttatatttaaactgcaaagacagaacacagagcattcgatttgaaaattctggacccatttgcaccagtccctgctgaccccacacccttccttcctgtcacagccagggctcactgtgcggtgactgcgaccctgggtgcaggagccgggggcccccgcaggacaggcacttggggggtggccttctggctcctctctgcagacaggcgctccaggcgctccgtgtagaaaccattgaagtcaagcctggagatgacgctggccatgccgtgctcacagtcactggtgctatagatgctcagccgggccaggaggtccagcaggtgggctgagaagttcttgtcaaacttgttgatggtggcctcgaagccggacaccagctgcacagtgtctgcgtgctcagccaggtgcttcctggcgagctccttccgggcccgctcctcggcccctgcgggcagccccaggacggtgctgtgctccagcgtctgcccgcccagctcgccatctaatttcatgctctgtgtaaatttctgcatgcagttggtgaacatgacgcacacagacatgagcttggagaagaccttcagcagctcggggttggtgagcatgcagtccttcaggcaggtgtccaggaagcctgtgtggtggccaaggacgtcgtcaatgttggaggcggatttcaggtttttctccaggatgtgccaggtcggttccatcacttcggaacatcatgtagtattgaatattctggacgaagttgagccttcgctgccgcagaggtgaaagcccagcaaaccactggggcggagtgcagcgagtgctgctgggcggtgaggtggctgatcccaagaagctggagaagctgcccgtccagttcttccattagaacacgtgcctgaaaacattggaaggagtgaggggctccggtaaggaagggaagggccctggcggttggaaaaaaggcccggcgcggccgcacacacgggggagaccccac

SEQ ID NO: 126593 - DNA, 2278 bp, Homo Sapiens
  misc_feature (525)..(525): n is a, c, g, or t
gagctgagtcaatcattcctgctttatatttaaactgcaaagacagaacacagagcattcgatttgaaaattctggacccatttgcaccagtccctgctgaccccacacccttccttcctgtcacagccagggctcactgtgcggtgactgcgaccctgggtgcaggagccgggggcccccgcaggacaggcacttggggggtggccttctggctcctctctgcagacaggcgctccaggcgctccgtgtagaaaccattgaagtcaagcctggagatgacgctggccatgccgtgctcacagtcactggtgctatagatgctcagccgggccaggaggtccagcaggtgggctgagaagttcttgtcaaacttgttgatggtggcctcgaagccggacaccagctgcacagtgtctaggaagcctgtgtggtggccaaggacgtcgtcaatgttggaggcggatttcaggtttttctccaggatgtgccaggtcggttccatcacttcgaacatcatgtagtantgaatattctggacgaagttgagcattcgctgccgcagagtgaaagccccagcaaaccactgggcggagtgcagcgagtgctgcttggcggttttgttgctgattcagacgctgcagagctgccgctccacgtgcttgcaatagaacatgtgcctgaagagcatctggtagcgagtgagggctttcctgttgatgatgagcgaaaggggccacttgacgatgtagtcgaaagagagcctccagccgctcagcgccagctccgtggggtcggcgtgcgccatcgccttctcctgcttggtctcgatggccaggacgcgcaagagctgagtgatgaggtcatggggcatcaggtcgatcttgaggtcgtccttgaaggggtcagtgttggccgtgctcatgcgcagcgccagctccaggagcgcttccaggcgagggggcgtgatgtcctccaccggcttccggagctcctcctccgcgaggtccatgaagtgcacgaagaagtcgccctggtccatgaggaagtagcgcttgatggacctgaggtgagccaccagctccttctcctccatcaggaagtccagcagcaccttgctggcgtagttaaacgccttctcgatctgctccacatacgcccgcttttttaaggtgtagatgatctctttagcccaccgggcaggtgacgtcatggcccacactctctgaccacatttagatattttcctgtgctgaggatcttgtccgccattttctgcaggaaggacgggatctgctgctggacgatggtgtaccgctggtcccagtacttgtcgttgtaatcctcctggatcctctccttccgcagctcgtgctcctcgaccataaactcactgtatgggtcgtggatgatgcccctgtagatccacttctccagaacctcgaagtagggagcactggccgccttggttaggtacaggcatagctcctgcgcctggctgtcccctgtgtagctgaagctcctgtcgtggagcaggctcagcgtggaccccccaagacattcgcctttgtccaccgaggtggcgagggaggccaggatgtccatggtgcgcatggctggctggatgtagaaccagagcttctgcagcgaaaggaggccctgcctgtgcagctgctccagctgtgacaccagaatcaggtgctccttcaccagggtgcgcatggcggccgccagggcgtggttcacctgcccgtactcgaaggaagacttctcttcaatgaacctggtcacagcggagtagctggcggccactgggaggatcctgtgcaccagctccctgatggacaggtccaggttggggtccacgaggaaggtccggctctgcctcccagccaggggctgagcactgacgtacctcccgtccacgcccaccagcacgtacagcaggtcctccaccacggccgactcctgcgaggccaggggcaacgtgcctatcggcaaagcggtgtctgtgctgatgccagcaccaatcaggaaatccccgatcagggcaggtctctcatacacccatgctgggaagatggggaggtgctggcctgaattttttttgttctgcttgtctcgaagcatctttcttttaagttccagagactgctgcagcgttggagcctgtggccacgctgccaagctgcttcctcagttcctcaagctcctcctcgtgccgaattcgccacccaggcctcgctacgttgggggtttgtggtatcgtttggtggtttt

SEQ ID NO: 126594 - DNA, 1124 bp, Homo Sapiens
gaggcccaaaatcctttcccggggaagaaccaattcatggacagggtgaagtaacagattttatgaaaagacctcctggaagtttccaattaaccaaaataagtgtcttcccaggggcacaggcggcgccaggggtgttcactgccctactcaaagaagatttctctccatgaacctgtcacagcggagtagctggcggccactgggaggatcctgtgcaccagctccctgatggacaggtccaggttggggtccacgaggaaggtccggctctgcctcccagccaggggctgagcactgacgtacctcccgtccacgcccaccagcacgtacagcaggtcctccaccacggccgactcctgcgaggccaggggcaacgtgcctatcggcaaagcggtgtctgtgctgatgccagcaccaatcaggaaatccccgatcagggcaggtctctcatacacccatgctgggaagatggggaggtgctggcctgaattttttttgttctgcttgtctcgaagcatctttcttttaagttccagagactgctgcagcgtggagcctgtggccacgctgccaagctgcttcctcagttcctcaagctcctgcatggagatcttggaggccgcggcagggacgttgatgctggtggtactgctgcccacagcagcggctgcaagctcagctctttcttttgcattctgttgtaagtactgcagagtctctttgtcttccgtgagctttgacaacaggtacaccagcgggtcaaggttccttgtatttttagatttcagttcatcatatttctttagaaagtcttctggagtacgagaaaactctgcaattttaaccttggcactgtgagcagagacagtggtagtgacgtacggggtcctgttcttttgaagcaggtcaatgtagacctcagccccatctcctccgtggacacgcagcaggctaagcagttcattgacgtcatggtgaatccgaaattcactcatagttttagctctgaggcacgaacatcacaatatgttctccgcagtcccggagccacagcccccgcgcagcccccgacgcctcgtgccgaattcggcgcgccttgacttcatactctctcgcccata

SEQ ID NO: 126595 - DNA, 2884 bp, Homo Sapiens
  misc_feature (39)..(39): n is a, c, g, or t
  misc_feature (147)..(724): n is a, c, g, or t
  misc_feature (757)..(774): n is a, c, g, or t
gatcagcgtataccgatagcgcacgtcggcttacggggntgtcacacaccagctgagcgacgactcaccgactggtacctcagctgagtatgagaagccccgcttcccgaaggagaaagcggacagtatccggtagcgcaggggtcnnnnnnnnnnnnnnnnnnnnnnnnnnnnnnnnnnnnnnnnnnnnnnnnnnnnnnnnnnnnnnnnnnnnnnnnnnnnnnnnnnnnnnnnnnnnnnnnnnnnnnnnnnnnnnnnnnnnnnnnnnnnnnnnnnnnnnnnnnnnnnnnnnnnnnnnnnnnnnnnnnnnnnnnnnnnnnnnnnnnnnnnnnnnnnnnnnnnnnnnnnnnnnnnnnnnnnnnnnnnnnnnnnnnnnnnnnnnnnnnnnnnnnnnnnnnnnnnnnnnnnnnnnnnnnnnnnnnnnnnnnnnnnnnnnnnnnnnnnnnnnnnnnnnnnnnnnnnnnnnnnnnnnnnnnnnnnnnnnnnnnnnnnnnnnnnnnnnnnnnnnnnnnnnnnnnnnnnnnnnnnnnnnnnnnnnnnnnnnnnnnnnnnnnnnnnnnnnnnnnnnnnnnnnnnnnnnnnnnnnnnnnnnnnnnnnnnnnnnnnnnnnnnnnnnnnnnnnnnnnnnnnnnnnnnnnnnnnnnnnnnnnnnnnnnnnnnnnnnnnnnnnnnnnnnnnnnnnnnnnnnnnnnnnnnnnnnnnnnnnnnnnnnnnnnnnnnnnnnaagaattcggcacgagggccgcggctgtaggcnnnnnnnnnnnnnnnnnncatttggttctttttattagaaactgagaatacagcaagtagggaaatcccacatcaatggaaccatcacacagatgcctttctggaaccccaaccttctatgatccccaaaaatgtgctttgtggctttagcataatttataaaggggaagagggaaaatactgaaaaaggccactatttaatggtgaaagaatgaagctgtagaggtcccaaccagcctagggccaaaaaagaaaattaaaaatctgcacagagcaagcaagcctctgactgctgagagtaaggcattcaggcgccaacctggtgagagttctcagcgagcactgtcaggtcaagtgcacatgaggctgttggtagtgagctgcacgtagacacacacatagaaatgggcacatgcccacatacacacccgaaaaagggagattttactggattacacatcagtgatgttaatttcatttttcctaagggtttgtgctatgttgaaccagatccttccagctttggggtgtgggtgactgcacccagaggctgctacttctgttggtgttgtgacagggctgcacctatacgctgtatcccaaagtgcatgaccgaagagcaagtctggcttctgatacgtgctgttgctcccaagaaactaagtgggcttctgtccaaatggccactgtcctgctggactatgctttctcaaagggattaatactgttctttattctgtcaggcactgcaccagttcatccactgagtcttttgctcggtccacctagcacctagggacagtgaccttatccagaaccaaaacggttcaagttcttctcaacttctacactggattctttcttcctagatcccaccttttgctggagattgcaagggcaagggaggaaaataactgagaaaactctattgaataaataggagacccttcccatattcccaaacacctactgaggacgccagtccccatgctcaggacctccatatttagttctaatacccacaaccccaggatataatggagtcatcccaagtctttgatgacagtaacctaagactcgagcactattttggtggttcacctatgggccaagatcagaattccatgaaccagatcctttccccaccactttctctgacaccgtatcaggtaggcctgtgacatgagccatcgtcttgtacctcactcctggcaataacataccattgtatttaaaatgccacaccactcttatccctgtaaagtgaggttcagtgagtgctgacaactccgtactacaactggctttaagagttctgctggctttcttattcaaggagagccgaggtgtctgtcacatccaggcttaccaagacagtgtaccagaggtaaaactcatctttcctaatccaaaggaagggtctaccaatctatgtagatgagctcaggagaaacctggacacgtcagaatctcatttgtggctggctcccatgccaagaactatgtcagagaaaggtccatttctattccctcaaggaggaagtgtagttagggcagtgatttttaatagagggaaatttagagagtgttccagagctccacagcaaggatatggaaaactgtcccatccctctaataagacttcccataaaagtgagcgggatgccaggaagtaatcagatcagcccatgctaatgtttctagagctcctccatggcctccagcacccctttaccagctgctaggagtgtgtcagtctctcaaatgacaatgacaccctaactagagcctttatctaacatcctgtcacccactcatgtgctgcttccactgagaaaacacataccactcccctctacctcaggcctcccaaagggagtggtcatgtcaccactgggctagggctatactctctgccccattagggtccaaggtatgtcagcctttagaaggcatcttggtgcaccaagacactgtacattccggggctatcacctgatcctacagtcactttttgtgcaaaattcaaacagtgtgtggtacttgcatgtttcatcctcgtgccgatttaacaccccggcctcgctacctagactgatctttgctgtgttgttgttttgtgtgctga

SEQ ID NO: 126596 - DNA, 1046 bp, Homo Sapiens
tatctaacatctggcacccagtcatggcggcttcccctgagaaaacacaaaccactcccctctacctcaggcctcccaaagggagtggtcatgtcaccactgggctagggctatactctctgccccattagggtccaaggtatgtcagcctttagaaggcatcttggtgcaccaagacactgtacattccggggctatcacctgatcctacagtcactttttgtgcaaaattcaaacagtgtgtggtacttgcatgtttcattctatacaaaaattctccctccctcccttacccctatgttttaaacatttatataaagtcttatttaaacagttagaaatcttatttacattaatttctttgttctcccaaaagagcatttaaaatcacactcccaccccttatcggatataaatgttcacttaaattggtttgtattattgtcatagagagagagaaagggagaagaaagaaccaccagctaaactgtttcgccatcttctacaaataaatatgatatggatcagaagccagtttgccaagggtcttgcagagcccgcaatcagtagatcccaagaataagccagggtttgggctatgtctccttttctcccaattgatgcactccatcctttgaggtatgatttatttttgtttttctcttctcagtcatgtaccacgcagagcccttgggcgttcacaaagcccacgaggctgtcaaagttttggggctcctctggtactggcatcagtagccagcagggaggcccgcaagtgccgcaggccctggtttagggtcatagtccctggagactggtaggtatcacagtgcatcctcttcactgcagcccccgccgatcatgaaacgaaactcctggaggtttgagacaccatggaagtgaacaaaagctccagcaaccacaaagatatgaaacagctgatgagagtgaaaccagatgtcacatttgccagggaaaaagcgttcggggatccgggcagcatacagggcagctcctgtgatgtagaggctgggcatcagcatcaa

SEQ ID NO: 126597 - DNA, 693 bp, Homo Sapiens
ttcatttgattgtataaataatttatttctgttcacagcatcatatatgcattataaaaggctatggaaacaaaagagaaggatgatgagacagagaattacagcagtagaaaggaaaacagaaaccagggcacacagttccaacaccagaacagagaatttgggaagataattgctctgaaacagaactggcctccctgtgtctattagaaaacatttccaaagctcacggagggaggccaacttcccctatgggaaacccattcactcgccaaagggcagaaggcatcataaatcacccattgatacattggtggggggctccctgtccccctggtgaccactccaaggtgatttgatctgtgcttcctctgttgggtcagagacgaaacgggctattattaggtcaaacattacagaaatcaactgagactcttaactagtagttgatacaccacagggctttactttactgcacaattactaacagttgattgcacccttaagtattgattatgcaaaaaacaaaatcatctcgcatcagttttacagcatgacagggtttgaacagtgatcttgaacctaagtattgttatcatgagaaggttacagtatttggcatctgcaatgtcacacaataaatatattattctctcaatagtgtggaactaccaaaatgtcaaagtgcttaag

SEQ ID NO: 126598 - DNA, 459 bp, Homo Sapiens
agagatgtggcctgtctatgtggaattgaccaaatgaaaagatatatggctgcgatttcattgtcagtgctacaggaagttacacccaaatgtagaacctttttctccatggtaacagtgtaaggtgaaatttttttgtccagctgtgaatatatttgaagtatttttgtgaagatctctaattctcaaacatgaataattattattttagtgtacaactgtaacttaacatggttggaaacagtttggttaaaacattgtcttgatttacggtattttttactgcttaaaatccttacatagttatatccttgcataagcgtcatcagtaatggtttataatgtacaatttatttatctaaatgttggtaagagactgacacctcccgtgacttctcaaaaatgattcttttagagaaaccatcttgtattttttgcttttcagcacttgaagcttac

SEQ ID NO: 126599 - DNA, 1080 bp, Homo Sapiens
  misc_feature (26)..(26): n is a, c, g, or t
  misc_feature (42)..(43): n is a, c, g, or t
  misc_feature (49)..(49): n is a, c, g, or t
  misc_feature (55)..(55): n is a, c, g, or t
  misc_feature (59)..(59): n is a, c, g, or t
  misc_feature (67)..(67): n is a, c, g, or t
  misc_feature (69)..(69): n is a, c, g, or t
  misc_feature (77)..(78): n is a, c, g, or t
  misc_feature (89)..(90): n is a, c, g, or t
  misc_feature (96)..(96): n is a, c, g, or t
  misc_feature (104)..(104): n is a, c, g, or t
  misc_feature (125)..(125): n is a, c, g, or t
  misc_feature (142)..(142): n is a, c, g, or t
  misc_feature (179)..(179): n is a, c, g, or t
  misc_feature (233)..(233): n is a, c, g, or t
  misc_feature (298)..(298): n is a, c, g, or t
  misc_feature (316)..(316): n is a, c, g, or t
  misc_feature (342)..(342): n is a, c, g, or t
  misc_feature (351)..(351): n is a, c, g, or t
ggccttaagcgccccccaacccgcgntatgggctcgaacgcnntgggtnggcctnttgngcccacancnggccccgnnggccccattgnngggcantacggagnccccgggcccaataaccaagntgccgcccaacaccggntacgccctgcatgacccgtcgcgaccgcgcgcccccnccgtcacccgtcggcgcgcgttcccccacgcagcagacgacgtgcgcccccggnccagcccacctgtgcccgctcgcatgaccgtgcgcgcaccgacgggcgcccccgcctactccatntacgcccgcccacgccgntcagcgcccttcctcactccgggacntgcagtacnttcccggagcgagcggggaacgcgacgtaccccagtgcgcctcggcacaccattgctccccgaaactggggtgtccaggcggaacagcagagcccaggtcccgcggcctatacggtgccctcgctcttgggtccgcgcgtcatcggcaaagtctccgccccaacttgctccatctacggccgcagagcggctggcagtttcttcgaggacctcagcaaggtgggggaggggccggggcggacgcagggggtccctggtccgcggcagtggaggcggcagccagcaccctctgccctctcgcagaccccgggcccctgcgcctatcaggtcgtgagtccaggggtctacaagtcccgggccccccagttcacgattctggcgcggacttcgctcccccaagacaacactcggaagccagggcccgcggcctacaacgtggatcaggtggcctggagcccagggtcaagggtcagagtcaggagagtggggagggcctgaggtcggagtgatgggatcagagtccccgggggtccaggggtcccggcgcggagaggatgccggccccgcgaggtcagcggtgtctccgggcccgcagcaccggaagccccgcggctggagtttcgggatccggcactcggactacctggccccgctggtgaccgacgcggacaactgacccgccaggcgggagcggccccaacacgtgtttgcttaaagtctgcgagtccg

SEQ ID NO: 126600 - DNA, 660 bp, Homo Sapiens
tgcggccgcgcgcccccgccttcaccttcggcgcgcgcttccccacgcagcagacgacgtgcggccccgggccaggccacctggtgcccgctcgcatgaccgtgcgcggcaccgacggcgcccccgcctactccatctacggccgcccacgccgctcagcgcccttcctcactccgggacctggcaggtacttcccggagcgagcggggaacgcgacgtaccccagtgcgcctcggcacaccattgctccccgaaactggggtgtccaggcggaacagcagagcccaggtcccgcggcctatacggtgccctcgctcttgggtccgcgcgtcatcggcaaagtctccgccccaacttgctccatctacggccgcagagcggctggcagtttcttcgaggacctcagcaagaccccgggcccctgcgcctatcaggtcgtgagtccaggggtctacaagtcccgggccccccagttcacgattctggcgcggacttcgctcccccaagacaacactcggaagccagggcccgcggcctacaacgtggatcagcaccggaagccccgcggctggagtttcgggatccggcactcggactacctggccccgctggtgaccgacgcggacaactgacccgccaggcgggagcggccccacacgt

SEQ ID NO: 126601 - DNA, 1268 bp, Homo Sapiens
  misc_feature (364)..(364): n is a, c, g, or t
  misc_feature (1150)..(1184): n is a, c, g, or t
  misc_feature (1188)..(1227): n is a, c, g, or t
gccccgccttcccaaggtcccacattttaagtgtttggtttcgggaatattcctccgggggtttgtcaaaaattttccccatccctgtcttggccagggatataaaggggtgagagagttttgcccatttggagaggccctaaacctgcgataacctgtaaataaaacgcggcccaggattgggggatttcctcgggttttgatattgctcccatgcacccattcccagaaagggtagtaccaagcttggccacccggggtaaaacttccgtcccagaaccctgtgttctaatcgcttctttgtcttcttccagttgcttattatgcttgaaggagtcgaggtgggtgagaactcccataattntaggaaagccatgtacttgacagatgtttagaaactccaacgtttccatttcaaaccctaagctggcatctataagcaattcagtaccagatctgctacttcagccagatcaatcatcatgttaatgtcacacccacattcaataatggtgagtcggagctttttacctgacacgatcatcacagggcctctgatctcggtcaacttctgccgggtgaagttccgaatgaggcattatatcaaagtgctctttccaactttggaggccccgtcaccactaccactattggtgggggctctagtggagttcgatcaaccactggaatatgatgcttttttgtcttcaaatcctgagtcctgtgaaaggatcgagccatccacacagcagactgaactgcaaaagctttgggatttctcttccgggcatcttcttcgtctcctagctggagatcctgcagatgccgcttctttttctttgcagctttgggtccactatttttctttctttgtttcttctggtccttagtctccatagtggctatttaccaataacaagtaattctaatctccggcagatgcgaaatatgctgctcctcaggaggaaagatgacccggaggaccgcgggaggaccttcccactcgcgatcttcccagtgccccaaagccagggaccccactgccgcctaccccagcccgcggcaccgaacctgctcacaactgtgactcctcaggtcccccggccgtaatggccgaattcccgggcatatgtccggtaccgtcgactgnnnnnnnnnnnnnnnnnnnnnnnnnnnnnnnnnnncggnnnnnnnnnnnnnnnnnnnnnnnnnnnnnnnnnnnnnnnncatacaagcgagctagcgccctataggtgatctatacaatt

SEQ ID NO: 126602 - DNA, 889 bp, Homo Sapiens
tttggtggagggccaaagggggggtgggattcaccgaggtccaggagttttaaagaaccattccgggcccaccatgggtgaaaccctttcggcaaatgagtgtaactgttcatcaggtatgctcaaagatctatctgcatctctttgtgtgatatgatgaggtatctccaaggtcacaatggtttgtacagttgcttcttcttatttctacaacatctgtttgagagttcctctggaatattgtgcttgcctctggattggcagaagggttaaactccaaagcatctgtttgagagttcctctggaatattgtgcttgcctctggattggcagaaaggttaaactccaaagcttcaggcatctcccggtcacgaacctggtgcatgtggaggtcctcaccaacttcaacagtcacctcagcaggctgtacagcagcagccatgggcgctcctgccatcctgtcctcagctcctgcctcatagatctcagattcagagggacacaccgacccctgctgctggtcaaactcgaggctgacgcttaagctccctgacttgctgctcgtcctttctctggcaaaatctcatccttggatgagcccgactttgtgtttgctcaatgacaccactcacccttgattatctatagcctctgacccaagtggtttggaattggaaagcagcatcactcgacttgaagccatcttggcatcaatggtggagtaggtggagatgagactctggaccagctcatgggtgagccccaccttgtcctggcatgtgaatttggcttttatttttcaagtgtgctcctcttaaataaccataaagtgacacctgcaggtcacatttgcctcgtgccgaattcgccacccaggcctcgctacctt

SEQ ID NO: 126603 - DNA, 1280 bp, Homo Sapiens
  misc_feature (242)..(267): n is a, c, g, or t
ttaaaatttttccccgggggtttatcctgccagcgcccgattcccaattaaatggccaggggttacaccctgggtttatttggaaaatttaaatacggactcccctaataggggagacccggccagattttaccccccttttgttccaaggaaaagttgggttcaggaaaacagttagtgacccaggtgccattttcattcccttcttttcccgcaccccgacatagatgcctggaggtttnnnnnnnnnnnnnnnnnnnnnnnnnnccaatgctgccagctgcatttattgtagcatgtacaaaccactcacagccagcgcctgtcaggggcccaggacactggccagcggggccaaggagccacattgctgggcacatgccccataccctggccacccggcagcagtgcccagcatccctcaatgacagagcagccaggaccccagcggtgactgtcccagagggacctacaggggcatggggccaaagctgggtcctgcaccttgtttggcctgcagatttgatttctgaattaatttctgccaacaacttaaaaaatcaggacatctcacatacaaatctgtatttctggcttctccagatttctgtcattaggcctgcattcccacaccagagcaattagctacacctgaatatggcagcggccactgtcagacggggacccgtgctctcccccccatccccaccgcactctcttggtctcaaggaaagtggctgttaccgactagattgtgcgaactttctctcatcacgatgtctttgtctccagcaacagtgggaaagtcaaagtgaagcaggctcccaactcaagggcctgtttcatccatttacacaacatacgtggccccaggggcatcggagtttgagatctctggaccagcccagggagggggcggcaggatcactccacacacaccccttcacatagctgatgaggcggagctgagggcagcagccagccttcccaagcctgagccagttggctctgagaaattcccaaactctccgaaccccagagcgctagtaggcaggcacaggctctactagagtgaggttgcgggaggaagccagacccagggagtgtggggctggcgtgccctctagtgcccatcaggcagctctgcagccacggcgaagatgctgaacttgactcctaggagtcaaccatccagatcccccaaacaggctcccgccagtcccatggcttccagctacttcttttgccctcgtgccgaattcgccacccaggcctcgctc

SEQ ID NO: 126604 - DNA, 204 bp, Homo Sapiens
  misc_feature (115)..(129): n is a, c, g, or t
ttttttagggttcagttccagctgattttatttccttctcaaaaaaagttatttacagaaggtatatatcaacaatctgacaggcagtgaacttgacatgattagctggcatgannnnnnnnnnnnnnncccccaaacattgtttttgtggccttgaattttaagacaaatattctacacggcatattgcacaggatggatggc

SEQ ID NO: 126605 - DNA, 616 bp, Homo Sapiens
  misc_feature (105)..(118): n is a, c, g, or t
  misc_feature (514)..(530): n is a, c, g, or t
tttggtagttgttgttacccacgccattttacgtctccttcactgaagggctagagttttaacttttaattttttatatttaaatgtagacttttgacacttttnnnnnnnnnnnnnngacaagagagatgaaaacgtttgattattttctcagtgtatttttgtaaaaaatatataaagggggtgttaatcggtgtaaatcgctgtttggatttcctgattttataacagggcggctggttaatatctcacacagtttaaaaaatcagcccctaatttctccatgtttacacttcaatctgcaggcttcttaaagtgacagtatcccttaacctgccaccagtgtccaccctccggcccccgtcttgtaaaaaggggaggagaattagccaaacactgtaagcttttaagaaaaacaaagttttaaacgaaatactgctctgtccagaggctttaaaactggtgcaattacagcaaaaagggattctgtagctttaacttgtaaaccacatcnnnnnnnnnnnnnnnnnataagcaaaaacgtgccgtttaaaccactggatctatctaaatgccgatttgagttcgcgacactatgtactgcgtttttcattca

SEQ ID NO: 126606 - DNA, 977 bp, Homo Sapiens
cagtatctcacactgtactttatttttcttcacaatattaactagacagacaaggaaagtttaatggcaatgtgactttttccaacaacacaaacaaagtgccattatagctaatggtggccaactggagacttactttaccttaaccatgtaaagtatccttaccgtattttttatgtgtacagtgttgcagaatatcagccacctcttaaaagtatcaatcttaaaaagagccatggaaggtaaaagtatgaaaatcttgataacaaaagctttcaatacaaaaacacttattgtacacttatttttatttaaaacaaaaataaccccagtaactcaaaacaaaagcaaaccttggttgaaaacttaagaaggtataataaacaaaaccaccaaaagaaagcttccccaaaagaaatgcaatccactgtcactcttgcaaattctaccttggagggaaaaacttaatgaaatgagctatctggagggcccacggcagattttccaaaaggtttaggtgcatggatttactcagtatctacactacagtcttatttattaatagtctcagaattttcttgattgagcgagcctttccatcctccaccaagtgttcccatcttctgtgctcagcttggtatgcagaaccacacttgtttttgataggatgtttgcttgaaagttatttttactggggcagtcccgatgaaccggtacagtaccattcatgctccatctgattttctttgcatccagtgagatgcatatttcatgattgtccaaggtcatggttgtccaaagacatggaacagaatgattcactgggtaagactaaaggacttgtattatcactctccaattcagtttcacattgcttaattttataaaatttttttctgtattgtacataataaacatttagaaacagatgtccctaccaaccagaaggttgtcattaaatatcctgttagttaaaa

SEQ ID NO: 126607 - DNA, 878 bp, Homo Sapiens
cctgtttgggcccatttattgtttattttgaataggtaatacagtcacatggttcaaaattcaaaatgtacaaaagggtgtaagtgttaagacccttccctctcctgtcctcaacctactggttcccctcccaaaagtaatcagtgttacccatttattctgaataggcatacataagcaattatgtgtttatattctactcctttctgaaacacaaatgggaagtgcgctatacacatttctgtggcttgcctttttcacctgaagattattacatattagtatataaagacatacaattattttttagctgcatactattgtattgtaaggctgtatcagaattgatttaaccagtcctttagagaaaaaagtttctgttgtttctcatctcttgctatttctttgtccccatccccaatccagacctcaggagggacagcagtgatgggaatggagcccaagcctggaccaggccaggccctgccccacccaggccaggcccctccccactaggccagacccccacctcacccagggcccagctcattcgcatgcctgaatgtgattggacagcccctcctggctgggtggctggagttgtaggggctttggcttctcatctttgatgcccaccctttgtttccactccagcctcccaaacaggctgttgcagaatacagagccctggtacaaatggccattcttcattatcattgcacccccaaatcacttgaaatgctaacttgagctgctgctgtcacgatgaccatcctcctctatagagagcatgaggcaggcagacacaaatgcacagaagcagctgtcctgaaacacacccagccccaggaacggggtaggagcaactcctactccca

SEQ ID NO: 126608 - DNA, 2473 bp, Homo Sapiens
  misc_feature (611)..(645): n is a, c, g, or t
  misc_feature (2410)..(2410): n is a, c, g, or t
cataaaaattctatggaataatcaatttattaatgtatagaataattaaagatatttagaaaattattggtgaattatcttatgattaataagaacttcctatttatgctcaagaaaactcagaaatgtttagaaggataaatgaataaccaagccctttatagaaaaaatatacactttattttcaactagaaaggtgcaaacatgtaacttttggtcacactctcaacaaataaactgtccgaaaaacagtcatatcaaagtagaaacaaatgcttccaggtgaaaaaactgatcagctatatagagtcactcagtttttaataaaggccatttgttcattaaaagtgaggctaccacatttcctacctagaaatcagcctgccaaggacactgatgcctcccctttgcaaacaatctgttttgacggactgtcattctatctgagcagaatttccatataagtatccatttcatgctttgaacgatcagacaagctttacattctacctatggtgttcagaaattgaggctaacattgaaatatcaaagcatttaaacacaaattataaaggcacaaacaactttaaattaacttagataactgtacnnnnnnnnnnnnnnnnnnnnnnnnnnnnnnnnnnnatatttacaatataaattttaaaaaatctggcttgttacaggcaaattcacttgccacaagctgtccagtctaatcgacaggattccgattcctgaacagtgtcattcgaatcagaatgtcagagctgagtctgctgttctgacttaaggaacaacttgactcagtctcttgatggctggagaatgcacatcctagctgtcactggggctacaggcaggtcagtgagcacgctaaaattttccttctcaattacacttcaaatagcaggcatattactcgtataagatgctatctgatgatactaacctttctgctggtaccctcccactgctcctaaagccacaccttaatatacattctggtgctgtgtactaatgtagttccactgtcaagtcttaacattcttcaaaccagtgtctggggttgatagactatttgtttgacatggcacaatgttttgaattgggtgggaatcttttcccccagttagaaaaacagatttaaataacttgtgctactgaaatcatttttacggaaaaatgagatgtgaatcagttcaagttccagtctaatgagttaatgtctctcactctctggcttcatgccatgtctccgtacatcttcctgtagtacagcgattcaaagatgtcattgtctccgggacagttgtaatggcaggcacaggtcttgatgaacatcatgttcttcttcatgacctcgccgtcagggcacttgaactccaccggcagggtggtggttctgtggggggtgcagcatcggccgtcggtacatactccacagaatttagctcggtatgtcttcatgctggtgcagccagaaagctcaaacttgataggcttggagattttgggagtacggatgcactttttgcccttcttaatgttctcttccaggtcagcttcgcaaggcctgaccatgcacaggcggctctgcttctctagcctgcaggaggcgttgtcattggtaacccgggtggagatgcccatcccacaggtcttggaacaggcgctccactctgtggtctggaccaggcagttggctctaatcatagttgggtctgggccaaacgtgtcttccagtcggtaagccgcgagggcaggcccaaccacggtttggtccttgggctcgtcacacacccactcctcgcagcatttcccgggcagcttgaccctcctcgggaaggggcagtcagggctgggcagacgaacgtccatgctgcacaggggcatgcagcccaccgccccgtccaggcacgtgcactggtacttgcagctgctctggaaggactctccgctgcggtacaccgtaccaccgaagatgcagggagcaccatctttggcggtgcacacgccgatcttgcggttggccggggagccgaagtcacagaagaggcccttgtgcgggtcgcaggggtcgcgctcggtgcacagctcgcccagctgcttggcgcagacgcggcagcagccgcagccgtccagcacgaggctcacgcccgccgggcagcgcggcgccggctcgtccgggcaccggcacggcccgctgcagttctggccgacggccggccggctgcagagggcgaggaggaccacgaaggcgacgcggacggggcccatactggcggcggtcatggttggcactgcgggcggagcggagggcgcggtggcggcgagcggggagcggcggggcctggagcgctggcggtggtcggaggtggggaccgggacgcgccgggctgtcgtctcnggggctgtcggccggggcggctgccgtcgagctggagggtggagtcgcactggctgtctcctc

SEQ ID NO: 126609 - DNA, 579 bp, Homo Sapiens
atagaaaaaatatacactttattttcaactagaaaggtgcaaacatgtaacttttggtcacactctcaacaaataaactgtccgaaaaacagtcatatcaaagtagaaacaaatgcttccaggtgaaaaaaactgatcagctatatagagtcactcagtttttaataaaggccatttgttcattaaaagtgaggctaccacatttcctacctagaaatcagcctgccaaggacactgatgcctcccctttgcaaacaatctgttttgacggactgtcattctatctgagcagaatttccatataagtatccatttcatgctttgaacgatcagacaagctttacattctacctatggtgttcagaaattgaggctaacattgaaaatatcaaagcattaaaaacaaaaatgagaaggcacagacaactttgaattaacttagatgactggacatagatatataatatacacgcacacacacacgcagtatttaccatataaattttgaaaaatctggcttgttacaggcaattcacttgccacaagctgtcagtctaacgacaggattccaatcctgaa

SEQ ID NO: 126610 - DNA, 1147 bp, Homo Sapiens
ttttttctctatgcagtccttgtttcctgccatttaattttagatgaaaatgagacatatgagtacactgaaaagtaacatcaccatctggaaaattatacataaggaaaatgcaataagggaatatagatccttcagcccctattccagtactctttaacaactctgcttccttggacgggaattcatgaggtataatacttaaggagattttcatctgtaggttttaggattttcttatcggccatattcaccacccatcctggagcaagaccaaagaaaatctgccttggatccttcctagtacagagcattttgaagagttcatctttagtgatatcaggtaagatataaccatacttcctggcgagttcaagtcgtgcttcaggaaatttggcaggatccgccaggtacccacggttctttgcatcagtgtaatatggtaccagttcttctggtggaagcattctttttggaatgggttgtccacgaagaaagaatggaacaggtttgcatacaatgtccagacttcttggatcatagaaggctgtagtaacaacaccaccatttttttcaatggcagcaatagctagttctgaagccaactgtacttcaatattaacttttgccgtaaaggtgtcagcaccctcctcaaccagctggacaccataatcccttttaagtggctggatggtcacacctctcccattgacaagctgggttaagtcaataggttgactaggatcaacacgacccaaatcaataagatactgcagtctattgagactcaaaggcttatactggcgtctgaaactatgtccttcgttaaacccgtattttgggattcggatgtaaaatggagtctggcctccctcaaagcccaagcggggccgggttcctctttgcctttctcctttatggcctctgccacattttctacctcttctccgacctcttggtcttctctccggtttcttggagccgggattcggctttaagttggccaggctcacacgcggcaggccccggagtaggtccagggcccgggccccaccgccctgcaagggaccggccataacccgcagatccaagaactttcaagggcgccctgagctgctcggaggccacgtggtctcggcctcgtgcc

SEQ ID NO: 126611 - DNA, 2111 bp, Homo Sapiens
  misc_feature (217)..(226): n is a, c, g, or t
  misc_feature (500)..(508): n is a, c, g, or t
  misc_feature (648)..(744): n is a, c, g, or t
cggcggcgggggggaagaaaatagtttatagtgtggttccggccaccaactcccacggggggggatgtattcgccccctctgttggagttcatagcgcggcgcgcaatataggggaaaaatcgtgttgttgttaccacggggtttttcgccgcggggaaaaagagaaattatattggcgcgaggggggcgacaaggggggtgtggatatccgccccnnnnnnnnnnttgaaggtttcaactcaatcggggggcttcgtgaaaataaaactttacccacggcgggcggccgggaatgcgctttaaggggacgttttcccccgcgttgggctgcacatataaattttcccacgctggggcgggcgggcgtaatttttgtattttcggaggtctgcgcctgggggatcccccggtcggtttaggatccccgggaaatggcccccgggaaacccccctctgggaatttttttccaaaaggccctcgtttgccgcgccggggggnnnnnnnnngggggaaaggccccaaccccttattttgggtcccgggtttccggggaaaaaaattgggaccatgtttccttcccttatgggcccgggccgcaaaagaagggtttgaaaaattttttgagggcggagggggcccccaaaannnnnnnnnnnnnnnnnnnnnnnnnnnnnnnnnnnnnnnnnnnnnnnnnnnnnnnnnnnnnnnnnnnnnnnnnnnnnnnnnnnnnnnnnnnnnnnnnaaatataagaaatttattaatattattaattgattaataattgatcactgccatatgacttggattttacatttccaccacttcttcgtgttacttctttctaccctattatatcagcgtcccatcccaagtctgacacacctggaagtattgaatgttgtattttgattgtggatgacttgtttatttggttatatcttttgaacgcctcaggtgattctgtctgtctttggaggatgggccataggcttcctgccccaactccattatctgttttccacaaagatagataaacattcacttatcagactaattcagcaaagcatacacgttcttaggttcttagcaaaccaagtactttgtccacctctcctctccatctcccctccctcaaatcttcagtgggcagatgtgggagaagaaaggagctgtcactccaaaccttctggtgtttcagttggggagtctggcttcacagtgagctgaaactttcccttgccagcctccatcaatccagccccttctgacggggctggagagtaattaacatcgccgtccacctgtgcacaggaagatgcctacagccacaccagcaatgatgaaactgcccaccaggacgcccaggaccagcgaagtgtaggagcggcttgtttggctccctttcgtgttttccgcggaaatatgtttctgcacatactgcacacaggtgtcctccaggaattcccgcagttcataccgagtgcggttgtaggcattgagctgctgcagggtgaaggtgaccactccggaggtgacctgggtgtctgcctgccacaaggctctctccggccggaaactcacaaaggagctcccattcacagccacttcgaagaagacatgggctctagagccctcgggaggcagctcacagcccaggaagcagcggatggtcagaggaaaggccaaggtccgctcctggtgcaccaggcgcacgaggccgtggaactggagcaggtaggactgcaggccactctgcgtgcgcgcccagctctcgggctcctgcaagggctgcagctgaatgatcgtggtgttggtgtctgggccttccagcacgtgcgttaggtgtccccccagcgacgcgttgccctggtaccacacgtgataggggtcgcggaagtaggagatctggagcatatgaagtctttggaggccatctgaggcgtcttggctacaaaaggcccagccagacagcagcagtatcggcagcaatgttgtcaacatcctgaagttgaggctccggaccgacgtgtggtcgacgatatcccgggaattccggaccggtaccagcctgcttttttgacacacttggttcatagcaactagagctt

SEQ ID NO: 126612 - DNA, 1004 bp, Homo Sapiens
  misc_feature (914)..(914): n is a, c, g, or t
  misc_feature (925)..(925): n is a, c, g, or t
tcttggtgttttcagttgggggagttcttggcttccccagtgaggctgaaactttcccctttgcccagccttccatcaattccagcccccttctgagggggctggagagtaattaacatcgccgtcccacctgtgcacaggaagatgcctacagccacaccagcaatgatgaaactgcccaccaggacgcccaggaccagcgaagtgtaggagcggcttgtttggctccctttcgtgttttccgcggaaatatgtttctgcacatactgcacacaggtgtcctccaggaattcccgcagttcataccgagtgcggttgtaggcattgagctgctgcagggtgaaggtgaccactccggaggtgacctgggtgtctgcctgccacaaggctctctccggccggaaactcacaaaggagctcccattcacagccacttcgaagaagacatgggctctagagccctcgggaggcagctcacagcccaggaagcagcggatggtcagaggaaaggccaaggtccgctcctggtgcaccaggcgcacgaggccgtggaactggagcaggtaggactgcaggccactctgcgtgcgcgcccagctctcgggctcctgcaagggctgcagctgaatgatcgtggtgttggtgtctgggccttccagcacgtgcgttaggtgtccccccagcgacgcgttgccctggtaccacacgtgataggggtcgcggaagtaggagatctggagcatatgaagtctttggaggccatctgaggcgtcttggctacaaaaggcccagccagacagcagcagtatcggcagcaatgttgtcaacatcctgaagttgaggctccggacctgggttcctggctcgggccggctgcgggctccgctggctgcagtctagggaaaaaagaagtnaggaccgtctnggaggggcggagtctgggcagaggaggatggaaggaggccaggagatgggaggagggagaggcttataaagtgttattt

SEQ ID NO: 126613 - DNA, 597 bp, Homo Sapiens
  misc_feature (480)..(493): n is a, c, g, or t
cttatgtggacttcttttaaacatttattaaaaaagcaaaatgtatgttcatctcaaatctaacagttaaaaatggtaaagcaatacaaacaatgtgttactagcagcatccagtcgttagaatctctcaccctgcttctcggtctgatctgtgcaagctcagtctcttctgagcctgcagctacctccatccctcatcgtagtgcaggccaaaccaaattttataaaattaacaatttaaggttaaataagcttaaataagggtgttaaatacaagacacttcatcaaagcttctgtacaaagataaacaaatctggcattgtacaagtggttccgctggctcacagcacacagggaagttctagtgagtaagcagattcactctcatttctttccagcagagcaactatacaaaagtgaactaagagttgaagtgactactgaccactcggtgagccatttacaaggcatatgtatcnnnnnnnnnnnnnnaatcagaacactgttaatattcaggcaccatttgttcctgcaaataaataagtctctaaggtaactgcatctgaactagtgttaaacacaacagtgttctgatt

SEQ ID NO: 126614 - DNA, 699 bp, Homo Sapiens
  misc_feature (208)..(219): n is a, c, g, or t
aatgttactcaaatttttctttaataaagacaaaggatttaacaatttttgcgcaactatacttaactgacaaagatgatttgtttaggatcttaaggatagcaaagatatatgctaagagggtaccaccaggaaaaaagacaaatacattctatcactagaaaatgcttcaagacaaaaatattaattcaataagaaaatatttcannnnnnnnnnnnatcacagagacaattaactcatttctgtaatccagttacgtggcatacattcctttttctagtttctcatgcaaaagtttggaaagtttttctcaaaacagagcaagttagcgctaatggtttcaagtcagggctgggagtcagcctagaagagcatgctcagaaggccatttacacttacctgaccccagcctgatgctctcccccatccaaaaggggtcagttaattcctattactaatgaattatctcttatacttactctatagacatataaattaccacaaatgtgcctataaattaacaagatatcattcaatgtggaggagagcagctggaacccaatgacaccctggaggtatcttggttactctttttagaaaacagaaaaaaacctgcctcattccaggtaatacatagaaataacactttaacacacagtgtcatcctgcctgtattctttccctaaaatgctgtgtaa

SEQ ID NO: 126615 - DNA, 688 bp, Homo Sapiens
gtaaatgagccatatatatttattttcataattgtaagcattgtttacaacaataatgtattcagagtaaaaatgtataatacaagcacataatggaatcttcatagatattaaaattatgctgtagaagattaattatatgaaagaatattcaagatgtattttaaaatatgataaaacaggttataaaactattacaatgtgatgacatttatttttttataggaaaaaataaagcataataaacttccaaaattcaacaatatggtggtagttttgtggtgaggccagcgttaaaaaggggaaagttatccatacattgctgaatttgtatatccttgactcctgttaatctcaagtaaacaaactcatgctgatcctcaaatgagacattggacaaagctgagcagggtttttcaattgcatctggcagatttccaaaagtctaactggaaaataagaaagaaataacatacaaaccacccctcttgcctgagcctgggaaaacatttactctctgaatctactctctgaagtttgagctcttagagagaaggatgcaggtctgatactctgttaaatattaaccaacatttgtgcttctcctatctacgaaggactgtatggttctattgcacagatagatctattagagacatagatgttatctacaaaattagataccatc

SEQ ID NO: 126616 - DNA, 683 bp, Homo Sapiens
ttttttttattagttctctgttttattgcaatacagcaaagtctggttaatattaagtgatatcaacataaagtattggtgaggagtcttttgtgacattttttaccatcccaccttaaatatttctgtgcaaaagaatccacatcattgtttggtagcagaggatctcttaaaaagttccctaagacactgagggcataaaaccaaacaaaataaaataaggagtgataggctaaagcagtatcttcccctccatccacatttgtcagcattatattctaaccaaaaaatgatcacaccaggccatgcaaaactgtacaatattacgagaaaaaccctaaaaaatttataaaatgaatgatattacactatcaaataaaaagacaagtcattttgttttcatgagatttcaaggttgatttgagtcagcttcccccggaactgcacggtgtcctgtgtggggagggcccagcgtgctgccagtgctggggggcagggcttacactccttatctagcagaagtgcacagagaactctggacttgagtaacaaagtcataaggaaagagattttaaaatgggctccatgaaatgcagctcatctagttcagggctgggccagagagacgggggagtggagtgcccaattcattccctgttgtgctcaccagacatgggctacgg

SEQ ID NO: 126617 - DNA, 849 bp, Homo Sapiens
  misc_feature (30)..(30): n is a, c, g, or t
  misc_feature (32)..(32): n is a, c, g, or t
  misc_feature (35)..(35): n is a, c, g, or t
  misc_feature (200)..(200): n is a, c, g, or t
  misc_feature (762)..(792): n is a, c, g, or t
acgcgccaattttgggttttctggggctgngncgnggttttcccggggaggtcgtaatccaaagttctattttattaaaggagttatttaccccaatatgaccatcaattataatttccaattgtaaaaaaattttttataccaaggatggactgattttcatatttccaaatcagagtcaactgtacatttacacaganattgtctttgcatgaagcccaagagggaacagcataaaaatgagtgtttctgtagcccctttatttttgctgatcaacagtttgttagaaaagcagctgcaggtatgttacctaaggtctgagacagtagaagagtcaaaggtgtcatgaattcacctgtaaacaaccttatgcctgaacatcagctaattctggaggaagtggagtcttaggatgcttgctctcaaagtgctgcttgaaggtcttagggtctggcatttgtgtcctacagacagtgcaggtatatattaaggcagctttggcagcagccttttggtcatgtccttgtttcttcttttgtccagcttgctttttggcatttttctgctgagactgaattttctgctgtccacgagccatatccgggccgggacagtcttgcgtcggagagacagtgcagcgcgagagggccgggagaggacgccggagggaaaggaagggggagcgcgcccagcaccgcttgggcctcctccacccgctcaggaggggaaacacgagagccgggagcacaacagcctcgcannnnnnnnnnnnnnnnnnnnnnnnnnnnnnntcagccttaggggagaccactacgcctcgtgcccgcgcacgccgcgccgctctcccc

SEQ ID NO: 126618 - DNA, 1058 bp, Homo Sapiens
ttttaaatatttcccacctcaaaccccagggaaatgatcggagggggtacaatggccccctaacccgcaaatatactaaaggcagcagataaatcatttttccactaagatcatcagctgccccataaaatggtatgcacaattttaatgaaatcagtctgctctagtttaactgagggaacctgccactgagcagagaaaggggatataagaattgcacttgcaattctagctgatgaattcattagatttttataaggcaaataatgtggaaagttagaacagaatttctaaaaccatttatcctgtgatgtcgtaaatcaaagtactattttattaaatgagttattttacacaatatgaacatcaatataattacaattgtaaaaaaattttttataacaaggatggactgattttcatatttccaaatcagagtcaactgtacatttacacagaattgtctttgcatgaagcccaagagggaacagcataaaaatgagtgtttctgtagcccctttatttttgctgatcaacagtttgttagaaaagcagctgcaggtatgttacctaaggtctgagacagtagaagagtcaaaggtgtcatgaattcacctgtaaacaaccttatgcctgaacatcagctaattctggaggaagtggagtcttaggatgcttgctctcaaagtgctgcttgaaggtcttagggtctggcatttgtgtcctacagacagtgcaggtatatattaaggcagctttggcagcagccttttggtcatgtccttgtttcttcttttgtccagcttgctttttggcatttttctgctgagactgaattttctgctgtccacgagccatatccgggccgggacagtcttgcgtcggagagacagtgcagcgcgagagggccgggagaggacgccggagggaaaggaagggggagcgcgcccagcaccgcttgggcctcctccacccgctcaggaggggaaacacgagagccgggagcacaacagcctcgcacgcccgccgccgccgcgcgatcccgggaattccggacc

SEQ ID NO: 126619 - DNA, 681 bp, Homo Sapiens
  misc_feature (636)..(636): n is a, c, g, or t
agtggtgcagaggtaatggacgttggctctggtggtgatggacagtccgaactccctgctgaggaccccttcaacttctacggagcttctcttctctccaaaggatccttctctaagggccgcctcctcatagacccgaactgtagtggccacagcccgcgcaccgcccggcacgcacctgcggtccggaagttctcccctgaccttaagttgcttaaggatgtaaagattagcgtgagctttaccgagagctgcaggagtaaggacaggaaggtgctgtacacaggagcagagcgcgacgtgcgggcggagtgcggtctgctccttagccctgtcagtggggacgtgcatgcttgtccctttggcgggagtgttggtgacggggtaggcgtagggggtgagagtgctgataagaaggatgaggagaatgagctggatcaggaaaagagagtggagtatgcagtgctcgatgagttagaagattttactgacaatttggagctagatgaagaaggagcaggcgggttcacggctaaagcaatcgttcagagagacagagtggatgaagaggccttgaatttcccctacgaggtatgttggcagcccctcctctagagggctcttagcaaaacccanaagagagatttgggaattgcagcatcttttgaaagcagggaaatt

SEQ ID NO: 126620 - DNA, 1009 bp, Homo Sapiens
  misc_feature (803)..(803): n is a, c, g, or t
  misc_feature (834)..(834): n is a, c, g, or t
  misc_feature (864)..(864): n is a, c, g, or t
  misc_feature (868)..(868): n is a, c, g, or t
  misc_feature (954)..(955): n is a, c, g, or t
  misc_feature (960)..(961): n is a, c, g, or t
gcaaacctaagattattctaaaatacaacgtttattaaaaaaacatgcgatcttgccaataggccaattccatgagaacaaaagattttttttcccacctacaagtctttttagagaaacaaacggaactatttccagatgaggcggggtgtctgggaggggctgtgggtggtctggggctggtgactggtgaggttgggtggccctctgggggtccgggaggcactttccgttttgcttctgttggagatgttcccgtcggatgctgaagaacaagcctgccggctgggccactccgacctgggctgtggcacccgtgtggccctcggccctcctggcctgagaaaggggagtgagaaggagccactgtcctgatatgggcaaaactcggggtcactggtctcatgctccaaggccccgtgagcaggccaggtggggggatccctgggggaagcccctcacccttctccaacccccagccttcggggagcccctgccctccaggccctgtgctcggaggtggggggaggacggctcagtgacttttggttcccatgacattgacagagacagggacctcgacgcatcctccatacccgctgcggggaaatggaccccaccagccagcacggggtgagttgggggccagtccctgcagagtgtgggtgtccacagagggtctcttctgcagtggcggatcgggcgccagcagggtccccggctcagtgctgcctgtgcgggcgagggtggcctgtgggcagggctggaaatgccccacagcgcgggctctgcctcacgcccantgggtggcccgtgatgtgggagggctgggcntgctcgtgcccgatttgggctcgagggcanatcnctatagtgagcgtattaattcgtatcatgtatagctgttcctgtgtgaaatgtatcgctcaattcacacacaacgagcggagatanntgtannctgggggctatgatgactaccaatattgcgtggctcatgcggttcatc

SEQ ID NO: 126621 - DNA, 1657 bp, Homo Sapiens
agctgagggtagggagtatggcatttattaaccctgtgtttcccccgtcactggtcactgctcttgactcgtagaacaacaggtacagaactgcaagggatcatccccagctccgtgatcaccagatccacaagctctgggggagtcacatcatagactagattcaacaaccgtagggatgcgtggttctgccagttagccagcgcaacatgttctccccgcttacattgcagatcatcagggtcatctagctcattagagacaaaggcatcagtctgcacacgctcacagaacttgtatgtttcacagcaaaccagcactggtacattatgggctcgagccaccagggctaactgtgctgtccctacccgtgacatcacagacccgttggccaagagtgcatgagctcccaatagcaccttggaaacctctgggagcacataggaggctgcaggaatcagcaggtaggaggctgggacaccagcatggactagagaacgtagtgtgtgccttccttccagccatggccggctgtccaccactaccacccgaaaccgccggccctctgtccaagcctcctgaagaattcgtgataccagagatgagcatccatataccaggatcacatctccattactgatcttctggtaagcaaagcgtgaaattgcctgagctgctagcacaatcttctcttgcacataccgatcaatggctgctcgaagttctgacttggcctcctcttcccgcttggaactgcccacactggtgatttccttgttaaggaacttgatggcgttgtgcatgctcgctgaccaggggacggcactgagtcaggaagctcatgtagggttttagtttattcactagatccctggagagttcttcattaggcggtgttgtgtaatcctgaatcacctgctgcaaggcacgaagcagggcaatacaccgggcattggagccactgaccaggccctgggagtactgcaggccgagtcgcaccatggctgggtggatcacagaggatgggatgctcataaactgggtcagagagttttgtctgctgtactggggtaggtgagagaagagactgactttggatccataatcctttcgtgtaggaacctgttgacgctctggttttttaacaagccttctcagaagtaggtcatcaacctgagggtactcagggagacgcttcactcctgagggggtttctccagctgtgctggggctggccttaggaggtggtcctccttgttccccttttcttgcctgtttcagggcccgctcggcctcctgcttggctcgacgctcagcccgaagttcggccttactccgaccagctggaactttctcccgaggagtgcccaactgaatgcccgattctggcagttctctggttgggcctacttgacattgggctgcagatacagcagagccagtctctggttctgcccccttttcttccttccgtttcttcttctgctgtttcttttccttccgaagctgcagcttttcttctttggtcatttccctccccactgccccaggcccagggggaagctccgccttcatcccggatcccgagtcctcgcgaacagccacggccacagcagccatccctcgtgccgattaacaccgggcctcgctacctagc

SEQ ID NO: 126622 - DNA, 598 bp, Homo Sapiens
  misc_feature (132)..(132): n is a, c, g, or t
  misc_feature (163)..(219): n is a, c, g, or t
aaatcaccttggtacctataggtgattcaggattacacaacaccgtctaatgaagaactctccagggatctagtgaataaactaaaaccctacatgaggtagggacaacactataagtccactcccagctcngccaatctttgtcttgtactctttttcctgnnnnnnnnnnnnnnnnnnnnnnnnnnnnnnnnnnnnnnnnnnnnnnnnnnnnnnnnnaaatgtgaaggctttgtaagttgtgaagagttgcgcagatataaggtattgctgttgtattatagcttcctgactcagtgccgtcccctgtcagcgagcatgcacaacgccatcaagttccttaacaaggaaatcaccagtgtgggcagttccaagcgggaagaggaggtgatgagtatgagaaataaggaaggcatgcacctgtgggtcaaattaagaaacatgttaaaaactcccgggaaggccaacgtaagcctttttttgccctagtcaagggttacggaatggtttggccattctgacttgtgccatctctgagccctctataggcttgtcatcatacacatattcaagcacctgctgatcatcagagcggata

SEQ ID NO: 126623 - DNA, 2263 bp, Homo Sapiens
  misc_feature (80)..(80): n is a, c, g, or t
  misc_feature (101)..(101): n is a, c, g, or t
  misc_feature (147)..(553): n is a, c, g, or t
  misc_feature (595)..(613): n is a, c, g, or t
  misc_feature (995)..(1011): n is a, c, g, or t
  misc_feature (1165)..(1173): n is a, c, g, or t
  misc_feature (1888)..(1899): n is a, c, g, or t
  misc_feature (2154)..(2188): n is a, c, g, or t
cgtacgcagtcgacaggaccagaggactccagggaacgctgtatttatatcttccgttcgcaccttgactgagctgattnttgtgctgtcaggggcggacntatgaaaacgccagcacgcgccttttacagttcctgccctttgttnnnnnnnnnnnnnnnnnnnnnnnnnnnnnnnnnnnnnnnnnnnnnnnnnnnnnnnnnnnnnnnnnnnnnnnnnnnnnnnnnnnnnnnnnnnnnnnnnnnnnnnnnnnnnnnnnnnnnnnnnnnnnnnnnnnnnnnnnnnnnnnnnnnnnnnnnnnnnnnnnnnnnnnnnnnnnnnnnnnnnnnnnnnnnnnnnnnnnnnnnnnnnnnnnnnnnnnnnnnnnnnnnnnnnnnnnnnnnnnnnnnnnnnnnnnnnnnnnnnnnnnnnnnnnnnnnnnnnnnnnnnnnnnnnnnnnnnnnnnnnnnnnnnnnnnnnnnnnnnnnnnnnnnnnnnnnnnnnnnnnnnnnnnnnnnnnnnnnnnnnnnnnnnnnnnnnnnnnnnnnnnnnnnnnnnnnnnnnnnnnnnnnnnaagaattcggcacgagggttggagcggccgcggctgtaggcnnnnnnnnnnnnnnnnnnnatattattgaactttatgtacaaaatcatttgatttcaaataaacatttaatgtaaaaacaaatgttcttttaaactgaattttttttacatctactgtaccattcaaatgctttatcatcttacaggatttcttcaaaatctgttatcaagggtacatatagaaaagcactttttttataaatagaaacaaagggattttttcagcttttacgatgacataaaaagtttactcaacagaagtaattttattactatttggggtgggaatcaccaactttttgtgcaaacaatgctagccttcttttaagcattaagagcataactgcttaagaaatgacataagcaataattctacacctacatctcccctaaaataatcnnnnnnnnnnnnnnnnnacatatgtgcacagctttagcaaattaaagcccgagataaacgctcgagatctactatccagaggcaaaaatcagagtttactagaactcatcatttggagagcttaccaatcaaggaatctgtaatgaaagctgcagtttccctctttcctannnnnnnnnaaacacaaaaatcaatgactaagaacttaatactggatgacaaatcacatccacactattcgttaaatagcctcacagttaaacacatcttaaagaccagtcaaatcagtatttacattttataaatttctgaagacaccattagaaagcttatatatcccttcattaaacaaaatagggaactgcatctgatggtggtggaatgaaattttaaaattaaaaatacctgtatttacagcagcattgatcctttataaataaagaatatgaaaatgcaatatctttaaggataataaaaaattgaggtgatgttactcaaccacagtgctcggagttggaataaaaacctattggtgcttgttaatgtgccagtagtgaatccactttctgttggagaaaatccaactgcaaatatgtgcgtgaaacacatataacacagggcaaaattgctccaaatgattcaagtcagcttatctgtattggatattctattcatgaaacacattacaaagacatccttgcaaacaaataaaaggcataacagttttctggttgactttttaagaacacttctccccttataagtgacatcttaaaatctcaaatgcgttctttccttggtttgcaatcctaatttaaagatatgaacagcttaattttccgtgtgattatctaattaaaaaagaaaaccaaacacagccaaatgttcaagttnnnnnnnnnnnncataccgggtgagcaatgcactaaaattatccacatgaaaacaaatggtctgtaatcttataaaccaacatagcatttcactgtcaacaatgtgaaaatttaatatcttctcaaacaggcataagatgaagaagtgctattttttaattgtaaaaggaacttatgtaatgtaaaattacattataatttttcattccgaattgccccggccgtaatggccgaattcccgggcatatgtccggtaccgtcgactgnnnnnnnnnnnnnnnnnnnnnnnnnnnnnnnnnnncgccgcttcctcgctcaatgactcgctgcgctcgtcgttcgctatacgcgagcccctatatgagtctagtcatgt

SEQ ID NO: 126624 - DNA, 934 bp, Homo Sapiens
cctgggtataaacaaatttacattaattaatagcgcaacagaacccaaaacatttggtagaacaaattctaatgtgacaatttaaaagcagacagtgctccactgggttaataaatcatacttaactaagagacaatactttaaataccacatcattaaaaactcctagtaggcatgtccctcttatcagttaagtgaaagagcaagcaccatactcagtactgcaggttactggactgctttgatacagcactgcagttcacagataaacacttcacatcttctcttcaagttactgaatctttcttcttccggaatggtgattttagcctcttccatacactgtttttgggcttagattttttctccatggccagtactgcctccttttctttcctacgtatctcccgtacaagggcatggaaaacatcatcaatatagtagcggtatgcagcagatgtctcaaaaaagggacagctgaattctcgggccaaggccaatccttcttccttggtgacctgtcttagctgtttgaggtctgacttgtttcccacaagaaccacaggtgtatcgtcagtacgtcggactcgataaataagctgtttaaactcacgaacttcatggaaacttcgacgatccgtgatagagtaacagatgataaacccttctcctgccctcatatactggtcccgcatggctgtaaactctgcctgtccagctgtatccaaaatgtccagattggcaggctcatcatcaatacggatcctgatcttataagcatcttcaatggtgggatcatgatcttctgggaatcggtggctgatgaactgcatggtcatggcactcttccctacaccaccagcacccagcatcactagtttgtactcccgcggacgcgtgggtcgacgatatcccgggaattccggaccggtcc

SEQ ID NO: 126625 - DNA, 788 bp, Homo Sapiens
  misc_feature (130)..(138): n is a, c, g, or t
  misc_feature (734)..(742): n is a, c, g, or t
cccattttgttaactggccgtgttcccacggtaagcgagcgctgctattctctttctgaagcagcggagttcttcacctaacactggcctctgtgtttcttattttatttgttttaatgctctggccggnnnnnnnnnctttcaaaaatgttaaattaagagttgtacatgtctttgaggtgcctatgatattttgatacctgtatcgaatgtgtaatggactgaatgagggtaactgggatttccttcacctcgcttatcttttctttgtgttgggaatattcttattcttctagctgttttcaaatatacaatcaattattgttaaatgcagtctccctactgtaatatcgaatgctggaactattccttctatctaactgtatttctgtgcccactaatcaacttctgttcatccccaaccccaggcctgcgcatttctgactgtgcttgttagaaaagccccagctggagggggtgagcagtccctgttgctgtgaccacggaaggccgcaggggaaggcagattacatatgtgaaggaggtgtctgtggccatgtgtctttaagggagagcccacagaaaaatgagcctaagggaaataaagcgagaagtctgcttcaatcacagagacggtaaggtgtaaattcttaagaaggtcagaggaatgattgacaattatgtgagtgactcacaaagtgaaatgatggaaagactgaactgcatgagagttnnnnnnnnntcttttccagggcaataaagctctgtctacacagcgtaagggatgg

SEQ ID NO: 126626 - DNA, 599 bp, Homo Sapiens
  misc_feature (282)..(405): n is a, c, g, or t
acagatatctcaaaacaatttatttatttatttgtcctctccccattctgtgtgccacttttgtcaaaaatcaattggatggaaatgtatgagttatgtctgggctttcctgttccactggtcagtgaatctgtttttatgctggtaccacagttttttgataatggattacaaaatcaggtagagtgatgcctccagctgtgtccttgttgctcaagattactttgattatttaatgtcttttgtagttccatacaagttttagaattttttttgtatttnnnnnnnnnnnnnnnnnnnnnnnnnnnnnnnnnnnnnnnnnnnnnnnnnnnnnnnnnnnnnnnnnnnnnnnnnnnnnnnnnnnnnnnnnnnnnnnnnnnnnnnnnnnnnnnnnnnnnnnnnnnntctgcaatttccaagcttcgtcagtagaagttaggcgatcagcgagaaagaaattattctccgatattttgaagagacacaatactattaactggcgagtttctggacttttgttagtggactcatacttcggacgccttgcaacccccgtaaggacgcagtgattgcactccgtgcaaacgccgccctcgtgc

SEQ ID NO: 126627 - DNA, 481 bp, Homo Sapiens
  misc_feature (260)..(260): n is a, c, g, or t
ttttttttctcaaaacaatttatttatttatttatcctctccccattctgtgtgccacttttgtcaaaaatcaattggatggaaatgtatgagttatgtctgggctttcctgttccactggtcagtgaatctgtttttatgctggtaccacagttttttgataatggattacaaaatcaggtagagtgatgcctccagctgtgtccttgttgctcaagattactttgattatttaatgtcttttgtagttccatacaagnttttagaatttttttgtatttgttttcatgtttctaattagcactcttttactacagcttgaaggactccctttagcaattcttcccgtgcaggtctagtggtggtaaactcccacatcttttgtttgagaactttatatttctccttaatttttgaaacacaggatagttggagatagtattcctggatggcagtgttttcctttcagcttttggtatat

SEQ ID NO: 126628 - DNA, 1123 bp, Homo Sapiens
  misc_feature (357)..(465): n is a, c, g, or t
  misc_feature (692)..(929): n is a, c, g, or t
cagatatctcaaaacaatttatttatttatttgtcctctccccattctgtgtgccacttttgtcaaaaatcaattggatggaaatgtatgagttatgtctgggctttcctgttccactggtcagtgaatctgtttttatgctggtaccacagttttttgataatggattacaaaatcaggtagagtgatgcctccagctgtgtccttgttgctcaagattactttgattatttaatgtcttttgtagttccatacaagttttagaattttttttgtatttctattctcagtggtacaggagactcaggaatgaagagctctttcaactccagagctgggtgatacagagcccagtannnnnnnnnnnnnnnnnnnnnnnnnnnnnnnnnnnnnnnnnnnnnnnnnnnnnnnnnnnnnnnnnnnnnnnnnnnnnnnnnnnnnnnnnnnnnnnnnnnnnnnnnnnnnagagcgaactccatcataccatcttaccaccacatcactaaaggcctgtgtaccgaagttccttttactcaatacatcatgtctggcagtcgtcaatgcaatttcaaacaaacaatgcaaaattggtaaaatgttttagtctttatgtagatttcatcaagtgttttgccttctcccaagggttaggaagtttaaaactaatgttctggccgggcgcggtggctcannnnnnnnnnnnnnnnnnnnnnnnnnnnnnnnnnnnnnnnnnnnnnnnnnnnnnnnnnnnnnnnnnnnnnnnnnnnnnnnnnnnnnnnnnnnnnnnnnnnnnnnnnnnnnnnnnnnnnnnnnnnnnnnnnnnnnnnnnnnnnnnnnnnnnnnnnnnnnnnnnnnnnnnnnnnnnnnnnnnnnnnnnnnnnnnnnnnnnnnnnnnnnnnnnnnnnnnnnnnnnnnnnnnnnnnnnnnnntctgcaacttccaagcttcgtcagtagaagttaggcgatcagcgagaaagaaattattctccgatattttgaagagacacaatactattaactggcgagtttctggacttttgttagtggactcatacttcggacgccttgcaacccccgtaaggacgcagtgattgcactccgtgcaaacgccgccatcttaa

SEQ ID NO: 126629 - DNA, 777 bp, Homo Sapiens
  misc_feature (128)..(365): n is a, c, g, or t
  misc_feature (440)..(548): n is a, c, g, or t
tggagatttcccggaaattttccttgggggacttactcaattctggaaaatgggaggcgaataattttcggaaatgtttcccaagttggaaaatccacctatttcttggtggacgcgggtggttcatnnnnnnnnnnnnnnnnnnnnnnnnnnnnnnnnnnnnnnnnnnnnnnnnnnnnnnnnnnnnnnnnnnnnnnnnnnnnnnnnnnnnnnnnnnnnnnnnnnnnnnnnnnnnnnnnnnnnnnnnnnnnnnnnnnnnnnnnnnnnnnnnnnnnnnnnnnnnnnnnnnnnnnnnnnnnnnnnnnnnnnnnnnnnnnnnnnnnnnnnnnnnnnnnnnnnnnnnnnnnnnnnnnnnnnnnnnnnnnattctcagtggtacaggagactcaggaatgaagagctctttcaactccagagctgggtgatacaggagccagtannnnnnnnnnnnnnnnnnnnnnnnnnnnnnnnnnnnnnnnnnnnnnnnnnnnnnnnnnnnnnnnnnnnnnnnnnnnnnnnnnnnnnnnnnnnnnnnnnnnnnnnnnnnnagagcgaactccatcttctgcaacttccaagcttcgtcagtagaagttaggcgatcagcgagaaagaaattattctccgatattttgaagagacacaatactattaactggcgagtttctggacttttgttagtggactcatacttcggacgccttgcaacccccgtaaggacgcagtgattgcactccgtgcaaacgccgccatcttaagtcttccactagccctccc

SEQ ID NO: 126630 - DNA, 1088 bp, Homo Sapiens
  misc_feature (1038)..(1046): n is a, c, g, or t
gggtcctcagaaatgctttattgggcagcaggaggccagggccagggagccccatggccagcatggcgaatgtccggggccagtgcctccagcgaggtcaccccctgccctcctggctgggctcctgagggtgtggtggccagggtggcccccctgaggcccacagaatccacctgggctgccccaccccgacatgtccacaggagagttggccaggccagggcagctcagacgaaggtggcgtggtgagcgctggtcttgggcttagcaggctcacccgggacggggcccaagccagggaggtctgatgtaggaggcccaccactggcctgcgacctcccagggccagcctgtgcccccgctatgccaccatcccgcccgggcgccgagccagttacaagatccacatcgatgattctgttgactgggaggtctcggctgccatgggtcccacttcctggtctggaaggtcctggcacttcctggggggtggagggcggcggcagcaaggtgctgttggggctgctgatgtccccctcccccatcagggtcagctcggccacgtgctcatcctccaccgtctggatgcccccggcctccacttcctgagactgcctcttccagatctgggcggtgccctcctgcgcgagggagacgggggactggggagtgcagaagggcccgctgggagacttctgcccggggggggtcgtcccaggaggtccaggggggctggaggctgagcccgggctggtggacgggctgtcgctgctctcctggactggctcccactgctcgccaggctgggaggcgctctcccggccgttgcctgtggcgcttctcttgctaaagcccttggccacagcagctggagtggggagggtgagttctgtagaaccaggaggtaaacggaggaactctggcaacaccaggtcttccttccttagcagcccacgttggtcatctgctctgttgctctgagctttggaaataagctcaaaaaactcctctgcttcgtccaaattaattttctgatannnnnnnnncccaatctttgcaatagattcttctctctttgaaagccgggg

SEQ ID NO: 126631 - DNA, 636 bp, Homo Sapiens
gtagtccacattcctgcaagttccattaaacacgtttatggtaacaattcagatttaaagacagacgcattaacatgtcagaacttactagcaatttcacgcacagctcaatctacagcagattctgaagaaaataaagttaaatagctcatacgaaagtcaccgtctgggctacggatctcctagtgacagcccagacgaccgcgggagtgtgcggcggcggggcggggaccccggagcaggtcttacctgcaaggacaggatgctgatatccgtgttgagggtggtcagcggcgtcctggacgcctggttctgcccgggtctctggtgatgcaggctgacaatagtgggatgcgagtccagggcgatctgcaggtccaagatgtagtcgatgacgtgctgcaggatttccatcttgctcaccttcttgttctgggggatgctgggcaccagctccttgagcttggagtagcagtcgttcatgttgtatagcaggctcatcgggtcgtccaacaggggttttgctccgggagatgcccaggctgtggtccgacaggctgttttttctgacggacctgacgggactgaaggctttcatgctgaccgcgagggaaggcgagaccgggagggagctgg

SEQ ID NO: 126632 - DNA, 1405 bp, Homo Sapiens
  misc_feature (312)..(334): n is a, c, g, or t
  misc_feature (634)..(648): n is a, c, g, or t
  misc_feature (741)..(741): n is a, c, g, or t
tttgacttcagacatgttttattataatcttatacagtctacataaatttgaacttgtatttatttgggttcagttataacatagcataataaaaatcaaagcactggtcctctgaaataaagcaggcaatcaccattcaataaacacacttgatttattttgtataaaagggttaagtttacaactaaacttttataaaaagtttagcatgaataagtacatcattacacttttgaatgcagaaatagacatctctgccactatacaagaaaactctaattaaagagttcacaaggtttcactcaaatagnnnnnnnnnnnnnnnnnnnnnnncacagcattcagtaggcttgtgtcaaaaaggtaatttctgaccaaaagacttcatttaagtgactgaatactggatccttctggtattcacgctccacctttgaaaaaaggcaaagtctgcttagattgggcaattccttgtgattttaacgttttcgctccccatggtgggaatagtatataaagaaaaccttccaactgcagaaagggcatttaaaagtctttttcataaataacgaatatcacagtccaagtaagagaacaccctgggaagatgatcattcttagttttccttccannnnnnnnnnnnnnnaaaaaggtccattcaacttgtcctccttgtgaaatggttgaaaaataagttcagcacttaaaagattccgtgaatttgttgttgttgttgtgntgcaaagaataaaagaaatcatgaaccccgcttattcagccacacagtgctttgctgtcatttgacattaactcagaagggaattcagaagcctgcaaggacaggatgctgatatccgtgttgagggtggtcagcggcgtcctggacgcctggttctgcccgggtctctggtgatgcaggctgacaatagtgggatgcgagtccagggcgatctgcaggtccaagatgtagtcgatgacgtgctgcaggatttccatcttgctcaccttcttgttctgggggatgctgggcaccagctccttgagcttggagtagcagtcgttcatgttgtatagcaggctcatcgggtcgtccacaggggttttgctccgggagatgcccaggctgtggtccgacaggctgtttttcctaacggacctcacgggactgaaggctttcatgctgaccgcgagggaaggcgagaccgggagggagctggctgccctgaagctcaggccgccgctgccgcctgctgagctagctgcgcttggcaccgggctcggctcagaatgaagcccgagcccggcggggcggcttttatccgcactcgccggggccacacgctggagcttcccttcgtccccattggcggaaggtggcacgtctatcaagacgagcggccgca

SEQ ID NO: 126633 - DNA, 862 bp, Homo Sapiens
  misc_feature (238)..(256): n is a, c, g, or t
  misc_feature (639)..(639): n is a, c, g, or t
ccccatgtgggcatagtatataaagaaacccttccaactgcagaaagggcaatctaaaagtcttttttcataataacgatatccacagtccacagtaagagaacacccctgggaagatgatccattcttaggttttccttccatggtgtttgtttctttttaaaaaggtcccattcaacttgtcctccttgtgaaatggttgaaacataagttcagcacttaaaagattccgtgaatnnnnnnnnnnnnnnnnnnngcaaagaataaaagaaatcatgaacaccgcttattcagccacacagtgctttgctgtcatttgaccattaactcagaagggaattcagaagcctgcaaggacaggatgctgatatccgtgttgagggtggtcagcggcgtcctggacgcctggttctgcccgggtctctggtgatgcaggctgacaatagtgggatgcgagtccagggcgatctgcaggtccaagatgtagtcgatgacgtgctgcaggatttccatcttgctcaccttcttgttctgggggatgctgggcaccagctccttgagcttggagtagcagtcgttcatgttgtatagcaggctcatcgggtcgtccacaggggttttgctccgggagatgcccanggctgtggtccgacaggctgtttttcctaacggacctcacgggactgaaggctttcatgctgaccgcgagggaaggcgagaccgggagggagctggctgccctgaagctcaggccgccgctgccgcctgctgagctagctgcgcttggcaccgggctcggctcagaatgaatccccggccgtaatggccgaattcccgggcatatgtccggtaccgtcgactg

SEQ ID NO: 126634 - DNA, 753 bp, Homo Sapiens
  misc_feature (575)..(593): n is a, c, g, or t
tacggtccaaggtagcgaggcctgggtggcgaattcggcacgaggccaagcgcagctagctcagcaggcggcagcggcggcctgagcttcagggcagccagctccctcccggtctcgccttccctcgcggtcagcatgaaagccttcagtcccgtgaggtccgttaggaaaaacagcctgtcggaccacagcctgggcatctcccggagcaaaacccctgtggacgacccgatgagcctgctatacaacatgaacgactgctactccaagctcaaggagctggtgcccagcatcccccagaacaagaaggtgagcaagatggaaatcctgcagcacgtcatcgactacatcttggacctgcagatcgccctggactcgcatcccactattgtcagcctgcatcaccagagacccgggcagaaccaggcgtccaggacgccgctgaccaccctcaacacggatatcagcatcctgtccttgcaggcttctgaattcccttctgagttaatgtcaaatgacagcaaagcactgtgtggctgaataagcggtgttcatgatttcttttattctttgcnnnnnnnnnnnnnnnnnnnattcacggaatcttttaagtgctgaacttatttttcaaccatttcacaaggaggacaagttgaatggacctttttaaaaagaagaaaacaacggaaggaaaactaagaatgatcatcttcccagggtgttctctacgttggactgtgatattcgtattta

SEQ ID NO: 126635 - DNA, 1540 bp, Homo Sapiens
  misc_feature (122)..(137): n is a, c, g, or t
  misc_feature (215)..(226): n is a, c, g, or t
  misc_feature (300)..(330): n is a, c, g, or t
attttgagaaagatctttatttgctttgtacaaagtaaaaattacatgacacattaacatattatatatcaacatgatacataattcataaaacactgtctgccaaaagtaattttaccagnnnnnnnnnnnnnnnnaaaaaaaaccatctaaaagtggttttttaatatatatattttttccaaaggaagaaatttcttgcttttactcagggnnnnnnnnnnnnttaaggtacatttgagtagaatgatttcatctaaaagagttctttcaggagacatctgtgattcactgcattgnnnnnnnnnnnnnnnnnnnnnnnnnnnnnnncaacatttctaccattttcctcttcttggttgatatcaggccactttcttttgttgctttcttactgtcacctgttaaaccgcgtttctttgtgttaggttttgaccgcttttcttctttgtgcactgtgtcaccaggctcctttttgccaattttggactgttctttacttacaggagaaggctctgcagctggaggaaggctttctttcatgtctgccactttgtctagccacactccaagacacgtcagcctggcattagtgtttatttcacagagtaaagatgggggaactttcttatcctgcttaagcttccacattttgatgaaaccatcactcgatgctgaaacaataacatgatgctctggaatttcaaaactgaacatgtcctttaccctgttttcatgagctttaaattcgcagaggcacactagtgaatcacagtcaaaaaacctttataactttcttcatctccagcccctgcaagggacagactttgaaagaaattttaacagaggaaattctcttttcatttgtgatggtgcccctaatggatgcagtgtcaagctgatagatgtctattttattctgtatgataactacatactgctctcctcttggggaccattctactatgtgagcattttgttttatattttttatgaatgctgatcttccttctacaagattccacgttcttaaagttttatctgtaccaaccgacagggccaacttgccagatgggtgaatagaaaggaaggtcacctgtcctttgtgagctttaattgacttcaggcattcccatttctttgcatcccagatacagatgagtccatcttccgctccactgattaaatgcctgttgccatagaatttcaggcaagttattgtaccactgtgatgcactagagccccatgctcaatcttctttttcatgtcataaatgtgaattgtttcatctttgctcccagtgaccacaaaacgactatttacagctactgctgacaaggaggcagtgtgagcatggtgagtgaagtcagccacaagagtccattgctcgtggtcgccgcaagcctcgggctccgggtgtacagcgaacccaaagaggacctgctcgtagcaaccagcgaccagctccattcagcagcgcacgtgcctcttccgccagcccggctcagcctggaggtgacagtaccggaaaccaaaaaa

SEQ ID NO: 126636 - DNA, 1535 bp, Homo Sapiens
  misc_feature (101)..(248): n is a, c, g, or t
  misc_feature (294)..(294): n is a, c, g, or t
  misc_feature (296)..(296): n is a, c, g, or t
  misc_feature (785)..(786): n is a, c, g, or t
ggggaacaggagggccaatatacagggaaaggacagccgcccggaagcggaaagtaggacggaagagttatggtatggggagggtggcgggaaaagaaacnnnnnnnnnnnnnnnnnnnnnnnnnnnnnnnnnnnnnnnnnnnnnnnnnnnnnnnnnnnnnnnnnnnnnnnnnnnnnnnnnnnnnnnnnnnnnnnnnnnnnnnnnnnnnnnnnnnnnnnnnnnnnnnnnnnnnnnnnnnnnnnnnnnngtttggggggggaaaagtgttgaatagcgggggtaggatttggggngngtgaggtttaaaagtttattttacaaccatgtaattgtacaaatgatataaacagaagtcagataaaattattagtacatatatagtactaaagcataaactattacagaaaatttgatacaaagttgtacataagtacttgtaaaggcaattaagcttccccagtctatgggaatacaaaagttgccagcaattaatttacattacaaaaaaggaaaaccattatttatgctatcacaaaagcaatacccttaaaagtaaaaacaatctccacttgatattagtaatttgaaaaacttagcatatctacaactactgcttaatcaacacttttcattgattcaacattatcacttaaatgcagatgcaaaataaccttgcatggcaaacatgtttactctgtgctaatgaaactatgaaacagttcctgcaagttcacagacaagtcaatcaatgattgactacagaacagactggtgagtgttaccnnaaaaaaaagacctgcccaggggaccactaggggtggaggaagaacacctgggtctcactcactgggcacttgatgctttcatttttatctgtaagccaggggacaattatattaatattgtatgaatacactgctactgggaaaagcattcattcaacagatgcccactacatactctgtaccaggtagtgtgttaagtgctgaaacagggaaggacaaggcacatcctacgggggctcgcagtgtgggcaggtgctgagctaacgcacacacacaagggctgggtactgccagatctgtatcactccggagcaacgacctgtctctctgaatgatctctggcatggtaaaagagttaactgtatttcaaaaggtgaaacaaaactttttttgctttgttatgcatgtttcaaattgatcagtggttcaggcctggagtatgcatcagaattatctgtgaagcttagtgaaagtgctgatgccagagcccacccaaagcttactgcttcagaaccactggggacctggcagttctgatgtgcacgactagtcaagaatcctttaaaggctgataaagcaatcttgaaatcactgtcaatgcaaaagtggatgttcctcattaataagaactcaaaaaataaagtacagctagtataagacttgttttttgtgcctataaaacccaagtgttagctactttctaactataaaattctatccaaaaagacttgcagtcaaaacaccgagcc

SEQ ID NO: 126637 - DNA, 481 bp, Homo Sapiens
ttttggatttttaacattttattttctgtgcatagcttaccgcactgtattataggaatcagagtgtataagcaaaaaaatgaaataaaacttcttgaagaccatttccattatttatgattaaatcaatgaaactatacaatttccacattaaatacaaattagtaaaagaattcctccaagtagtattgcatataagctacaactttaccccaactattttaatcactatgattcgagatttcctaggatttaacagcccaagattgggctgttactacctcagcaagaacaatcaccagtaaatacatgaactggggttatagctgaatttttagaaactctccagacaaaccacgtgttagaggaggtaagtagaaaaactaatgtttgagctgtgctattcctatcaggaactatgtcaaatatgcaaagttcaaacattattagtaaaataatatgaaaggatctatatatactg

SEQ ID NO: 126638 - DNA, 972 bp, Homo Sapiens
  misc_feature (221)..(239): n is a, c, g, or t
acacaaatgtttggttatttagccacactagtgataaaacatattcatattctaactgcaagtggaataaacattgcaacaaaaatgcaacccaatcaaaatcattagtaataactattactccctcttagcagtaagaaccattattcttggatttcaaacattttattttctgtgcatagcttatagcactgtattataggaatcagagtgtataagcnnnnnnnnnnnnnnnnnnncttcttggagaccatttccattatttatgattaaatcaatgaaactatacaatttccacattaaatacaaattagtagaagaattcctccaagtagtattgcatataagctacaactttaccccaactattttaatcactatgattcgagatttcctaggatttaacagcccaagattgggctgttactacctcagcaagaacaatcaccagtaaatacatgaactggggttatagctgaatttttagaaactctccagacaaaccacgtgttagaggaggtaagtagaaaaactaatgtttgagctgtgctattcctaccaggaactatatcaaatatgcaaagttcaaacattcttagtaaaataatatgaaaggatctatatatactgtaaatttagcaaaaacacttttatgtacagaagcctaaatatcttaggaggtttagaataccaatgaagagaattgttaattcttcaaggctggtttcttatgaggattaaaaaccagcccttagtctcagatgcattccacctagatgtgttcacgaactccatagaataagaaatataaaccatgaatacgtactcttaatttccattcttcaacttaatgttctatagtacttcagatttttaaatccagagtttggtgtacacttaggaaattatagtaagagtagattagagaagatttgcttgttttccttttgaagccatgtgaaggtttattac

SEQ ID NO: 126639 - DNA, 2223 bp, Homo Sapiens
  misc_feature (1128)..(1138): n is a, c, g, or t
  misc_feature (1371)..(1388): n is a, c, g, or t
  misc_feature (1440)..(2151): n is a, c, g, or t
aaatataggcttagtcgaggcctggtgttgaatcggcacgaggggctgatgctgggttctctctctctttggggcttctccctcccgtttcaggggaaaggtctgagtctccacgtttcagaccagcttctgggggaaggcagtccggcagggagaccgggaggggtggccacacagtggggagctgggaggtggggggaatggtcccagactcctctcggggcccctatccacacagggcctggtgttctaccccatctggcccctggcccatctcttctgtgccttagtcacatatgaaagcgcccctccctggctccccatctgtcccacacgctccctggggctcttagttcagctgctggcactcgcaggatcctgcagtgctgggcccagagcccttggacaggcctcaggagtggtcaggaccaccaagcccctcctctccccctccacacctctagacctggggcctccggaacccccagcaggctgggcttatactagctcctgacttaggaagagcctcgtgtcacaacacgtgtccctacaggcaaagtgtcctggcatttaaaacccagattatccctgggtttgggctgcagtcacctggagaagctggtagggtaagggagagggaccctgccggtgttcactggggattctttcttttggtccttcctggaatgaacaggttccctccctgccacctgtgaggagagttggggcccagccgtcttcctggcctccttcctttcctcgtggcagaggcctgcatgtgggtgccagaggccagctctccccctccatcttgggggggcggagcagttgggcccaagctgcccgggagggtgggtgcagacacaggctgaggaccagccctggccctgccccgccatctgctttcaccaagctgtctctccaccgtggcttcccttctccctccaggccaaagtgctgctgattcccactcccttggttttcgcctgcccagcgttgctgtttgcgtggagggtggggggagctcagtggcagggaatcagcggtccgtggggtcgtggggacgggaacatgtgcccgaccgctccatcccctcctcctccttaggatgcataacctaccttgtcnnnnnnnnnnnaaattttctttccaggtagagtagctctttgtacataaagaatacttgaaaaattaattgtatgatgtatgagaagacagagtctcctagttttgtatcttgttgtatgactgccatgagttccaccagaaagccactctattttggtctctgtgacattttaaatgcgtgacagaagtgagcaaataaagtgaggaagaaatctatatatgagataatatagattgtattgnnnnnnnnnnnnnnnnnngcctacagccgcggccgctccaacatcagaatggcctcgtgccgaattcttnnnnnnnnnnnnnnnnnnnnnnnnnnnnnnnnnnnnnnnnnnnnnnnnnnnnnnnnnnnnnnnnnnnnnnnnnnnnnnnnnnnnnnnnnnnnnnnnnnnnnnnnnnnnnnnnnnnnnnnnnnnnnnnnnnnnnnnnnnnnnnnnnnnnnnnnnnnnnnnnnnnnnnnnnnnnnnnnnnnnnnnnnnnnnnnnnnnnnnnnnnnnnnnnnnnnnnnnnnnnnnnnnnnnnnnnnnnnnnnnnnnnnnnnnnnnnnnnnnnnnnnnnnnnnnnnnnnnnnnnnnnnnnnnnnnnnnnnnnnnnnnnnnnnnnnnnnnnnnnnnnnnnnnnnnnnnnnnnnnnnnnnnnnnnnnnnnnnnnnnnnnnnnnnnnnnnnnnnnnnnnnnnnnnnnnnnnnnnnnnnnnnnnnnnnnnnnnnnnnnnnnnnnnnnnnnnnnnnnnnnnnnnnnnnnnnnnnnnnnnnnnnnnnnnnnnnnnnnnnnnnnnnnnnnnnnnnnnnnnnnnnnnnnnnnnnnnnnnnnnnnnnnnnnnnnnnnnnnnnnnnnnnnnnnnnnnnnnnnnnnnnnnnnnnnnnnnnnnnnnnnnnnnnnnnnnnnnnnnnnnnnnnnnnnnnnnnnnnnnnnnnnnnnnnnnnnnnnnnnnnnnnnnnnnnnnnnnnnnnnnnnnnnnnnnnnnnnnnnnnnnnnnnnnnnnnnnnnnnnnnnnnnnnnnnnngttcagcggacgctgcgcttatcggtactacgtctggatcacccgggtagaccactatcgcatgggagaaca

SEQ ID NO: 126640 - DNA, 1288 bp, Homo Sapiens
tttgtattcttataaatgtgtttaattacaactgcttcaaaagaatcccagcttttcaaaagtttattttaagtttggagactagacaaggtcatactggttttacatcctacgtgatataagtatatatacaaagaaaaaaacaacattggaatattacacagcttgaaggtttgcaaaggttatttgtgtcttagttatttctgcacttaatgacacatcagacgcattgagtatatttcataagttgttgactagcaaagatacaatcattagtaacccaagtcttcaaaattcacaccaaactttatgaagtcattcagaaagagaaagtcaatcctaaaattaaaattggcaactatgataaataccttcaaaaggatgtagatataatggagatgtttaaaagtttagtttcattaattgtaaaattagcatgttatatttactcaatatagtgaagactaggtgattcttacatgtattctacttatggtactgtactggttttagtgtgaatttacatagaataaatttacttcactttcatgtcatcgacatgaatgacacaaaagctacttcataatactactttacaatagttttcaacatttccatatggtgcgacccctttgctctcatcaattttgggtgtcatgagaacaataggtatcccgttggacatgatgtattgcgaagagcatataaagcagagggaaaatgaaaaagcaagagaaactcatttcaatgctttttctaaaaggtaacaaatataattttaatcaacttccttggaaaatatttttaaaacaggtatcaatagaaaaaattaccaaacatcatatgaagctataaataattttgaaaaactatatcatcataaagcataagtaataatcttaaaaatacactcttaagaaggtatgtaatttgcaaaggaaaatggctagatatctgatgggacagtaaaccttgaaagaaactggctaaagagtaagtgtgtgtatatttctgaacctaagtaattatttgtcacgactttaaaatttagccagttacaaatattttaaaatcctaactttaaagttatctaaaaaaggcaatatggaggaaatagtaattttgtttttgaaagatgttgaaaactgatcaccatttcagaggcttcaaattcataatttcataataagaacaagaagtagaaagcatatgggcaaggaacaaatatgtggccagcccccggccgtaatggccgaattcccgggcatatgtccgctaccgtcgactg

SEQ ID NO: 126641 - DNA, 688 bp, Homo Sapiens
tctgacggacatcctgatgttggttttactgttttcgttttgaatacacaggctgggtcaggagcagtgagatttgccagcactcagggttctaagggtcttgggccagctctggatggaggaagagccccacatgcccagagcaaggccccccattaagggactgcagccacctccaagggctcctccctccacccaccggctcccaaatgccagagggagcctcttcgccctccctccctgcccaccatccctcaaccatcagcctggcgttcaaagcctttccaagtcccacctcacttttccctctcccaaaggtgcccaggctctgggcaggccctgctcatatccctgatcatggcacattctctggaggaccctcctgttctcgggtaggggccgtgccccacctaggtagccgtcccatgtgggatcctgtaggatctctaaaacctagctctggccccaactttctgtctgccctggaggtttctcagcctcctgagagctctgctgggccccggtctgggcagaacctgggcctaaacaaacaagagccagggcagccagggtctctgcgtggctgggcccagggcttgccctcagagctcacctgtccaacagaagaggagtgtgcctccaccttccctactgccccaggtggagctgaagtcatggggctgttgag

SEQ ID NO: 126642 - DNA, 1623 bp, Homo Sapiens
gtgtgaaatactggtttttattggttggcacaagattacaacctacaatttcaatgcccttccctcccacacagctcaaatggaaggaaactgattaacacatagaaaggaacggcaggctcacaggtttaagcatttgtttttacaaaaaggagtgggatatgggggtggtcaagttttacgggtaataacaacattctctctagatggcagggggtaagtctgcctgtcctccattgctggtaccacataagggatacattagtaaagtagggaaagggttatatgtgtggctggcctgttctttaggtgacctaatgatgagaaggctaacttatttgctttcctgggtggtcctgatggaaatgaacagcagcagagttctggtgggatagagcagtctagtctgagccactgtgtgattccccaggggactggtccctgggtacatgggtccctggctctctgtctcagttccacagatattactcaacttggccatttacgcctcagctaaaacatatgagcatgagggaaaagggacaagaaatacttttgtcctctagaaaaacttaactcaatacatcttggctactttgcctcaacccacggggttccctggaaacatttgttgaacttggccaagaggagattgtatatggatggcacacctggaaaaggggagaaagcacactagttcatctcttttataagtagaatggtcccagggatgttaacctttctgatgctgatagtagatgagtggagtggaggtaatcgtgagaaaacttaaaaacccttaagctgtttggagactacacaccacagtggagcaaaccaaggtggggcctcactgcctcctcagagcccatccctgaccatgtcattggataggatggaagacaaagtctttgaaatggaggctgggctggcaaaagtaagtatgaagatgctactactggccttccacttcctctctctgatacacctaagaaggtgagagacactagcttcaattccattttacaacagttctcaacaacctgaaatattcttgacttccttaagcacatggaaaactggtaagctatatctttctaactgaaattttacttattctaaccaaccttttctttgattatcaaccagtttgacagtcttcagatcacaaaacaatagaacagacctgacatttacaaaactgtactacatacttatttcttttacagtagagctgaccaattacttttctaactactaatgcaacaccatgccactgggccctggactctgatgtttctgatccctgagcaacacatctatgtccattcacagatggaaatgaaagagtgagattctcagaggctaaacaacattctgggagcaaattggatttttgaagggagagtcctgttagaaaattctgagcaaacatgctcccagtcacgagggatggggtgagcgggcaggtttctgtctgtgagctatagctcccttctgaactccctcatgttcttgggaggacacaagcctcttgttcattaagcaaaggccctccaagtctcctttttacttcagcactttggaaactctccaagactaacttccgatctgggagtctac

SEQ ID NO: 126643 - DNA, 796 bp, Homo Sapiens
ttgtgtgtgaaatactggtttttattggttggcacaagattacaacctacaatttcaatgcccttccctcccacacagctcaaatggaaggaaactgattaacacatagaaaggaacggcaggctcacaggtttaagcatttgtttttacaaaaaggagtgggatatgggggtggtcaagttttacgggtaataacaacattctctctagatggcagggggtaagtctgcctgtcctccattgctggtaccacataagggatacattagtaaagtagggaaagggttatatgtgtggctggcctgttctttagagaggaaggtgggatggtatctgctgtgtacctgtctcagaccaaacctggggctggaccagtgcccctttcttctcagccctcctccacagcctgactgtactgccagccgcacccatgagaaggaggtgtgaaggaagcctgaggacatccacctcgagaaaaggaaacaggaaaactatttccttccgccttctctggaccaaatttcactcccctcagctccagagagtgctgcaaaaatcttccttagggacgctgtgaagacacggggaagaggccagccctgagcgggcaagaagaaaagcttgaactttccatgcagtaccaagcaaggctattttggaaacaagcaaacaaacaaaaaatggaaaccaacaccatataaccacaggttgggtagctcctaaatcctggacagcatttggattgggggtaagggcaattttactccagctccttgttttataacccgcacaaggt

SEQ ID NO: 126644 - DNA, 1678 bp, Homo Sapiens
cgagggagttgctggtttatttaggagcctgggtccagcccccagggaccaggctgcactgctgagccggcctcagacagagacgggtcaggtcctgactggatgtctctgccatcatggaaagacgggtgtgcatgggccagggcagaatcccccagtgtatagggcagcctggcatcatcttggccactcagcagcacatgggggcctcgggagactccaggggtgtggagcgtgccgaggccgttacgaagatcatgtcacgcacagttctgctgcccagagcgggggcttactgctgtaggagcgctgcctgccgtccgccccgtcggcttccgtggcctcggcgtctgtggcggcccccgcctcgcagtggtaaggggtctccagtagtttcagcacccgccgcacctctgagaagtccccgcgctcggcagcctcgatggcattctgcgcgatgtagttcctcagcacgtacttcgggttgttggcgtgcatcacgcgcacgtgctcagcctgccaggcggcagcgtccccagcgccttccaggtccttgtccagccgggctctggaatgacatccgggctctggagtcacagccgggctggactttttccagcacgcgacccgccgtcccccggtgaccatggacgcagggctcacctgtacgcctgtagccagtcagcccagtggccctggttcctgctctgcagctctgccgcactcagctgctccagccgagactgctgctccacacgctccagctccctggcgatgcctgcccgggtgcccataagcgcgaacagctgcgggtttgactgcgccagcatcagcatcatggatagctgccggggatccatctggggccggaaggccagcctcagctcctccagggaggcacactgctccatcagcctggccaggaattccgccaggcctggcgactctagctccactgggaaggagctcagcaagtagaaggtgtttgtgaagtcggcacatgaagggtttagagcagtcaggttcacagactcggagcggagtggttgctaccaggggctgcagggaggggaatggggagctggtaaccggctcacacagggtttgggtggcggatgtgaacaagctccagggctcggctgtacagcactgctcctgcgtcagctgtgatgtgcggtgccctccacaatttaagaggatagatccatgttgtgttcctaccacaatgaaattgtaaaaaactgctacgaacaattatatgccaaaattacctacaagacatggacaaactacctgacacagaaaattcctggaaacataaattaccaaaactgactcaagaagaaaagaaaatctaaattgaggtaaggcaagcaaggagactgatcagtaatcaaaatttttccaacaaagaaaagcccaggaccagatggcttcactggtgatttctaccaaatactcttacgaacaaatggcaatccttctcaaactttgaaggaaaaaaatggaagatgtgggcatacctcctaactcactctgaggccagcaccaccttgacatcaaagccaaacagacactaaagaaaaagcagaactctaagctagtatcccttacgcatacagatgcacaaatcctcaaaatactcgcaacattcagcatattaaaataattatacagc

SEQ ID NO: 126645 - DNA, 1395 bp, Homo Sapiens
  misc_feature (1140)..(1203): n is a, c, g, or t
  misc_feature (1354)..(1354): n is a, c, g, or t
gatccatctggggccggaagcccagcctcagctcctccagggaggcacactgctccatcagcctggccaggaattccgccaggcctggcgactctagctccactgggaaggagctcagcaagtagaaggtgtttgtgaagtcggcaccggtcagatgcatggtctccaggagcttggacaccagcgccccgtcttcctccagctccacctgcacgaggcccagcttcctgcgcatcttctgcaggtagtgcctttggaactcggcgtcaaactcctcggccaggatggcctcccccaagctccaggggcagttccggctgcagggcctcggccagcttccgcaggttccacgtgcacacctcgggcctgcttgctgtacgcgtagcgcgccggtgttgtcggaggcattgcacacgtggtcggggtcgtaacctgtccaggaagccaaagggcccgtagtcgatggtgagccccaggatgctcatgttgtcggttttgagcacgccgtggcagaagcccacacactgccactcggccaccatccgcgccgtgcgccgcgtcacctcccggaagaaggcagcatttctctgcacgctgtcgctggcatgagcagcctggatctcggggtaaaaggagctgatgacatagtcgagcagctgcactcgaatgtcgttcctccccacgctggggcctgcacgccctgtgtgctcatctgcagacttaaaaatctcaaaggatccaaccttatgaaagtggaagctacacgcaacacaaccgtgcattgttcatatttgggattcccatcatagaacccgtcgcgcacctccgtggactcgtacgtgacgcaggcgccggcccgtgtggtggggactcccaggtggaacatggcttcgctgcatagaaactcccggatgcttgaccgtaggaccttggcgaccgtcggcctgtctggagaagggcgtgggcccggcgcccttgagctgcagctcccagcgctcgccgttcgccgtgcacacctcgcccaggtccatggcggcgccgtcgcccagctgcccggcgaactggccgaattggtggccgcagtagcagtgcgcggcgggctcggcgcccggcaggagcgcgttgccgctgaagaacagnnnnnnnnnnnnnnnnnnnnnnnnnnnnnnnnnnnnnnnnnnnnnnnnnnnnnnnnnnnnnnnntctgacagcgccacgaggcgcggctgccgcagcggggtgggctgcacgcgggtgaagcaggccccgggcacgggccgcggcgcggacggggcgccctcgcggacgcgtgggtcgacgatatcccgggaattccggaccggtaccagcgttnttgtggggccaagggggggcgcgggtgaatttgtggtggtg

SEQ ID NO: 126646 - DNA, 1379 bp, Homo Sapiens
  misc_feature (227)..(250): n is a, c, g, or t
gcaatggtgtctgtgtaattattttgctctttgattaaaaaaaagacccccagcaataaaaagtgggtcactctatgccctctgtgcacattagtctcttgtattcaactttgctgattctctggaattttcctactctttagcataattttgatgattgaaaaatattttggaaaggatgggtcaggtgctttgcctccatagtcttttgaagtgcctgcatatgnnnnnnnnnnnnnnnnnnnnnnnnaaaattctgtaaaaaaggaagcccattccacttttcaagtatgctttgttttaagccataaagacacacatgtagttttgtcacattctactagccaaaattttcaagaagggttaaaacaaagactggctagaaagataattattttgaataaatctcatattcatctttcatttatataattgttacttattcctcccatgcagtctcttcgttgtctttaagtgtgtgcctccaggcatgcttatttattctttattgtctcaaggtaacatttaagatgtatattaaagtaaagctacatttttttacttcattattgcatttacagggatttaattgtactttgtaattctatcttttcttattagccaaaagtttaatgcatttttcttctctgatggaattaggcacccacatgaacaccacaaatcaggacacttgtttatcattgttgctatgaatcctatgaatgatctttttttattttaaagacctacacttagcctacaaaaacatttgctgtataatttggtcaacagtttctatctatctgtatactgtcatgatgtcttaaactgcaggagttcacatactgagtttatatttttatttgctttgagcaaggtagataaacattttggccattataatgtgaaaccacttcttctttctttacagtatttgaccaaacttgtgtgtctatgatatttgtaaatacatgcgaatatctgtatttcttatcataagcctatttagttttattctcagtagggttttttggattgtacagtgtttatatgatctgaactccttctacataagaaggtgtgtatattactccaattatggacttaaaatattttaaaagtataaatacccttatttgctgcaaagaccagtgtgtaggcatttgctttttagcaatatttttaagtgctccattttaatgccgaggaataagtcttttggcaacacaaactggtcaataataggtaatgcaggtatgttcaggttaagccaacaatgttttgcatttttatgcttattttctgtcaacactaatgaagtcaacattgcctgaatgtctgaataatgaaacacatccctgtttaaaagtatgtaactg

SEQ ID NO: 126647 - DNA, 733 bp, Homo Sapiens
  misc_feature (60)..(81): n is a, c, g, or t
gtccggaattcccgggatatcgtcgacccacgcgtccgtctagatcgcgagcgccgcccnnnnnnnnnnnnnnnnnnnnnngcacagagggcatagagtgacccactttttattgctgggggtcttttttttaatcaaagagcaaaataattacacagacaccattgcatggcacatccaaagttttctgcttaagggagaatgtaatcattcagcagtaagtttcggtgagatttctttaggcttccaccttatacactgcaacaaggttcacatttactacctctccttagtgtatttctttataactccaacatatatcactttttaaagtattcatttcttgctgtctaacatacattattatttggaagcataaagttacattgtacaaatattttgcatttttaaaaataagcgcttttgccacttctgcaacacagtacttcacatagtgatgcaacaaaagcggagcacatatttaccacactccttaagattcattttaccaccaccatctgccgaacccatattgctttttcctcagtacctctgggcagtgactgtaccatgatttcacggagagaatgttaatatgacttatgaataacagtaccatcagtaatactgaaatcaatgcagatgtcacaaaatatgaacttctcaaggaataacttctttttaaatatttgggcaaactctgggtttctccggttggaattatcccactggg

SEQ ID NO: 126648 - DNA, 726 bp, Homo Sapiens
  misc_feature (242)..(264): n is a, c, g, or t
  misc_feature (697)..(697): n is a, c, g, or t
ttttttttaccttttatcacaaagtttttattgaacaaaaataatatgacagtaaaaatgatacataaagtgaagatttgcagtcatagaaaagatgtgtacaaagagaccaacattcaggttatatagttctataaaacttttcccatagcagtttaacactgattaagcagacataaaagggaaaagaaagtcattaatgttctttgaaacctattttctgagtaaaatacctctgctannnnnnnnnnnnnnnnnnnnnnngaatgaggcagagctatatgagtgagttattcttcagttcctccagttctctgtttgtgttacaggagtattttcatccatcaaaaaattgtagtatttttgcatttctaataaatggatctagagcatacattaatcccagtttccaaaggaaaagaaagaatcagatctatagtcatttaaatatttccaatcagcatttacgtaaacaagtatactaaaaatagtagttttggttgagatttttgcacattaacttcctttagtttgtaagaatcatgcattttggatgtgttctcttatctgacaacacagttttaaatgctgtctttatctgttttgtttgttttactaataacacgtagttttgaaccagtaattacttaacagctaggcatgggggagacagaattggactgagcacaatcattgntctaccttcagtgagctgtgcagccatag

SEQ ID NO: 126649 - DNA, 703 bp, Homo Sapiens
aatttcactccttcatgactgtcacatggacaaaatgaaactaaacttaaatcataactaaaaaaaccaccaactatatttttgaagatttttctaattcttgccactcaaaggacaacattttccacaccggtttgtatgttatccttttggtcattgtcttctgaaccaatgaaatgttgattctccaagggatttgagttttcgtggcacacgtcacctattttctcctgctgacttgggcttttgaataagtgtttcttttggtgcattccaagggcagcagctgttttgcaaattttggggcactggaagcaggcatagcccttcccattatgctcccgaatatgcctctgctcgtgattccttttggtggagagatacaaaaatctctgaaagcagaactgacagtggtaacgcttttctccagtatggattctttcatggattttgagggtctcattcaaagtgaatgccttggtgcaatactgacagacgaactccttcaagcccaggtggatgcgttcatgtttctgtaagtttccttgcaccgaaaagcaccgtccgcaggtcttgcactggtatggcttctccccggtgtgacatctcatgtgcattttgagtgtggaagggctctggaactgcttggcgcaaagctcgcaggcatatggccgagaagtagatgtcggtggggccttccttg

SEQ ID NO: 126650 - DNA, 743 bp, Homo Sapiens
  misc_feature (426)..(453): n is a, c, g, or t
gaatcactgcttttcctttattgataggtcagagagcatttcctggcacccccagggtacagccccctgactcctgctacccaagaaggccatcctttcctgcctgtgatactccgtggcatctgttctgccagaggactgaccctttgtgctccacatatgttttgccaggaaacacttatctcagccacaaaccgtccctgtcctccaaaagactcagagctgcttacaaggggctgctttggtcagtcagctgttagtcctggggctcttgcctcctctgtgggggtagcatcagtcaccctaaagttctcaggccgccgctagctagtgagttacaagattttagaaaccagctcttgtccacagatcctcaggcccctggttcttggatccagaggcgtctgaggtatgttcacaggcacnnnnnnnnnnnnnnnnnnnnnnnnnnnnctctgctcttgccctcagtccccgtctttccacctgggtccccttgcactttcatgcctgaggctgcactggtggccaagtctaaactgagggtcctcccgcagaccgagagccgccgcagcgcctcggaggcggcctccacgggcatgctggagcgctgttccagcagcatctccagcagtgagctcatctccgagacagaggtgctggccagcctcgtgcctgttgggctcagctctggtgcctctgccttgccgaacgtctggaaggtcctcggctcctccgtggct

SEQ ID NO: 126651 - DNA, 1077 bp, Homo Sapiens
gcggccgcggctggacaggatggttcacctgctgagtcgaggttatgtacttcctgttgtcagttacatccgaaagtgtctggagaagctggacactgacatttcactcattcgctattttgtcactgaggtcagcaatgcaccgttggtttcatgtttcatactgtttacactagcactgccctttttggcttaatttagttcattttgtacctaactgagaactgtgctttctgatgtagtgatgacaatgacagatactcgtttaccaaaaagcaccttctgcctgcagcagctgtatgacacactttacctccattaccaccctgggcatctgaatgttggagatgggtggtgtcaccggccggtgggggtggggagggattttttccaaactgatggccatttcacccggatgtcggtggatgccccgcactagtgtgcggaagaagtcaccctgtgctcccccacgcaggtgctggacgtcattgctcctccttatacctctgacttcgtgcaacttttcctccccatcctggagaatgacagcatcgcaggtaccatcaaaacggaaggcgagcatgaccctgtgacggagtttatagctcactgcaaatctaacttcatcatggtgaactaatttagagcatcctccagagctgaagcagaacattccagaacccgttgtggaaaaaccctttcaagaagctgttttaagaggctcgggcagcgtcttgaaaatgggcaccgctgggaggaggtggatgacttctttacaaaggaaaatggtagcagcttcagtgagaaactgcccttacaaacagtcccttctctgctgtcaatccaatactgctcccaaatcctgttttcagtgttcatttccctcaaggcaggcgctgggctcccacgacccctcaggacagatctggccgtcagccgcgggccgctgggaactccactcggggaactcctttccaagctgacctcagttttctcacaagaacccagttagctgatgttttattgtaattgtcttaatttgctaagaacaagtaataagtaaatttttaaaaagcc

SEQ ID NO: 126652 - DNA, 927 bp, Homo Sapiens
cattaatccaacccagcagaaaggctttttaaaaatttacttattacttgttcttagcaaattaagacaattacaataaaacatcagctaactgggttcttgtgagaaaactgaggtcagcttggaaaggagttccccgagtggagttcccagcggcccgcggctgacggccagatctgtcctgaggggtcgtgggagcccagcgcctgccttgagggaaatgaacactgaaaacaggatttgggagcagtattggattgacagcagagaagggactgtttgtaagggcagtttctcactgaagctgctaccattttcctttgtaaagaagtcatccacctcctcccagcggtgcccattttcaagacgctgccagagcctcttaaaacagcttcttgaaagggtttttccacaacgggttctggaatgttctgcttcagctctggaggatgctctaaattagttcaccatgatgaagttagatttgcagtgagctataaactccgtcacagggtcatgctcgccttccgttttgatggtacctgcgatgctgtcattctccaggatggggaggaaaagttgcacgaagtcagaggtataaggaggagcaatgacgtccagcacctcagtgacaaaatagcgaatgagtgaaatgtcagtgtccagcttctccagacactttcggatgttactgacaacaggaagtacataacctcgactcagcaggtgaaccatcctgtccagcagtgtcttcttcaactcaagctgctccatcacgtccagctgggagtgctcagtctcaaaaagcttaacaagcagctgcaggacctgggggtgcaggagctggtggcaggtgctgatctcatccagcaacgccaggtggacaggggtatgtcagtccggacgcgtggtcgacgattcccggaa

SEQ ID NO: 126653 - DNA, 1243 bp, Homo Sapiens
tttgtgtgttggagttataactttggttctgtttttaccctttatttggaatacagtgcaacattacagttttggatcattaaatgaatggacttggtgatatagtactaacaagcacgacctgaattctgggagtaagtggttttctagttcatgggggaggaaaacagatacgtgcaagatctccagaggagaacagaaccatggtactcagtgagtcaccaaagggctttggcttcaactcactaatggctggaacaagtgccagtcttggtcagccatccaggattttcatcacagcaaatcaaaatctccaatttttcaaactaattgtaggtagaagagagagaataactccaaactgtcttataaaaggatctagatgactactgaagtgtcctccattcatgagttggcaaaatcttcagagtgactgttggagcaaggagcctttcatgtgctcccagttattatatagtgcatagaggctggtaagtgttagtcctgtcagaccacctcgtgctatccctcgaagaccacctgtacatttatacaacatgcctgtcatggttccagctgctactgtgttaaggtcatcttctgcacctcgtgttttctcaatgatgacaccaaatgcactatagagcaaagccagagaacctagagtattagcccaaagtgccccttgcctagtcaccatattcaaaatctgtacatttcttggtttggaccaggccatgttctgggtttccttcaatcctagccgaagaccattcattgcaccaaacgcagcccctgtcatgcaacatcctccaatcgtaaagaaggccagctcaaatctgccccgggttttattagctccggtaggtaaaataaactcatctgtatcctgcacgaggtatcgtggatccacatttaaataaggagacagagggttcataccagttagcgggacgccagccaaatccgcgtgcgagtaacctgctccgccggctccgaaaaagccggccaatccccctgtggttttgttgccgcttcccccgcctccttccatggtatcgcagcaaaccgagtggttcccgccgctgcctcaagcctgggtggtccgctgggccgttactcctcaataacagcgggtaaccccgcgttgccagcgcctacttcacacgctgaccttccgggcgccccttcgtgccgaattcgccacccaggcctcgctaccttagaccggctatagttactg

SEQ ID NO: 126654 - DNA, 744 bp, Homo Sapiens
  misc_feature (684)..(684): n is a, c, g, or t
  misc_feature (734)..(734): n is a, c, g, or t
gacagggatatttgatcaggagaacgtggttactagcacacaagaaattaattagtcgtcacattagggaaaacatcaaaatgaatcacgcacgacccttgagatcctgaggttggcccagccgagcccgtgctcagaagccccccagctccggcccccagctgcccgcacgcccgccctcaccagcaggcaggtccccatccactcagacaccagcacgtccaccttctcgggcagcaccacatcctccaccttctgctggtacacggtgatgatgtcagcaaagccgttctgcaggaccagctgccccgtgtgctgtgccatctcactggcctccaccgcgtacaccgctctaggccgcgcatagtgtgcacagaagagactgatgatcccagtcccacagcccacgtccaggatgactttatccgtcagggattctttattctgcaggatgacactgtggtatttagttgttcgtggctggtctgccaacatctccaagtggagtttcagagttccatagctgccgaagtactcttcatcctgccacgtgtcctcggggtcgtactcatccacgtgcttccccacatggtttgccggaatgtacccacagcagcccgcacgctcaccccaccaccaatctgcagtggtttgtctcaggataagaattttttctcctctcanaaaactgagctgggtctcatcggtgggagcgtagtccgcgatggccacanactcctctgg

SEQ ID NO: 126655 - DNA, 1990 bp, Homo Sapiens
ggcaatatccttagtgttcccacccccagaaagggaattaaagccacccgccaattaaggggcccccccttaaccccaagggaagtggggggccagttcccctgttccccaggggttccccgggggtggaaaaatggcgtggcgttccctaggagatgtgttagccctttagcccttaagctttagggaccacaggaagtttcgggaaccaaggcccaggggtttgggccctctgggggccaccccccgggtggaacccaccgggaaaaccccagccttacttttttagaagggccggcccactgggcaggcggggggtgggccacgccaagttccttgccggagccccaaggggtgtttgttctggtgaaggaacctgaaggtcaccttgcccaggttaggggaaggggtcaaatgtggaggggaatgttcaccgactttcgcaggagtgtgcaggaagccaggtgcaccttggtttgtttgtgttcatcacccctcaagatatgcacactgctttccaaaataaagcatcaactgtcatctccagatgggggaagactttttctccaactttttgagatgtggggtcttgtctggaagtgacagcccagctcagagccacagacatgtgccttctccacactgggtttctctgcaacacaactgaacccgtgaccacgtctcctgtatggacagggactgggtcgtccatcatgaacagcgtctgcttccagtgtgtggtggggtggaagggcccggtgctgagcacctgcggcggctgcccctcctgcaggctctggaagtggacgctaaaccaggccgtgaagccgtgcagggtccccgccttcctgatgtcgaagcgcagctcgcccctcagggtctctagatcagaaatttgcacggttctcatgtccaactgcaatatagtgcacggttcagagagacagtcttctggtttcaaaatgtggttatacttgggctttgaaaaaaactccttaactgctaaagatttcagagcgctgaggttgaactcgtacgcgttgtcccagaagagcaccttgctacgataatccttatcagcactgcagggcacaaggtgcaacgcagccatggtgggccaaatgaccccgtcctccttcagccaggcatccccgggcatacaggatggactcgatcatgaactcaaacagcaggcaggtccccatccactcagacaccagcacgtccaccttctcgggcagcaccacatcctccaccttctgctggtacacggtgatgatgtcagcaaagccgttctgcaggaccagctgccccgtgtgctgtgccatctcactggcctccaccgcgtacaccgctctaggccgcgcatagtgtgcacagaagagactgatgatcccagtcccacagcccacgtccaggatgactttatccgtcagggattctttattctgcaggatgacactgtggtatttagttgttcgtggctggtctgccaacatctccaagtggagtttcagagttccatagctgccgaagtactcttcatcctgccacgtgtcctcggggtcgtactcatccacgtgcttccccacatggtttgccggaatgtacccacagcagcccgcacgctcaccccaccaccaatctgcagtggtttgtctcaggataagaattttttctcctctcaaaaaactgagctgggtctcatcggtggcagcgtagtccgcgatggccacaaactcctctggctgtactccctcctgcaggagacccgcctcactgcactcagcaggctcttctccctgcgattcacttctgggacagtcacctgatgttgccatagttctcttaggctctgcctcataactgctgatttatttcattttcttttccatttctcaatcgcgtttctccgctgagttccgcgtccacaccgccagcgcggaggggtggacggtcctttccaggagcctgagccaccgccctcccc

SEQ ID NO: 126656 - DNA, 1496 bp, Homo Sapiens
  misc_feature (126)..(150): n is a, c, g, or t
  misc_feature (504)..(504): n is a, c, g, or t
  misc_feature (699)..(699): n is a, c, g, or t
  misc_feature (702)..(702): n is a, c, g, or t
tccataatgaaacgaaatataatttatttgattttgaagatgctgagaatattaaacataaatctaaaatgaagacgctggagacataaaatggtgtacaatatgaaagaatcaaaatagaacgtnnnnnnnnnnnnnnnnnnnnnnnnntcagtagcaaacgttttataaattcacttatttgcataataaaataattagttattcactcacacccccagcactcactgaaggtttttgataagccaggctctggtctgagtgtttcgtggtcactgattatcgaatgtaaggagcaattcatctttttctcacctctagatcagaaatttgcacggttctcatgtccaactgcaatatagtgcacggttcagagagacagtcttctggtttcaaaatgtggttatacttgggctttgaaaaaaactccttaactgctaaagatttcagagcgctgaggttgaactcgtacgcgttgtcccagaagagcaccttgctacgatnatccttatcagcactgcagggcacagggtgcaacgcagcccatggtgggccaaatgaccccgttctcctttcaagccaggcattccgggcatacagggatggactcgatcatgaactcaaccagcaggcaggtccccatccaattcagacaccagcacgtccaccttctcgggcagcaccacatcctccactttntgntggtacacggtgatgatgtcagcaaagccgttctgcaggaccagctgccccgtgtgctgtgccatctcactggcctccaccgcgtacaccgctctaggccgcgcatagtgtgcacagaagagactgatgatcccagtcccacagcccacgtccaggatgactttatccgtcagggattctttattctgcaggatgacactgtggtatttagttgttcgtggctggtctgccaacatctccaagtggagtttcagagttccatagctgccgaagtactcttcatcctgccacgtgtcctcggggtcgtactcatccacgtgcttccccacatggtttgccggaatgtacccacagcagcccgcacgctcaccccaccaccaatctgcagtggtttgtctcaggataagaattttttctcctctcaaaaaactgagctgggtctcatcggtggcagcgtagtccgcgatggccacaaactcctctggctgtactccctcctgcaggagacccgcctcactgcactcagcaggctcttctccctgcgattcacttctgggacagtcacctgatgttgccatagttctcttaggctctgcctcataactgctgatttatttcattttcttttccatttctgggaccttacagtgtttccactaacaggaaccaaggtctgcatcttccagtcttttccttcttctcaattcgtatttttccagtgatagtgtaatccacacactgctctcaatcgcgtttctccgctgagttccgcgtccacacgccagtgtgtgggg

SEQ ID NO: 126657 - DNA, 1082 bp, Homo Sapiens
  misc_feature (46)..(65): n is a, c, g, or t
  misc_feature (776)..(776): n is a, c, g, or t
  misc_feature (835)..(835): n is a, c, g, or t
  misc_feature (855)..(855): n is a, c, g, or t
  misc_feature (910)..(910): n is a, c, g, or t
  misc_feature (925)..(925): n is a, c, g, or t
  misc_feature (1000)..(1000): n is a, c, g, or t
  misc_feature (1016)..(1016): n is a, c, g, or t
attaccctcactaaagggaataagcttgcggccgcctgctcaggtnnnnnnnnnnnnnnnnnnnnaactttggggatgtttattgcaaatggttataatttaagtgatatttacaattgtttaagacagagggcaaacaggctctgagccaggcctcagctttagaggcccatcctggagaggaaatggcacttgcagggaacatgagctcaatcactattgctcactaagcacagggtcacactggagtcatcttagggaggctgcgaggaagaaaagggagtgcacagagccatgaagcaactactttaaattctgaatcttgctgtgttcccactgagcatgctgccttcctagagcaggccttggagccatcccagggactaacacagatccttcctggggcgcaggcttctcacactagcgtagggtgcctaggtcatcctcatcattgtttatcatcacagacttctttctgcctgccagatatcttccctacttgtggctttaaaacaccagcaggagggaagtcaaggaatgttcttgttagtataaatccatagcaaaaacgatttgagaactggatgcttcccagggttggcaggtgtgtggatggttccctgaattctttatccacaggatgcttgaatgggtggtgctgttgaggctgacaaatgtctgagctttacagacttgttcatgtttttgagaacctatggggatactcattgggcagaatcagagcccagcagaacacggggacggggaaggggtanagaggggaaaccgacagagtctgaggccccccggggagggagggagactacttccagangcagcagcacaagggctctngcgagactctgcggagggggtcaaggtactgggggtggaggggtccctcctgcantgtggggtactgttngggtaagcgagtccaggcagttcctgtgcacattcacatggctgcatgaggagtgaaccagtctttggctttcangctctcacagcgtgcntctgatggacaatccttatgccagtcgcctgcatcaagtccgagtgaaaccaatcacagtggcgga

SEQ ID NO: 126658 - DNA, 788 bp, Homo Sapiens
ggttaattaattttgaaggcgatatatttaccaaatttgtttaaagcccagaggggccaaaccagggtttctgagcccagggccttcagctttagagggccccatccctggaggaggaaatgccacttgcagggaaacatgagctcaatcactattgctcactaagcccagggtcacactggagtcatcttagggaggctgcgaggaagaaaagggagtgcacagagccatgaagcaactactttaaattctgaatcttgctgtgttcccactgagcatgctgccttcctagagcaggccttggagccatcccagggactaacacagatccttcctggggcgcaggcttctcacactagcgtagggtgcctaggtcatcctcatcattgtttatcatcacagacttctttctgcctgccagatatcttccctacttgtggctttaaaacaccagcaggagggaagtcaaggaatgttcttgctagtataaatccatagcaaaaacgatttgagaactggatgcttcccagggttggcaggtgtgtggatggttccctgaattctttatccacaggatgcttgaatgggtggtgctgttgaggctgacaaatgtctgagctttacagacttgttcatgtttttgagaacctatggggatactcattgggcagaatcagagcccagcagaacacggggacggggaagggtaaagaggggaaaccgacagagtcctgaggtcatcccgggaggaagggggactacttccagaagcagcagcacaaagggct

SEQ ID NO: 126659 - DNA, 726 bp, Homo Sapiens
  misc_feature (631)..(631): n is a, c, g, or t
  misc_feature (634)..(634): n is a, c, g, or t
aaagatacatgaaaagggttttatttatttaacaaacagacaattgaacaaacaaacaatggaagcaagtcatttgccaaaaggaacacagagggtcatgatgatctactcctccaaggatttcagggttcccagacgcctagttttctgtctagttctggaagatgttattcttggggagcaataggtcctcgagtttggggctctttcaggttctctctccatttccccattctgcaccatccctgccctggtggagccccgggcggaacacaggatccgaagatggcagcggaagctccgcagcagcccacgagcgactgggcagggtggatacaggctccttcactgggtgaaggcggcacaaagaaccggaagaaccatcccgggagcccaccgggcgttcagcttcccttgggaccccaggcgtctcgggctgggtcgccgaccggggcgtttctggggtctctccctctggctccagaatctcctaacgcgcaggtgtccaacgtgaccagcgcgattcaccgctctaatatctctggttttccaagaacttgctcagtcgtcctgccaggcgggccctgcaaacaggcagtcctcagctctggacttctggatcacgacgtcnatntccttctgaattcggtcttgccttgaacacatccccattaaataatccttggaaaagaagagccgctatttccaccccaccccctcgcaagt

SEQ ID NO: 126660 - DNA, 1092 bp, Homo Sapiens
taattttaaagatacataaaaagggttttatttatttaacaaacagacaattgaacaaacaaacaatggaagcaagtcatttgccaaaaggaacacagagggtcatgatgatctactcctccaaggatttcagggttcccagacgcctagttttctgtctagttctggaagatgttattcttggggagcaataggtcctcgagtttggggctctttcaggttctctctccatttccccattctgctacaatagataaacaaacaaaaacaattctcacttccagaagatcccgcctgtacgtctgcacgagcccttcaggaggtctggatgtctggttcacaactcccctgcttcttttccagcttttgctttcccttcccccgctcccgccctaccgccccacgacccgaccaccgcccagctgagccccagaggctccacagcgcagaaggtgcaccggaggccgtgtcagttgcccgccccgcggggtgccaagaaatcaacgctttgtaaaaagaacttccccgtggaaaaaaatctcttgatttccactctcacctctcttcaaaggactaaaagctaaaggcgacaagggattcattcgacaagtcctagtcgtgcgcccttgtgagtgccagaccctgctccctgccaggggacccacgagcgaccctcaccaccatccctgccctggtggagccccgggcggaacacaggatccgaagatggcagcggaagctccgcagcagcccaacagcgactgggcagggtggatacaggctccttcactgggtgaaggcggcacaaagaaccggaagaaccatcccgggagcccaccgggcgttcagcttcccttgggaccccaggcgtctcgggctgggtcgccgaccggggcgtttctggggtctctccctctggctccagaatctcctaacgcgcaggtgtccaacgtgaccagcgcgattcaccgctctaatatctctggttttccaagaacttgctcagtcgtcctgccaggcgggccctgcaaacaggcagtcctcagctctggacttctggatcacgacgtcgatatcccgggaattccggac

SEQ ID NO: 126661 - DNA, 755 bp, Homo Sapiens
  misc_feature (557)..(557): n is a, c, g, or t
  misc_feature (621)..(621): n is a, c, g, or t
  misc_feature (738)..(738): n is a, c, g, or t
atatgaaaagggttttatttatttaacagacagacaatggaacaagcaaacaatgggagcaagtcctttgccaaaaggaacacagagggtcatgatgatgctactcctccaaggatttcagagttcccagacgcctagttttctgtctagttcttctggaagatgttattcttggggagcaataggtcctcgagtttggggctctttcaggttctctctccatttccccattctgctacaataaacaaacaaaaacaattctcacttccagaagatcccgcctgtgcctctgcatgcgcctttcaggaggtctagatgtctggtccaccgctcccgggcttctttcccagcttttgcttttccctttacctgctctcgccctacggccccagggccggaccacggcccagctgagcccccgcggctccaccgcgcagaaggtgcgccggaggccctgccagtttcccgccctgcagggtactgagaaatcaacgatttgtaaaaagaacttccccatggaaaaaaatctgttgatttccgctctcagggctcttcanaggactaaaagctaaaggcgacaatgaattcattcgacaagtcctagtcgtgagccctggtgangtgccagaccctgctccccccgaggggacccacgagcgaccctcaccaccatccctgccctggtggagccccgtgcggaaacaggatccgaagatggcagcggaagctctccgcggncccgagagcgactgggc

SEQ ID NO: 126662 - DNA, 984 bp, Homo Sapiens
  misc_feature (811)..(890): n is a, c, g, or t
tcttttccaaggatttatttaatggggatgtgttcaaggcaagaccgaattcagaaggatatcgacgtcgtgatccagaagtccagagctgaggactgcctgtttgcaggtgagttcttgcttttccagaacctcggacccagcgcccccttctcagttctctgaccgcgacgatgtgtggctgggggtggggtggagggtttgcacgtccgcattccggggttcatttggcgacagctgctgcaacgaacgcgggagccaaaagcgggagggggcgccagcctcgccccttcccctccccccagccccaagtctggggcagctactagctttgaaggcagaacccgagtggcccgagcgggggtctaggcgaaggggcagtgcgtggtatttccagccccgcgtagtgcccgaagcctgcaagcacgcctcctgggttccagcagcggcggcagagcggggttggttggacccgccaggtttgcgtaatgggctgagcggcggcggccgggaatggagcctgctgcgctgcgctcgtaagctgcgcccggcgccgaggacccccggggggcagcgctcggcccatctccggccccttcggctccatctagtcccctccgactggcaaagagaagggattcctcggattcccaaggcacccagcgcccctgcctggggggtcgcctttcgtccattttgctcccccgggagcggacgcgtgggtcgacgattatcccgggaattccggaccggtacccagcctgacttttttggtaccaaaccttgttctataggtgtcacctaaataggnnnnnnnnnnnnnnnnnnnnnnnnnnnnnnnnnnnnnnnnnnnnnnnnnnnnnnnnnnnnnnnnnnnnnnnnnnnnnnnnccggagtctcatgggaggcaacagctggatgggttccgaggactgacggtcactaagactctgtatcacccacggggagaaaaaacacaaacac

SEQ ID NO: 126663 - DNA, 669 bp, Homo Sapiens
  misc_feature (337)..(388): n is a, c, g, or t
ccccccttttccccctcccggccactccggtttgtgtttgccacaagactcataattcctttagaaagtggagtcgaattcataaaagtgacggggggagagcgcggagagggaaggccggagcggggctcgcccctcgtcggctcccgccgcccagccggtgatcgctctcctgccgtccccggcaccctcggccccccacggcggttggtccgggcgggggaaggagaaagtgagactcggtgtcatcaccaatccgtcgccagaaggggaggaaactggaatccagcagcggcgagcagcagctgggcggtcacatctggaaatggaaagccgnnnnnnnnnnnnnnnnnnnnnnnnnnnnnnnnnnnnnnnnnnnnnnnnnnnnacccaggatcacttccgaaaccacttggccttcagcccctgcctcggccagaggtttcatttttaactgaatatttaccaaagctgaaagcgtgcgaggggggtggggtggaaatagcggctgcttcttttccaaggatttatttaatggggatgtgttcaaggcaagaccgaattcagaaggatatcgacgtcgtgatccagaagtccagagctgaggactgcctgtttgcagccatgtgaggacacagcatctgtggcaacaaggagccatcttgggag

SEQ ID NO: 126664 - DNA, 536 bp, Homo Sapiens
ccatcccgggagcccaccaggcgttcagcttcccttgagccccctggctgctcgaacccgggtcgcagaccggggcgtttccgggggcttctgaagcaggcgaggggcagggcgggcgaaggccattcggctgtccttctggctccagaatctcctaacgcgcaggtgtccaacgtgaccagcgcgattcaccgctctaatcgctccggttttccaaggccttgctcagtcatcctgccggacaagccctgaggctggaaggcacaggggaaatttgttgaaggcgcccttcccatagcgcacagtaaaagcagtagttcttgtctctgtggcgcaatcggttagcgcgttcggctgttaactgaaaggtctcacaaaacttcttatgaagagctccaaattaataaaggatgcctttcataatgagctgatgggagatgaaaatatcaaaaactatgcctataaactggagatgtcgcttactggaaacaacatcaaataaaatactccctccaagtccactggagggcaccaaa

SEQ ID NO: 126665 - DNA, 639 bp, Homo Sapiens
  misc_feature (620)..(620): n is a, c, g, or t
aaagattttcttttccccccttttccccctcccggccactccggtttgtgtttgccacaagactcataattcctttagaaagtggagtcgaattcataaaagtgatggggggagagcgcggagagggaaggctgggagccccagggagtcttcactacctacactgccgctcagctcccggcgcgagtggaggtcggggtggggagacgcgactcctgcccgggatggctgacactctgcgagccccggcggcccgcggccgggccgggtgactaggcggagggcgcggagggtccgcggcgggcgggtggcgctgcagcagcctgggcacggctgccgccgcccgcgggcgagagtgtgcacgggtgtggaaggccggagtgcgggccgtgaggggtgtgcgcgcttgatccggagcggggctcgcccctcgtcggctcccgccgcccagccggtgatcgctctccggccgtccccggcaccctcggccccccacggcggttggtccgggcgggggaaggagaaagtgagactcggtgtcatcaccaatccgtcgccagaaggggaggaaactggaatccagcagcggcgagcagcagctggacggtaacatctggaanatggaaaggcgactccccc

SEQ ID NO: 126666 - DNA, 1733 bp, Homo Sapiens
  misc_feature (1210)..(1210): n is a, c, g, or t
tttttttgtgttccaataaaactttatttacaaaaacaaatggccagccccaagggcctggtttgcaactcttgctctggagcagagcagaaggtatactctgaactgcaacaaagtttctgctgcaaaagcagcacctctgctgtccgtcccctcctctctgtccactggctctggacgtccatgtgaacaggcttgccaagaaggacaaagtgggcaggtaaagctggggggggcggccacaatcaagatcccaacacccctatctttaagaggcagtgccaagcgaatcccatttcaggggacccactctacctcgctgcctacgatgaattcccatcttacagcctctcgattactatgcagttaccaagctggctaccaccttactaagattcttgccattttctcattctagtcaaaaaagtaagtcatcggtttagtggagggggcagctaaagcccaagtttgtatttgagaaagatgtacaacaggttctttaaaaaaataaattacataaaattttctggacacaaaactcctatccagaccactagtcatggagaagaccagaagccaaaaaatacaatcctcatggagaaccagcctattcgctgtgtgcactctgcaactggtaagccttccctgggggtcttactctcagaactctggcttgttggacgtaactggtaattcctgcaatttcaacagaatattctcctagattggtagagagcagaccttggaaccctggagtgaacctttctcagggtgctccactatggcacgtggcagcagaatccaggccacgaatccaggccaccgttgccatcacccctcgcctggctgccttgaacaggcaagcttaaaacaatgatgcaacctccctggtcccttctcagccaggacagaccaggcatggtctttcacggaagccatcctctctcataatcattgttgctcaggtgcctgtttaggagacggagctgtagtcacaacaacagtggagactgctttggaggagccagaagctgttccctgttggagatgggatgcagggacagtctggatgcgcacctgtgtggcctgaccttgctgctgaagctgctgcaactgctgagcagtgaggaaactaacaggcttattgccagcaatgagcttagtgcctgctggcatagttgtgaggatgatgttgcggcccaccccactngaggttggctccaaggttgcctttgatgatgggggctgtgaccacgctcttgcccttcattggctggctgatcacagagaggggaactgtggatccgtgtaggcaacttcccagcctgggacgtggacacaaccgtggtgctgacagggacctgccgcacggtgggggctcctgtgctgatgctgatgggggtgcttgcagccccagaagccacagctacagtcttggacacagcagcattcatactgggtaaggacaccgctgaagtatggacagttccagacccactggccaccgaggccccttgcttggcgtgggttgcaacggtgatggtctggcctgctttgggaggcatcactcccagtccttgcccgatgcggatcgtggcagcgggttttgtttttgaagaggccctggggttttttccttttgggtcagcccccttcccgccaagagttggcatcaagcgaaaagccgaccttgaggcttctgttggcttgaggtcaggagtcaccctcgtgcc

SEQ ID NO: 126667 - DNA, 802 bp, Homo Sapiens
  misc_feature (722)..(731): n is a, c, g, or t
cccctattttttaagagctttaagggcacgatagcaaaagtccacaaaagaaaaatcttacactttctttttaaaaagacatgatctttactggtgcttaaatgaacaaagaggtagctaaaaaaagccaccatttctctcaaatgtcatcaattacataagacctcaaaacacacactgatttgaaaaaaaatccatccgtattataaacagtgaagacagattaatgtcatctatttcatagtagcaggtcttccttgatatttgtaacaggcagaaatatttgattttactcttttgtcaccagagataattgccacatcacttgccaacatgatgaactcattttattagtcaaatgttgaattccactcaagtgcacttaatatagtactacacattataagttgatcgaaattaaagagatctccaattagaaatgggatcttcaaaaatactattactaattttcaagttgtatgtttcattggtattctaatgaaacatataaagcaaatgatttgtttccagcatctctgaaagattatttagtcctttaatgtattaaaatagtagtgagaaaatgtgcccttgaaatatagactctgaagtacaatttaaaaaattaaaactgatttgatatgattaattcaaactgcggttgaattgcaaggggacagctcagaagttcataaaagtttcaaattagtcacatttgttgnnnnnnnnnncataaaatgcaggtgcctgcaatgtttacattgtgtcagatatttcagagccatgtataatgttgtcttga

SEQ ID NO: 126668 - DNA, 1049 bp, Homo Sapiens
  misc_feature (86)..(86): n is a, c, g, or t
  misc_feature (101)..(101): n is a, c, g, or t
  misc_feature (524)..(574): n is a, c, g, or t
tagccatagaactgactcctggaagcctggagagaaggtgtgacacccatggttctcaactgtaaggaaaaaagacaccagacttntgttccctagtgggngaaagcccttagtcttgtacaggagcagcttgctcccaagtccttttggaagctggcagagctatattcctgacagccctgactgccaggtagagcaaaagacattggtgggggtatgtgaagcaaaaggggcaggtgcacacacctccacagtgacctctgtgcacacggttaccaccaactggctggccctcctcctcttccctggcccattgatcatcccttctcacagagggtcatcattatttccaaatattgtttgtctgatgacttcctcttcccagtgcaatttttcccttcctatttcaacctctggttcctgggatgagccataccctggaactggcccacccactgtgtcttccacgtaagggagacctttgcaaagggcatccaaatgggtaggcaggtgacagccgccgnnnnnnnnnnnnnnnnnnnnnnnnnnnnnnnnnnnnnnnnnnnnnnnnnnncgttatgagtttgactctcggggagttttgttgttatgactcttgtgtcttttgtcacaaaacaatgatatttgctaaacgatatatggaatttatttttgattggtaataaaaaatcaaatatgtataaatcctggtgaatctacaacttgcctgtttgttctgtcagtattcagtatgttgttgagataaaagtggctgtggctggctgtctcttgtgatgggacaagggcaataaaggattctaggaccattcagcagtgaaatgcaatcagaaatggaatttctaaatatagtcaaggctgtcgtcacaggagtgagagggacgtggctgctggcagacatacaggacagatgtgctcagctgccataagcatgagtcctgtgaaacagatcccatagggcccttggcttgtgagtactggaagggcagtgggcttcagcaaattgcccctcctccctacccatgggactg

SEQ ID NO: 126669 - DNA, 1086 bp, Homo Sapiens
  misc_feature (187)..(251): n is a, c, g, or t
aagaaggaaggtttccttcccaaagttccccagagtgggagttttcccacgctccgggcgtttaaaaaagaggggccgggccctaggttataaaagggccccccttagggggccccctttttacaaaaaaagggggtgccgataaacttgggccccctgagggtatattttgaagccgccccccccnnnnnnnnnnnnnnnnnnnnnnnnnnnnnnnnnnnnnnnnnnnnnnnnnnnnnnnnnnnnnnnnntagattcaccaggatttatacatatttgattttttattaccaatcaaaaataaattccatatatcgtttagcaaatatcattgttttgtgacaaaagacacaagagtcataacaacaaaactccccgagagtcaaactcataacgccaaaataaatcacaaaaatatacaaattaaaatattatgcaaaataaatacggcggctgtcacctgcctacccatttggatgccctttgcaaaggtctcccttacgtggaagacacagtgggtgggccagttccagggtatggctcatcccaggaaccagaggttgaaataggaagggaaaaattgcactgggaagaggaagtcatcagacaaacaatatttggaaataatgatgaccctctgtgagaagggatgatcaatgggccagggaagaggaggagggccagccagttggtggtaaccgtgtgcacagaggtcactgtggaggtgtgtgcacctgccccttttgcttcacatacccccaccaatgtcttttgctctacctggcagtcagggctgtcaggaatatagctctgccagcttccaaaaggacttgggagcaagctgctcctgtacaagactaagggctttcccccactagggaacaaaagtctggtgtcttttttccttacagttgagaacccatgggtgtcaccaccttctctccaggcttccaggagtcagttctatggctaggagacctcagactggccaggggtaggcatacttggtgcaagacaatccctggtcctaagagttaggatactctaggcacctggagagcagggcactgggatcccgggaattcc

SEQ ID NO: 126670 - DNA, 897 bp, Homo Sapiens
tctgccactctgctttattggaacggctccgcgtctgagagcacagcaggctcaacccgtgcttcagagtggaggccggaccaggctggtgggtgaccagcaggactcacgacacttccaacacaggaaaggcaaactacagactgtgggcacagcacagcacaggacagcacagccaattgagcttttcttttatatataaacaaataatttaaaaattcgaataatatatagagtttctctagagagacactttgcaacaaaaaatatatataaagaatatgacctcctgggtaaatgaagcagcatctctgagcggaggaaagagggttcctcatgcactggagggggcgaagcctttgggcaggcacaaaggccattgcatatcttggaaaaggttggaggagtagagggctggctagtcagggtatctgcattattttctctacgttgcaggttttttatggctttggctaaagcaagtgaagcagcggaggtcctaaggtgctaaactgaggcctcttggtctctgtgtacaaaacaaaaggaggggggcaggggacagccatcaagccctcttgagcctccagctgagtggaagcaaatggaagatcttcagggcaggggggaggctgggggatagggtttagcagcctcctccccccataccctctgcagccctgcactcccacacatctgtccctgctgatagtgtctattggaagggaggcagttaatctcccctacactctgttgttaatccctgacagcagctggaacagagatggcagaaaggacctatgtcaaccccatgaggcttctcctttggggcagataacagccaggagcctggggaaacagggatgagaagggcattggtttaggcagtgaggctcg

SEQ ID NO: 126671 - DNA, 560 bp, Homo Sapiens
  misc_feature (175)..(175): n is a, c, g, or t
  misc_feature (183)..(207): n is a, c, g, or t
aatttggggggggaggaattcccccaagcgcccttttgttccctgggcccccggggttttcctttggggaaaccagctttgggcccctgtttcccttttcccttattgggggccccgcggcgcccaaaaggaaatggttcttgaaaagctttttggagggcccgagggcggccgnacatgttnnnnnnnnnnnnnnnnnnnnnnnnntttcgaaaatcagtaaaactttattcgcttccattctttcgccattaacagaaaactggagaaagcaaaaatgtttcgtgtttacaaagataaacggcctctttacccagagatcaaaacctcaaacgacaagggggaagataaaaccgccctcccccacatcccctgagctgacccttgtcatcttagacaaagccttcagtccactggccagggaccctgtatatggccaattcaagaagagggccaagaaatcagacccatccattcccgtgatataaagttgaacagaagctacaccaagggtcaagtgtctgtattttacaggacacagtaaccaggcggctacttat

SEQ ID NO: 126672 - DNA, 1488 bp, Homo Sapiens
tcttcaaggccccttttattttgaaagatctgttttttaaaagaaaactgcagccttgccccagtggggaccatgtctgcatcagaaggaaagtcggcaggtgcgcatcggggcacactcctgcagctagggggctgctgtctctgctcagcacggggaggccggtgcctgggtggccccaggcctcagcagcatgagcttttgctcctcaccttccaccagacggctgggaagggagttgagtgcggactgagctatttgccgcctcctccaggctccacttgaaatcgtcctttgcaggtggtcattgtccttctttcaggataacccaaggtcccccagccctggggccatgggcgtccagctaattgggcatcttcccttttctctctctaggccggccgagcgaggccctgggaccgtgacctgcaggggcagttgccacctggggtgggtgggagggggaacagtggcctttctggagctggcgctgccttccaaggagccctgctcccaaggaacagacacggtggctgtgccctctcaggtacctgcaggcagctccctctcgtgggctgacccagcggaagccctttgttccttgaagctcacccgctggttagtcctggattctagctggactcattcttccccttttggcagatcaattagtgtcaagaactttggtcctgcagagtcatttttctttgttcaggcatgttctcccaaccacagtctttgtcccaatctggatggagcaattatgaagtctgtatttcagtccagaagctgcccgaatcctcacatgccagtgggatgtcattcattctttgcatccataattgtgcatgatagaaatttaattatcgccagccccagcccaaggcactgcatgcccgatttcaagctgaatagaggtagataatatcccaagactctttaaaggtggcaatggccggttaccaggcagccaggagcccagctataaataaacctccgctggccctaaccagctgtgctgtagaccacgtggcgctccatgaattggattgggtggttctgagcaggagagatttaatggaaccgttccgagggaaggctttggagactcgcaggcatcgttctccattacaacaatatttctgggctcacgtttaatagtaagatgaatgacttgagattaaagtgagcacccaggggccggacagctgaggggacagaactcagagcctggagcacgcaggtgctaatctcggacaagcctcctgccctaagagccttggtttccctcgctgtggagcggtggttggaaggcagggctggcctttgaaggctacccctgttcttggttgcaggacctgtctaggggcaccaggctctaaacctgcctgattggcttggccacgccaagggcctagccagaggctgctatctcaagcagctgcctcgtgccgaattcggcgcgccgtcgacttcatactctctccc

SEQ ID NO: 126673 - DNA, 1041 bp, Homo Sapiens
  misc_feature (352)..(405): n is a, c, g, or t
  misc_feature (500)..(511): n is a, c, g, or t
  misc_feature (650)..(659): n is a, c, g, or t
taacagaaaagtaaattacacagacataatgaagaataaagtacagctacaaccaacatgaatcaatcccatcttgaacaaatgcagctacaaaagaatgtatgattttaaataaaactcaaaaacaagcaaactgtattgtttaagtttacacacataggtggtaacactataaaaacaaagagacaattatcatacaaggtaggatagtggtaattaccaaagggtacgtggcagggagctggttgtgactgggaaggaactacatgtgtaatttctgaactgctgtcaatatattctactaagctgagtgctagttatatagttgctttaaaattattccttgaactgnnnnnnnnnnnnnnnnnnnnnnnnnnnnnnnnnnnnnnnnnnnnnnnnnnnnnntttctcaataaaaaaacaaagttatgacatagagcaaaatgaacacatattatcaatggatacttaactctgatcctcaagagctcaactctgannnnnnnnnnnncagagaaagcattcagattatatgtttttgaatctatgaaaagtaaaatcgctaaatccatacacagtgattatataaaattagatatttgcaatcacaatgaatattcattatagtggaaagatttaggtcacgagannnnnnnnnnccctaaaaatttcaaaagaacaattttctatcttcattttactaattataaaataaacatagttgcttttttaatgttccatgaatatcaccagagtgtgacatagtagattaaaaaataaagatatacatttatttccatgtcctacctttgggacaatttatgaggaacttatggacaagtaacagaactgctttgaactctaaaaagaaatggactttacaaatccctaaccagtagtatgggatttaccagatcctctaggttttacatggtcacgactatttctctccaactgttttaaaagaatttcctggagccatctgaggacatttgaggtaatgtccttccacacctaataactgctgtatctccatgattg

SEQ ID NO: 126674 - DNA, 873 bp, Homo Sapiens
  misc_feature (65)..(82): n is a, c, g, or t
  misc_feature (127)..(127): n is a, c, g, or t
  misc_feature (132)..(132): n is a, c, g, or t
  misc_feature (145)..(197): n is a, c, g, or t
  misc_feature (293)..(301): n is a, c, g, or t
aaagcttcttgttttaattaaaaacaagcacatattaacagccacatgtgaatgccaaatgattnnnnnnnnnnnnnnnnnncaagagccatctacactgcagctagggaaagcaaacttcttggcntaacnagaagtgagggannnnnnnnnnnnnnnnnnnnnnnnnnnnnnnnnnnnnnnnnnnnnnnnnnnnnttcagaaaagccactccagtctgggaaaataaaagcacagaccatttctaatgactggttttgtttcaccagaagtaaacagagtacttagggtannnnnnnnnaaaatagtaacagttgtactaatttaaaagccttttcatttgaagaaggaaaaaatctgtctacagtgagaaaagctacccaatgaaatacacattttaataggttgatcaactttttaatttatgttcactcatgggttcgatttttgttcaccaaacttccctgattataagggtcacctagggcacctgttacacacagtctcctggaccccgttccagccttgcagcatcactgggtcattgggttaaggagctggcccggcatgccttcgttttgccagccctcacccaatccatcttcagatgtttttctgtggaaaaaaacctcgagggtcttctaatactaactagtcagttactctgaacatcaaaagacctcgtatccaggaatgtaacgtatataaacagattgaatccctttgtgaaactgattgggagtcaggaggcatgaaaattagtctgcttctgcctcgaaacagaagtgggacctcggtcaagtcccttcccttctccgggccttcatttcccttacggagtaagtaggttatatcgtcttactgactaaaatc

SEQ ID NO: 126675 - DNA, 671 bp, Homo Sapiens
  misc_feature (392)..(400): n is a, c, g, or t
  misc_feature (589)..(589): n is a, c, g, or t
ctgtaatcctttaaaaatattttattaagcattgatttagaaaacgcaagacaagattgtaacacctcagggcaaaggcttgaaggtgaaacaaataacactataaatattgcacttctaaaatctttttttgacatcttcacacaactcaattctaaaatatccttttacagagatgtataaataaacgcttccaagctgtcaacgcttgacacttttagcttcctatcaccgcactaagtcggcaggtttccaatcagatagctgctcctctgacagcaggcaaagaacttccctcagctatctcggaggcctcatacctccatcatgtgaagagtcaaccagtcccatctttcggaatcctctttcagaatatgtaattttataagtannnnnnnnnctactgagagaacatagatctttcaaaggcaatggcagaatacagcttaaatggacacagttcactgttaacattgcttattttttaaggcatccaggagcttctgattcttggtcttgaacttcatgataaagctgtttggcatgattttgcctcgcccatcttcacctacttggcccataataatgntatttagacctcttctgaggagagggcactgcttgcagacgacagtcagcctggcactcatgttcttgcccgcctgctgaat

SEQ ID NO: 126676 - DNA, 562 bp, Homo Sapiens
ggactctgcagtgttaagcagtgtttatttggtaagctgaatccaagaagatgtgttaggatcgtttctaggagaatgcttatgatagcttagaagaaaatactgtggaagtcttgcctgcgatccttttgagattgggaatacaaaggataaaattaaaacacctacagtattttgcaaaatctttctgaaaatccgtcctggcattaacaaaagcgcatcctctctcggttccgacgacaaacacgtctgtttcgtacactgcgatgcaggccacttctgccttggacttggccagttctttacacatggattcgagggcagacacgaggaatgtcaccaccatcctggtctctgaggaggactcttcttcaacaggcatggtggaccctgctacctgggccatgatccccttcttcttcttcttgtaatgatgtgagaatctatgcctgaatctgtgtaaccatcccttactcgcagtaaatggcttggtgtcagtttcagagcatcccttgcagaagtcttggtataggctcaaagctttctggcgcaacatgttgct

SEQ ID NO: 126677 - DNA, 511 bp, Homo Sapiens
tcatgaagaccagtttattttacatgcttgctttcacattctttactgggaatttaaggccttttttcagccttaacttgtataccaacctcaaggattttgtttgatacagaaaaggatagggctgggcccttctgccaaggactgataacctgcctgccaaaaggaagagggaatgaaagccttttgtccttctaggccccttacagtacctcaaaatctaaaggccttaaaggggaaaaaaaccgtatctgttctttctccttatctcctacccttctctttaagcatattgaagatggacttttttccaaatgtttatttgtaggaagaggtgatgagtgcaggccagcagctgagaacttacagctttgatgcaccaggaactgtattcaagctgagaaactggtaaagcattcgggggagaaaggattttgctctttgctctgccatgtttttccgggctctttcttcggggagaaagagggctctaacctttggtcctcattca

SEQ ID NO: 126678 - DNA, 624 bp, Homo Sapiens
  misc_feature (517)..(517): n is a, c, g, or t
  misc_feature (537)..(537): n is a, c, g, or t
  misc_feature (582)..(582): n is a, c, g, or t
  misc_feature (589)..(589): n is a, c, g, or t
cggatccttttctgttcccaaacacacacacaaagcatataacaccaaacactctgagtgagtggtaaaggcccgttttaactcgggccaccggaaacaaaaggttccctctgtgggggagaaaaagaaatccaggagctcctccctggattaaaaccaacgaggtgcagaccaaactttaacacctttagccttatgtggaaaccaaaaaccaactgctgggaaacttgtgaaaagcccttttacccacaaggggaggggtccaagttgctgccctttggggacacccgagacccctaattagcctatctgaatgaggaccaaaggttagagccctctttctccccgaagaaagagcccggaaaaacatggcagagcaaagagcaaaatcctttctcccccgaatgctttaccagtttctcagcaacatttattcaagatgatttttaccagggaaccttattcaaaggcaaaaccacagcttgcttggggtttgaagtccccatcctggggcttnctctttagccgccagacatnggccaggggaaccctgttggtttccccaaggaacatttttaaagnttcattntttttgattttgaaaggaccacctttttcattttt

SEQ ID NO: 126679 - DNA, 1924 bp, Homo Sapiens
  misc_feature (404)..(432): n is a, c, g, or t
  misc_feature (539)..(547): n is a, c, g, or t
  misc_feature (1812)..(1846): n is a, c, g, or t
tttgtttttaaatccaggatcaagaccacaatttattatgtaagacatggggtgaagaatggtcaaggaaagttatggccgtgagtgacatggaattagatgaaaaggctcaagtttgctgaagagagtttaaatttggcttttgctcttggaaacgtcaaaataatcataagaagcacttgtgccttacagagcaaataatccacagagtgtcatattcattttgcaaacagggtcacaacagcagtcaaatagaagcctgaacacccagagagttaacatacagattccataaggataacaagggattgagcatgctggtgggtttttaagtcagatccacattgaaccctgtgacctaccggaggttataagtggaacccggggaaagcagcttttccatnnnnnnnnnnnnnnnnnnnnnnnnnnnnnagaaaaccagactctgctggatgtctataatactcatttgcagtaaggctttcaagatacaggaatttttatagcatttgtattttaaggatttagggcaaatacannnnnnnnnctacttgataaaaagaaaattagtacttaaaaggttcaaaaatatattgattgagttatttttcttacataaataaattatattgatttttaggatttaacagctgaaaaaaccctttctgcttccactggaggcaaaactgaacaaaatgttagttaaatagagagagcagcatttctaagaaatctgtggtcagcattatagaccatctatgctacaaggatgtcattaaataggatttgttcaattactggattcttcttctatgatcagttatagaatttctggtttatatctctgattcataaaactgggactccactttttgaagatacatctgattgatttttttcagtcatgatttaacagacttctttgagatgctcattttaacatttacataatttataatcccaaatgtataaaagacaatgaaaaaagcatcataaataaataatgcaaaatgaaatagttatgtcagacttttggaccttctgataaattagcaaaactgtaacagaaaaagtaaaaaatacagtaaattgtgacgacagaaagtgaaactggtactagtaacacttgcaacatgttccaagggtcctgccgcagccctgcgcccccagagtactgaaccatgagcttacttcaagtctcagagtgtgaactacctgtgaagagtgagaccatcagaagggacgttaacatgaaggtgaaaggacattggggaagtgctgcttaggcaggttctttctcagttccctagacatggagaagctgaggaagaagagagaaatattgttgacttgcaatgtagtttcgattaactgatactttggaatttgggtccaactgtaagatataaacagaatggagaaattaatggagaagtaacttttcatagctgtattataaagggtggcacacatttgacagcctcagacactcttgatcaaaggacctactagcaagtgtcaaagtgttgggcaactgtcttcttgcaggctccagaaagaaccttattcttggtgaaggaaagcctgaagtgaaaatccattcggtcctggtgctctttaaacacagagaggcaaattaatggctagagaaatctgtaagcgaaccaggtgagagcagagcgctagccgtgtgcttgtgaagcagcgtgtagctctacggagcgcgggtccttgccccacccccgtcgacagcaataactccccggccgtaatggccgaattcccgggcatatgtccggtaccgtcgactgnnnnnnnnnnnnnnnnnnnnnnnnnnnnnnnnnnncgccgcttcctcgctcacagactcgctgcgctcgtcgttcgctatgacgcgtggcgccctatatgatgatcagttttt

SEQ ID NO: 126680 - DNA, 615 bp, Homo Sapiens
  misc_feature (486)..(551): n is a, c, g, or t
attggttaatatatttaacggaaaaattttatttaaaaattacagattaaagttatatgttttaaaaatctaaacattataaaacaaagaaaacataggtaaaagttaaagggcttttcaagctttcaagcaataaaatagacatatttgcctgtattagataatcaatgttatatacatataaaataccaaaatgaaaaaactactttttaagtataaattactgcttaattaacttatccaaataactatattacaaaagcatgacttattatctattgagcgtatccaaatacataaggaaccatttaaaaccagtaagcaacagataaataggcagacatgaacaaataaggaaatacaaatggctaacacatagaaaatattcaattcaactcatactaataaccaaagaaataaatattagaataaactaccatttttatctgtgagattaacgaagacttacttttaaaaaatgctaannnnnnnnnnnnnnnnnnnnnnnnnnnnnnnnnnnnnnnnnnnnnnnnnnnnnnnnnnnnnnnnnnacggccaggatctcaagatcagcctaggcaacatagggagacccccaactctacacacattttt

SEQ ID NO: 126681 - DNA, 659 bp, Homo Sapiens
  misc_feature (641)..(641): n is a, c, g, or t
gacttttgcatccctttatttgtgtattgaaagaacaagcacctcctatgggaactctatgccctgacagtttaattacttatcaagtttactctgggccggtattgatcattctttcgtgaaacgaattagatacttaaattaaaaacaaacaacaaaaccccccttttcacatagcatggcggcatgtcccttggtaacaaggtttagtggggatccaccaaggcccagcagcttgcctccttttcgtaaggatgtaactattgtccaaccagaagagagaggcatggagtgggatgtgcaccaggatgaactcgccggaatcgtcaagagtcgttgtgtgaccctcaccttgacttcgggcgttttgtggggacccaactgctttcttgccgctgctctttggtctgagtttccctcagccaaacacttcacccacccatgaccctccaactgtcccgctacagcaggggatgggggttgtcttccgatcgacctcggggggcaaaggcaaaagtccctagctgcttcggaaccgctcctcgagtcctgaagccgctccacgcctcctcgcccaccacttgggtcccgcaggacgtggcagtctcgggctccagcctggaaaggagcccgcccgggtngcgtcacccgccccgcgc

SEQ ID NO: 126682 - DNA, 1798 bp, Homo Sapiens
ccctggcaagggctgcgcggcattttattttctgaaccccccacagcaggggcggccagtcctgctgcaggcagagtttcagtcttcggagtttgaccttctggcccaaggtcatcacagccacaggcggaggctctggggaaaggtccagttcctgggatgctggcccctaatgatgggcccatctctccagtgccgcccttccctcccgcctggcacaggagttctggagccacggtcctgagtctacagaacagcccggtcagcctcgtcccgcggtgcaagcgaggcctggcctccctccctgcctgtccttggcccggccacatcactccctgcgtttcttcttcttctccggctcctggacattggccgcctttgctcgggcactggtcaggggccgaggtgtcctccttctctggcgagcccctctctggccacggcccctgggctgatctcggagcagggcccgctcagctgtgcctggctgctcaccagcctctgcccgcgcctcggggtcggcccctacacccctcctcctgctcctcttcctctccatgcccgggctcgggggctccttctcacctttccctctctcctgctgcaacctgagcagacgcttctgcttcttcgtcttcttctgccgcctcccttcaagcaggcgcctgcaggccttctctgggatctcatcttcagggaaaatgcctcctgccaggtcctgcagcttccggatcactttgtagagacgctttctgttctgagaaggggtgctctggcggctggccatttcaaacagtctgttagcaactgcctcgtagtcaaactggagaacggggccgccactgtccctgtcgtcacctgcctgctcctcaccagcctcaggttcagccctgcagatggagcctgcgggcggcttctcagacctcttctgggacagcgcgtctccacgctcaccaccctcagaggactcatcactgtccgacgccacctcctcatcctgtgtgtccagttcattcaggaggtcttcaatggcaagcggggcctgctccacaatcgtctcaaagatgcctcgagtgatgttgttcaaaaccaaggaatccttggtccgggcagcaattctgcagaaggggtcgatgaacttcaggttctggtctgccgtaagctcctcggcgcccactttggtcagctcctccaggaagatctcgatgaagtggctcttcacaccgttgggggcctggctgctggggtgcaggatctcagtcatcagcagctctagcagctcctcgatctgtctttcttcccagccttgcatcttcagaaccttcaaggactcgttcaggaccatccgcatgagcatgtagaatttatccaggcgcagcctgtcaatgcccgtccactcgcgattcatggtctgccagaaggcctgaaggaacaggtgctgcgcctccgtggtctgaaaagcatgaacgagctgggaaatagtccttcctaattcttcctggaggagtggcttgtcctgcatccacatgcaataaaacagtcctttccacaccttcagcagctcgtcgtgcgtaaaaccacctgcggcccgctgagtcctggcgacgatgtatttccggagcttcctcaccgcccggtcccgggtcacctgctcattccccgccaggcgctgagccagctggatctcaggcgggagctgcacgcgcgaaaccatgacgccgacggccgagaccccctgtcccggagtcgcctggtacccagcacactgagcacgcctcgtggccgattaacacgcggc

SEQ ID NO: 126683 - DNA, 1038 bp, Homo Sapiens
  misc_feature (691)..(691): n is a, c, g, or t
  misc_feature (702)..(702): n is a, c, g, or t
  misc_feature (707)..(895): n is a, c, g, or t
ttttttacttcacttgtttctttttatttggtgttggatccaggacaagggcagtggggaatcgaagcaggggcttccctagcttcatatcccccaggcccctgcgcctctggaatgtaccaacaaggggcaggggtttcagggggctcagcctcttcatggggcaggcctcagccctgggtttgtcacagtctggccttgaatttgcctttggccttgaccttccgacaggtgctaggaattgttccgacttcaaagggcagaggcaacaaggcacttccagctgggggcctcggaggcacaggagagcaggagcctcggtgtgaaaggaggggagaagagggagatgatcagaagtctgtggaggaaggggcttctgagggagaccagctcttcccttggggtgccagccagcctgggagctgccctctgcctgtgccctccagccctgaccccgtgctcagcactgtccactgggtgtgagtcacaggtcgaggcccacctttcttggcttcaggatgctgggtgccaccttgaaatcaaggttcggtgggagggaaatgaagaccttagccgtgggtagagtcctcaaggccttgcctgtggtcgacagggccttagtgcccaccagcttgctgtgctgtcgtctgaggacctggccctggtgtcggcctcgtgccgaattcttggnctcgagggcanatttnnnnnnnnnnnnnnnnnnnnnnnnnnnnnnnnnnnnnnnnnnnnnnnnnnnnnnnnnnnnnnnnnnnnnnnnnnnnnnnnnnnnnnnnnnnnnnnnnnnnnnnnnnnnnnnnnnnnnnnnnnnnnnnnnnnnnnnnnnnnnnnnnnnnnnnnnnnnnnnnnnnnnnnnnnnnnnnnnnnnnnnnnnnnnagctgcattatgatcgggcacgcgcgggacaggcgttgcgtatgggcgctctcgcttctcgctcatgaccgctgcgtcggtcgttcgctgggggagcgtatcactcatcaaggcgtatacgtatcaagatcagggtacgcaga

SEQ ID NO: 126684 - DNA, 2950 bp, Homo Sapiens
  misc_feature (114)..(127): n is a, c, g, or t
  misc_feature (191)..(191): n is a, c, g, or t
  misc_feature (225)..(263): n is a, c, g, or t
  misc_feature (378)..(406): n is a, c, g, or t
  misc_feature (813)..(909): n is a, c, g, or t
aaaaaacaaagagggggcgcggaggcacaaaaaagggggtggggcggcggcgcatttacccccagactgcgacttctcgggcggaggggggatgtatttggagagagtaagttnnnnnnnnnnnnnnataatacaaggcgcggaaagacgggggtgcgtaaaggaggagaagcgtgattgctgtaatctgngtggcgggtgatcgaggggtaaatgggggtggcnnnnnnnnnnnnnnnnnnnnnnnnnnnnnnnnnnnnnnntatatattgcgcggcgcaaagggaaaggcgggggttacccacctccggccacgggggcttattgttgatcacgcgcgcccccaggaaagtggaggtttgcgatacgggtgtaccnnnnnnnnnnnnnnnnnnnnnnnnnnnnnaataaagcgccgagaaagatctccggggtgcgattggagacccggtgaggaaagagtaaaacgggtccgtaagggcgggaggtttggaggtggctcccacgtggcaaacggggagggggacaaagggggacaccggacagggaagggcgcccgagaaaggcgcgtcgcagagacctctcgttggatgggaagcgcggaattggggcatccccaaggaaaaaattccgtgaggacggcccgcatgcctggcgggcaaaatatcaaggggtggggagggggacccagggggagcgtaaaaacgtaaggatggggagcggaaatggaggggcaggggtgggttgaaaaaatggggggggccgggaggaaatacgacgttggttagggtatttaggggtaagttttgttannnnnnnnnnnnnnnnnnnnnnnnnnnnnnnnnnnnnnnnnnnnnnnnnnnnnnnnnnnnnnnnnnnnnnnnnnnnnnnnnnnnnnnnnnnnnnnnnctcaggaaaaacagaaagttagggaaacacactacatttgacaaccaacattaatttgtagttggtcctaacccttcctggcacagctatcaaaagtacagctgtttaaccagaaccaaggtgttcaccccccacagaatgtacatgaaacactagaggactgcatgtttttccctgagagaagcgtaagacaaacagaagtcaaaaagtagtcactgggagcgccatccttctaagcaaatcctccctttcccttttggaggatttgcccgaactacgtagccagtcagcacttagaccacctgcctcctcctccccctataaacccaccactcccctcctcctttcccaaaccacttggggtgtcctaagccctcactgccccaagcccaaaatatcaactaagatccttgtctgtatttccacagtcatacctaatgaattgggaagtggggcccctaaaaaccaattcacatctatgcacttgtttccactggatttggcagacaggcttttttagttaccgtaaccagatcttaagattaattaaaaactacataaagtgcttttaggtccttagagatacatgatataaataagcggcttatgatcaagaacgataaatacataggtaaaaatagctctagcaaagatgaccttatggctctgagatgggcaggcagggcagttcttccccattacattcttagtcatcttattcatacctatttttaaatggagtccacagactaaaggtcatgttccgagactgaagctttcaaatgaccctagttccaatatagacactttcttcagtttatcagtagcttttaaactctgaggtttaacacagctcacctctttctgtaaatttaagtgagcatactcctatacaaaggaaactttagagaaagcctcataaaatgttctttcctctgaaaattcctgaggggacttttgacacattgcccccaaagacaggataaaacaatagttgaaaagataccagtccaaggaaaagggacttcctcccacctctcaatgactgttagtgtcacagcacccatggtattaccacctgctaacaggatcaagttcgtgaaagatgaaaggtctgtggactcttggtggggaaagctgtaggaattgatataaatatctgtagagggagcagaacaatcagcaatttcaaggaaggacaggaaataaaaggttaagtctgatagaacaaacatcaagactgaaatccaaagatgccaatgcaaaaacttgcaacaaggtttgggaatcattaatagaaacaaaacagtaagtatttgctttattgacatactaggcttagacctgtgtgtgtaacaagcaagcctaataatagcaccatggttagactagcctgcttttccaagccatcattttataatttattaagcaaacaagggatcaaatgtctctccatccacctgatgtgatctttttatatgcacacagctaatgagttccattcagctgaaaatcttttagtaaaagctttaaagatgagcccatgaattcactttaaatttcaccagttaaattaggtcaaatggaaggaactcaaatgagtattgcccaatcagagcccattatttgtaagtcatcagtaaccttaaaactccacttagacctaattattgaaaacttgcatataatgaagtgaaagaatttccattcatcaacctctcaatcccaggttttcaaagaaaaacctatctaaggaatacttaccaaaatcagataagaaaatttaaacctgcatagttatcagatttgttccactacaaccagtctgcatacagttacacatcaattcgttctgtatacactctagaactgaacagaacaaagtttagcatagaaaagctgtaagaaacaggttcctaattacggaagttgcaaagttcaaaagggtatgaaaaaaactaatgtaaattcgatacttccttccgtttcaaagaaatagacttttctgtaaaaatatatacaatttttacaaatacattta

SEQ ID NO: 126685 - DNA, 1146 bp, Homo Sapiens
  misc_feature (48)..(56): n is a, c, g, or t
  misc_feature (1102)..(1102): n is a, c, g, or t
  misc_feature (1125)..(1125): n is a, c, g, or t
gcgcaacctccggaatccgccccttccctttatgggaatacttttttnnnnnnnnngagtctcgtgcgccaccccgtaggactggccgccctaaaaccgtgataaaggactgctcgccacttctcacttccgcttccttccagtaaggagtcggggtcttccccagttttctcagccaggcggcggcggcgactggcaatgtttggcctcaaaagaaacgcggtaatcggactcaacctctactgtggggggggcggcttgggggccggcagtggcggcgccacccgcccgggagggcgacttttggctacggagaaggaggcctcggcccggcgagagatagggggaggggaggccggcgcggtgatttgcggaagcgccggcgcaagccccccgtccaccctcacgccagactcccggagggtcgcgcggccgccgcccattggcgccgaggtccccgacgtcaccgcgacccccgcgaggctgcttttcttcgcgcccacccgccgcgcggcgccgcttgaggagatggaagccccggccgctgacgccatcatgtcgcccgaagaggagctggacgggtacgagccggagcctctcgggaagcggccggctgtcctgccgctgctggagttggtcggggaatctggtaataacaccagtacggacgggtcactaccctcgacgccgccgccagcagaggaggaggaggacgagttgtaccggcagtcgctggagattatctctcggtaccttcgggagcaggccaccggcgccaaggacacaaagccaatgggcaggtctggggccaccagcaggaaggcgctggagaccttacgacgggttggggatggcgtgcagcgcaaccacgagacggccttccaaggcatgcttcggaaactggacatcaaaaacgaagacgatgtgaaatcgttgtctcgagtgatgatccatgttttcagcgacggtgtaacacactggggcaggattgtgactctcatttcttttgctgcctgtgtggctaaacacttgaagaccatacaccaagaaagctgcatcgaaccattagcagaaagtatcacagacgttctcgtaaggacanaacgggactggctagttatacanagacgctgggatgggttcgtg

SEQ ID NO: 126686 - DNA, 1066 bp, Homo Sapiens
gggttagagtagccctgctttttccaagcccatcatttataaatttattaagcaaccaggggatccaatgtctttccatcccacctgatgtgatctttttatatgcacacagctaatgagttccattcagctgaaaatcttttagtaaaagctttaaagatgagcccatgaattcactttaaatttcaccagttaaattaggtcaaatggaaggaactcaaatgagtattgcccaatcagagcccattatttgtaagtcatcagtaaccttaaaactccacttagacctaattattgaaaacttgcatataatgaagtgaaagaatttccattcatcaacctctcaatcccaggttttcaaagaaaaacctatctaaggaatacttaccaaaatcagataagaaaatttaaacctgcatagttatcagatttgttccactacaaccagtctgcatacagttacacatcaattcgttctgtatacactctagaactgaacagaacaaagtttagcatagaaaagctgtaagaaacaggttcctaattacggaagttgcaaagttcaaaagggtatgaaaaaaactaatgtaaattcgatacttccttcgtttcaaagaaatagactttctgtaaaaatatatacaatttttacaaatacatttacaagctgtcttaagaattgaggatatccatattcataactaattactgagccttccgtcaagtattattggtgataaactaggctaataaagtaagaatcatggaagccaagccaaagtataacaggtataaaagtcctgaacacttggactttctaagaagtatactgggaaagctaattagagagaggaaaagcttcccttgtacagtactgaggcttacagtcatagttctattacttgtaacttttacacaggtcactggcattcttagtgcttctcttaacactacagtaaattaatgaattcggcgggtaatcaattctatgacttgcctggctactggccactttccccggccgtaatggccgaattcccgggcatatgtccggtaccgtcgactg

SEQ ID NO: 126687 - DNA, 969 bp, Homo Sapiens
ggtgattaaactaagggttatttaaagtaaggaattcatggaaacccaaagcccaaaggtataaccgggtataaaaagtccttgaaacacttgggacttttctaaggaaggtatacctggggaaagctaattagaggggaggaaaaagctttcccttggtccagtactgagggcttacagtcatagttctattacttgtaacttttacaccaggtcactggcattcttagtgcttctcttaccactacagtaaattaatgaattcgggcgggtaatcaattctatgacttgcctggctactggccactttcctgttctcaacaaggaaattaagtctttccaccctaccatcttcactaaatctaaaagtcctcctccatagcttcccaaacaaagtttgtttgttgctgaaactgaactttgcttctttcagacagtgactcttcaatcaatggggagcactcttcccatgtatttattcttgttagccataatcctcttgccacttgcttttctggctaggttgctagggtgcaactctaggaagttacagcttggagtccaactgcataaactggttttggtggtggtggtggttggttaaaagtcaactattgcacttacagtaaggctatcttattagatatgccaaaccagctcctactccagcaacacctgcaaaagccagcagcacattcctgatgccaccttctaggtcctctacatggaagaactccacaaacccatcccagcctctttgtttaactagccagtcccgttttgtccttacgagaacgtctgtgatactttctgctaatggttcgatgcagctttcttggtttatggtcttcaagtgtttagccacaaaggcaccaaaagaaatgagagtcacaatcctgccccagtttgttacgccgtcgctgaaaaccctcgtgccgaattcgccacccaggcctcgctaccttggac

SEQ ID NO: 126688 - DNA, 892 bp, Homo Sapiens
ggtcctaggtagcgaggcctgggtggcgaattcggcacgaggattaggcttgcttgttacacacacaggtctaagcctagtatgtcaataaagcaaatacttactgttttgtttctattaatgattcccaaaccttgttgcaagtttttgcattggcatctttggatttcagtcttgatgtttgttctatcagacttaaccttttatttcctgtccttccttgaaattgctgattgttctgctccctctacagatatttatatcaattcctacagctttcccctgccatccctgaactctttctagcccttttagattttggcactgtgaaacccctgctggaaacctgagtgaccctccctccccaccaagagtccacagacctttcatctttcacgaacttgatcctgttagcaggtggtaataccatgggtgctgtgacactaacagtcattgagaggtgggaggaagtcccttttccttggactggtatcttttcaactattgttttatcctgtctttgggggcaatgtgtcaaaagtcccctcaggaattttcagaggaaagaacattttatgaggctttctctaaagtttcctttgtataggagtatgctcacttaaatttacagaaagaggtgagctgtgttaaacctcagagtttaaaagctactgataaactgaagaaagtgtctatattggaactagggtcatttgaaagcttcagtctcggaacatgacctttagtctgtggactccatttaaaaataggtatgaataagatgactaagaatgtaatgggggaagaaattgccctgccctgccccatctccaaacccataagggccatccttttgctaaaagcctattttttaccctaagggaattttatc

SEQ ID NO: 126689 - DNA, 679 bp, Homo Sapiens
tgcggccgccactggctgcctcccggcctccccctcagtctctctaaagcaggtagaacattatgaccccacaatcaacaaatggaccatggtggccccactccgagaaggcgttagcaacgccgcagtagtgagtgccaaacttaagttatttgctttcggaggtaccagtgtcagtcatgacaagctccccaaagttcagtgttacgatcagtgtgaaaacaggtggactgtaccggccacctgtccccagccctggcgttacacagcagcagctgtgctggggaaccagatttttattatggggggtgatacagaattctctgcctgctctgcttataaattcaacagtgagacttaccagtggaccaaggtgggagatgtgacagcaaagcgcatgagctgccatgctgtggcctctggaaacaaactctacgtggttggaggatactttggcattcagcgatgcaagactttggactgctacgatccaacattagacgtgtggaacagcatcaccactgtcccgtactcgctgattcctactgcatttgtcagcacctggaaacatctgccttcttaaatgcagtacattctaaagagagtgagcatgagctcactccatcactcgatgagataatatgagatttctacttcggagaggccaagtctaatgaag

SEQ ID NO: 126690 - DNA, 574 bp, Homo Sapiens
cactgatgacaatttattataatctgttagtagcacacagacaaatattagttaaaccagaaccatgtctacacagaagtgggcaatgacatgtgccattctatggcacacggtgtgcacttaatcatcatgttttagcattttgatcttctgcttatggcgctcaatttctttctgcagacgctcaatctccttcttatgatgaacgatttcttcttcatggtgttttttcaaagctgccagttgttctctactctgtgctctacaaggacacggtggctcagggtttaatttcaatccttcaccccaaagagatctcaaagcataacctgtaatgtctaagcaaggaataggagttccaattccatgggagtctagctggtcatcctcttctactcctcaactagtgaaagaataccccatcttaaattgaggtgtagccatcttaagaagaccaaagagcttattgctttcagattcctctttaacaatagaaaactccagagagatgtgacacaagtccctaataccttatgaggggaacaacccaggggaacttgactcccctttaggg

SEQ ID NO: 126691 - DNA, 765 bp, Homo Sapiens
cggttacagttgttaaggccgagggatcagctggagcaaaccttggcagtcgatcttgacactgtgcagaagaatttggggtgtttcgcacgacctgaggagaactcatcgcgggagatggtaatgataaaggaggagtgtagccgtgggtttgtctttggagacccgccaggtggaaacggtctagggggcactgaaactgttgtgcagcgtaacctgagagtgccctatacgttggcaacggtcgggacatcaagggttagggtatactggattgggggcccagggagttctgttgggggatgggggcgcccaaggcaccaggtaggaaacagggtgggtcgattggcagtttaaggattggaaggccattgggagatccagggctggacttgggacccaggtgagcctcaccggaaatatcgttcactctgtcagcactgctctctcatttcacagaaggccccaccggcttcccggatggagcccgcgccccggtcgacattctcggactgatccgagccgaagcctcgggcttgcatggtcctcacgccccacacgccaagccacgtccgcgccgccaacgccgtcactgccattgctgctggagggtaccatcaagctcaaggtgtttctgtcaggaatgccagagctgcggccagtgagctcgaagagcacgcggtcattgaggcccagccgcagcctcgtgccgaattcaacacccagcctcgtacctgccattgctgagggtgggtgtgttgttgg

SEQ ID NO: 126692 - DNA, 1010 bp, Homo Sapiens
ccatggggcataattttcccttcctgtttacctaccagttcggaaattcccaagcaaataagcccagcaccaacagttatcctccctctccgagggccaaatcagttaagaaactcagctgcaaaggagcccagcccacctccatatctaagcaggagaggaatctacagtctaggttggctgattaggccaaagcctttagaagattgtgtccaaccataagtagctcccatgaccagctcccatcatcctcactcttgcggagtcgggggtctagaaacacctgagaagcctgaatgcatgcaggcttgcaaagctaaggcgtgctggcgaggaaggagagcgtagagggggtgacaggtgggtaagggccgagggagtcaggctgggaggcaaacgttggcgcggtcggatctagacactgtgcgaagaatctgggggtgtttcgcacgacctgaggagaactccacgcgggagatggtaatgataaaggaggagttgagccgtgggttgttttggagacccgccggtggaaacggtttgggggcctgaaactgttgtgcaggtaactgggagtgccctatacgtggcaacggtcgggacatcaagggttagggtatactggattggggcccgggagttctgttgggggatggggcgcccaaggcaccaggtaggaacgggtggggcgattggcagtttaaggattggaaggccattgggagatccagggctggacttgggacccggtgagcctcaccggaaatatcgttcctcttcagcctgctctctctttccgaaggccccaccggcttcccggatggagcccgcgccccggtcgacattctcggactgatccgagccgaagcctcgggcttgcatggtcctcacgccccacacgccaagccacgtccgcgccgccaacgccgtcactgccattgctgctggagctgcacctctggcgtctctgccgcagcaagcagtctctcgttacgcgctaatggcaggac

SEQ ID NO: 126693 - DNA, 997 bp, Homo Sapiens
  misc_feature (48)..(57): n is a, c, g, or t
  misc_feature (174)..(174): n is a, c, g, or t
  misc_feature (211)..(309): n is a, c, g, or t
  misc_feature (421)..(441): n is a, c, g, or t
  misc_feature (448)..(465): n is a, c, g, or t
ggagaaagaaaaggggttttccccttggcccccctggggaatttccannnnnnnnnntgaagttttttcctttttccccggggaaccagccaattttgtcaagattttacggcacagccattaggcagtgggcattaatttacccaaataaatcccagtttttcaggtttcccngggccctccaacctggtaggataccagggaagcaccnnnnnnnnnnnnnnnnnnnnnnnnnnnnnnnnnnnnnnnnnnnnnnnnnnnnnnnnnnnnnnnnnnnnnnnnnnnnnnnnnnnnnnnnnnnnnnnnnnncaatagtattatttgtatcaaatatatgaaacataaagattgctaagggaaataaagtagactattttagatatccagtcttaaaggaaaccactactatcatcattggccnnnnnnnnnnnnnnnnnnnnnctcgagnnnnnnnnnnnnnnnnnncactgatgacaatttattataatctgttagtagcacacagacaaatattagttaaaccagaaccatgtctacacagaagtgggcaatgacatgtgccattctatggcacacggtgtgcacttaatcatcatgttttagcattttgatcttctgcttatggcgctcaatttctttctgcagacgctcaatctccttcttatgatgaacgatttcttcttcatggtgttttttcaaagctgccagttgttctctactctgtgctcggaaatatcgttcctcttcagcctgctctctctttccgaaggccccaccggcttcccggatggagcccgcgccccggtcgacattctcggactgatccgagccgaagcctcgggcttgcatggtcctcacgccccacacgccaagccacgtccgcgccgccaacgccgtcactgccattgctgctggagctgcacctctggcgtctctgccgcagcaagcagtctctcgcctcgtgccgaattcgccacccaggcctcgctacctagga

SEQ ID NO: 126694 - DNA, 1062 bp, Homo Sapiens
  misc_feature (19)..(19): n is a, c, g, or t
aattcggcacgaggttttntttcaaaaggtacaatagaaaatgtagtccactgtcattaaaatgcatattcaccttcctactactaataattaggaagggttcattatgacttctttatattataaagaaaagatgggggattagatttataatttccgtaaatattttagaaaaaatgcttaaaatctagtagtcaatgccctagaaactttatagatttgtagataatatgcacagatacaaatacattattcattaaatacaactcacatctgtgttttattatactctaaaatatacaggaatcttgatgtactgaaagagtgcaagtaaatacagtattcaagcagtcactatttctatgtacatgctcattaattcttcaaaaaacccacaaaattatcaaatagatcaaaatactgttctgtgttttcacactttatattcagaaaaaccagctgataatttacaatgtcataaagtttccagtttcacaatacaaaaaggataaaatgaaattgggtatcattttgttgcaatttatagaactttacccatacctgtaagaccctcaatgtatatgaaatcattttcactgggaaagtgacagttacagtaaaagcagaaccacacaaatctttatttaaaagccgaaatatcagccttctctctctcttttgctatttgaaaggtagtcttcaatttggcaggcaactgcttctctctccaaatagtaacaggttacaaacatgctactttaaatatgaataggacctaaggctttagtattttaaatcttgcccaatacagaaatgcctttcaagagactttagtgatgcttaatttatgaacaacaaggaattattttccttttgattattcactttttcaaaactcatagatcagaataaacaaaaaatcccccaacccatggtggggacacaaaagtaacataagtgactaaggtgtgccattcatagagaggttgaagactccatgccccaggaccacttagctgcaatagggtgaaatagtctactttttgatttcatgaatttttt

SEQ ID NO: 126695 - DNA, 1150 bp, Homo Sapiens
  misc_feature (1100)..(1100): n is a, c, g, or t
ttttttccgaaaacatcggatttattaggattagctgtagtgtacactgattcctttagctctaaatggatacatatgtgccccgcagacagtatacacgcagggatgtgactgagccacagtgacatagcaaacccaacagctggcttgtgaagccatcgtgatcccaacaaggtctatgttagcaattggtgaaagaagaagagagtgagatgggacccaggtgggcctggaggtgggatcctgtgggttttcagagcacccaccagtgctccctcggtgagcccagcaccacctggaagtggagggaagctgggtcgctgctggaagggagggaggctgactctctacccctcacctctgcaaggaactgaggcctgtagggttgcggctgtcactggctacaggcggcatctttctgtaaaaagcttttcaggcatgaaacccatttctgtatggactgggctgtgttgacggtggtgcttgggccttgtgtgccaggcctctctgggtcccctccctggcctttgccttcctctcaccttctcgaggccaagctgtgcgagacctggcattccttccaaacctcagttcctccacgcccctgcgctggtgtgactccagagctcagaatgtcagcacggagccgtcagtatcgagaaggaactcaacgcaaggcttcacagctttccaaggacagggaccggctctggagtggccgtgcgtgagatgtcaggcacgctcacacgcagggtcctgtgttggctcctgacccagcagggggacatggtgggcggatgtaccagcccttctggataacatgacagtcccaatttcaggaaagtttttattttaaatattggtgattctttaaccaggaatgcaaatgctactgaagtgctgtgtgtgtctctgtgagagccttcatataaataaattcatgcatctaaagagtccctggtcaggccgcatgctgatattcaatttggggaatggtgatgccatcacatgcatctgggggaggcagcagggaggcgtagggactttgtgtggcctgctctatcacagctcctgggagaattacagatctgagcccaggncatctctgggcttttggaaagggttctgcttttctgggccagtagtgggt

SEQ ID NO: 126696 - DNA, 1076 bp, Homo Sapiens
agtcacctatgctggaagggtttctttggccctgagtgaagagagacccagagggaacactgaggtgcctgcccaaccactctgtcccggtttccttcagcaggaccagccatgctggtcgttcagatgcctttctcctttcccatggcccacttcatcctctttgtctttacggtttccactatatttcacgttcagcagcggctagcgaagattcaagccatgtgggagttaccggtgcagataccagtgctagcctcaacatcaaaggcactgggacccagccagctcagggggatgtggacgatcaatgcgataggccgcctggggaaccagatgggcgagtacgccacactgtatgccctggccaagatgaacgggcggcccgccttcatcccggcccagatgcacagcaccctggcccccatcttcagaatcaccctgccggtgctgcacagcgccacggccagcaggatcccctggcagaactaccacctgaacgactggatggaggaggaataccgccacatcccgggggagtacgtccgcttcaccggctacccctgctcctagaccttctaccaccacctccgccaggagatcctccaggagttcaccctgcacgaccacgtgcgggaggaggcccagaagttcctgcggggcctgcaggtgaacgggagccggccgggcacctttgtaggggtccatgttcgccgaggggactatgtccatgtcatgccaaaagtgtggaagggggtggtggccgaccggcgatacctacagcaggccctggactggttccgagctcgctacagctccctcatcttcgtggtcaccagtaatggcatggcctggtgtcgggagaacattgacacctcccacagtgatgtggtgtttgctggcgatggcattgagggctcacctgccaaagattttgctctactcacacagtgtaaccacaccatcatgaccattgggacgttggggatctgggccgcatacccctcgtgttgaattcgccacccaggcctcgctacctagggggtgttgaagactgttgggggtggttactaatt

SEQ ID NO: 126697 - DNA, 1832 bp, Homo Sapiens
  misc_feature (45)..(62): n is a, c, g, or t
  misc_feature (104)..(136): n is a, c, g, or t
tccaaggtagcgaggcctgggtggcgaattcggcacgaggcgagnnnnnnnnnnnnnnnnnnccggcaaatcccaaaggcctttttaaaaactaagagctctcnnnnnnnnnnnnnnnnnnnnnnnnnnnnnnnnnctagcagcccccggccacgaagtcgaagtccaggaaggctgcctgctccgcggctgtgaggggccgcgcgtcgcggggcgggctcagtgtgggggcctccccggtgaactcctcgtcgaagttgctgacgtcggtgcggccggacagcgtgggcacaaagggcggtggcaggcgccgggccaacagggcttcccagcccagagtcctgaagaagggctgtttcttcacatcttctgcatctctctcgctagatcccagcctccgctctgggttcctccgaagcagccttctcatgatgccgatggcttcggccgacaggaagcgggggtagcgaacctcgtcgttgacgatgctgtcgaagacctcctcctcatcatcccctgggaatggggactcgccaaccagcatctcgtagagcagcacacccagtccccaccagtccacagctcgcgtgtacgacgtgtccgtcagcacctcaggggccaggaactccggggtcccacagaatgtgctggtccggtccccatagcccatcccctccttgcagaggccaaagtctgcgatcttgacgtagccctcggtgtccaggagcaaattgtccaacttcaggtccctgtagacgatcttgtgttcgtgaagaaactgtaggcccagcaccacgcaggcggaataaaagatggcacggggctcagagaacacgtcgctgtggatgtgcagcatcaggtccccaccggccgagtactccatcacgaagcacacgtgctccggtgtctggaaacagccgaagaggttcaccaggaaggggtgtcccgcactggtcactgccgccaatatccgcttctcacacatcaggctctccacctcgtctcgggccacaatgtcccctttcttcagagccttgatggcgaacagctccccactgggccggaattcggagaggagcaccttcccaaaatgaccccggcccagcaccgccaggaacttgaaatcttcgagggtcagaggtgacttcctcagagggctgcacagggcggggcctggggtctcctgggtctccgaaggcagctcgggagcagtggattcctggatgggggagctcaggctcgatgggctggaaggaggatcccgcgagctcttctgaggtgagctgtccgagtcagtgccgaggttcagcttctccaccgatatgtcacccgtggtccgggcctcggatcctggagaagccccagggctaaaggtgcctgtgcccgtggcattggggatgagcctccggagcagccgcacccacgtggcgacatcgatgttcatctgcctagcacgctggaacgccttcccttgctgcttggagaaaattttcttctgccgtcggagccgaggaatcctctcaatgacagggttgcggaaggtgacctcagccaccaggcagccctggggttccatgtccagctgcacctcatgcctctcattgtccaagaaatcctccaacttcaggaatttgagggcacacaggccccgctggtcccgccagaacacagccaactccagttcccgtgccctttccagctccagagtgaagctctggtcccaggcattggggccacatggcttccaagacgtctgccccaccactgtgttatccagcttaagcacagtgctgacttcactggtgttctcctcgtccgaatttccacccagg

SEQ ID NO: 126698 - DNA, 944 bp, Homo Sapiens
  misc_feature (794)..(794): n is a, c, g, or t
  misc_feature (933)..(933): n is a, c, g, or t
caaggtagcgaggcctgggtggcgaattcggcacgaggagaacaccagtgaagtcagcactgtgcttaagctggataacacagtggtggggcagacgtcttggaagccatgtggccccaatgcctgggaccagagcttcactctggagctggaaagggcacgggaactggagttggctgtgttctggcgggaccagcggggcctgtgtgccctcaaattcctgaagttggaggatttcttggacaatgagaggcatgaggtgcagctggacatggaaccccagggctgcctggtggctgaggtcaccttccgcaaccctgtcattgagaggattcctcggctccgacggcagaagaaaattttctccaagcagcaagggaaggcgttccagcgtgctaggcagatgaacatcgatgtcgccacgtgggtgcggctgctccggaggctcatccccaatgccacgggcacaggcacctttagccctggggcttctccaggatccgaggcccggaccacgggtgacatatcggtggagaagctgaacctcggcactgactcggacagctcacctcagaagagctcgcgggatcctccttccagcccatcgagcctgagctcccccatccaggaatccactgctcccgagctgccttcggagacccaggagaccccaggccccgccctgtgcagccctctgaggaagtcacctctgaccctcgaagatttcaagttcctggcggtgctgggccggggtcattttggggaggtgctcctctccgaattccggccccagnttgggagctgttcgccatcaaaggctctgaaggaaaggggacattgtggccccgagacgagggtggagagccctgatgtgttgagaagcggatattggccggcaggtgaccaagtggcggggacacccccttccctggntgaaccctctt

SEQ ID NO: 126699 - DNA, 2294 bp, Homo Sapiens
  misc_feature (52)..(52): n is a, c, g, or t
  misc_feature (56)..(56): n is a, c, g, or t
  misc_feature (2113)..(2160): n is a, c, g, or t
  misc_feature (2283)..(2283): n is a, c, g, or t
ccaggaaagggggtgttcccgccactggttccattgccgcccaattatccgntttntcacaacatccagggttctcccaccttgttctcggggcccacaatgtcccctttttttcagagcctttgatggcgaacagctcccccattgggccggaatttcggagaggagccccttcccaaaaatgaccccgggcccagccaccgccaggaacttgaaatcttcgagggtcagaggtgacttcctcagagggctgcacagggcggggcctggggtctcctgggtctccgaaggcagctcgggagcagtggattcctggatgggggagctcaggctcgatgggctggaaggaggatcccgcgagctcttctgaggtgagctgtccgagtcagtgccgaggttcagcttctccaccgatatgtcacccgtggtccgggcctcggatcctggagaagccccagggctaaaggtgcctgtgcccgtggcattggggatgagcctccggagcagccgcacccacgtggcgacatcgatgttcatctgcctagcacgctggaacgccttcccttgctgcttggagaaaattttcttctgccgtcggagccgaggaatcctctcaatgacagggttgcggaaggtgacctcagccaccaggcagccctggggttccatgtccagctgcacctcatgcctctcattgtccaagaaatcctccaacttcaggaatttgagggcacacaggccccgctggtcccgccagaacacagccaactccagttcccgtgccctttccagctccagagtgaagctctggtcccaggcattggggccacatggcttccaagacgtctgccccaccactgtgttatccagcttaagcacagtgctgacttcactggtgttctcggcttctgctttgaggctgctccggccactgaggcttccgcttcggctgtaaaggccccgggctgggcggctcaggaagggggggcggctgtctggggtcccaggtccccccattgagggggtagggttccacgggatggtctctgggaggtctctgcagcccaccactcgtacctccagggtccctgtgagcggcgcgggcttgcacagggtgctgtagtgcgtggcgggaaagggcccggccaggcgggtgctgaaggcagcggaggaggccgcagcgagctcttctcgcagcagccgccccttggggtggtcggcgggcagctccccaagtctccgctccagagcctcccgcagcagccccagcttctggttggattctgtcaatttctcctgggcctcgctgactgccttgcggtccggggccttggcagcgctgagcaggcgcagtacgttcttggcaccctcggccaccgcgtgctccactcggaagtggtgccgcagctcttcgatgcgcagctccacagcccccaggtcaggactcccttgggtgtcatccggggctgcctggttctccagctggccggcctgcagcgcccggcggagttgcatgcggatgatgtcaatcttggtcttactgtcctgcaacatctgctgggctgtcagcagcagcttccggtccttggtgctgccattgctgtaggtctggatcatgttctccgccccctgcttcaccttcagctcaatggccaactgcttctccaggcccgccacgcggctcaggttggtggccgagcaggtggggccacccgcaccaggggactgggggccatcgtgggtggccgccgggtcgggaagcaccacgtgggcgtgcagctcctgcagctgctggtgcagcaggtcgaggcggcgcgaggagccccgcagcagcagctctacggggcccaggctgcggcccaggtcagtggtggcccgccgcaggttctcagcaccctccttcagcttcagctccttgcggatttcccgccgcagccgctcccgctccagctccagctgctgctgtaccccgggggccgccaggtctgccccggccaggcccagctgctctagcagggaccagctgcgaggctcactctgcacggcgtcgctggccatgtcctcctgccgcccgccaggggtccccgcgcggagggaggggcggccagaggannnnnnnnnnnnnnnnnnnnnnnnnnnnnnnnnnnnnnnnnnnnnnnnccctccccggcgcgcggcccgctccggcctgctcggctcccgcctcgcctggccaggccgccgatcccgggaattccggacccgttccctccgcgcctttgtagtggggggccagtgtccagngtggcgggtca

SEQ ID NO: 126700 - DNA, 990 bp, Homo Sapiens
  misc_feature (94)..(110): n is a, c, g, or t
aaaaccctgcccattatggggtctagcgaacagcttcttttattcttgtttgaaagtatttttctgcttacaaaagtaacttatacttgatctnnnnnnnnnnnnnnnnngaaaagaaatcacacaatgttgaaagcaaagattcacccatttggccccagaagccctgcggacagagaagagcctatggctgggttggtggcctgggaggatgcgcctgttgtcaaggttacagggacttgccgggcgccacagagcagggggcaaagttctccccagcagcctcaggaggccccgctgctaatccactgtcttctgttctgtctgtgcctgggtcctgcctgctccgtttctgctcaggctcctgaggggctgcctcaatggcccgctgggcctcggggtgaggtctggaggagggccttggcaagggtgtcggccgggcacccccagggacatgacacagtgcacacccttgcgcttggcccccgccaccttggtgctgtctttggaggctgtgagcaggaccagtttggagaactttctgggcttcctgggggctgccgggatgacttctgtgcctggcttgggggatggctcctggctggccttcacactctcaccctcctgctcgctgggctcgggcaggggcatcccgggacccagggcctgtccctcaggccacactcagcccccagcaggtggatttctcctactcccaggcaaggaacctggagtccagcggttccgtccttgcgtctgagctagtgctggcgctgccctggctgggtggggacagcgatgtggagatgttgtggatcccaccgtcactgaggactccttggcttctggccgacgacagcggtgccctccctctccggcgacagcgccgcggcgggtcccttcagcctccgcgccaagggccccagcctcagctcgcgctgttacctcaagccgggcggacgcgtgggtcgacgatatcccggttcaccc

SEQ ID NO: 126701 - DNA, 619 bp, Homo Sapiens
gctggtaccggtccggaattccttgcatctggtgccggggtcggggtggcggcggcggcctgggccgcgaggtcgacgctcgctgctgcagcggcagaggttaaaggatccgccgcggcgctgtcgccggagagggagggccccgctgccgtcggtgaaaccagcccagagaagttacgggatttgcccccggggctcctgcccagcaagccagcgccgtgacccaggtgtgggggatgatggtgacgcttctcactcacatgtgaaggacggaaccactgcactccaggttccctgctgggtgctgagcgtggcctgagggacaggccctgggtcccgggatgcccctgcccgagcccagcgagcaggagggcgagagtgtgaaggccggccaggagccatcccccaagccaggcacggacgtcatcccggcagcccccaggaagcccagggagttctccaaactggtgctgctcacagcctccgaccaagatgaggatgggggtgggatccaagccccaggaagtgcactgcgtcctgtccctggagatggctggccccgccaccctcgccagcaccttgcagatcctgccagttgaggagcagggaggggtggtcc

SEQ ID NO: 126702 - DNA, 1017 bp, Homo Sapiens
tggtgggctgtttcgcccactcgattgattggacccaggccccacacggagacaccctcgtccttgtacacccagcgggaggagggccacagctagttcattagttgccctgtctgggaatacctctgggacccgggcgccgcctttctgcacttgctgagttgaagaaggagtcgctgaagaagtcgagggagccgctgaagatgacgcgggcaatttgttcctggcctggagcccagcaatgaggagggtgttcttccccaccgcatgtggatactgggtggataggcttgtccgggaagaaaggagtaagaggtggaagagcccgtcaggatgtccagcaccaaagggttatcaggatcggccaccatcccaacacctcgaaagaggatgggatttagagatgatttcccaacgatggttggggccttcagcaggttctcagtgtcagccacgatgagcgtatgctggccaaggtctgagatgtcatagttgtgatggtcaatgacagccgttttctcctcgtcaaactcaatcccgcactcactgcccagctctcgaagagggtcaccaatgtcggagctggcagctaccagcacactgcctccaccgtcaataaaggcactgatggtctccacgttgatgttgcctccaaaatcttctaccgaaggggagaaaatgatgagattgtcatagaggaattccccatactttatgagagacaggctggggtcatcagcggtcttgaatgtgagctcaaagccccggtccttcaggctccggaagaaaagcgaatgagtctcccgcacgttgaggttgtccagcagcactaaggtgcggggtccgctggcgcaaaccgcgccaagcaagggcagcagcaaccaaaagagggcccaagcccgggccgcggtgctgggctccatcttcctccgtacgcgtgggtcgacgatatcccgggaaatccggaccggtaccagcctgcttttttaaaccactggtcatagtacacagcgctcc

SEQ ID NO: 126703 - DNA, 2046 bp, Homo Sapiens
  misc_feature (26)..(27): n is a, c, g, or t
  misc_feature (51)..(374): n is a, c, g, or t
catgttgttttgcttgggaatgtacnngttttttgggggcaacatctcgcnnnnnnnnnnnnnnnnnnnnnnnnnnnnnnnnnnnnnnnnnnnnnnnnnnnnnnnnnnnnnnnnnnnnnnnnnnnnnnnnnnnnnnnnnnnnnnnnnnnnnnnnnnnnnnnnnnnnnnnnnnnnnnnnnnnnnnnnnnnnnnnnnnnnnnnnnnnnnnnnnnnnnnnnnnnnnnnnnnnnnnnnnnnnnnnnnnnnnnnnnnnnnnnnnnnnnnnnnnnnnnnnnnnnnnnnnnnnnnnnnnnnnnnnnnnnnnnnnnnnnnnnnnnnnnnnnnnnnnnnnnnnnnnnnnnnnnnnnnnnnnnnnnnnnnnnnnnnnnnnnnnntaacagaccacgtccctattttagaaatgagaggagtgactgcacataggaaaaatgccacttttagcaattcaaagtggaaaaacttcttttatataaaaattatcccaactcccaccccttggctctcagtgttgcatctcccacagaggtaaagttgtgccattttcccacggctttaaacaaagcaaaacaaaaccaccaatcctaataacccccctccctgccccgtctccacgctgtgcggagagggctctagcccctcagtcggacttctccttctccttcatgtgcaagaagacgatgctgaagatgaagagccccagcatcatggagaaggcgctggcgtagtaggggtaggccgaggggatgaagcgctcatactgcgtgtgctggagtggccgcacggatacctgagtggaagagtacaggtgtgtgtagcctagccggttgtaatccactttaaactggaatacaccatacacgtcgggcaacttgaactgaacactgtatttgccacctttcttcttcaggaaggtcctcacaaaaggatcaatgcggacaaactccagctgaatgtcatcgccatcaaaggggacccatttgccatttgagagctgctggatcacgatgctatactccactaggtcagtgacagtgtaggcattgggtggggctgtctcgcccacccgatgatgggacacaggccccacacggaggacaccctcctccttgaacacccagcgggagagggccacagctagttcatagttgcctgtctgggaatacctctgggagccgggcgccgccttctgcactgctgagttgaagaaggagtcgctgaagaagtcgagggagccgctgaagatgacgcgggcattgttcctggcctggagcccagcaatgaggagggtgttcttccccaccgcatgtggatactgggtgataggcttgtccgggaagaaggagtaagaggtggaagagcccgtcaggatgtccagcaccaaagggttatcaggatcggccaccatcccaacacctcgaaagaggatgggatttagagatgatttcccaacgatggttggggccttcagcaggttctcagtgtcagccacgatgagcgtatgctggccaaggtctgagatgtcatagttgtgatggtcaatgacagccgttttctcctcgtcaaactcaatcccgcactcactgcccagctctcgaagagggtcaccaatgtcggagctggcagctaccagcacactgcctccaccgtcaataaaggcactgatggtctccacgttgatgttgcctccaaaatcttctaccgaaggggagaaaatgatgagattgtcatagaggaattccccatactttatgagagacaggctggggtcatcagcggtcttgaatgtgagctcaaagccccggtccttcaggctccggaagaaaagcgaatgagtctcccgcacgttgaggttgtccagcagcactaaggtgcggggtccgctggcgcaaaccgcgccaagcaagggcagcagcaaccaaaagagggcccaagcccgggccgcggtgctgggctccatcttcctcctcctgccgaaggacccagcacctgcacaccggaagtaccccatctacggtagcccaatcgcggctcgtgcccgtggagcac

SEQ ID NO: 126704 - DNA, 1026 bp, Homo Sapiens
  misc_feature (201)..(211): n is a, c, g, or t
  misc_feature (214)..(220): n is a, c, g, or t
  misc_feature (944)..(944): n is a, c, g, or t
  misc_feature (967)..(967): n is a, c, g, or t
cgggagggaaaggcccgggtattttttaattgttttttctttagaaattttccagaaaaatgtgaaggccctacgaagggttaggggcccccccctttgcggggcccaggcagtaccctgtttagcccgggatggccgccaggcgggcccagggagatggccttgacaatcaaagcaccagggcctagtctggagttttgnnnnnnnnnnngtnnnnnnngggctttgtcactgatctttattccgtgtttttagcgcaccacatccagacagcacaccccgaacattccagatggatctgctcagacttaaggcccgcggccaacacctctcacattcagtcttggcgtttacatacatgaggaaatgcacacagggctgaactccgtggagcttcctgtttaaaacatcaaccacctcgagaagcaggtcagttgtgtccgcagccttctggccacacggcatgatctgagctagagaaggggatcctcccagggctgatctcggcaaagcgacatggggcttcctgcacacggccgaggggcggctcttcttgtgacggaatcccctccccatctagaaaaggaggcggcaggaggaggaggcatggctggtctgaggaacccttgaccctggggtggggacacggaaggcaggggtaaggcgtgcccgcatctgatgtgaagcaagcccatccctttgctggtttgggagcatctgacgtttgcacagcattttgtgctaatttccatgctgtgtgtaatgaccctggatttttaaaacagaagcagaaacacacacatcacttatgcctgtatgtcccacagtctctggcagtgtcctagggcctgggagaggacacggctgctcctgagggacagaggagagtctgggaagtcagtcaccagtgggtcgctgaggacgtgagcctgtcctgggctcanggatcagacagactgtggctgtnggcctgcccgcattcccagggtcatgcagcctgtgacacaccgagggaatgctgggaag

SEQ ID NO: 126705 - DNA, 942 bp, Homo Sapiens
gacgccgccatcttcttccctcttctgcgccgcctcatcctcttcaagggtgccagatattacgtgctggcccgagggggactgcaagtggagccctactacccccgaagtctgcaggactggggaggcatccctgaggaggtcagcggcgccctgccgaggcccgatggctccatcatcttcttccgagatgacgcctactggtgcctcgaccaggccaaactgcaggcaaccacctcgggccgctgggccaccgagctgccctggatgggctgctggcatgccaactcggggagcgccctgttttgaaggcacctcctcacctcagaaactggtggtgctctcagggcaaaatcatgttccccacccccggggcagaacccctcttagaagcctttgagtccctctgcagaagaccgggcagcaaagcctccatctggaagtctgtctgcctttgttccttgaagaatgcagcattgtctttgtctgtccccaccacatggaggtgggggtgggatcaatcttaggaaaagcaaaaaagggtctcagatcccttggccctttcctccgaggacttctatcctccccaggcctttgtttcttcggctaaaggtacagttcctttcaagaggtaacagcactgggatccaagcagggggatgaaaaactcagcagagaaattcgagaccattttgcaagactgtgcccttctcctcaggaccccctggctcagttcttgaaaaacggtgtcatatttagtcagaggccccacccccaggaagcatggatggggatgaaggcacaggcgtctccaacctcagaggccctttgtggggtcaggacacagagtgggagggagactgatgcaggcctaccagtccctggctttttgtctggggctggaataaagaggtgccttcagctggtgggccgagaggcagg

SEQ ID NO: 126706 - DNA, 915 bp, Homo Sapiens
tggcgtttcttttcttgcttgagttctcttactcgttcctcttctgaaaattcctcaagaagaagttctgacctgcttgggaattcatctttatgaaagactgcatcgaatctggcagaagctacgggcagaagagcagacatggcagatgcttttctatcttggtgttgatgctttacgcaagagttttgagatgaccgtggaaaaagtacagggtattagcagattggaacaactttgtgaggaattttcagaagaggaacgagtaagagaactcaagcaagaaaagaaacgccaaaaacggaagaatagacgaaaaaataagtgtgtgtgtgatattcctactcccttacaaacagcagatgaaaaggaagtaagccaagagaaggaaacagacttcatagaaaatagcagctgcaaagcctgtggcagcactgaagatggtaatacttgtgtagaagtaattgttaccaatgaaaatacatcatgtacctgtcctagcagtggcaatcttttggggtcccctaaaataaagaaaggcttatctccacactgtaatggtagtgattgtggatattcatctagcatggaagggagtgaaacaggttctcgggagggttcggatgttgcctgcactgaaggcatttgtaatcatgatgaacacggtgatgactcttgtgttcatcactgtgaagacaaagaggatgatggtgatagttgtgttgaatgttgggcaaattctgaagagaacgagacaaaaaggcacacatacaaaagaacgaagaacgaaaagcaagatactgaacatgtgatgcaacatattccagaacgcttggcacgcttgttttacagatccaggtaatcgagagcaccttcggaaataccatgcacacagggtttcaccgggacaagaca

SEQ ID NO: 126707 - DNA, 974 bp, Homo Sapiens
ttttgctgtgcgtattaataaatattctttattttaaattttgcacattgcgctttaacattacatccaaacattttgcaagtggatgtctactttgtaaaaccatatattcagctcattgtcatttctgtacagaattataagtacaacattactttttgccactaagttgctttagtaagtctcacaggaagagaaacatttaatgaaaagagatggcttaaatcatatggcaggcctgcgcagccacgcaactaaagacacaagcctgaagaaagaactaatgaggatacctccaccgtctcccaaaacaagaaagaatcacattgatttaagataaaattttgccataagtcactaaattaagagtttttcgaaagagaaggcgcagtagtcatcgtgagtgtttcattgaaagacagagctattttatttatttaatttgctccagccgttgtcaaccagccactacaaatgggcctcttgtgatcatttaaccggcagtatttattaaatttctccttcagatgctgtcggtattgttctctattgctgtagaaagactggttattagccataaatgactgtatttcatcttgtgagataaagatttcctcatctgaagtacattcagactcatcaaggagttcaactaagctcttggcaccttttccggaatcgggacaaacaacgtttctgtaggttctgcaaactgtggtacatttttcctatgctcaaaccaaggcaatggctgcccacccttttcagagctgcaacagctttcaggatgtgtatctttggtcttgtcacggtgaaacactgtgtgcatggtatttcctgaggtctctcgattacctggatctgtaatacagcttccaagcttctggatatgttcacggacgcgtgggtcgacgatatcccgggaattccggaccgtaccagcctgctttttttaccacgtttatattccatgg

SEQ ID NO: 126708 - DNA, 1509 bp, Homo Sapiens
agggccttcggttaacctcgttcagcacctccaactggccacatccaggatcttggagagggactgagacacctcttcaccctgccgcatcttgaggaggttgacaattgcctggtcgctgtaggccctgaccacggtgttcttatccttggtgttgtcaagaagagccttcaggatgggcttgatggcctgggggtccaggggaggcagtgggtccttatttgcccaccagatcatcttctcagccaccagcctgatgtcgctggatgggttctgcagacacttaacgaacaggctggaaagtttggccggcaactgccctccgcctgtctcgatgtggtgtctcatgagaaagcccatgccccggaccccgctcaccgcaatggggatcctgtccgccgtggcactgctcaggatcatttcctgaacatcactgctatatctgccggcacaaagtctgccaggagccacattcacagccacggaaagtgccaggctccgcccgtgccgaaccatccagtcaatgccggacacgtccgccagcaagcactgctgtagaacggcactaagctccttcttcagtcaaaaggcacacagttcccctaggcaacccggctgaggagatgcgagtgtttgtcctccatcgttgtcccagcatgctcagcaggagtgagacgatgtttttccggatgacggcatccactttggcccctgctccctgaatcacaaacctcagggcctgcagcatggtgtccctgacacctgggtcctccatggcgcggatgccattgagcagcctctgtgaagaggggggtccaccttaatgtggatggaaatgagcttcccacagagcatctgcggccttcaggcgcaccccccggttggagtcctgcagggctttggtgaaagtggtctgcagctggggcaggaagggcttcagggcaatcccaaccttagccaacaagaggctgagtgtctcgagcagagccgccttcacattccagctgaacctgtcccccaggatgcggatcagagggccagtgatgctgaccacggagggcctcagggcgtcagccgaggtcaggcggattaccaagcctaaggctttggctgcctcctccttctgctcagggctgccagtcaggactccttcccgcaacactggaaggatggaggtcactcccttcttcgggaggcagaatcctggcacatgctcgcctttgctctcgttccctatgagccggatttccttgtgcagctcttcaatgagtgccaacctggttgccagcatccagcttcttagtgatggcatttagggcatcccagctctcctccagaaccacagggctggagtcattgaagaggcggatcaggcccgagaccaggctccgcaggtggctggtgtagtcagcctttgagcgggaacagtagcgacgcgtgggtcgacgatatcccgggaattccggaccgtaccagcctgctttttttaccacgtttatattcacatgt

SEQ ID NO: 126709 - DNA, 391 bp, Homo Sapiens
aaagaataattgctattatatcatgcctttttacctgtgaaatcctttgctgtggtatcagatccagaagcttggaagctgtattacagataccaggtaatcgagagacctcaggaaataccatgcacacagtgtttcaccgtgacaagaccaaagatacacatcctgaaagctgttgcagctctgaaaagggtgggcagccattgctttggtttgagcataggaaaaatgtaccacagtttgcagaacctacagaaacgttgtttggtcccgattccggaaaaggtgccaagagcttagttgaactccttgatgagtctgaatgtacttcagatgaggaaatctttatctcacaagatgaaatacagtcatttatggctaataaccagtc

SEQ ID NO: 126710 - DNA, 705 bp, Homo Sapiens
  misc_feature (54)..(78): n is a, c, g, or t
  misc_feature (565)..(654): n is a, c, g, or t
aaggtagcgaggcctgggtggcgatttcggcacgagggagaactagtctcgagnnnnnnnnnnnnnnnnnnnnnnnnngggcgctggctgctttatttaagggcttgtgattgacagctgtccccatcccagcccttgcttcctctacaaaagcaactgaacatgaaacgggcttcctggttaccatggggaggggggcggctccctgtcagggcccagcccagggacctggggaacggcggctttgaatccccggccacgggcactagaaggtggagaaggagggcgggaagtccagttgagatgggcacggtgctggtgaggaggctggagaggtcctgttccagcctctagtgggcttcccttgtccaggatgtcaggaaacagtcccccaattccgccggggggagccagagccccaaggctggggggccaggggctgcagggaacacagcaaaggctttcggagccaagtgagatcagttcaggcccctcaggcccaggaacccgacaccaccgcgtacctgtgagcacacactcacggccaccccagtgacacgtgcannnnnnnnnnnnnnnnnnnnnnnnnnnnnnnnnnnnnnnnnnnnnnnnnnnnnnnnnnnnnnnnnnnnnnnnnnnnnnnnnnnnnnnnnngggtgttacagcccaggacccacaccctggacccctggaatgtctctggac

SEQ ID NO: 126711 - DNA, 1048 bp, Homo Sapiens
ctttttggtaataaaaaatttcttggtttaggcgaaatactctgtgcaaccgcagtaccgagggggagccctgcccccccatccaccctccccttcctttgcctccagtaggggagaggagaagggggaatctctgggcaggggtgaatgtgggagaaaactgagaagggccagggaggggagaagtgccagcaggggagacacaccaatccatcgctgcagtctcgcccaggtggggcggcgcagcggccggcagcccgtccagctggcccgcccccgccgcccccgctcctggcagcctgttaaagcttcagctcgttggctattttggaggcaatgtttttgaaggccatggaggtgcccgatatccgcttaaatcgaaccccgttgagagagagccgcggcagtttgcacacctccatctcccactgcacgaagtcctcgtggcccggcgtgccgtgcatacacagcagcatgtacttctcatgcagctcgctctggcagctgttcgcgtccagcaccttgcggatctcccgcatcatctcgttgggctccatggagctcgtggtcttcatactccacgtgaagcggagggagcggggcttggcttcccgaaattcttccttttctttgtcgttgccgcccactgccccaccacgtgaggtctgagcgtctccactcggtctttgctttcaggttcattcaggttcctgcgtacaaacttggaggtgaacttgctgaagatgctcccagaggccccccgccggccctggctgtggccagagggagaggctggggtcacaccgtagggcaaattctgctggtcccgcacctgtcggagctgcccagcatggaaggtgcttcggctggacacaccccgggggaagttagttcggtctggggctccaccactgctgctgatgttgtgggcggatggggaggcaacagggacacgctggggggctgtgctgtctttgccattctggatggaggcctggccgaggctggcccgctccaaaagtggggaattcctgcttcgatttgtgcc

SEQ ID NO: 126712 - DNA, 729 bp, Homo Sapiens
tttagtttcaatagcatattttattttaatctaagaacaatgattaaattcaaaggtcagaaatataaaagattatccaaaaagtttaggatcataactgtttcttaaacaacattggcatgtacttgagctggttctgtggctccaaaggcttgatttttaccttgcacagtttaaataagcaagaagccttacgcgatgctccacaagcatcacaacatcacaaaatcattctacaaggcatgtctcaggggatttggggccatgaagatctttttccaaccaaaagtctgagccgagatagaatcacagcttgaagttcctgctctcagactgtcctccaaatggttccttaagacactgggtgccctgagctctggggcccaggcctgagggtggcagctggttatgcacgcagaccagttctgttggtcactgtgtgggcattccactcctatccttctctgccagtgccactcggatgaatttcccattggcaagttctcgtacccttgatgcattcagaaaagcagaaaggaaccgtggggaccctcaggcacctccccccggctgccaacaccagccccgggggcaccacgtatccggctgtaccttcagtaaggagactgctcataattggttcaggtgaagattttaccttccggtagccctggggtggaccaggtaggaggatcaggagaataatgtccacgtgtaggaggaaaacag

SEQ ID NO: 126713 - DNA, 1914 bp, Homo Sapiens
ggctagaaagggcagaggcagatgggcctgctccatctcgcctcttaaggtgggcaggacggagatgccacagtggatgccactgctgccacagcctcctgcggactccaagcaggaagcctggctctcagccatgcaggatggaaagaaagattctattccaggaggggagctgccctggaacgccccaaggacagccaggacccactgttcattcaggattcccccattttctcctacgggagctaacgcctgtgcctgggtcctggcagcgctctggactccacactctcctcctggggtttcacctttgtaacaggatccccgcagaccacgcccacgacaaacactgtctccagcgggcaggacaaaggaagggcacggcgccaggcagtggtgtggttgcccatcaggaagaggccgacttctcccggtgaaacttctgcacagcagcaatggcggggccaaaggtagctttgacctccacacgggctcggatccaggccggcagcttggccaggacagggggccgggcatatcgctggtccaggagcactatgctggcaaaatccttctggtgcctgatgaccctgcctatggactggttgacggccttcatgcacaggttctccaccagagccttccctgggggtgcctggccgggggctctggggagggtttgatccaagtaggccatcttctcctgcagctctgcagacctgatgttggggaagggcatgcccaccatcaccacacaccggcctaggttgtcagagaagttgatcccttcactcatctttcctccaaccacagagaggagcagggcccctgtcacctggcctctctcctggccacaggcctggatgcacctggaatatgccagcagcacctgctccacctggtgtgcgctcttaggttcctggaatatcttcttcctggcagccagacggcccagcaggccacccttctcccagtgggcatggacctggcgcaggtactcgtaggaggggaagaaacagaccacccctccaggaaccacaccgcacaggttacagagaatgcgacccacctcgtccatcatctgaggcagctctcttttctggaacgtgaattccagcggctggttggagatcccgctgcagatgacaaggggcaggatgttgtctggagggatcacgtgaccacaggaaaactccaccacgcgctcagcttccaccccggcacaggccagcagctgctgccggaagtcagacaccggctgcatggtaccccccgcaatgaccactgcccggcattccttcaccacttgggcaaagtgcacagctggattcaggagcaaaaacttcagggtgctctgactgaggctgccttggcggctcaggatgaccctgccgtcctggttggccgtagtgagagctgccaggaagccttcgatgtgcatcagtggagaagctggtcgcagggtgctggcctgactctcgtctgcaggggctgcaagagcttcagtcgtcctgggctgcaggctctgcaggaattgctgaaacccagccagtttgggctgctcccgggatgagaacactgctccgtaccgttcagtgaatccaaagagctttctgctgatcatgctcttctcacagtatcgctgcaccttgaacaggttgatgttgtcgatctggctctggaagagaaagtcgttgatggtcttcagctccgtccctgtctgtgacagactctgtgtattgggattttgcttaatgttcccccctagcacagccacgaatttctccagcaaatacaggatctgcttcaggtacatcaggttcttggccttcaaacgcttcccgtatcgctccacgtactgcagcagctggcctcgtgccgaaattcacacacccaggcctcgctaccttagcc

SEQ ID NO: 126714 - DNA, 669 bp, Homo Sapiens
  misc_feature (146)..(154): n is a, c, g, or t
  misc_feature (619)..(619): n is a, c, g, or t
  misc_feature (632)..(632): n is a, c, g, or t
tttttttgtttgggctttatttattttgtcattccataaatacggtggctgtgtcgcggtctgagtctcgtttggaagctcgaggcataggacagtctctgcctgggtagggaatgcagttagctgaggaaccacggtaggttttnnnnnnnnngactcggggagagaaatagcacattatttacatgactggacaaggacagaaggtgggaggaagcccctgtcactccttgggacctgggatctgagcacaaagctgagtgggaaacagtgggggctccgaagcgcccagcagggccagcgccctcctttctagaccccgactgcccttggtcttctgccctttcttggatggtcctacccaataccccctcccgagaggggggacctggccctaggaggcagagccccctcacatcctccctgtagatgggtgtggagcaagcaggacatccaggaaccaggtcgtggaaagagctgcgccagaggctgactgcatcctgacactggggcctggcctctctgtgtttggcaaacccgcagccttcggggggctcagctgccccaggtgtgcctcgcattaagcagcagtgcccaccctgggcaccacctcgcgctnggtcctcttccancagtgggtggggctgggtggcaatggggatggggcca

SEQ ID NO: 126715 - DNA, 1043 bp, Homo Sapiens
cccggttcaaggaccacccccggggggttgtgaggcttctcctagcgctgcccccggaaatcaccgagtcacacagtgtcgtggaaaaagatctggagggccatctcttgaaattctggtgctcgatctcgaattgatgtaccaggttcttgctcagggcttcccagcaatcttgcagcttcggcctcaccctcggcctgcacaatttctgccgctgttcctgcttgctttttctaccaagaatggcccgctggccctcctgctggccacttgtttggcttctacagcagctgtgtactctcggctaaagctcagctctgtgatggccacatcatccaggatgaggctgaagtccttggccctctctgtcagctcccggcggatcaacagggatacctgggcccgctgggtgatcagctgtgaggcattgaacttggccaccacactcttgagcacctcgttgacaatggacggcaacactcgttcctcgtagtccagccctaggcgctggtacatgctaggaagctcttgagcattgggtcgagacaacactcgcagggagatattcaccatctgtaggtctttggagcctgtaggggaggagatttttcgaggtctggcccgaatgtcatagataatggggtactggaaccaagggatcctgaagtgaaggccctcggccaggatagtgtcctgctgcactccaccgatccgattgaagaagatggctctgtgcccgccttccacggtgaacacagattcgcgcacaccgtaggccacggcgccggcccccagcaacagcttcagggccgtgcccatgccccggggcccggcgggcagccgtcccgccaagtccttcaagttctgggccatgtctgatcttgaggccggcggcactggaggtcagaagggggtgccggcccgcctctaccccgctccggcttaggtactgcacccttcacacgagggttcgggcccgtaaggctggcgaaagaaagggcagcggaagtgcgctccctttgaaaccctccccccctcgtgcc

SEQ ID NO: 126716 - DNA, 1745 bp, Homo Sapiens
  misc_feature (146)..(189): n is a, c, g, or t
  misc_feature (197)..(236): n is a, c, g, or t
  misc_feature (332)..(346): n is a, c, g, or t
gttgttgtgtgggcgtaaattcataatcaacccggtagccaactttcagcgcaagcatatcagctagggtaacacgctaaacacgtgaaaggtgttatagtttaccttgagcctttaaatctcggtagtagttggtgcaaagtagnnnnnnnnnnnnnnnnnnnnnnnnnnnnnnnnnnnnnnnnnnnnagttgtgnnnnnnnnnnnnnnnnnnnnnnnnnnnnnnnnnnnnnnnntgatacgactcactataggggccacgttgtacacagaaaggctgggtacgcgtaaggcttgggcccctcgagggatactctagagcggccgccccnnnnnnnnnnnnnnncaggttaagtaataaaaatttattgagaattcctgggttggtgtttatctcctcccagccttgagggagggaacaacactgtaggaaatcactgagaaatcacgcactgtccccaacagccccagttaacacagggaggaggaaagtaattccccagaaaaggggctagtcttcagtcttccttaatccaagaggggttcagggaaccggtgtgggggaccatcgcatgatactggggcggggtagggctgtgctggacccctggctggctcctcaaaaactggagaagcagatccacttcctctgggggtggagttcttggtgactaggctcatttcttacccttgatgaggctgtcacttcccctggtgaaactttcatcctgtaggttcagcacaaggttgtcagctgtgagatagatacgattctgtgatgtggcgatcgtcttggagatattctgggctgctcgaatcttgcgaagtttgatgtagccagggttcttgctcagtgcttctccaagcatcttggcagcctcggcctcaccctcggcctgcacaattttctgccgctgttcctgctttgctttttctaccaagaattgggcccgctgggcctcctgctgggccacttgtttggcttctacagcagctgtgtactctcggctaaagctcagctctgtgatggccacatcatccaggatgaggctgaagtccttggccctctctgtcagctcccggcggatcaacagggatacctgggcccgctgggtgatcagctgtgaggcattgaacttggccaccacactcttgagcacctcgttgacaatggacggcaacactcgttcctcgtagtccagccctaggcgctggtacatgctaggaagctcctgagcattgggtcgagacaacactcgcagggagatattcaccatctgtaggtctttggagcctgtaggggaggagatttttcgaggtctggcccgaatgtcatagataatggggtactggaaccaagggatcctgaagtgaaggccctcggccaggatagtgtcctgctgcactccaccgatccgattgaagaagatggctctgtgcccgccttccacggtgaacacagattcgcgcacaccgtaggccacggcgccggcccccagcaacagcttcagggccgtgcccatgccccggggcccggcgggcagccgtcccgccaagtccttcaagttctgggccatgtctgatcttgaggccggcggcactggaggtcagaagggggtgccggcccgcctctaccccgctccggcttaggtactgcacccttcacacgagggttcgggcccgcctcgtgccgaattcgccacccaggcctcgctaccttaaggaccgttatagttactgccgtc

SEQ ID NO: 126717 - DNA, 412 bp, Homo Sapiens
  misc_feature (301)..(301): n is a, c, g, or t
  misc_feature (395)..(395): n is a, c, g, or t
caacttttgatcttggtgggcacgagcaagcacgtcgcgtttggaaaaattatctcccagcaattaatgggattgtctttctggtggactgtgcagatcattctcgcctcgtggaatccaaagttgagcttaatgctttaatgactgatgaaacaatatccaatgtgccaatccttatcttgggtaacaaaattgacagaacagatgcaatcagtgaagaaaaactccgtgagatatttgggctttatggacagaccacaggaaaggggaatgtgaccctggaaggagcttaatgctcgcncccatgggaagtgtttcatgttgcagtgttgctcaaggagggcaaggtttacgggtcgagggttttccgttgggttttcccagttatatttgantgatgtttgggacggtt

SEQ ID NO: 126718 - DNA, 1102 bp, Homo Sapiens
ctctggaccaagtaaattgtgaactcaaaaagttaggagggataccaattacattaacaacgctttctttaaaaaatagaatcactttcttttgaatcaaccacagtggtgagacgtgtttttcttttcaggtgccccatgatggcatacagctttacccggcaaatcctgccagcttccaagtcccaggatactgacctgcaccagcacgtggggcagcattacctcccaacagtgtggagaagagcacatgtcaccactgggcaatgagagagttgacagagactcttggcttctcaacgccagacatggttggagagctttccttgttctattagaaaagttcatgaggaagctgtgaataggatcagtccagagaagtaaaactcttttattttcaccgtccaaacatcagtcaatatactgggagagccagcggaaaccctcgccgtaaccttgcctcttgagcacactgcacatgaacacttccatggggcgagcattcagctccttcagggtcacattcccctttcctgtggtctgtccataaagcccaaatatctcacggagtttttcttcactgattgcatctgttctgtcaattttgttacccaagataaggattggcacattggatattgtttcatcagtcattaaagcattaagctcaactttggattccacgaggcgagaatgatctgcacagtccaccagaaagacaatcccattaattgctgggagataatttttccaaacgcgacgtgcttgctcgtgcccaccaagatcaaaagttgtaaaggtcattccagcaattgttagctcttctgatgtcggatgtagtgttggaacatgttggcccaatctgtcatctttgagcatgtgaagaagagtggttttgcctgcattatccaaacctaagaatacaagttttccagatttcttgtacagtcctaggaactggagcacactgctgaagccattgtagatccactcaaagatgaaagacattattaatgcttactacggcctgaggggctcctccggcaaaacagcggctggctcggaccctccctcagagcacactaaccagcagcaccctccc

SEQ ID NO: 126719 - DNA, 2634 bp, Homo Sapiens
  misc_feature (678)..(730): n is a, c, g, or t
  misc_feature (1048)..(1098): n is a, c, g, or t
  misc_feature (2611)..(2611): n is a, c, g, or t
  misc_feature (2621)..(2621): n is a, c, g, or t
ctcgaaagaccccacaccgggggtggggaggtctctccaccccctgcttgtaatttgaaagagggcggggcccgtataaatgcggaattttttgtgccccccctttgtattccccctgtgggggagaattctatttcaacggcggccgcgacaatgccttttttggaccaagtggaggaattggtgggtttaaccccccgggggggtttttattttcccaagggggcccaacctttaattaatgatccaccatctccctagaaaaaacagccaaggggcagggggcccttattttatttggggcccgccgcggcaaacggaatggttttagacaggattacgccgggccgacatccccgggcaagttttcccattttggggggtccccgcgggttcaaagatgtgagcgattaataccttgttttgcaaagaaaactgcctaagaaagtagcttcatggtgattagtcaaagagaccggttcccatatcctagtaagactcataaaattcttcaggggcttcaacgttagctggggctgcagcagcagcaggagcagctgtggtggcagcatcctcaggggcagcaggcctcaaaggcagatggttcagcctagtaaggccttgtctttttcagcaagttgtgaagttttaatctttttttctcatacaaggttcagnnnnnnnnnnnnnnnnnnnnnnnnnnnnnnnnnnnnnnnnnnnnnnnnnnnnncccctggagctgggacacgtcccattttcttttatttatacaaaaagttacttttttaaatataatttaagaacccctccaagcaccggcgtccgtttctgggttccaccaccaactaccgcccttttcactacctcaccccacaccccttcataggacacagcttgggggtcccaggcggggtccggggatgtgggatgaccaaggcactgttctggaaacagacatgatgatgggcccctgtttcaacttgggcaaaggaggccatagtgaaacaggttccctccaacacaaagttatgacaaggacggtagaaannnnnnnnnnnnnnnnnnnnnnnnnnnnnnnnnnnnnnnnnnnnnnnnnnncaaaactcaaaaaccttcaatatgaaggcagcagctgggggaggggcatttacaagggaaaaaaatgattgagtttggtggtgacagcagcaagttgggactacaaaccccaatgattttgtcactgggccctgacaccccttcttgccccctgggacagcccccccactctggagctggcaagggagtcacactctctttggtctgcgggaacgcacccatcaaggtgagggggggcacctggggaggctgggagatgttgggcacttccttttcctctggtcacacccagtcctgagggaaaggcgccctcactcttggtctggagttccccgaggtggctggggggtgattttcccctcctattatggcagaacccccaaatcctgtctctccaaattgccaactcctcaccccacgggctcaaagtgcaatccagcggggcacagggctgggggcctctgtgagtccccactctgccccggaaaatggggaggcggtgtccctggggtggggagttcctgcaggtcagtactgcggggccggtcctcctgtcccacccggggttcccggcttggcctgggacttcatgtgctggacactggccaagattttcttctggtgtcccgccagagtgactccgattcggagcaggtcctcagcagagatctggctgaccagctcgaaggagccaaagccagcggctgcgaaactttcttcgtatcttcccattttgatggcccgaagccactcgcccacagagccaaaaagctgagtagtgaggctgccgctggtccaggagagggtgtgaggccccgccattctcccgggccacgattttgaggctggcggggttccggatcatcttgtccagggcgctgaccacctgggggaagcggggccgggcattccggtctttctgccaacagtccagcatgagctggtggagggaggtgggacagtctggtggcgggggcagccggtagtcctgttcaatggcattgatcacgtcctgattgctcatgtcccagtacggcctctccccaaatgacatcacctcccacatcacaatcccgtaactccaggcatcactggcggaagtgaacttccggaaggcaatggcctccggggcagtccatcggatgggaatctttcctcccagggagctcgtgtaggtgggatcggaagagttctcctccaggaatcgggaaaggccaaaagtcagacacttttgcagacgaggttgctgttgactaggatgttgcgaagcagccaggtctcggtggacgtagctcatctcggcaaggtaccgcatgcccgaggcgatgccccgcagcatgcccacgagctggatgactgtgaactgtccgtcgtttagccgcaggaaggagtccagggcgccgttctccatgaactctgtgagaatcatgacgggcatgctgttggtgaccacgccctccaggcggatgatattggggtgctcgaactggcccatgatggaggcctcgctcanaaactcacgncctgccgctccgt

SEQ ID NO: 126720 - DNA, 2341 bp, Homo Sapiens
tttttccggagcgtaggtgtgtttattcctgtacaaatcattacaaaaccaagtctggggcagtcaccgcccccacccatcaccccagtgtgcaatggctagctgctggcctcctccatctggtccctccagcctcacagcctcctcctgaagccctttccttccaggctccagaagagcaggagacaaacacaccccactgaggcccagctttaataaagtgcctgatacagagccaggggacagaacccaggtgatacagctcccgacagccatcccaggacgacagagggtcgagggagaccctcggaagcccccagtgactccagacaaaggggcagccccaaaggcgcctccaacagttggaaaacctccctgctagagggcagaaaaggaggcctggccctttaagagccaagctaatggcagctggctgaggggctaagaaaacagcttaaggttttgtcccgtttccttcagagtcccccaaccctgaaggagtttgcgcaaaaataccctaaagttttccaggaggtggggaggtcaccccagaccccccaaagagctgagccttccagcaagggatagtggctgggagggtccagacggggaggacagacccgagggcacttgtaggggaggtggaaagggtctcagactccgcactggaaactggtgtgggcagaagggtgcccagagagggggaagggtttgtccaaggtctcagggcagagccaagacctggatgccagcctcccacctctgggaccttccccaccgcccccacaacctccacaaccccacaaattctctggccgggcctccagacagcttctacccccacacaatctctctttctggtgctggaaattgagggggcaacaccaagttcccagctccttgggacaggaccccattatcccagcagagtggggagtgattggggggtccattcctggggctctgaaccaaggcctcatgggaaaggacatgtccttagcctcagattgactcagaaataccccctctaccctgattgactgtgcgcagaccctgactgcacaagaaagacacccctgattaaccacatagactcccaaatccctgattcgccaacagattccccaggccctgattggctggagggatacatcctcctcaaggccttgattggctgggagacactccagcaagccttgattggccagaagatggtccctggcctagcggctgggcggaggctgcttctcctctgaccctcctgaggtcccacaggctgggtggcctaggtccaggaggggtgggagaaggtgatgccatacagctgggcccacgatgagaagacccttttctcggtgatgaagcggtggtggttgcccttgcgactgtgctcattctggatgtaggtgacacattcgtccggccccttgggctcgtagtagtggtagggcatgcgctggaggcggggccgctggctgcagtagttgggggggaccatgccatagacatgcacgtggtcacacaactccaccgcgatcaccatggtaaaccagcctgtgctcaaccacgaatgagacttctccctgtccttgcccgtctcaccccggaagaggtcgtcaaattgccgcatgcggccgggagagacggcatatgcttccatgttggggaacaccaggcccgctcgctggatcacacgcacgaggctgccctggggcttctgcatcttgctcgggggcccccagaagatgaacacggtttcaggggtccggttgacaaactcctggggcctcctcagcacgcggaacacactggaatgggccacgacgcggtaggtggtcttgttgcccacatcagctgagtagccagtggtgggtgcatcattcatgcggattgtacactcagcccgctcgatctcagggcccagcttggtgcccagcaggtggctggagctgctgacaatcacacactggtggcaccgagagggcagtgtcttgttgccgagaatggggacatagccgtcagtgatgctccacttcttgaggttgacaggtcggcggctacggccccgcagggagccgtaatggaagacctcattggcactgttggagctgtagaggatgaggatggtgatgagggcaaagaggatcacgaacactgctgaccgctgctctttgttgctactcatttctctccggcgtctgctgaggggtaggtgtcggcgtcctgcaggtggccctgggggcagggatgtgggttcacaccatccggcggggagcgcccggcccccacacggccaccgagccccctcacatggcgccagggagccgagcgccggggtccg

SEQ ID NO: 126721 - DNA, 725 bp, Homo Sapiens
ttttcattacttactcagttttatttaggtggacacaacagtgaagaactcaaacatggtttgacctttatctacagacacagcagcctggattttcagcctttcattccttttaaatgaaagtcagcaggctcaaaatgcagagcttggctaagtcacttctgtggaaatatgaaatatagtagtgataaccaccaagggctttcaaattcttgtgttcttctaaggatcctttcctaacaccatgatttgttctcatctttgtggaaatgaaaccaagatggtcttaatttgtaaagtcctttttcctctgttggcagtcttcttacaaaggatgcagcaaaaagaacacatttttctttcaaagttttgaagaaatatagtcattaaaaagaatttaaattatgcctagagcaccactttacagaataccattaaattgtaattacgtgcttttaaaaagccaacttgttaaagaggagctgatggtttcagtttttgtagggaacacttgtaacactgcagaattctacaagggctttctcctctggtgggcagggaaaaaaccactcaagtcatgagaaacttttatagctttcaggaacttgaagaacatactgctgtattaaatttcatgctttagtgacgaagtatttttacagctaaaaaaggaaccccggccgtaatggccgaattcccgggcatatgtccggtaccgtcgactg

SEQ ID NO: 126722 - DNA, 1057 bp, Homo Sapiens
  misc_feature (945)..(979): n is a, c, g, or t
aatggtccattgcatacagtttatttcactagattgcaattttatacacagtatgaaggggtttcctgatagcacatatatagtttactttctgtactgctgaagaaccaattgttttttacattgtatcataataccctatcattaaaacattattcagtgaattttttccaactacatataaacggagatttaccacacacattctttaccatggtgcaagaatgcctttataacatatttgaatcacaaaatgtgagtctaaaatacatcactgtaattaaaacactactttaaagttacaatgccccatgttatagtagccagatttgattaatccctgtataaatcacaaagcaatttggtggataatgtcttggctaactggcagcagcttttaaccgtgatacttgagaatggaaattctgttaattaagaaccagactttcacaatttagaaaacttcttcccttatatgtcaatattctcagtcaaaatgggatatttaaaaatttgtagtctctaaaacaaggaaaataaatccaaccctcccttagctgaaaggatgcggttctaacattaggtttcgtagaaacctaagaatagcattgtacgaggagtggaaacaagtcataagaaacataacatttcttttaaaacctcgttaaattcctctgcccctccccatctctgtcaaacacagagaaagaatactgcattacaaacaaagatgtgtttccgtgaaatgatgtaaacaagtcagagagaaagatttcttcattttcctattttgtggagtggggcagtgggatatcagttaaataagaaatagagctccttaatcaaagaaccacttcattacacacaaaacagctcggggcaactgctgaaaaccccggccgtaatggccgaattcccgggcatatgtccggtaccgtcgactgnnnnnnnnnnnnnnnnnnnnnnnnnnnnnnnnnnncgccgcttcctcgctcatctactcgctgcgctcggtcgttcggctaaaacgacgctagcgccctatagtagtctttca

SEQ ID NO: 126723 - DNA, 2030 bp, Homo Sapiens
ggccctccggaggggccgaaggaaaccgcggaaacgaaagggctgggttagggcccggggcagttacacgggccgggccggagtctcaggaccacggggttggctctggccctgtctctgcttcagggtccccggcccgcgctctggccgccagagccaagttggaagaagagtctgaagcgggttcgacttgggacaggggaaaagcggggccctttccgctgctggtccgccccaggatttgcgagcgtcctgggcgcgaaagtccacgagaagtgcagaaggggctcggggatttgttgattggggtggggcgggggagtttgggtaaagaagttgcctggggaatgacactctcccctccacaacagtccgaggttatgcgtctcaatgatcccgcggaaacgctacgggtctaagaacacggatcagggtgtctacctgggtctctcaaagacacaggtcctgtcccctgcaactgctggcagtagcagcagcgacatcgcccttctgccccccccagtgaccctcgtccctccccctcgcgacaccatgtcctgccgggatcggacccaggagtttctgtctgcctgcaagtcgctgcagacccgtcagaatggaatccagacaaataagccagctttgcgtgctgtccgacaacgcagtgaattcaccctcatggccaagcgcattgggaaagaccttagcaacacatttgccaagctggagaagctgacaatcttggcaaagcgcaagtccctctttgatgataaagcagtggaaattgaagagctaacatatatcatcaaacaggacatcaatagcctcaacaaacaaattgctcagctccaggatttcgtgagagccaagggcagccagagtggccggcacttgcagacccactccaacaccattgtggtctccttgcagtcgaaactggcttctatgtccaatgacttcaaatcggttttagaagtgaggacagagaacctgaagcagcagaggagccggagagagcagttctcccgggcacctgtgtcagccctgccccttgcccctaaccacctgggcggtggtgctgtggttctgggggcagagtcccatgcctccaaggatgtcgccatcgacatgatggactctcggaccagccagcagctgcagctcattgacgagcaggattcctacatccagagtcgggcagacaccatgcagaacattgagtcgacaattgttgagttgggctccatctttcagcagttggcacacatggttaaggaacaggaggaaaccattcagaggatcgacgagaacgtgctaggagcccagctggacgttgaggccgcccattcagagatcctcaagtacttccagtctgtcacctccaaccggtggctcatggtcaaaatcttcctcatcctcattgtcttcttcatcatctttgtggtcttccttgcttgaaccctctctactctgaggcactctgttggggtttgggaccctcctgggaaggcaagtggccagtgctgccactgagcctgtgcagggtacttgggagaaaggccctgtttccctggaactgctaagaatgaccactgcccctgatcccccaccccttgcctctggccaccctgtcctccccccaccaccctcaggcctatgaaacacacagggttctagatttgaactctgctgtgaagtgactggaagggagcagaggccagctgggggccagtgggggaggttgtttccactaggagatttttataaaccctctccagcctctcccaaaggaagcgttggcagcaaagggagatgatgcccttacccaccttcctgtgagtgaagagaggaagcagccccagggaccaattttcccaattgacctctttcttcctctttcaccatgtgaggcagggagccctgagcccttcagctgcctgcacaacccctgacattggctgctggtgactcaatctgccaaatgtgctgcagctcgttttctcccaattacagcaagactgtcagcctca

SEQ ID NO: 126724 - DNA, 272 bp, Homo Sapiens
gcggccgcctactactactactatacggctgcgagaagacgacagaagggagcagaggccagctgggggccagtgggggaggttgtttccactaggagatttttataaaccctctccagcctctcccaaaggaagcgttggcagcaaagggagatgatgcccttacccaccttcctgtgagtgaagagaggaagcagccccagggaccaattttcccaattgacctctttcttcctctttcaccatgtgaggcagggagccctgagcccttc

SEQ ID NO: 126725 - DNA, 1836 bp, Homo Sapiens
tttttccttttgtattaacttttatttacctgttaatgaaatcatcaaaatacaatgagtaggcaccttctatgtacatctgtcctagtgcttttgagtgttaatctaaactcatacatcaacaaacattctagccggacaagtaggtggctactcagtccattaagaaacttaattactagtttctagtagccttaaagtctcatttaacatttaacaaatcaaagagcatgtcagaggctggacatcaatggcagatgatgccaaagtcatagggttttgcctttgtgtacagtgcataggctccaaagcatgacctgcacgtcttgatactcaggaatttttggaaaaagaaaatcacactcttttgtccacttttaaaaagtgaaaagtagagccttcattaccctagtagagcttaacctaatacaatacaatgaaccaaacaggaagaaaggcatcttctacaaaccctattcaaaagtcattggccagctctttaaaaagtttattaataatttaaatatttaaataacttgtaggtttatccattagtctcttctattaggctctacaccgcctcttttgggacggggttagaagttccagttttacatgctgttcctcccagcaaggccccatttcttcaagtgagtacaggattgttgatagctccgtttacaaagtggaagtgatgacagctcccattgatgtggacagttctctaaacaacgcgaggtgacttcagcttatgtggctcgttgcctgacctcttcttttaaggtatctctttctaattttgatcatccattttatactcagtttggcaaactctgctgctttaaataatgccaagaaggcgccacagagaagagcaattgtgttccaaggattggcagtgactatatcttggactttctggatgaaaggatctttccattcaaagaccacaaaaaacaattgagcactttttttggcagctggcctctggtcaatgtagttaaccacacttgtctcctgccggaactccactgcttcccgcccatcctcctccttggtctttaccagtgacatcttgacccaggtgcggaagcccccagagaacttccagctggaataggcactctcacaggcctgcatgaagcctaccctgtttgggctttgcaggaaactcctggaaagaggagaagaggaggtaatcaatggcgctgaagtcctcactactccttgttcaggcggaactggaggaagaccagctcccgctttttcacttcccgggggcccctggacaatcagggcagatttcacagtctgattggagaaggggtccgtgtagttgatcctctgggtggtgcaattcatgtcacccggctggccagggcttgtcagaggaggaatgacctcgtaatggtgcttacagctgagcaactgggcctgaccggggtacaaggcaatacctggggcatcgtagcgatccacttccttgtaagacacagacatgacagggtgcttgagtttctcacgaaagtctgtgatggtccggtagaccaggaagacggccacagccatgagcagcaggtagatgaagatgagtaggaccgagaagacgttcttcaggcaggccttgctgaagcggatgctgctggaggcggactcgctgtccaggcctggtaagatacccggaccttggactctgaccgtctccttgtcctgctcgtctgccagctctgagttctcaaccacctggaccaactcctcactcagctcctggtaggatgtggagcgctctgccggatcatggcactgaccagagcttcggcacacctgagaccgccc

SEQ ID NO: 126726 - DNA, 1078 bp, Homo Sapiens
  misc_feature (855)..(855): n is a, c, g, or t
  misc_feature (888)..(888): n is a, c, g, or t
  misc_feature (946)..(946): n is a, c, g, or t
  misc_feature (950)..(950): n is a, c, g, or t
  misc_feature (1019)..(1019): n is a, c, g, or t
ttggattctaacactttattaagaggtcacaagccacaggactttaaagtgcatgaaatttattggcaatgaagccgcatgtataccaggctcccctagtccccaccaccttgccccatccatcatgacgtggtggggaggggttgagacccatctttaaaagtgggggacagcagggacaaaggatgggaaactggaggaacaggagtattcatgaactgaagctgggacaggagactgaccacagtgattctgctcactgaaggaagggtggggtcagtctagtctctcaaaggctggtgaaaagttttttttcacctattcctcacagcgagcccctggcatttcaaatagacctaactcctcctcttcatctttctctggttttctcctctatgagtaatttggaacccacagtccagcttgagggtatccctgatatgcacaatgaatacaaaccacggcggatgcagatttcaggatcatgctggggcctggcccatttgggtgggaggagctttctgtcaggagttgctgggtgcggggtacatgtgtgccctccagtgtggtgagtgagagcatgtgagtgtgtgtgcatgtcccataccaaaccgtaagaggcagctgggtcaggaggaaccccacttcttccttcatgggacaacaagtggagtgggaagaagcggggctctgagtcccagaaagaagggagaagcctgctccctactgtaacactcccaggccaatctatacccgcccacaccctttctactcaacatactgctccttgttcccagccagcccggcacactcaccatggacacagggcagctcttgctggcccattcacatganattctctgtgtgaactcctcgtctgctctccangagatggacaggctggggagatctccacctctcttctcccctcctcagagtggattangcanggacctaaactttagcaatctacccatctataacttttaagaatggtaagtgcttgctcgcagatgcanaaggtggacaagctggacagtgcactgctctctctctgcgatctggctcaggcaatcta

SEQ ID NO: 126727 - DNA, 740 bp, Homo Sapiens
  misc_feature (683)..(683): n is a, c, g, or t
aatgaagacttctcagttgtattatatttttaaaaatttaaaatgaacttgtatatgtggaaggattgatgatctgtactgactccagatggttatgttctcctgatgacagatggaagtccaggaggcggggccatcccaagtgtatgccagcaagatatggttctactgctggtgacctcatagaagcagagtcatcactggagaaagacatagctctcatcctgatgggcatctcctgcccctgaggcctcagttagctgcacttgccttctgcatctcctggggatttcactccatcagttagcatcttgtttactgccttcccatgacggggggcaggtgtccagatcccagatctacagaaaattctttcatttctgttgtgtccccctgcttccatcctgagtgtacgtccccaaactttcatttaacatgtcatgttcattagttccttcaaatactagttcagagcagtctggaatcaagactgcctagtttgagctccaactgtcacagatcttgggcttgtcacataaggcaatcaaatccttaaagaagaaaaaacatcagaggtagtaaatgctgcatagagtttaaaaaggataatatgatacagaatcacaggatggctacttgagattgtgggcctggacatgaacacggcctctttgaggaggtgngtgataagtgatacctgatggaaaggagcaaactggagaaggagctcagagacagga

SEQ ID NO: 126728 - DNA, 795 bp, Homo Sapiens
  misc_feature (494)..(494): n is a, c, g, or t
ttttgcgtttttggatggagttttattgggaggacattctggacgggctcccagcaagagtctggcaatggagcatgaaaatgaatgagcctggaatgagggagggtgcggcctcggctacacaaagttcacccgcccccaactgcctcccagcgtgttagctcctgtggcaactccccacttctctctctgtttttcaacccaaatcctggagcagagggctcttcgctcctcacaccatctccaccaggctgcagggggagtcactagcccactcaagagctctctcctgttggtccctgattcgcaggggcacgtcattccttcttggtaactcattctctttaacagcccgacacagggtctccaggaaaaggacaggagctcacacagtcatgaacagagatgcatctggagcaggaataaggatgctgacaacatctgtgtctgccctccactcttgtaagggccagtaaggtagtacccagtccctngggggtagggggggtggtggtgggaatgagggcatctcttctttcaggggccaaatctggcacaaggatgtctgcttaggcaactccactgcctggcatgctctctccctaggaaaacaccaaaccttttttatttcctcagtcttagtgtgagagtgatcacctcttccaggaagcccacaaccagaatgccagggcacaccctggccctcagtagatgggcactgagacaaaacatggcctgctggtggcattcccaacaatgtcaaaagtctcagggatgagctcacagttgggagtc

SEQ ID NO: 126729 - DNA, 1121 bp, Homo Sapiens
  misc_feature (711)..(750): n is a, c, g, or t
ttcttggcccacagtctcccagaaatgatgttttgagtccctatagtttaaactccctctcttaaatggagcagctggttgaggctttctagatctgtttgcatcttctttaaaactaagtggtgagcatgcattgtggtgtagaggcaggcattatgtaggataagagctccggggggattcttcatgcaccagtgtttagggtacgtgcttcctaagtaaatccaaacattgtctccatcctccccgtcattagtgctctttcaatgtgatgtgggaaagcaggaggatggacacaccccactgaaagatgtaggcaggggcaggtctctcaaccaggcatatttttaaaagttgcttctgtactggttctcttcttttgctctgaggtgtgggctccctcatctcgtaaccagagaccagcacatgtcagggaagcacccagtgtcggctccccatccaaatccacaccagcaccttgttacagacaagaagtcagaggaaagggcggggtccctgcagggctgaagcctaagctactgtgaggcgctcacgagtggcagctcctgttactcccttttaaattacctgggaaatcttaacagaaaggtaatgggcccccagaaatacccacagcatagtgacctcagaccctgatactcaccacaaaacttttaagatgctgattgggagccgcttgtggctgccggnnnnnnnnnnnnnnnnnnnnnnnnnnnnnnnnnnnnnnnnctctgctggggaccctggccacccccctgctgctgtcttggtgcctgtcacccacatggtctgccatcctaacacccagctctgctcagaaaacgtcctgcgtggaggagggatgatgcagaattctgaagtcgacttccctctggctcctggcgtgccctcgctcccttcctgagcccagctcgtgttgcgccggaggctgcgcggcccctgatttctgcatggtgtagaactttctccaatagtcacattggcaaagggagaactggggtgggcggggggtggggctggcagggaattagaatttctctctctcttttaatagttttattttgtctgtcctgtttgttcatttggatgttttaattttt

SEQ ID NO: 126730 - DNA, 696 bp, Homo Sapiens
tttttgctggtactaagacatttattatatcataaaaagtccactgttgttctgtttttccatatgtacatgctcctgtgggcagtcccccacccagcccccacctgcctaccctccatggtgccagtcaactctccaaactgaccaactaattagtaaaagaggaagaactggaggaggtggcccagggctaatgggagtgggaaacaaagtgcagagtggttgggcttagttttcaatgcctgaccgtgggcaggcactgcagggccggcacacggatgcctccccagagctgccgggctggaggcagaggctgcagatgacagctgagttcactctcaggctgaacccccaggaatggagcgcagaggaggaaaaaggtcccacagctgattgggggtcttagctggggctatcaacattctctttttcaggtccccatccaagtggcagcaacagcagctctgacttggcctgaagagcttgtggcccgcaggacagccagaagtggggtcaaggaaagcctggtgggaagcactggtcctgatctctgagtgacctgccttagttgacctcagaggtgggtattggatctgtggggcggggtgtggcccggaggggcactggtgaggtggcctcgatgagcgcagggttgaggatgatgggcagagtcataggtggcacgcccacctgcag

SEQ ID NO: 126731 - DNA, 1389 bp, Homo Sapiens
  misc_feature (448)..(464): n is a, c, g, or t
  misc_feature (466)..(503): n is a, c, g, or t
  misc_feature (1009)..(1054): n is a, c, g, or t
  misc_feature (1075)..(1100): n is a, c, g, or t
gagacacaggaacaattcttttattgtacattggagaaatagccctgtgtgctggttcaaggtgcaacatacagaatattgaattaagaaaagagggaacggggaagggaagggaaacctcttgaggtccaaagttgcaaacaaaaaatggtaaaagatttcctcacgcaagaggcatttttgcaaataccatgcaaaacaggcagctggtgtgccttaagagaatccctataaataacagaaaagacactccaagcattcctgtacgtggactcagagcacagagaaaagaaactaaaatgccttttggcatttcaagatatttggcactcttgtgattacatttttttacagtccattaaagagaataaactgacataatattagagaaataaacaggctgctcacacaacagactgcaaggggaagttagaaaaagctcaagcannnnnnnnnnnnnnnnncnnnnnnnnnnnnnnnnnnnnnnnnnnnnnnnnnnnnnnttttctgacataaaaaatgtgtccatttgcattaacttgggcagatagcttgcagcaacaaagaaacacaagctttacaactcattttaaaatgaaatcttttctatgtatcattccttagaaaagttctcttcttgttttaaacacattcctgataacttctaaagatgacccaaataaaacagaatatctacagagatcattttctgaattttttgtacatccaaggataacaacataataaaaattaaactggacagcatttcacatccaagtgcacagaaccatttttgcaagattaaataatgtaaacattgggaacagccaaatcagcgaagaatgccaacacctcaaaacacctggtgttgccgcttcattaagtggttcaaaatccagatctataattgcgcaatattcaccgtatataaaaagaaatggatattaattttgacaaatagctgcaactgagacttctttttatttctttatatgtgtatatagtgaannnnnnnnnnnnnnnnnnnnnnnnnnnnnnnnnnnnnnnnnnnnnngcagaggagcccagagccttnnnnnnnnnnnnnnnnnnnnnnnnnntcatctgtctcccggcctgataccagatacaggttgttgatttcatcgtgggtagcaagctagtaataaatttcaaagtgctttctcttttcatgctttttgccaataactgttaccgccgttcttattctctcccttaactcattgtctttgggggagttagacaccaggaggtgccttgtcggtcatatttttcagcacgtcatcaatcctatcatcttcaatgacaacccgcttgccccggccgtaatggccgaattcccgggcatatgtccggtaccgtcgactg

SEQ ID NO: 126732 - DNA, 666 bp, Homo Sapiens
  misc_feature (453)..(469): n is a, c, g, or t
  misc_feature (471)..(508): n is a, c, g, or t
tttttgagacacaggaacaattcttttattgtacattggagaaatagccctgtgtgctggttcaaggtgcaacatacagaatattgaattaagaaaagagggaacggggaagggaagggaaacctcttgaggtccaaagttgcaaacaaaaaatggtaaaagatttcctcacgcaagaggcatttttgcaaataccatgcaaaacaggcagctggtgtgccttaagagaatccctataaataacagaaaagacactccaagcattcctgtacgtggactcagagcacagagaaaagaaactaaaatgccttttggcatttcaagatatttggcactcttgtgattacatttttttacagtccattaaagagaataaactgacataatattagagaaataaacaggctgctcacacaacagactgcaaggggaagttagaaaaagctcaagcannnnnnnnnnnnnnnnncnnnnnnnnnnnnnnnnnnnnnnnnnnnnnnnnnnnnnnttttctgacataaaaaatgtgtccatttgcattaacttgggcagatagcttgcagcaacacagaaacacaagctttacaactcattttaaaataaaatcttttctatgtatcattccttagaaaagttctcttcttgttttaacacattcctgataac

SEQ ID NO: 126733 - DNA, 790 bp, Homo Sapiens
  misc_feature (767)..(767): n is a, c, g, or t
aaaaaaaatttaattacacatttgaagtcctgattacatcctagggatttatttgcttatgaaaagtcaaactatgaattacaatattgcagaataattttccatttcatcagattagttttaccattcattccacaaatgatttgtaaaattttgcattacctaaaaaactttgatactacattacaaaaaggtacttaaatatagatgagaaagatagatgtttgtcttcttcttttgatattgatattaaatgaaagatggaatgttttttatttaaaatcaatccctcgtattttcccccaaacacaaaagtaaatagcaatgtgaacaaaggctttctttaagtctgttattcagttcaaatatgtgttagaaaaaagatctattctgtgtataaaatataacaacaaaaaagggaattataaatagaaaaataaaacatgtagaagagactaatattctgtgcacatagctttaaaatcccaatagggaatgcttgtcagaaggagatactacacattcattgacttaagcacaaattcacaaagagcaatattccaacacattaatttgccacaacacatttacccattgaaaccagtccaccaatttttaccaacaagtagcatcttaattttaccatctaatggttaaattgaagtgaaataaagatttccacacaaatatcagtaacacagactttcctggattgtaatggagcacctaccaacattcagtcagctcacaggttatgacactccttngtagtatcatctcttcacacagt

SEQ ID NO: 126734 - DNA, 2284 bp, Homo Sapiens
taaatcacaaatttagcttcagaatctttattgtgcttcatacaatgtcgtgttcaatacatgttttttaaacattactttatatgcaaagacttttctctactgaaggtataaaagcaatcattatcttattttaatagcttaattcactgctgtatcccaataagtcctgtttgaataattgagtacgtgagctaggttgttcctaatgactttggagcacctctaaaaataccgaatggcatacactcagatattaggtaaatatttctttattaaatggttaattccataaataaaatcttttcactgaatataaaattaaaatcatttacaaattattccagtattacatttcccctccctccccaaaagctacattttgataaataaaacattcagtcttaaaacacctgatttctgtttgcagtttagagtgcagatagctgcctctcacagacactcatggagtgtcccccttcaggaagggatggaatgccctcccatttacttttgtcaaaggacgaataaaagctttaaactgtccaactaatcttattatctcttttacgactgtagaaccccaaaaggaaaaaagcctagagaaaatatgcttagcaaataatttacaaacagaaaacagaaagtcatcaactccacaagctccaaaatgaagcagtaacatgtgctccaatactatgaagcaaagtattctccaatcgtggctgcattagtgtccatccgcaccagcacccttggcagtttcgaaataccttaatgctcctcaagaatgagcaaggcttcctttctacaatgagtcccatcacccacaccacccccgcccattttctccatgattctgattctgacactcttctcccttgtttgtctaggtgtgccctggaaacccaggtagcatttagtccctaaatttgtgaatgtcattgaacagcctgtagaagggaaacgctgcttcattggcatgcgggcagttgtagttgcatttgcaggactggatcatcatgacgttcttggaaaatgtctccccatcttcgcagcggaaccgcatcttcacagtcctggtcagctggggcgtgcagcatcggccgtccacgcaggaaccgcagtacttgggccggtatttcttcacactcaaacatccagcgtaagtaaacctgactggttcgggggatttcttggtcttgctgcatttcttgccctttttcaggctgctgtacactggctgtccacaaggccgcacctcacaaatccgggtttctttcacaaggcggcactcagggttgtcattggtaactcgtgtggagataccagttccacaggtctttgagcactgggaccatgaagttgtttgaacaatacatttctggccttgtaaagggttgtataggatgcgaggctccattccaaaaacagggagccgcttcagtgagctgccttttccaactgcaatcaattcattgtttctcgtcaactccacctcggaggcatcgaatcccagctccttgccaaggaggccgtcctggtcctccatggggtccttgatactatcctcgtcacagacccactcctcgcagcactgcccggtaactttgaccagccgagggttgggacagcccaagttggggagagatagttcttggggacacagaggaatgcagcccacggcgccatcaatacatgtgcactgatgtttacagttgggctggaaactttccccgttttggtagattctggagttatattcacagggtctgccctctgactgagctctgcagatccccttcagagcggtggagctggcgccgaagttgcattccagccccttggtgtggtcgcagggctgcgttttgctgcagtcctcgttgagctgcttggcgcagaccttacagcagccgcagccgtcccggaccagcccgactcccggcgcgcacttgggcgcctccagggggcagtggcaggcagcggggcaggtggagagcgccagcctggtcaagtggagaagggtgacgactaaggcgagcgccctggcgatgcgggagctcattgtggcgcgcaggagtagcccggggcgagcgcggcgacgaagacgccaacaagctggtgtgcagcggacaggccgtgcgcagcggggtcggggtggcggcgcggtgtgcccggtgggcagggaggcgagggctgggcggcgggcgggcgtctttcgctcgaggtcccggcggagaaggcgcggagggcgcgggcgctgctcggggggcgctctcgctcc

SEQ ID NO: 126735 - DNA, 1801 bp, Homo Sapiens
gtgtttgtggtcgtgaatggcaagattatggaggtaacccccttacccgcacaccaatccgaatatatgattgatgatagactgtttcgtgagaaggccagataaaggtgccacattaatgctaagttagtccccaacccagcgaatcagccaaaaaaggtcacatttcagaaaattttgccacagtaagacataagtcataattctaccatagagataggtccatgagagactgtgtatggtatcttagattccatattacaatgcatataagtcggtcaaagaaacttgaaccacactgcatagaacatctgccacccggtgctcaagcctattaatcacttaaaccttgggttgttggttgttcttacaaagaagtagaaagctgtacatgtgaaacagtaatatgaaatatatggggtggtacacagatataaaattattgttaaaaaatactacgtatgaattgagtaactgagctaagagaggccacttataaataatgaaagatacatgtgttttgcataaggaaataccagtgttttcttttcatagcaaagtaccattaaagcctcatgttttatactactaggtcaaattattttttctcctttttaaaatttatcggttccgacttaaaaccatcaagtctggtcagaatcaactcagtctagctgatgcaaaatcatatgcattcaaaaagcagtctttaccgagatgcctttacaaaccttggaatccagcaccttcttaaggcaaagtttcatggcagcagggaagtgaactaataattttcatttaccacatcttggtgtctttgaaaaaatactttatggcacaaacctgtttttgtctctccttatgtctccacttccttcaagtagactagatgctacaggcaatttctcatttatgccaccatgcagtctcaatccattttcaacttgctctacatacctaaaatcttccactactacacaaacctcagacacactgcaatctccacagcatgtgtgctccacagcatgtgtgctccacacttccagctggccctgggttccttgacttgtgaatggcagtgtttttttcacctatgtttgaagaaaaccaaagaaaagcctggcctttgctacctctcctgtgccttctacttttatctaaatgaacacactataatcatgctggttgcattttccttcattctcctccctactccttccaaacccctgattcctccaaatactatatatgccttggtcatttgggtggtttggatgctttctgtggaatgaactgtaatatatttctgctttattcagagcactttatattatttatatttaaattagccttttaatatggtttgtaaataagtttcctaccaaggtagcatgaaaacactacacataaagaaaaaaaatgttaagaactaaggtattaaccttgttagaaaactcttttgatattaacatttaaggcaagtagttccttccttatgatttaatataaaaacatttgctaagacaaggcatttacttggatttctttgtcatctcttcttctttcatccttacatattgcacttggttcactgtatctgtctgaatacactgtgcttcagaatcattgtagtactgtttgtggtacaactccctcattaaacatttcacactatcaggctacacagcacctatatcttgtgtttaaagaccgaacgcgtggtcgacgatatcccggaaatccgagcgtaccagcctgcttgtatcaccaggggtctagagtccatgctttttcgtgtgtt

SEQ ID NO: 126736 - DNA, 987 bp, Homo Sapiens
tgtgcatataacagtggtaaaaaaagcaggctggtaccggtccggatttcccgggatatcgtcgacccacgcgtccggggaaccaagactagtttcttcagggcagtggacgtagtagttgtaaaaacgttttctatgacgcataagctagcatgcctatgatttatttccttcatgaattgtcactggatcagcagctgtggaaataaagcttgtgagccctctgctggccacagtgaggaaagtagcacaaataggatacagttgtatgtagtcatggcaacaattgcatacaattttattaccaagagaaggtatagtatgggaaagtccaaatgacttccttgattggatgttaacagctgactggtgtgagacttgaggtttcatctagtccttcaaaactatatggttgcctagattctctctggaaactgactttgtcaaataaatagcagattgtagtgtctggttggtttggacagtagtgctttctatcatattgtacgtgtgcaatggtaattgttctactggccaaagcctctttcagcagtgccttgccatcatgcttaaaagttggctagtatatcttgctggatggagccttgaactccggcaaggattgaaccatctgacttccaaatttgccttcccctctggacctcactattaacaagcaaacctttcagggccctcttagctctcagaagctatgtatgggcttccccagattctaaagctgctgactcgagaaactactcatttctctactggttcagcagacagaaatagccatactaatctcatagggggtcaattgcattttcaggggcaggagggaaccaagcagggtggacaaggccttctgatggggggagagcttgttggatggggccacattcacaggagggcggtcggtacctctgggcaatcaagatcggagtcatcttgggaaggccctctaagggaaactacggggacccatcg

SEQ ID NO: 126737 - DNA, 972 bp, Homo Sapiens
  misc_feature (126)..(126): n is a, c, g, or t
tttttaaaactgaatatttattttgcttcacaaaactgcaactattatttgtcaaatatttattgatgttaaatccacattacaccagcacaacaatccaaagtagtatgattgattgatagtacnttttttttataaatacaatataaaggtggcaaaataatgctagttaatcccaaacccagcaaatcagcaaaaaaaggtcacattcagaaaaatttgccaagtaagacataagtcataattctacaatagagataggtccatgagagactgtgtatggtatcttaaattccatattagcaatgcatataagtgcggtcaaagaaacttgaaccacactgcatagaacatctgccacccggtgctcaagcctattaatcacttaaaccttggttggttggtgttcttacaaagaagtagaaagctgtacatgtgaaacagtaatatgaaatatatggggtggtacacagatataaaattattttaaaaaatactacgtatgaattgagtaactgagctaagagaggccacttataaataatgaaagatacatgtgttttgcataaggaatacagtgttttcttttcatagcaaagtaccattaaagcctcatgttttatactactaggtcaaattattttttctcctttttaaaatttatcggttccgacttaaaaccatcaagtctggtcagaatcaactcagtctagctgatgcaaatcatatgcattcaaaaagcagtctttaccgagatgcctttacaaaccttggaatccagcaccttcttaaggcaaagtttcatggcagcagggaagtgaactaataattttcatttaccacatcttggtgtctttgaaaaaatactttatggcacaaacctgtttttgtctctcccgacgcgtgggtcgacgatatcccgggaaatccggaccggtaccagcctgctttttttaccactgtctatagtcc

SEQ ID NO: 126738 - DNA, 1231 bp, Homo Sapiens
  misc_feature (76)..(84): n is a, c, g, or t
  misc_feature (101)..(263): n is a, c, g, or t
ggggacacaaatttccccctttctccttctccttgggggcccgcgcccccaaaaaaagggtttaaaaaatttttcnnnnnnnnnaggggggccccacaaannnnnnnnnnnnnnnnnnnnnnnnnnnnnnnnnnnnnnnnnnnnnnnnnnnnnnnnnnnnnnnnnnnnnnnnnnnnnnnnnnnnnnnnnnnnnnnnnnnnnnnnnnnnnnnnnnnnnnnnnnnnnnnnnnnnnnnnnnnnnnnnnnnnnnnnnnnnnnnnnnnctctttattgttacatacaatgtataaacacataaaacagaaaacagtagggatcctctaggatctctagggagacagtaaagtagaaagaggtctcagaaacatttttttaaagtacaagacattcagtgctcggcccaaaggcgtagaaggtttagagccagcagatagctgtactaaaggctccgtctctctccccagagccaggacaaccccagggagctctccattagcagccagtccacgcaggcaggatgctgcggagaaagctctatgctgagaacattccccttgatggaaagaagggcaacacaaaagggtaactaagagctccttcctctcgtgagggcgacaactgaggaacagaaaaggagtgtcccatgtcactctgaccccctccccagctgccctgggcccagatgcccccatacttggcatttaccagaacctgtcccagctcagaccctgcctagacccaccaggtacccaaagttctctggggagggccagggaagaggctgggtgtcaaaccaaacagatttttatttgcagtcgtcactggggccgtttcttgctgcttatttgtctgctagcctgctcttccagctgcatggccaggcgcaaggccttgatgacatctcgcagggctgagaaatgcttggcttgctgggccagagcagattccgctttgttcacaaaggtctccaggtcatagtctggctgctcggtcatctcagagagctcaagccagtctggtccttgctgtatgatctccttgagctcttccatagccttctcctccagctccctgatctgagtcatggcttcgttaaagctggacatctgggaagacagttcctcctcttccttggataaatcggacgcgtgggtcgacgatatcccgggaaattccggaccggtaccagcctgctttttttaccactgttatagtacaatgccttgatatc

SEQ ID NO: 126739 - DNA, 1010 bp, Homo Sapiens
  misc_feature (78)..(78): n is a, c, g, or t
  misc_feature (181)..(181): n is a, c, g, or t
  misc_feature (198)..(199): n is a, c, g, or t
  misc_feature (212)..(212): n is a, c, g, or t
ttccactttcaaacttgggggttcaatgtaccaaagagggagaccacttgctagggaattggaaatcaccatcaaatnttcttttcttggccaatttcttgcttattccagtgggcgtttcctaacacccagaccacatattttctgtgctcttcgataggattcagtcatagtaagtggnatgacattccaaagtanngcccgaaattctntaatcattcgggcaaattcccagtttggaaaactactgtcatactcctgagctctcttcattctcatttcagagttctgggccttcttctcttctcgcttgttcttcattttttccacttccttcacaagacatgatttcctccgaactgagttcacagggtttgcagaagagctgcctcggatggaatggacttgctcttccgtctcctcgctgaccatcctcaatggtatttcagccactgcagggcaggaaggcctagtgggggcaggaggaactgaaaactgcttgcgggagtttgcagctgcaggcagctccacctccatgtcattctcctgagccgtgatgcgaagctctgagacagtggacatgcgagtggagcggcttcgaagactttcttttggagcaggaattttggagttgacggatctccgtttttgtttctggattgttacattttcctgcaagggcagattgtccttcggatgtaagggaagaagctgtaagagttctgggtttattgcagccacatcatcaaaatcaatctctttgccctttgtggcacctccttctgcccattccactgaaacacaggatttctccaagttcacagtccttacattggcactgtgaattaaaccattactgcgttggatcttgatagcgagaccgggaaacaggcgggcctgaagcgacgagtccatggccattcggagagtcagcaaggaagagaaacgcgcaataccaagaaacctcaatttcgctaaccctacgaagtcttaacgccgcgtaaaccccc

SEQ ID NO: 126740 - DNA, 2397 bp, Homo Sapiens
ctgccctgggcccagatgccccccatacttgggcatttaaccagaacccttccccagcttcagaccctgcctagaccccaccaggtaccccaaagttctctggggagggccagggaagaggctgggtgtcaaaccaaacagatttttatttgcagtcgtcactggggccgtttcttgctgcttatttgtctgctagcctgctcttccagctgcatggccaggcgcaaggccttgatgacatctcgcagggctgagaaatgcttggcttgctgggccagagcagattccgctttgttcacaaaggtctccaggtcatagtctggctgctcggtcatctcagagagctcaagccagtctggtccttgctgtatgatctccttgagctcttccatagccttctcctccagctccctgatctgagtcatggcttcgttaaagctggacatctgggaagacagttcctcctcttccttggataaattgcctggaatcagcgccccgttagagcaggcttccatctcttctgtttccatttgaatcaactgctctccactgggcccactgtgggggctcagctccttgaccctgtctgcatatctcagggtgtttaaagtatattcacaggagcttatgcctggtgagatcgtggcaatcatgcaagtcctagagttctccccaatgaaggagtccctcagcacctgtgtcagcttgctctcacggaacggggtgtgagccttgttctgtcccagggccctgatgcactccttcagggctaagagactcttgttgatttctgcgccctccatgcgggtctgccggtcagcactggaagtgtccgcgcctcgctcattccctgccagatctaccaaagagaacttgccatgcattctccctttagctcgaagaataatttggaagcacgcgtgggagcgggaggaattggagttggcaaatgtctgcccagaggttctgcaggcgctgcccatgtcgatcatcttgatgacatcatcagcagagttacccagatggtcctgcagccccaaccatttgcacctgttgcttgccgtcctcccagcacgcgcaggcttggctttcttgttgagcaggtcaaacagcttccccattgtagatctcgaagaatgtcacatagacttcccaggcccaacttccggtagcagggttgattcttcaggaggaagacgtcccgggaggccatggcatagatccctttggatgcattctgggctttcccagagaggtctccgcccatagtatgtgtcttgccacttcctgtctggccatatgcaaaacaagttgcttttccaccttcaaagattgtctgtaccagtggccttgctgtgaacctgtagacaacttcattcgaagctgtttcatcaaatgcaaagtcaaagcagaatgcttggttctccagatactttgttaagtccactttcaacttgggttcatgtaccaagaggagacacttgctaggaatggaaatcacatcaatttctttcttggccaattcttgcttattcagtgggcgtttcctaacacagacacatattctgtgctcttcgataggatcagtcatagtaagtggatgacattccaaagtagcccgaaattctttaatcattcgggcaaattcccagtttggaaaactactgtcatactcctgagctctcttcattctcatttcagagttctgggccttcttctcttctcgcttgttcttcattttttccacttccttcacaagacatgatttcctccgaactgagttcacagggtttgcagaagagctgcctcggatggaatggacttgctcttccatctcctcgctgaccatcctcaatggtatttcagccactgcagggcaggaaggcctagtgggggcaggaggaactgaaaactgcttgcgggagtttgcagctgcaggcagctccacctccatgtcattctcctgagccgtgatgcgaagctctgagacagtggacatgcgagtggagcggcttcgaagactttcttttggagcaggaattttggagttgacggatctccgtttttgtttctggattgttacattttcctgcaagggcagattgtccttcggatgtaagggaagaagctgtaagagttctgggtttattgcagccacatcatcaaaatcaatctctttgccctttgtggcacctccttctgcccattccactgaaacacaggatttctccaagttcacagtccttacattggcactgtgaattaaaccgctcacgagtccccttgacctagggaccccgctcctcaccattactgcgttggatcttgatagcgagaccgggaaacaggcgggcctgaagcctcgtgccgaattcgccacccaggcctcgctac

SEQ ID NO: 126741 - DNA, 815 bp, Homo Sapiens
  misc_feature (749)..(749): n is a, c, g, or t
cagtgataacaatgaccaacatttattgagcacctaccacactgggtaatcctcacaccaccctgggacggaggtgccatcgctttaaatgtggggaatagaagaaacttgccaggaggtgcagagaggaagtggcagcgctggaattcaaacccaggcaaaggagcaccttttacctggggtaggagagagcttgctgggtgggcttcctccacgcggggaacagcagagatggggcttcctccccatctcccaggataaaggcagagacagctctggaagaggagctgttgccaccgttgttttacaaacaggacccctgggcttccctcttcctccagagagaaggatctggggccttgctcagtacctgacatggagggtggtctaggtggggttttagaagccctggggccaccctgggcactctgccctatcctcaggatggccactgcagacaggaggctctcgtcatggggaacagtggcaagcaagggtggctggaggacaggatgcaaaggcagactgcggccaccttggcctagagcagggggatacgggaggcctcccagaggcgccgggccagctggccggcctgctgcaccagcaggtcagtggggatgacagacaggtgcagggccagcagctcgtagcacctgacagcctcggtttggcggttcttgctgtagtagcgcaagaacttcctgtagagtctcctcccagcatgccgataagcacttgagtcgtgngagagacgggcaccctgacaatttggagtggtaccccatgtcattctcaaaccaccagaagtagga

SEQ ID NO: 126742 - DNA, 725 bp, Homo Sapiens
  misc_feature (313)..(313): n is a, c, g, or t
aatataaaaataaaactttattctgtctcatcaaaagctaccagctgctgaagcaaacatgaagggtggcgggggggcagggattctagggccccagagtaagtagaccacactgagtcccttttggtcctcctgcctggatagtgctgagtggaaggggaggagctgggacccaaaggtcttggcttaggtgtgggagcagagaacatgagacctcattatggtcctaaatctccaaaggctctactggacaaacaagcttgatgttaagagagaggggaatgagtgacattgagaaacaagatcacccttngaagagctgtctgctggagagcatacacacgatcctggagctgggcctcttcctgatgcctttccagggcttgcagccctgactgctgcaggaagacctgaacagcctaggggcagggaagaaaattcaacacacctggtctctgtgtcctaagactcaattcccacagcctcatgggtcagcctactccagagggtgcattccccaacaagaggatgaagtttctgacatggaacctatataggttagccaggcccagagaaacaactatagttaggactggatgggaaggggagccactgtgtggcttcagaacaggggtgactgaggatgtgggccagaaacctatacctctggctgatacaggaacagcagatgcagcagctccaaactctggcctactacttcagtg

SEQ ID NO: 126743 - DNA, 628 bp, Homo Sapiens
agcttaatataaaaataaaactttattctgtctcatcaaaagctaccagctgctgaagcaaacatgaagggtggcgggggggcagggattctagggccccagagtaagtagaccacactgagtcccttttggtcctcctgcctggatagtgctgagtggaaggggaggagctgggacccaaaggtcttggcttaggtgtgggagcagagaacatgagacctcattatggtcctaaatctccaaaggctctactggacaaacaagcttgatgttaagagagaggggaatgagtgacattgagaaacaagatcacccttgaagagctgtctgctggagagcatacacacgatcctggagctgggcctcttcctgatgcctttccagggcttgcagccctgactgctgcaggaagacctgaacagcctctggctgatacaggaacagcagatgcagcagctccaaactctggcctactacttcagtgtcagaaaaggctagtgtgtgcagcaaggcgggaagcaggggccctggccacagccgctggcactaagcaggacccttttctgcaacattgcacagaactgtgagcaccattacgctcaccacgttagatactggcaacagctgt

SEQ ID NO: 126744 - DNA, 1252 bp, Homo Sapiens
tttttttcatttagggcatctttatttgtaatataatggggatggagcattgcctcccaagcccagtgactgtgcctttagcaaacatttccagatggcagtggcaatcagtgactgagagacaaattcacagcctgcacccaaatgacaaaagttacgtttaatttacaatgtaataaaggttacaggtaaaaagctacacataaagcatgaaaaggcctattacacaaatgtacaaatctctgtacaaagcttgtatcaatgtttcctaactttgtctcctatgtttgttagccaggtctagtcttggagctctgaataacaagagctctcaattgaggggggaaagagcctccaaactgacatctaaaaattcctcttagagacaccagttacttccaaacaaatcttttcctttttaatttgaattaccccaactggtcatatcctttgaaaactgccttcataatacacttaaaagtaatgccttagagtagaggacagtactctggaattaaataagaaacttcagcaggaggagtgctcaggtttgacaagaaaaacaggtaaatttcaaacaatactgtaagttaaaactataaacctgtgtctatggcaccagtcacagatgaaggaaaatcgaaatgttttcattccaacaggaaggacaaaagagaaaagcctagctactggacctcaaaaccactgacccaaggaaacattttttagtttaaacctcagcttaactgcagaattctaagccttctttttgatcaaactgagatctatggcaacccttctgctacccgggacttggaaggatagtgaatataaattaggctctggacccccaaggctggtgatgctactgtaacctctacagctctggattcaacctgagggcctgggatatgtgactttacataaaaatgatcctagaaagtgggagaaagaaaggaggtagtggaaggcctaggaaagagccagggcagtctattgaaaaggatataagaagcctttctctacaatgcaagtgttgtgaagacaggtctttatgggctatttcaaccccacccccaattgtcatattacatggttaggatgccaggagacattctgaaagacgataccgcacacatggaaagtttttctccctagttcattagctccccatcacccttccaccccattcccacccaatcccacccttctccatgaccaaaaatatcaaatcagcaaggaaggtgtgggc

SEQ ID NO: 126745 - DNA, 1582 bp, Homo Sapiens
  misc_feature (1322)..(1386): n is a, c, g, or t
  misc_feature (1509)..(1523): n is a, c, g, or t
tcacacttgcatttttttaataaggaatttaagatccatagtatctttaatgcttggaagagacacaaattcaaggtgataaaaatattaattagaagacacataacatgcctcaagtatatcaacacttgactccacaaacaaggcataaccatgaaaacaacactcccttttattttggggctcccaaaatcaaaagttagaactaatttatttaatcacagatatttagtatactcaataatgcactaacaatttctttaaaaaaacactaatactgtacagtatttctgtgttttagtttttcccacagctgttgaaaatttcagccttgatttgaaacatgacctgcatgacaggctataagttgtcaatagttctttttctttggaaaagtacagttgtggcatttactcactttagcagatagctaaaagggaaaaataaggaaaaatatacactggacctgcagttaagtttttgacaatgccaaggatcaaaaacagatgaaacaacatttgctgaagatgaaaaggtattgcattggtcttaatagatgttgccatctctgggtgaggatgctgactgagcctgttctgtgtcttcatcacctctatttgtttcttcttctacgacagacctccaagagacaagatccatgtagtaagccacactaggtccttttgacccttctcattcttctgtagtctcttccctgtgacttttgacaaaaatactcagttcacaatattagctgcctgcttctgatgggtaggaggtaatcaaaatactcccaccaaagcactctatggtctagacttgatacttaaaatttagttttcagcattcctcaacaaggataccttgaggtaataggagatattttggtaagtgaaaataattcctgcttggaacacagcctactgaactcaggatttaatttcttgagtattaggcagttctcaataaattgatgtatactgaggaatgattctaaagaggttagtgatatcctgtttgagaatagatttagaaaactgaaggtactctccagctctacaattctgtattaggaacaatagggaaatgagaaagtgcctctatattgcaatctaatgagtctctgggggaagactgtctacctgcgtagtagttgagaacaagacaagctcccaaacacatgaaaatcaacttgaaataacatcaaattcagcctgggcaatatcatgagaccttatatctacaaaaaattagccaggactggtggcacacgcctgtagtcccaagctacttgcgaggttgaggcaggaggatcacgagcnnnnnnnnnnnnnnnnnnnnnnnnnnnnnnnnnnnnnnnnnnnnnnnnnnnnnnnnnnnnnnnnnagaccctgtctcaacaaaataaaaaacatcaaattcattccatattcaggtaacagtgacatatatctactgaattatttatttttcttttaggaatgtctatatctatggattgtcactatnnnnnnnnnnnnnnnccctaaaactgagcttgacaaagggaataaaagcatactttgtttttcttggtgaaaaa

SEQ ID NO: 126746 - DNA, 677 bp, Homo Sapiens
tttcggtttgttgttcagtgtttattaagtagattcagtcttatatatgatatacagattcaaaaggaaaaggattccacatacttatgaaatcagtgcatttagcaagtaataccatggagataacagctcgattaacagctcattggtcttttgttaagtgagggagagagggagtcggcctgtgctagtcattccacaaacaaaacagaatttagtcacatcacgtagagaagacacattctaagaattaaaatattaagccacatttactggtaaaactcactatatagaacacaaataatttttatagagagcattgaggaggaagtcctcacctgcttagaagagccacgttaagttgcataggtgcatatctgtaaaaatataatttagaggtgaagccattaatagagtcacctttaaaagttggtgccatccactgtttgccttaagtgcttactatctggagccctgtgcccctccccggaggtgggacctcatgaaggagctgcccccagaggaaccctgaagaaatggcttgtactatctgcactgaaagtcttaaatctcatctcagatatggaactcatgctcttccaaaacatgtctaaattatgccagaggactaaagacctcttgggttgtccctaaatcctggatggcttgatcctgaa

SEQ ID NO: 126747 - DNA, 981 bp, Homo Sapiens
ttgacctgcgcagtactcatacggtttaaggtagcgaggcctgggtggcgaattcggcacgaggcaccgaagctcggggacgcgaggagccggcgtggccctggaaagacgccccgatccggacgctggtgcagcgcatccaccagctgcaggctgagcgcgcgcagggcttccgccgactggaggagtgagtgggggcgcggaggggctcagggttcggtcccccgcccgctccgggcgtgggcgtgttctcggcgggcgtgcctggaggaggagctgggtccttgtgtggctgcagagtcagatggggcggggatttcggggcaccgggtcctcaccttcacgaaaaaggccccacagcacgtccccactacccgacgactcactcttcgtggcttctctctcctccccaagagcaggggtgggcctgtctcgcgttcccctgcgggagtcaggaagcgtccttcctacctaccagtcctcccctctggtgtctggggacacttcctgggggcctttcaggtggttggcgccggtgcagggcctgagagcctgggggcgcggcctcagggtccccacatgccgcagaggccaccgccagtacctgcgcagcgggcctgactacgacttcgcgcgctaccggagcacagtgcacggggtgaacccaggccttcgcacgccgcctcgcgggaggtgctggcggtggaagccgagctgggcgggcctcgcaggcagccctgctcggcggcagtgcgcagctgcaggagctggagcaaacgcggcttgggcacggtggccctgctggcagttggatgggagacgccagagctgggggcaagaggcagcttgtcggatgcagccgtgaaaatgaatgagcggtgtgccaagcgctgggtatgctcgattggaccaggttggcacggaggaagcgcaagaaggaactctgccgggcacaggtgtcacgtgggccaggttattccc

SEQ ID NO: 126748 - DNA, 812 bp, Homo Sapiens
tacagaggaggagctctttattgtgggaggtgtctggaactgcaggaaggtcagcagcgcagtggggcgcgaccccagccagctggcagttagggctgggctgggcgccatccgccccgtttcccatctccctcggcgcatccctggggagccgccatcactcggcagattccgcatcaaacctaaggtcctggagaacctcgctgatcgcctccatggttttaattaccttcattttcagctgctgcatccgtacagcgtcctcctgccccgccagctctggcgtctccatcaactgcagcagggccaccgtgcccagccgcgtctgctccagctcctgcaggctgcgcacgtggccggcgagcagcggctgcctgcgaggcccgcccagctctgcttccaccgccagcacctcccgcgaggcggcggcgaaggcctgggtcaccccgtgcactgtgctccggtagcgcgcgaagtcgtagtcagggccgctgcgcaggtactggcggtggcctctgcggcatgtggggaccctgaggccgcgcccccaggctctcaggccctgcaccggcgccaaccactcctccagtcggcggaagccctgcgcgcgctcagcctgcagctggtggatgcgctgcaccagcgtccggatcggggcgtctttccagggccacgccggctcctcgcgtccccgagcttcggtggcctcctcagcagcaggcactgcagggaccgtaggctccgccgcggcctcgtgccgaattcgccacccaggcctcgctaccttagaaccgttatagttactgccgttc

SEQ ID NO: 126749 - DNA, 1079 bp, Homo Sapiens
  misc_feature (778)..(787): n is a, c, g, or t
ccaataaacatacacaaaaacaagaaaagatattaaccttcgcttatctcccatgcggataaaactttcgctacaatacatccttggtttctccaataatttcaagaccttaattacgcaaatttgaagtcagaacagacttcgtttgactggtttaaaaacctacaatcttcttactactactgggatccccctcccagaaatgcttatctcctctgaaaccacattttaactcatatcatgtagatctggcccatcttcctgacccacgcatcaccctcaattcaaggataaatttcttcgttgcattatacaccaaatacatagtactggcagtttaaatctccagctgcttgtgctaaatgaatgactctccactggtcaagctgacagactaccatggtgtcagtcatgacagaatggaggtcctggttttaagtttttatcatcaacctatcaaccttaatgctgtccagaatatcaagccttctatttctctctcccaatttcttttgccaacttacggaatgtctttgattaacaggaaatgaacttatgttcaaatctctaaaagcttttagatgacctaagtgacaatatcttagagctgttcaaattaagtatttaaaaacagacctcataataaaaaatgagaggcctgctacagaagcaagttttactctggtaaaagtctgataaaattgaaatagccgatttcaaggatatattaagagccattagagagcaagtatcaggttagagtcatacgtagtagggnnnnnnnnnnaccaaaaatgcaaaaattgatgtaaggcagaatctaagtcaaaaggaaaagaattttcaatagatgttttatacagttactcagtttaaagtggatcaacttaagtaggatttagcaggctatattttcctaccacataatagaccgttatgccatgtaatagcaacaatacaactgtcatcaccagagattttgtaggttaagtgcatagatttttttccccctctctctcatggtatggttttgttccaggttgcaagcaccgaggtggtgttgtatcaagaataaagac

SEQ ID NO: 126750 - DNA, 1236 bp, Homo Sapiens
taccctcccccggatcttaaaagctatatggcttccaaggagggttgcggctgatgcagcttgggccatcactgtgatgcagctggagcagaagggcggcccgtttcacttcagccagattcacttgtcttcccacctcggtgttgtacccagggctgtacttgcggcccggcagctctctgaactgatgtaagacacggtcagtctgatgagctccaatggtgacttccgggagaaagataggaatgcttgtgtaattcagcacctcaaacttatcctgaaccagtaatcgcaggtggtataaagtgcgattgtcctgcttgagccacggccctttatcgaacttcaggtattcaatgtcctctaccaccttttttgaatcttgagcttcccttgcagaatactgtaaaacctcacatttttcactcatctcagggagaaaggttttcttataggcattctcaatgtcctgtagataggcagaggtgatcttcatttcatgtggatctcctttcttctgaatccgcctctggacctctggaacgggcacatcgatgtaaatcaccaggtgggggggcaggtaatcgcagatggtgacgctcttcacctcgttgtagtggtccacacactgctttcggatgaatccctggttgtacatcgcctccaggaacacaaagtcactgaagatggagcgctccaacacaacaccttgtcctgtggtcagcaagtgctccaaggcatctgagtactgcagcaggcgactgctgtacaaccaggactgcaggcggtaactgttgccatcattgcttctcggatcatcgtaaaatttctccaaactacagttgccattatagtcggtggcgaggggcttcccatctcctgtggtactgtctggataatgaatccccgcttcaggaaagtgcttgaagcctagtttctctgctatttcttttgcaagtttgccttttccagtacatatattgccatctacagttatcactctgctgcgttctgtcagtcttttgcttgctttatccccaagtaggaaatgccacattccatagcgcagcttgcactgcacactgctatgaattcctctcacgcgctgggcgcccgccgccacgacccgggcggacgcggacgtcgctgccagcttcaggagccgcaaggccatgcctcgtgccgaattcgccacccaggcctcgctaccttaaaccgttatagtactgccgctca

SEQ ID NO: 126751 - DNA, 802 bp, Homo Sapiens
tcactcatctcagggagaaagttttcttaataggcattctcaatgtcctgtagataggcagagtgatcttcatttcatgtgggatctcctttcttctgaatccgcctctggaccttctggaacgggcacatcgatgtaaatcaccaggtggggggcaggtaatcgcagatggtgacgctctgtcacctcgttgtagtggtccaacacactgctttcggatgaatccctggttgtacatcgcctccaggaacacaaagtcactgaagatggagcgctccaacacaacaccttgtcctgtggtcagcaagtgctccaaggcatctgagtactgcagcaggcgactgctgtacaacccaggactgcaggccggtaactgttgccatcattgcttctcggatcatcgtaaaatttctccaaactacagttgccattatagtcggtggcgaggggcttcccatctcctgtggtactgtctggataatgaatccccgcttcaggaaagtgcttgaagcctagtttctctgctatttcttttgcaagtttgccttttccagtacatatattgccatctacagttatcactctgctgcgttctgtcagtcttttgcttgctttatccccaagtaggaaatgccacattccatagcgcagcttgcactgcacactgctatgaattcctctcacgcgctgggcgcccgccgccacgacccgggcggacgcggacgtcgctgccagcttcaggagccgcaaggccatggctacccggtcagctcaggatcaagacccaagggacgcggtcgcg

SEQ ID NO: 126752 - DNA, 1442 bp, Homo Sapiens
tttgctatttcttcttcacgttcttattttttctactctaatgtagcacattactaaaataaatacagtaggcctttagaaaaactcttcagcataatgtaagcctcaattaaaccacaccacaccaaacagggcccagagcagcgtgtgtgcacgtgtgcagtttcgacgtgcccgcacgcacatagacgtacgatggggaaattcccatggaaacacttttatttctggaagtcagaagaaaaacaatgtgcacaacctgaatgacacagagcggcagcgctgaaaccacaggggctgccgagagctggcctttcacagcagaccactgttttccagtgagaatggtgggccattccaaaacaaagctaaagggttccaaacatccagaatggaagctgcttcccccaactccattacctatactacaggatggattgctttttgtgagaccccttcttccactgtgcaatttttgcattatttaccctcccccgatcttaaagctatatggcgtccaggagagtgcggctgatgcagcttggccatcactgtgatgcagctggagcagaaggcggcccgttcacttcagccagatccacttgtctcccacctcggtgttgtacccagggctgtacttgcggcccggcagctctctgaactgatgtaagacacggtcagtctgatgagctccaatggtgacttccgggagaaagataggaatgcttgtgtaattcagcacctcaaacttatcctgaaccagtaatcgcaggtggtataaagtgcgattgtcctgcttgagccacggccctttatcgaacttcaggtattcaatgtcctctaccaccttttttgaatcttgagcttcccttgcagaatattgtaaaacctcacatttttcactcatctcagggagaaaggttttcttataggcattctcaatgtcctgtagataggcagaggtgatcttcatttcatgtggctaaacagaagcagaaaaatcaaactgggaaacatttagagttcattctctttgacctgtgcgtatataaaatgcgaagacaatcactgaccaccattgtcttacaactcacaccgggcactgtggggactgcggggtgacagcaaagggtcccaacatcagctagagtcattctccttctactacagtgaacacctgagcctgcccaagtgctcccatagcgtgactttctccacacattctaagatgtatacttagggcaagaaagatgcctgttacgaagcagcactgcctgtctttcctgtctgcctcgtgcctgagtgcaggaatgaaagagcaccaaaaattgggggcagcggcctgtctgtccgccatctgtcctcagcacactctcttcttgtcacctgactctccctcgcatctctccgactgactcgccacctccaccgcatcaccctcc

SEQ ID NO: 126753 - DNA, 1127 bp, Homo Sapiens
  misc_feature (355)..(375): n is a, c, g, or t
  misc_feature (971)..(971): n is a, c, g, or t
  misc_feature (980)..(980): n is a, c, g, or t
ctcagccaatttgggaagtttattttgccaaaattaaggatgcacacctgtgacacagcctcaggaggtcctgacatgtgcccagggtggtcagaggacagcttggttttatacattttagggagatatgagacatcaatcaacacatgtaagatagagttacattcttttgagtttctgatgagcctttccaaagaaggcaatcagatatgcatctatctcagcgagcgggggaatgactttgaatggaattggaggcaggcttgccctaagcagttcccagcttgacttttccctttggcttagtgattttggggccccaagatttattttccttttactctcctaaaaaggnnnnnnnnnnnnnnnnnnnnnccagattgatcgcagagttgaacaacagagaatgtgtgcacagtgccaggcacaggtgtggtcaagattcaccttgggagaggaagtgggcaggggcagaggagtgtgcccacctgagctgaaaggctgcatggcaggtgaccattatcaccagtgtcgccagccaggtcacctctctgaattttgtggttgcaacctccatgattccctagagctgtttttacccagaactaatgaaaaattctgcacattaaattcatgctattagaatcactgttgtggtttccatctcccaagtagaccccaactgatacataaattcatactaggagggggtccccagagacaggccctcaaagtgacacagtcaggtacctctttggtcatttgccagccaggtacctctggctgctgacaccccccctccccaggcctctcttggccatgctacctgccgcaggaggtggcccacccactcagcctgcctgggccacacctggctgttcaccagctcagcctgtggctgggctgggcatgttccagcctgcttgtgttatagcttgtacccatgtatggcagttcccaagttcttgtcncgtgtccangaagaatgaggagatgctgccaatcgaagcgtgagaagggcagagaagaattttattgagagacggaacagctctcagcagagaggggatgcacgggtggttcccgaccctgaagtcaggtggttctctcctagtgtggctgggtcc

SEQ ID NO: 126754 - DNA, 1221 bp, Homo Sapiens
  misc_feature (1105)..(1139): n is a, c, g, or t
tgacattcatgccattaacaaatcacagtaaattaggaagaataaacttacatttcgacaaaacctatgccatatttgctgaaagcatcttccaaatcctattaaaaacatctgtaaatatatttctctgcagcttcttgcccttatattttttattgggtgcatcatattttaattttataatttaatttctttgctgccttttcttcctctgatttatgcttatcctcttctactagtttaatttcttcatttaattggtcagtgtagattttcctcaaacctcttcccgttgtttcagcctttcctctgtgtccttgtatatgtcatcagaaaagtaagccccttcgttgcactgcaccattttctctatcagctccaccaactcctgcacttgactttccttctctgccttactggttttcttgctgttgctaaaggcacagcagcggttcccgcactccttgacgatgctttttaggcccacatccgcatctgctatgaagtcatggaagctctggccctccaactcttctttgcgagtgaacaagatgaccatgtgcttcatggctgacttcccaaagacagccttgatcaatgcaacggttttctgctcctcctctgtgtagcggcccagcagcagaactaggacaatagcatggggccctgggcaggaggagatgatgcagcagctgatttccttgcaggtggtgtccaggctctccttggtgtcaaagagccctggagtgtccacaacaagaaggtctctcccctgccattcccgggatgctttttgacagttcttggtaacagcttgggcagcaattctagaatcaaagatttcctctccaaggatggtgttcgctgttgcacttttcccacttccagttttccctaccagaacgatcctcagggagcggtcctcactctcagccatgctcacgtcaggaggctctagaacttaggcacgtacaagaccttctcttggaacaagttgaattttcaggttttctccaaggaggctgcttgagctgttgcttttgcttttactgtccccggccgtaatggccgaattcccgggcatatgtccggtaccgtcgactgnnnnnnnnnnnnnnnnnnnnnnnnnnnnnnnnnnncggccgcttcctcgctcacatgactcgctgcgctcgtcgttcgctagtagccgtggcgccctatatgaagtctaggtacagt

SEQ ID NO: 126755 - DNA, 802 bp, Homo Sapiens
  misc_feature (697)..(697): n is a, c, g, or t
ggaagggagagttcagactttattagataccttaaggctggccctggggaaaaccgtggctggcttcaccatcctcctaataggaagaggcagtgaggagaacagtagtctggggaaggtgggagccccaactgaggggcctgcacccagcccctcagatccgcctcccctcccatgtcactccagctcttttgggatgatcacatggtgagaatctgctttgaagatatgaagggcttcatggaggcttccaaggcagactggtagtcctgcagcgggacctgggagcaggcaggggctgtgagctggcctcggcggatgagatcgcacagtgtgaggatcagctccttgaactggtctggactgtgatccttcttccactgggacaaccaaaagcctcgaagtttgagatccttaaaaatgagcaggctcacagaggctacgacgggctgcttggccatccccccataggttaccatggttcctccacgcgctaactgccgcagcagctctgtggagcttttcccaccaacacagttgagagcaagccgtggctggggcatgtccttaaagaagtttttcatttcgggccttcttagctcctcttctgtgatgacatgctcagcccccagactcttcagtctgtcactcagcttctggatatcaggtctgtctcggacacattgatggttcttanggccagggctgcggcgatctggatgacgcttgcccactccgctgttggatgcatctggatgacagatcccctggctgcagttgctcgaagtcatcacatctgtag

SEQ ID NO: 126756 - DNA, 942 bp, Homo Sapiens
ggcctgggtggcgaattcggcacgaggcaggctctgtgttggttggagcgagcatgtgggtctgcagtaccctgtggcgggtgcgaacccccgcccggcagtggcgggggctgctcccagcttctggctgtcacggacctgccgcctcctcctactccgcatccgccgagcctgcccgggtccgggcgcttgtctatgggcaccacggggatccagccaaggtcgtcgaactcaagaacctggagctagctgctgtgagaggatcagatgtccgtgtgaagatgctggcggcccctatcaatccatctgacataaatatgatccaaggaaactacggactccttcctgaactgcctgctgttggagggaacgaaggtgttgcacaggtggtagcggtgggcagcaatgtgaccgggctgaagccaggagactgggtgattccagcaaatgctggtttaggaacctggcggaccgaggctgtgttcagcgaggaagcactgatccaagttccgagtgacatccctcttcagagcgctgccaccctgggtgtcaatccctgcacagcctacaggatgttgatggacttcgagcaactgcagccaggggattctgtcatccagaatgcatccaacagcggagtggggcaagcggtcatccagatcgccgcagccctgggcctaagaaccatcaatgtggtccgagacagacctgatatccagaagctgagtgacagactgaagagtctgggggctgagcatgtcatcacagaagaggagctaagaaggcccgaaatgaaaaacttctttaaggacatgccccagccacggcttgctctcaactgtgttggtggggaaaaagctccacagagctgcttgcggcagtttaccgcgtgggaggaacctggtaaaccctatgtggggggaagggccaaaccagaccctt

SEQ ID NO: 126757 - DNA, 1234 bp, Homo Sapiens
  misc_feature (144)..(144): n is a, c, g, or t
  misc_feature (155)..(155): n is a, c, g, or t
  misc_feature (473)..(473): n is a, c, g, or t
ccgaacacgcgtaggtgatgcgtgcggaaccacacatcatattgtgtgtcttcctggctcgtgacacgggcgttacatatagtacgcgcgagtgcagtcgggtctagctgcgcctgtggtaccaacttaaggagtaccgaaatngctcctcaggnagagagaggggagcgcacaattcccccgcgcggtttaaaaattataattccccaaggtgtgtttcgaggttttcaaaggtgtgggagggaaaatttcgcccccctttttctacaggtggtgcacaaagagggggatggggcccagaaggagaagttctttttcccaaggagagagggttctccaattccccctttaagagagggatttaattgggccttaagagaggaagagggagagtcagggcttcaaaaaggaaaggcccccctggaaaagagaggaggttgaaggcggttccttggaggggaaatttccttgtntggtgggcaaggcccccatttttcccccgggaatagagagtgtgcattgggccacagtttggggggggttggccttaaattcccaggcaccgcggcaggcccccaggcgggagaaggcccaagaatgggtcccaaatggtggttccaacagggggggttcattcccggacccatgagatcctgccaggggggaccttgacttttgttggccacctctcggatcagggcctctgacacccgcgtttgaagcatagcgttgcttgctgttcacgtggatcacaggggcccttgtggaataaaggccggtggttctcgtcatggttgtccaggtagttgggatgcacagcatgggccatgtctgcgctgatcatgaaggacttgggtatggcttcctcgaaggctgtcgggtgctggcacgaggctgagatccgccgcagcaccagctctgtcagcagtgactgtgctccctgtgcactctcagaccccacctcttcgttgtcatagagtgtgaccatgcgcacgtgaggctctgtggccagggagccagggcctgcacaggaatctatcaaggcctgcagggcacagaagcagctgtgcagattgtccagccgaggagcaaagatgaactcatcataggcaccacccaagaccgcaggctgggtgtctgcaaggcagagctccatctccactatgtccttggggctcagcccccccggccgtaatggccgaattcccgggcatatgtccggtaccgtcgactg

SEQ ID NO: 126758 - DNA, 1673 bp, Homo Sapiens
tttctgagtgacaatccactttaataatccagcttcagctcagctgagaacttcccctctcaggtgcaaagggatggcagagaagtctttccaagagggctcaatccactaagagattatggcttagagaagggaacagctcaaagaagcccttgaagagggtgagggtctggaggactcctgtggtgcaggccatctcccggatagagtgcatggccagttgggggctgcctaaatccagcacccgcagccccagccgagaagccaagataggtccaatggtggttccacagggggtgtcattccggaccatgagatcctgcagggggaccttgactttgttggccacctctcggatcagggcctctgacaccgcgtttgaagcatagcgttgcttgctgttcaccttgatcacggggcccttgtggaataaaggccggtggttctcctcatgcttgtccaggtagttgggatgcacagcatgggccatgtctgcgctgatcatgaaggacttgggtatggcttcctcgaaggctgtcgggtgctggcacgaggctgagatccgccgcagcaccagctctgtcagcagtgactgtgctccctgtgcactctcagaccccacctcttcgttgtcatagagtgtgaccatgcgcacgtgaggctctgtggccagggagccagggcctgcacaggaatctatcaaggcctgcagggcacagaagcagctgtgcagattgtccagccgaggagcaaagatgaactcatcataggcaccacccaagaccgcaggctgggtgtctgcaaggcagagctccatctccactatgtccttggggctcagccccagatgggcacagagcagggacatgaggaccgaatggtgccgctcatccacagcattgagaggccctggctcaggagtccccttctccagctcctcctggatggctgtggcaagaatggggactagatgcatctctgtgttgggcccaaagttctcgttgatatttcgctgcagatggatggccaggtgtgggatgcgaagaatgggccgctccacgtgcaccagctgctgctccagccgacctgaggtagggcacttgacaatgacgcgtccagccagagtcaggtcacggtcaaaccaggtgctccagatcccaccaccataggtctccacaccgacttgctggaagcccacctggctgcggcgagaccgacgtttcacccggaggcaggggctgtccgtgtgggccccgatgaggctgaagccattgccaggaacgtactggccccctacagcaaaagctatgatggtggaggagttcctggtcatgaagtacttgctctcgggcttaatattccatttctcagtctccttgagttcactgaagccagcctggagaaggcggttgcggcattcagccacagcatggaaaggagagggactccggttcacgaacttgaggagttccttagccgcagtctgcaccgcctctttgcgggccttaccgttcatggccacctgcatggccccgcgcgtggggctgtgtccgctcatctggcctccgggctcggcccgcccccaccgcgccgcctgccccgcccctcactagctttgcaggtcccccgcgtgccccttcaggccgcgccgcactcgtaggccttcatcacgc

SEQ ID NO: 126759 - DNA, 1150 bp, Homo Sapiens
  misc_feature (1038)..(1038): n is a, c, g, or t
  misc_feature (1057)..(1058): n is a, c, g, or t
  misc_feature (1096)..(1096): n is a, c, g, or t
  misc_feature (1114)..(1114): n is a, c, g, or t
  misc_feature (1124)..(1124): n is a, c, g, or t
gctctggaactgaaatatcccccaaataatgaaaaataatatgttggggggctgatacagagtttattgaattagatttttctatttacaactgagatcacatctacatactattttgctagtctacatgggtacattatttccaacaagcttaagacttaccatgaatgggctcattcatacaaaaacacactcacactaattcttttaaaacagtagtgcatacattatactcctcctataaagccaactttgattaaaaaccactagtttcaaagctcagtctctgattttgaagatgaaccaagatatacgccatatgatcctacaatctattttagtcattttgtacagctgctatcttattggactacagtaaatattttttaaaaggacaccaatgaggggcaccatctggtgttaaccttaaccagaaagctggtttcctcctcctccccgcaaaaacctttggccaagagttctccactgtgaagactgaaaggacctggtgacatttcggcatcagtcctgttaccacttggaggtaacagaagcaggctcgtgtcctcctttaattctaccacactacatgactcgcaattggttctgaaattagaacgttcaccatcgtacttaaaatcttaggggcatgaagagtcagctagaacaaggaaaaagaaagtcgcaggtagtaggtaagtaggtgggcacatgaaaagccaagctgctctgtccaacaccagtgtacatgtgctttaactaaatgaactccagaggccaacagcagcagacctgctcaattcaccttccaaatcagaacaagaccaaaaagctcaggcttgagttgtcaactatgcataggttccgccagtgatgaggagctcgtaagcaggatctctactccttctgcacaacacgatgcaagcacacagcatgcccagcagctgaatagctgcaaatgccagtgcggcccagatcacatgcatcatgatttcttgtagcttcttcactactagagcctcacacccctcagcatanaggtcgggaaggttggcanngctgcatacattgctggcagtctctctgcagagctaanaggaaccctggttttggnttccctcctngcgaattctggctccagggcaatccc

SEQ ID NO: 126760 - DNA, 1132 bp, Homo Sapiens
gggggggctgcgcgacggcgcaggggctgcggggagcgccgcgcaggccgtgcagttcctagcgaggaggcgccgccgccattgccgctctctcggtgagcgcagccccgctctccgggccgggccttcgcgggccaccggcgccatgggccagtgcggcatcacctcctccaagaccgtgctggtctttctcaacctcatcttctggggggcagctggcattttatgctatgtgggagcctatgtcttcatcacttatgatgactatgaccacttctttgaagatgtgtacacgctcatccctgctgtagtgatcatagctgtaggagccctgcttttcatcattgggctaattggctgctgtgccacaatccgggaaagtcgctgtggacttgccacgtttgtcatcatcctgctcttggtttttgtcacagaagttgttgtagtggttttgggatatgtttacagagcaaaggtggaaaatgaggttgatcgcagcattcagaaagtgtataagacctacaatggaaccaaccctgatgctgctagccgggctattgattatgtacagagacagctgcattgttgtggaattcacaactactcagactgggaaaatacagattggttcaaagaaaccaaaaaccagagtgtccctcttagctgctgcagagagactgccagcaattgtaatggcagcctggcccacccttccgacctctatgctgaggggtgtgaggctctagttgtgaagaagctacaagaaatcatgatgcatgtgatctgggccgcactggcatttgcagctattcagctgctgggcatgctgtgtgcttgcatcgtgttgtgcagaaggagtagagatcctgcttacgagctcctcatcactggcggaacctatgcatagttgacaactcttgcctgagctttttggtcttgttctgatttggaaggtgaattgagcaggtctgctgctgttggcctctggagttcatttagttaaagcacatgtacactggtgttggacagagcagcttggcttttcatgtgcccactattacctatactgggatttctttttccttgttctagctgatcttcatggccctaagatttaagtacgatgggtgaa

SEQ ID NO: 126761 - DNA, 2214 bp, Homo Sapiens
  misc_feature (1340)..(1359): n is a, c, g, or t
  misc_feature (1482)..(1491): n is a, c, g, or t
  misc_feature (1515)..(1528): n is a, c, g, or t
  misc_feature (1857)..(1888): n is a, c, g, or t
tattttaatgtcaaatgtttatttctatgccatagttgcctcagcacaatttgtaaaagaaaggaatccaaaaaaatgaattttttttagtcaggatattttctctgcagttataagaaagaaaataaacaccatgataccagaatcaccatttctttcacatcatcactctagtaagttgcatctaaatattttccttggttgccactttttttaggatggagaaatatccacaggaaaaaatgtctgaattcattaaaataaccttgggatagtctttgccagactgtatcgagaacatctttgtttgggtatgctatatcgctaattgccatattcttattatttaatataacaggcatactttattatataaaacaaagtgcactaaagatgaacaatgttacaaacaaactgaaatttggtgtatcttaaatcttcgggtgatgattagatagtagctgaagcgtgggtatacaaatttcttgttaatacaaatgcaactcttttctgtgatgaaaatgcacttagtagcctagtactttttgctttagcagatagatagggcatccaatacaactgaaacaacctgataacaaattaattttatttttcaataaaaaggaatgctctggttttttaactggctccttgaggaagccagaagatggcatctgctctttaaacaggcttctcttatctgatttgagacacaaatccaccaagattctttcttacagtggaagtaggcaccacccctcagatcacgaggcccctaggaagaagcctgtggaaatcagcctgtgatgtgtggtggtgggccagcacctagaagacacatggtggttgtgcacataaatcccttcagcggactcagtggaaggatgagaattctgtaagttcatgcacattttattgagtagtaatataaaatgctttttctttttcattgttacaagtgcatgctttgattgccaacatgtcagaagtcaaattacaaaggcaaggctttaggctgtagtgaattacttgggcacttatacaattgttaaaaaatatgaatggacttttgttgttgttgttttcagaatgaaccagttgtaacccgtaactgatatacaaagggaaaaaagtgaaaaaagtacatattttgtggcacatgacagaacagaacaaaataactaaactgttatgacattaacagttgccatgcatttagagtttcacatgtaactacaaacttattataatttcacaaggtttgctaaacatgctaaccatctacatgtgcattgacaagcttatgttaaaaactttaaagaatactctcccctttagannnnnnnnnnnnnnnnnnnngattacaaaatttcaaaggcattaagcattttagagaatataaagtacgccagtatacatacatttccagtatatgtcagaccactaagcgcattacagtcccatacaggccgatacagccannnnnnnnnncttaaaaaacatgcataggcagannnnnnnnnnnnnnacagaatatagatgctttatcactgtacttaatatggtgtcttgttcactatacttaaaaatgcaccactcataaatatttaattcagcaagccacaaccaagacttgattttatcaacaaaaacccctaaatataaacggcaaaaaagatagatataattattccagtttttttaaaacttaaaagatattccattgccgaattaagaagaagataagtgttatatggaaagaagggcattcaagcacactaaagaaacctgaggtaagcataatctgtacaaaattaaactgtcctttttggcattttaacaaatttgcaacgttcnnnnnnnnnnnnnnnnnnnnnnnnnnnnnnnnaagactgcctaattcagtttatagccattgtctgacaagagtagcaaaacattatcaataaatagtccttagtttgtacatcattttgttaaaaatgtttgatgtcatccatttttagtgctgcgactgtaaacgtacaatagagtaagaaattagacaaagttttcatgtccagtaacagaataaaaggcctttcattaacctatctagaagtccccaatgcagtaggaaaacatgttcattcccctaacattgcagtatatactagcattagctttctttttaaacacctcttttgggtatgccttttaaaaatgcttatagag

SEQ ID NO: 126762 - DNA, 705 bp, Homo Sapiens
tccttagttgtggaaagggatgccgtttttatacctgcaggctggacattgaaaagaaaatagctattttacatggaattttaccaaccgtgaagccggaagatgcatatgaagactttattgtgaaacctcccgtgagaaagctggtccacgacaaagagttggcagcagaagatgagcaggtgttcctaatgaagcaacagtcactccttgccaagcaaccagccactcccacgagagcttctgaatctcctgcaagaggaccctctggctctccaaggacccagggtcggggagggccagccagtgtgcctagctcctccccaggcacgtcagtaaaaaagccggacccaaacatcaaaaataatgcagcaagtgaaggggtgttggccagcttcttcaacagtctgttgagtaaaaagacaggctctcctggaagtcctggtgctggtggggtgcagagcacagccaagaagtcaggacaaaagactgtgttgtcaaatgttcaggaagaactggatagaatgactcgaaagccagactctatggtaacaaactcttcaacagaaaatgaagcctgaacctccttaaaaagtgcatatgtcgaatgaccaaataactatgtatattgatctgctaagaccaggatttttctgatatggcacatgctatcagttttttggggcaggggagatgaactttaaa

SEQ ID NO: 126763 - DNA, 758 bp, Homo Sapiens
  misc_feature (326)..(350): n is a, c, g, or t
  misc_feature (436)..(460): n is a, c, g, or t
  misc_feature (724)..(724): n is a, c, g, or t
ttttttcttttaaaataagactttactgaatatatcaacaaggtactgtatagtgtagagtgaagtttgtcattaacaaagtgtgcgacatggtaggtctcagaggatgtgtgatgcagaatctttcagccccttatcagagagaacacactaaacagaaaccagaagcaaatcagcatatggttcaaacaataacaaatcatcaggttaactttcagtgaatatacactagtcctatgagcgacacacacttggcaatgccttcaccttgccttaaacattataaatcttacattccagggacacctttacaaatgcccctgttnnnnnnnnnnnnnnnnnnnnnnnnnacaagcatgtgcatgtttgataataatttttaaatgcctgttgcaatggccttgctttgtgctcttctggtgggtgtgcaggtagnnnnnnnnnnnnnnnnnnnnnnnnntttgttttgttataacaacggtatcagacatatacaaaactctttctccacagtgacaagcattccccattgctagtaactgtcttttgaccctgctgaagaaatcagagaaggatgtaggttatgccttcttagcattcatattttgactttagaaagagcatcaggcaaggtttgacaagaccaagaacaagaccaagaactgttttgttctgtgtgagtatcttttttccatttggggcactgttttctgctttgctttcncatgcagctggaatggtaagctcgtgccgattct

SEQ ID NO: 126764 - DNA, 1030 bp, Homo Sapiens
  misc_feature (927)..(927): n is a, c, g, or t
  misc_feature (929)..(929): n is a, c, g, or t
  misc_feature (979)..(979): n is a, c, g, or t
ttttcagttcaagcgcaattttgccaccaatttgattacgaaaaatctttcgggcttccagggagctttggagcctggaaattgcagatgagggatgggggcctgcactgtttcgcggctggggagagggagctcatccgaagtcttccgacagaggtgggcgtcatgcccgacgctgagcggagtgggtctcctcgagcccaggctccctgcgggcgctgtcctcagcgagcctccccgcctccgcgcccggggtcgtacctgcttcacgatctcctaccgcggcgggccgcgtacctcctggatggcctcttagacgttctctgagtcgctgcgcgacaggggcagcaggcacacccaggagcccgctacgctgcaggccttgaagctgccgctgcttccgaggttgccggcgggaggcgagacgacggcgcgcgtcaggtcgtccagggactgcgcgggccgcacgggcgccgtgggccgcaggtacaggcaggcgggcaggccgggcgccaggctgctgcgctggctcgcggcgccgcgctgcgcagggccgcacagggagctggccccgcctcggggctccgctggggggccgttgggggccgctgccacagccgcgctcacgaaccggtagtcgtaggcgagcggctcaggggctgcgggtcccgatggggggacctggcggcgcgtcagcggcagggttgcccagcgcaggcagctcgcgcacgtactgcgcgggcaggtagaaggggcggccgccgggcttgcgccgcacgtgccaccaatgctcagtgctctgtgctgcgccgcaacggccggtatcgctcattggggcgggatgggcacgcggcgcgcggtcttttgcggtgtactcgagggggtgctccacagtacgtacagtccccctcacatcccgcgcattgngncgcggatttcatcattgctggataggaaactctcatcggtgggtgatcanatttacccgctcatctgccaaagtcaccaactgttgaattgccgtgctatg

SEQ ID NO: 126765 - DNA, 1559 bp, Homo Sapiens
ctgcttgagtgaattctttatctgctccatacgtgtccctcacagcctggaccaggcatcggctgcccccacctccatgtaggttgcacagagttggacttagcaaggtttatttggaagggcagagtccaaccaaccccaggtcctgagggtagactcaggtcctgagggaaaggggtggacttcagtgggctttcttgctgtgttgggtgctcttggggaaaggctgcgggcccagccagagctgcagcaggatgacggcatggcatatgtgcagggcagcagagctgcaggatgtggaagggtatgtgttccaggagagctcgatgagccccagcaccaacaacctgagcaggtgtgtgagccagcgtgcaggcatggcccacaggaggtagggcagtgtgtggaaataccagacgtagaactggtagtggagggagcggctgaagcagatgccaatgaagttggaggtgaagagggtagaaacgatctggttgggtgtaaggggctggggtggaaccttccttttggagggatccctcagcagcgacaagatactttcccctgtcctgtgccacctgcagagggcaaacagcaggagcagggtgaggtgggcagtcaacagggccaggtggaaggctcgatgcaggaagagcgcctctgggaggaagcgccagttcactgtccagtggaacagaaactggcggccaaggtcaaaggagcgggacaggtagccgctggggttctccagcaggaagggcagccccagcaccacctgaaggccagcacagattcccagcttggggagggccccacggaagccaaactgtgtgaggagaagaaacagtaacccaggggcgaagagcagcacattcatcttcacagagactgccaggctgaaaaagcagcaaccccagccccagcgctgggccagcaggaggttgatactgaggaagagcagcaccatggccactgggtcattgaagagccgcagcacaaagatggagtggacacggtaagaggcgcagcacatgaagaaaaagacgaagggaggtaccttgcaggtctggtgatagatcaagaagacaagcagcaaggtagccaggtagagcacagcaaagatgttctgggccatgcggatgtcagtgcctcggctggtggcatagtacaaccccataaagatgtacacgaaaccagctgggtacacaagtggtccggtgtcaccctgcagttgggtatagtcataggtaccattgatgacgccttctacctcggccatgtaggccttccagtcaatctctgtgtatgccaccctgtgaatgacccagaaggtgatgcccacctccgccaggcagaggcaggcggccaccagcagcgtgtagcgcggctcccgcagcagcaggcgccgctcttgccaggcgcgctgcagccattgcttgcagagtccctctgcctgggccgcggaaccggaccggccgcgtttccgcagcccagccgcccctcgtgccgaattcgccacccaggcctcgctaccttagaaccgttatagttactgccgg

SEQ ID NO: 126766 - DNA, 1228 bp, Homo Sapiens
tggaacggccagtaactactaacggttttaaggtagcgaggcctgggtggcgaattcggcacgaggacgcggccggtccggttccgcggcccaggcagagggactctgcaagcaatggctgcagcgcgcctggcaagagcggcgcctgctgctgcgggagccgcgctacacgctgctggtggccgcctgcctctgcctggcggagacacagagattgactggaaggcctacatggccgaggtagaaggcgtcatcaatggtacctatgactatacccaactgcagggtgacaccggaccacttgtgtacccagctggtttcgtgtacatctttatggggttgtactatgccaccagccgaggcactgacatccgcatggcccagaacatctttgctgtgctctacctggctaccttgctgcttgtcttcttgatctatcaccagacctgcaaggtacctcccttcgtctttttcttcatgtgctgcgcctcttaccgtgtccactccatctttgtgctgcggctcttcaatgacccagtggccatggtgctgctcttcctcagtatcaacctcctgctggcccagcgctggggctggggttgctgctttttcagcctggcagtctctgtgaagatgaatgtgctgctcttcgcccctgggttactgtttcttctcctcacacagtttggcttccgtggggccctccccaagctgggaatctgtgctggccttcaggtggtgctggggctgcccttcctgctggagaaccccagcggctacctgtcccgctcctttgaccttggccgccagtttctgttccactggacagtgaactggcgcttcctcccagaggcgctcttcctgcatcgagccttccacctggccctgttgactgcccacctcaccctgctccctgctgtttgccctctgcaggtggcacaggacagggggaaagtatcttgtccgctgctgagggatccctcccaaaggaaaggttccacccccagcccccttaaacccaaccagatcgtttcttcccctctttcaccttccaatttcattgggcatctggtttcagccgcctcccctcccctacccagttcctaccgtctggtaattttccccacacttgcccctaactccttggtgggcccattgcctggaacccttggcttcaaacaaccttgctctcaggttgttttgtgggctgggagcgctcatcccaacc

SEQ ID NO: 126767 - DNA, 1717 bp, Homo Sapiens
ccatgcaaaaacagggcaacagacgcaggattgaaaggtaatgtccaaggagagctcgatggagccccagcaccaacaccctgagcaggggtgtgaaccagcgtgcaggcatggcccacaggagatagggccagtgtgtgggaaataccaggacgtagaactggtagtggagggagcggctgaaagcagaatgccaatgaagttggaggtgaagagggtagaaacgatgcttgggtgtaaggggctggggtggaaccttccttttggagggatccctcagcagcgacaagatactttcccctgtcctgtgccacctgcagagggcaaacagcaggagcagggtgaggtgggcagtcaacaggccaggtggaaggctcgatgcaggaagagcgcctctgggaggaagcgccagttcactgtccagtggaacagaaactggcggccaaggtcaaaggagcgggacaggtagccgctggggttctccagcaggaagggcagccccagcaccacctgaaggccagcacagattcccagcttggggagggccccacggaagccaaactgtgtgaggagaagaaacaggtaacccaggggcgaagagcagcacattcatcttcacagagactgccaggctggggtgagcaggggagaggaagggtggagatcagctccagggccatgcacacaacacccaaagacataccccccaccatcaccacagcaacctcccccccgccgccacgccaacaaactccaaggtgggacctacactcacaactgttggagggaagagcctggagtaggccagggggcagatacatagtctctatgcttactagatgcgaatgaggcatattctgagtatttagaaatgtgaaggactaattcccaacagggaatgctgtctgggaggaagacaggatggaaagagggcatgtgtgtatgttgggggatggcagggcagaaactttctatagatcctggactcgctttgtggagccctgagtgacccatgctgtcttggctactcctttactccctctgctgcaggaaattgggaagagatggaaatgcagaaaacgagaggggaccagaaaggaagaggtgttgacctgaaaaagcagcaaccccagccccagcgctgggccagcaggaggttgatactgaggaagagcagcaccatggccactgggtcattgaagagccgcagcacaaagatggagtggacacggtaagaggcgcagcacatgaagaaaaagacgaagggaggtaccttgcaggtctggtgatagatcaagaagacaagcagcaaggtagccaggtagagcacagcaaagatgttctgggccatgcggatgtcagtgcctcggctggtggcatagtacaaccccataaagatgtacacgaaaccagctgggtacacaagtggtccggtgtcaccctgcagttgggtatagtcataggtaccattgatgacgccttctacctcggccatgtaggccttccagtcaatctctgtgtctccgccaggcagaggcaggcggccaccagcagcgtgtagcgcggctcccgcagcagcaggcgccgctcttgccaggcgcgctgcagccattgcttgcagagtccctctgcctgggccgcggaaccggaccggccgcgtttccgcagcccagccgccatcttaacggtgatccaaggaattccggaccggtccagc

SEQ ID NO: 126768 - DNA, 770 bp, Homo Sapiens
tggaccggtccggaacttcggaatcaccgttaagatggcggctttgctgcggaaacgcggccggtccggttccgcggcccaggcagagggactctgcaagcaatggctgcagcgcgcctggcaagagcggcgcctgctgctgcgggagccgcgctacacgctgctggtggccgcctgcctctgcctggcggaggtgggcatcaccttctgggtcattcacagggtggcatacacagagattgactggaaggcctacatggccgaggtagaaggcgtcatcaatggtacctatgactatactttactgcagggtgacaccggaccacttgtgtacccagctggtttcgtgtacatctttatggggttgtactatgccaccagccgaggcactgacatccgcatggcccagaacatctttgctgtgctctacctggctaccttgctgcttgtcttcttgatctatcaccagacctgcaaggtacctcccttcgtctttttcttcatgtgctgcgcctcttaccgtgtccactccatctttgtgctgcggctcttcaatgacccagtggccatggtgctgctcttcctcagtatcaacctcctgctggcccagcgctggggctggggttgctgctttttcaggtcaacacctcttcctttctggtcccctctcgttttctgcatttccatctcttcccaatttcctgcagcagagggagtaaaggagtagccaagacagcatgggtcactcagggctccacaaagcgagtcca

SEQ ID NO: 126769 - DNA, 2120 bp, Homo Sapiens
  misc_feature (114)..(114): n is a, c, g, or t
  misc_feature (142)..(142): n is a, c, g, or t
  misc_feature (169)..(462): n is a, c, g, or t
  misc_feature (501)..(554): n is a, c, g, or t
  misc_feature (1251)..(1329): n is a, c, g, or t
tcttcgttccacttgactgactgatttgatgtgtcagggcggactttggaaacccgcacgggcttttacgtcgtgccttggtgctttgtcacatgtcttctggtatccctgatnttgataaccgtatacgcctttgaggagntataccctcccgcagccgaagaccgannnnnnnnnnnnnnnnnnnnnnnnnnnnnnnnnnnnnnnnnnnnnnnnnnnnnnnnnnnnnnnnnnnnnnnnnnnnnnnnnnnnnnnnnnnnnnnnnnnnnnnnnnnnnnnnnnnnnnnnnnnnnnnnnnnnnnnnnnnnnnnnnnnnnnnnnnnnnnnnnnnnnnnnnnnnnnnnnnnnnnnnnnnnnnnnnnnnnnnnnnnnnnnnnnnnnnnnnnnnnnnnnnnnnnnnnnnnnnnnnnnnnnnnnnnnnnnnnnnnnnnnnnnnnnnnnnnnnnnnnnnnnnnnnnnnnnaagaattcggcacgaggggagcggccgcggctgtaggcnnnnnnnnnnnnnnnnnnnnnnnnnnnnnnnnnnnnnnnnnnnnnnnnnnnnnnagaagtttggaccagaatatattttatttttctcataaaagttataccaaaaatatattttcttaacttaaaaatacagcttcaaaaagcaaaatttgagttgttagaattcattacacattttataaacagcagtgaaaggaagaagtcagcagaatggattcaatttttaaatacacaaatgttcatttcacaagcttgactttgtcctttaataacttaaaggtagggttcttgctgattttcttgttaaagatgaccaggagttcctcttcggatctgtgatgctcatctgtcactgtgtagtactgagctaaaacctttttccttagctttttgatggttatttcattgtctggggcctgtttcagaattgctttaatagttcccttccagttgaatttaccttttgcaggagcctcatcgtcttctggttctccgccctcaggatgctctgggagcttcatctttttcttcttagaatctgtttcaacttccgagtgcctccgcttcctcttccctgcgcccacgcgtgcctcttcctcactggcgctgtccttgcgctgcttcttcttcttgctcctcttccctgcagagccattggcctcagggacttcctccccaccagcctcaaggtcagcctcctgtccctttttgcgcttcttaggcttctgattccttgagttttcctggtggnnnnnnnnnnnnnnnnnnnnnnnnnnnnnnnnnnnnnnnnnnnnnnnnnnnnnnnnnnnnnnnnnnnnnnnnnnnnnnncctccccttgctgttccacggcgtctttcactttggaggctggaaccttggtggagatttctgcatgtggatttgccactgggtggagtggccgttgatcctgttccttattgactggttcgctgttggaagcttcagaaaagatattccacacctggtccagaatggattcattatgaacttttaaactgttcttcatccaattctgaaattttgcctttttcctgggaacgttgtcaaaagcactaatttgctctaaaagttctctcactttggggctgacattgggtctctttattaattcactaattttctgaatccacgcctgctgtttgatgtcgcctttgtgggttttaccttcatagcctttgccaccatacttctgatcttcacttatgcatttcacgtggtttttatagtcatcgccccagaaatctttaccgcagtcaatgcaagaaaggcattcacagtttctgcaaacagacacatgcttttccacttgtattttcttcactgattcaccacatgcattgcatgtaaaaaataccatttttaggtaaatggctaaatattctctatccaagacaggttttaagtcttgtcaaaaagccgtcatgtagaaattcagtcactccaatggaagacagcaaacattgcctctcagccagcgcccgccaacggtttcaaccggccgcggggagcacgtggactcgccgccgccagcccagcgccgcagctacctgcctctcaggcttcgcggtgcagaattcgcttctgaaccacccagcgcg

SEQ ID NO: 126770 - DNA, 656 bp, Homo Sapiens
  misc_feature (235)..(245): n is a, c, g, or t
ctgatacaatgtattaaaacacataataacaagagtctacatgtaaaaatataacttttacatacacaatttcaaaataatgatacgtttgccatttgttgcataaaatttacaaatgtatttcattactatataactggcaaaacaggagaacagatggaacatttagaccatttcaatggatttatggcatttactcagtgctgataggtggaaaaactacttgaacagggannnnnnnnnnncttaatacatgccaagaattgtgtggctgtaaaaatagaaacaagttagagacaaaaggatgctgacaaatacttaactaggagcactatttgtttactgcactatacaccaaagtcaatcattataaagattcacgatggaagttggttcaattgtgcccagacgtcaaagctagctatctgatgagtcgctgtgccatagcttgatctatgtttctatcaaatatggtaagtataaacttcattcatactggccagagaaatactgcactacccctcctcaaaaaagtgcaacttaatgctttaggacttataaggcttgttataatgctgcatgatgattgaatattggcatttttcagacgaaggaggaggcagttaagtcatctacattttagtaaacccattttg

SEQ ID NO: 126771 - DNA, 1613 bp, Homo Sapiens
cgggaaaaaaaatgatttttttctttaatagtaaaataatatacgtcttggaaaatacagcatacaaaatacagaaaatataattgagcacttttatgagcatatcgatcattgaatcgcgagtctgcatcgcctatctctccgcgtctcttgcgtgcgtgtaggtatataaatggtgtataggcttgtgggtgtgcatgcatagacagtccttcttgggtactcataagggggctcagaccctcaggtgcccctgagtcttaaccccaccccttcttcatccgtcctgttcctgaagacgaccatgaaggtgactcttcattgagagcctctggaggctgggagcttttagagtaaggctttgcaatgtaaccgtgaggtagctatgatcatccttatttccagatgtgggaactaggcttcccagaggctgatgatatgaccaaggccacacagctggcaaacagtgattccaatggtctggaggtccctaggcctctgttctctcaacctggggctttcagtttcctcaagtctgattatctgccctcttcaaggtgctgctcagagggtctggggctcaatgatgaaaactgggatgggtcccaagggcaggtggagtagttacatccaccagtccatagactctttggggcaagccctgacgatgaccatacagtggggcagccccttacacaggatcttctccgcctcctgaccctcccaccccagcccctgcagctcaaggactctgagcttgggcatagtgaggcaggaggagaggatttcattgggggagggcatttctggggtgacgaggggaccctgcaggcacagactctccagggccggcattccctccagcacagccaggccaggggcagagaggcccctcacggtcagccggatcttgcgcacatctcggaggtggcggctgatggccagcagggtgctgtcggcagacagggtgcagcccagcacctcaagcctctgcagatagctgagctcctgcaggccagcatccagccctgtctcggtcacacggtaggtaccacccagcaccagcgagcgcaaggcccggaagcgcgtcaggccctgcaggtgctcgtcacggaaggcggggacgcggtccagcacgatgcattcaagcaggggcagcacggtggggtcctgctgcttgtggagccaggccatggagatctcgcagctgtgcagctccagggtcctcaaggtgctgggcaggctggtgatgggcaccatgctcaggtcggccacgtgcaggcagaggcgcttcaggttggggcacttctggcccagggctctcaacagagcaggggacaactggggggcctgggagccagagaacaggtagccacccatccgcagggaatggagccgggatgccatgtaccttcgaaggaggtgccacatgactttaggtcgcatcgtgtagagcgtcaggtcgacatgtcgccacagccaccggtcgtccaccagcctcttccagcggtgacagaccctggagatgcggatccggtcccgtaccgggaggtaagagaagatctcgagcaggaccgagtccggcagttcgaccaaagtcgccatgatccccc

SEQ ID NO: 126772 - DNA, 741 bp, Homo Sapiens
ttttttcagaacttgtggtttattgacacttctgcatggtgggtccttgggagactgcctttctggcatcttgggacttgtccctaagaatagggaagacagtcatcctgtcctggagcaaagctcccccttgcacaggaacacaactcccatgcaggagaagcccaccgagacgaacgcagataaacccttcgcaaggcctgcactgcaccggaatggcagagctccgtgcatttggcaaagctatggagccttggcagaatgcacaggactctgggggctgccccccttgagctacagaggcagaatcgaaccaaaaacactgcttcctttaacacagcccaactggcttacatttagcttgggacgaggctaggcctaagaagggccagagctgtcctcccagccctgggaacacggctgagacggcccggtgcccacgctgggctcaccataggagaggagaggagagggagggggccccatactggccctgccgtctgcaccccgtccctttccccactaaacacacccatttcctatcctgggttctgaggctgggactgcctctgggattctgagggactgccctccacccctgcaggcctgggctcagagtcagccacacctgtaaggcaggccctgcttccccagcttttgtattccatatacggtgctggcatgtggagctccattcttctccagcccacttattttaagaatagcactaataagacttac

SEQ ID NO: 126773 - DNA, 656 bp, Homo Sapiens
  misc_feature (622)..(622): n is a, c, g, or t
cagagaaagcactttttcttaagcacttttgccttgggtcacatggttagtgcctctactaaggggatgggttgtccagtatctgctgagcttctgctgtattccaggcagtgcttggaccgtaggtgcattatgtcctttaaatctcacagcagccccacattatcacctttcacagatgagaaacacaaggttcagagagatcaagcaacatgctcaagcttccacagtgacagagggggctctcaaatcttaactccaagtctagtgctcataccatggtgctggcagaagtgccttaactgcaccggatggggaaggcacctgaggtgggttctggctgctctggagaaggtggggacaaggtgtgctcttgctcttgtccagaccacgtaggaaacgatggtgtgacttgggaaagatggaggagcctctccccaacaaggccctagggaggagatggggatgtggagaggacagagcaaccttctttggggcaagtttgggttcagagatcaccctgaggggcggggcacaagggaagtgtctgagggagagggaaaagagaggtcccaagtctgaaaggttgggaagagaaagggaggagggagaccaggccggncccactagccatgcccagcagggactcttttctg

SEQ ID NO: 126774 - DNA, 1374 bp, Homo Sapiens
  misc_feature (23)..(23): n is a, c, g, or t
  misc_feature (37)..(37): n is a, c, g, or t
  misc_feature (43)..(43): n is a, c, g, or t
  misc_feature (62)..(62): n is a, c, g, or t
  misc_feature (126)..(126): n is a, c, g, or t
  misc_feature (1287)..(1287): n is a, c, g, or t
gacctagggtaagcaaaatgagnacaggaaaaaggantacatngctcaggacagcgtgaggnccacgtgagctgcttgattggtagcgatttgtacaggggctttatggatcactaggttttaatntgcaaggcctgaaactgtccttagcattctctgaaacccacagtgccagtcgcccttcacgcctcggccagcagaaagctcctcatgagtggatcctcctgagaacttcagaggggtcaggtgacggtactgagactgcctcagtgatcacgctcggtgctatgagctgaaatctgggccaagggcacagtaagttcaggcagctagtatgtttaaaataactacttttcgggagctaagccatgaggatgtaaaggcattaagaatgatacagtggactttggggactcaggggaaagggttggggtgagggataaaagggtccagtgtacactgcttgggtgatgggtgccccaaaatcctggaaatcaccgctaaagaacctcacgtaaccaaacaccacctgaaccccaaaaacctactgaaacttttaaaaattaaaaatacatacataaaatagctacttttactgctgtcaacagcatgttcctgaaaaatgttggaattcaaactttctggagggcagctggtcaagaaacttattcacgtcaggagttttctaaaatttgtttttaatgcttattggtacttctgcattagaagtaactacaaatgtcttattaaagtttccactttaaatgcacaattttacttcattttattataaggaattgttacagaaaatgcaaatatcagtatttgaaaaatacattccattacacagactccaaagaaacaatgctgataagcgccgtggtcctctatgataccatcaccccacactgagcaccaccccgaaggggctggaagccaggtgatccacccaaatgtgtgcctgcagtttctgcccagctactgcccctcctctgggatcacacagggatgtcgtaacagccaactccacacatctgccaaaaaagagcaagtcatcaaggcgagcagtctcgactcaagactccctagctgcagaaaaccaatgttgtcagttgtaacaggttaatatattatttatgccacacaaaaaaggaatagtacaggcaatgatcttccaaagaaagtctttaaggcatctgtaacttctgggaatttcagggtttttatcttgccagtcagctctcactaaagtacttccacagagtgagaaggtggctcccaagtccnctttggtgagttggtgccacctgcttcctctgccaccaggctggggtggggagctttggtgcttcaggtagttcttctgggacttgt

SEQ ID NO: 126775 - DNA, 591 bp, Homo Sapiens
gctctctcacagcatgtctgcaagcctggagcccttcctctacggcctgcacgccctgttcaagggggattttcgcatcacctccccacgtgacgagtgggtctttgccgacatggacctgcttcaccgcgttgtggcgcctggggttcgcatggccctcaagcttcaccaggaccacttcacgtccccagatgaatatgaggagccagcagccctatacgatgccattgcggccaacgaggagcggctggtcatctcacatgagggtgacccagcatggcgcagcgccatcctcagcaacacgccctccctgctggcgctgcgccatgtcctggatgatgcctccgacgagtacaagatcatcatgctcaaccggcgccacctcagcttccgagtcatcaaggttgggccggccccacctgccctaagccctcgtggccagcccggctggttttgtaagatactgggttggtgcacagtgatttttttcttgtaatttaaacaggcccagcattgctggttctatttaatggacatgagataatgttagaggttttaaagtgattaaacgtgcagactatgcaatacagg

SEQ ID NO: 126776 - DNA, 1068 bp, Homo Sapiens
  misc_feature (778)..(778): n is a, c, g, or t
ttttttttctggtttgcatagtctgcacgtttaatcactttaaaacctctaacattatctcatgtccattaaatagaaccagcaatgctgggcctgtttaaattacaagaaaaaaatcactgtgcaccaacccagtatcttacaaaaccagccgggctggccacgagggcagggggatgggagaggagggggcacccctgggcagatggctgggtaccaggaatggctagggtagaaaagaaaaggggactcccagatgggaggggactgattgtcctaatgggaggggtgcaaaaggcacgtcagaagaggaggtttgaggggggcatgacaggtcagtgctttctccaccagggcacagtgttgggggggctcagtgccaccacctgcccacctctggcacttggagagccagtgacctatgaacccccggcatggcgagccccacttgaaacacagatgtcagcctgcccctcccactgggaccccctttccttgagcccgcctggctggcccgcctcttcaggacttggggctcaactattcctcactcctcagcaacatgctgcagcccccacacctcagggccagggcagccagggaggagcagggcggacggtgggtgtgagaacgtgggtagtccagctgctacccccattaaaaatacaaaaacaaatcatcagcatctaaagtgaaataatcacaaagtgaaaatatatcctcaaacagcccctgagattcccacaggggaaagcagcatcgggtgggagggcagagnaggccggctgggccagcgcccctccccaccacccacccaggggctccaggtctgtgagtgccaacagcccaggcagcccgggctcagaaaacagggacttgggccctgacgggagaggcgggtgcaagagaggggagggttgtcaggacaccagcacagggttcagccagagcttcggccttggctgcgccagcctggtggccagtggtggtggaggcacggagcacaggggtgggtcatggacacagccacagccacatccacgtgcacaactggaggcacctgccttg

SEQ ID NO: 126777 - DNA, 731 bp, Homo Sapiens
  misc_feature (592)..(646): n is a, c, g, or t
ggttatcttttgatgtcaccggagttgtgcggcagtggttgagccgtggaggaaaattaaggcattcgccttagcgcccactgctcctgtgacagcagggataacacactgcaagtggacatcaacgggttcactaccggccgccgaggtgacctggccaccattcatggcatgaaccggcctttcctgcttctcatggccaccccgctggagagggcccagcatctgcaaagctcccggcaccgccgagccctggacaccaactattgcttcagctccacggagaagaactgctgcgtgcggcagctgtacattgacttccgcaaggacctcggctggaagtggatccacgagcccaagggctaccatgccaacttctgcctcgggccctgcccctacatttggagcctggacacgcagtacagcaaggtcctggccctgtacaaccagcataacccgggcgcctcggcggcgccgtgctgcgtgccgcaggcgctggagccgctgcccatcgtgtactacgtgggccgcaagcccaaggtggagcagctgtccaacatgatcgtgcgctcctgcaagtgcagctgaggtnnnnnnnnnnnnnnnnnnnnnnnnnnnnnnnnnnnnnnnnnnnnnnnnnnnnnnnttgccttgcccatgggggctgtatttaaggacacccgtgccccaagcccacctggggccccattaaagatggagagaggactgcg

SEQ ID NO: 126778 - DNA, 2781 bp, Homo Sapiens
ctgctcggtgccattttatttaatgcaaacactagacagtttacaagtcacacctggacacaagcacgtgaacagatgtacagggaattctggaattttgagatcagtccccatttcttcctcagggccctggcactgaaccccagcccctgtcccagagcctcccctctgggtcccaccccagaagccacgcacacctccttccgcccagctttatctttccttgagctgtgacttcacccagcatgtgctcagagttgttacaaattttctctgccaaattaagctgatagagattggccactttcaaccagtcctttcagtccactgtgtctcccctctcgcttgggacaggcccatgctggccagtgcaaccttcagatagacacatggtgaccagagcccgccaggcttctgcaggtggcagtgtcgagcaagtgtaagatgtctgtgggaaggagaagctcctgaaatgaacgttctgcaaacagaaggctgaggggtcttccaggcatgtccagtcactaggagctgccaccggtgggcttgagtgccaggctctaggctttgtgcagaaagcacccggggcggggggcggtaagggagagcaaaatgggtctctctcaactgcagtcagtgctcctgggaacacggtctcacagacagcacatattctacgtcacagctctagggtttcaaggacttagccatccgacaggcctcaccataaaggtaaagtggacaacccctgaggtcacgctgtccaggtggcgacaggccacgcatgccaaaatcctccatagccacctccggcccagcaccagccagagggtggggccatcggttctcgacatacttggtatcagggagggacaagcctgacaaagttcacaatctggccaatgagtgtgggaggccctggaaacaggccaatcctgcaagccaccccacccttactaacttcctgaagcatgggaagcttctcgagaccaggccaaggtttctttccttcatggcaccacgcagaggcatttctgcagtgctgcaggtcccccttcagccacacagtccaggtctgtcagggattaaagggccgagcaggaaaaggggtggtaaggagctcaagggcacgcactgggaatggcctcacaaggcagccttgagacgcacagggctacaactggccaccctccaccacaggcatgtttgcaaaacgaacacgaggcatgcgttagacagatgcatgtgggggctgcagattccagtggtttccttaagaaactggagttggctcatcccactcagcagacaatcccgctcagtggacagcctatgaaacgcatggggccatcatgcagaccaaagaggcccgtgagttttgtaagatcctgcctgtctggtgactcatatctgctttcagaagtgctttctgacacagcaaactgactatcagtagacaggggccctagaccctagcatgtggttctgtcccgtgagcctctgacaacagagctcaccgggacagaaccatatgtgggccaaaggaacattccaggaaaccagctctgctccagcccaaaccaggcagctccacgccaggtgaggggcgagtcatggggttcctgtgtttgccacggtgagcatggctccccacgcactctccctcagagcagacaagtaggctgaccacagagctacaaagtcacctgcgtttcactaaaccaagcgaatgtctctttccccctctcctcccccgccgcccccaattacatttttaagcaaacaagcaggattctggctttgatgctcgttcttgacatcggtcactcttgctaccaaaacagggacacagggtggagggtgagcacctctccccaacacaggataaaactcatctccggtgcagaaatgattgctaaagacctttctcatgtcaacccgaaggccacacccagccccctatggaatcagatgggaaacaggcctacgaattgcttcatacttatccggaagattcctaagctctcaaggcaggactatcacgagatgcatgtttgtacttaaatcactgaaagcctccgcttggaccggctctccggaagcccagcaacataaaacctgggatggggaagactgaagtgaaaccatcatcctgggtgctgcgtgtgtgtggtgttacttggtgctgaccggttcgctccttgcaggggctccaagtgggtgcaggctgagccccccacctgcagctccttgaggccactgtcaggggctgtctattggcagaaacctgccacaatgagccactccagtgtgcaggggtcacagtcccttgagttcaaactcttgtcccctaagcataaatgtcatcaggcctcagcatcatcttggcccccgcatcctgtgctcagtaaagctggaggcaggctggctttgggagttggtggctcagcagctcccgaggctggtgctggctttctatcagagctggctcttgaatttcggcaccaagtctcagcacgcttggggcagggcagagaaaccaaactcacaaacacccagagctcatccgggaaactcagaccaacaaggagccgatggcacagagcagcacagcagctgcgggtccaaatgaaggggtggggggagccgggtgacaagcggtggcaccattgtgcatgcctgcagctggacagggccctcagatccgggctggttcgggcggcggcggcggctctgccctcgtgccgaattcggcgcgccgtcgacttcatactctctccc

SEQ ID NO: 126779 - DNA, 914 bp, Homo Sapiens
ggcggtcccgggtacctccggtggcccccttttgcatccctgcctgtgccggcctccgtcccgtccttgctcgtggcgcgcgccgtctccttcagctgcgctgtgtcacgtggagtatttcccttgggcttcctcccataccacgcgtccaggttctctcccgtcacgtagtctgcgtggagaccctgctgacgcgcctgaagcagacttctttctgctggtaggagatgtagctggagacggcaccgtatgagggccatggccagggcgctggccacccccggcaatgggtgccaggctctgccaccatgccagatccagggtcgtcattgctgccgttaccggccatcaccatgttacccttgtcaggtttgtattctccaccccctactatgtcttcaagatccttgtctgaaaaacctcctcctccagcaattggtttcctgcggccatcatctcgatcatttcgatcatccagggcatcagccaagtcaaaatcatttcctaaagtatttgctggagctctggtggttactggcctcttggtcgtggtggttacatggttccatctctctcttcctcctatacccggtttcctgcggccatcatcttgatcatccaaagcatcagccaagtccaatccactacctggaggttttgccggagctctggtggttcctggcctattggttgtggtggtggtggtgtggtcccatggctgctttactgaggaagtttctttcactgcatcctccaggttaaaatcatcaaagtccccagatcctcgctggaccagggtggccaaggagaaagcgaggcagacaaggaacgccgagcgccaggccaccatggctgggagcaggcgggaagggccccggaggagcacagttagcgcgagagcgcccgaagggagg

SEQ ID NO: 126780 - DNA, 1008 bp, Homo Sapiens
  misc_feature (822)..(822): n is a, c, g, or t
  misc_feature (884)..(884): n is a, c, g, or t
ggagcgaggcctgggtggcgaattcggcacgaggttttgacttggctgatgccctggatgatcgaaatgatcgagatgatggccgcaggaaaccaattgctggaggaggaggtttttcagacaaggatcttgaagacatagtagggggtggagaatacaaacctgacaagggtaaaggtgatggccggtacggcagcaatgacgaccctggatctggcatggtggcagagcctggcaccattgccggggtggccagcgccctggccatggccctcatcggtgccgtctccagctacatctcctaccagcagaagaagttctgcttcagcattcagcagggtctcaacgcagactacgtgaagggagagaacctggaagccgtggtatgtgaggaaccccaagtgaaatactccacgttgcacacgcagtctgcagagccgccgccgccgcccgaaccagcccggatctgagggccctgtccagctgcaggcatgcacaatggtgccaccgcttgtcacccggctccccccaccccttcatttggacccgcagctgctgtgctgctctgtgccatcagctccttgttggtctgagtttccccggatgagctctgggtgttttgtgagtttggttttctctgccctgccccaagcgtgctgagacttggtgccgaaattcaagagccagctctgatagaaagccagcaccagcctcgggagctgctgagccaccaactcccaaagccagcctgcctccagctttactgagcacaggatgccgggggccaagatgatgctgaggcctgatgacatttatgcttanggggacaagagttttgaaactcaaggactgttgacccctgcacactggaaatggctcaatgngggcaggtttctgcccatagacagcccctgacagtggcctcaaggagcttgcaggtgggggggctcaacctgcacccacttgggagcccctgcaaagaaccggaccgggtccggcaccaagtaa

SEQ ID NO: 126781 - DNA, 2649 bp, Homo Sapiens
  misc_feature (493)..(493): n is a, c, g, or t
  misc_feature (1769)..(1778): n is a, c, g, or t
  misc_feature (1895)..(1912): n is a, c, g, or t
  misc_feature (1945)..(2253): n is a, c, g, or t
ggacgcgtgggaccgtgtgtagttggcatctccgcgcgtccggacacccgatcccagcatccctgcctgcaggactgttcgtgttcagctcgcgtcctgcagctgtccgaggtgctccagttggaggctgaggttcccgggctctgtagctgagtgggcggcggcaccggcggagatgcctgggaagaaggcgcgcaagaacgctcaaccgagccccgcgcgggctccagcagagctggaagtcgagtgtgctactcaactcaggagatttggagacaaactgaacttccggcagaaacttctgaatctgatatccaaactcttctgctcaggaacctgactgcatcaaaaacttgcatgaggggactccttcaaaagagttttcttcaggaggtgcacgtttcatcaatttgaagaaagactgcattgtaattgagaggaatgtgaaggtgcattcatgggtgcccttggaaacggaagatggaatacatcnaaagtgaatttctgttcaagttttcccagattatcattctttgggatgagagaacattataaaagcactttgtttattttaaagcaagaatggaagacccttgaaaataaagaagtaattattgacacatttcttttttacttagagaatcgttctagtgtttttgccgaagattaccgctggcctactgtgaagggagatgacctgtgattagactgggcggctggggagaaacagttcagtgcattgttgttgttgctgtttttggtgttttgcttttcagtgccaactcagcacattgtatatgattcggtttatacatattaccttgttataatgaaaaaactcattctgagaacactgaaatgttatactcagtgttgatttcttcggtcactacacaacgtaaaatcatttgtttcttttgactcaaattgtattgcttctgttcagatgatctttcattcaatgtgttcctgttgggcgttactagaaactatggaaaactggaaaataactttgaaaaaattggataaagtataggagggttacttggggccagtaaatcagtagactgaacattcaatataataaaagaacatggggattttgtataaccagggataataaaaagaaaacagaagttgatttttaattgatgtttttgaaacttagtagaacaaatattcagaagtaacttgataagatatgaatgtttctaaagaagtttctaaaggttcggaaaatgctccttgtcacattagtgtgcatcctacaaaaagtgatctcttaatgtaaattaagaatattttcataattggaatatacttttcttaaaaaaaaggaacagttagttctcatctagaatgaaagttccatatatgcattggtgaatatatatgtatacacatacttacatacttatatgggtatctgtatagataatttgtattagagtattatatagcttcttagtagggtctcaagtaagtttcattttttttatctgggctatatacagtcctcaaataaataatgtcttgattttatttcagcaggaataattttatttattttgcctatttataattaaagtatttttctttagtttgaaaatgtgtattaaagttacatttttgagttacaagagtcttataactacttgaatttttagttaaaatgtcttaatgtaggttgtagtcactttagatggaaaattacctcacatctgttttcttcagtattacttaagattgtttatttagtggtagagagnnnnnnnnnncagcctagaggcagctattttaccatctggtatttatggtctaatttgtatttaaacatatgcacacatataaaagttgatactgtggcagtaaactattaaaagttttcactgttnnnnnnnnnnnnnnnnnngcctacagccgcggccctcgtgccgaattcttnnnnnnnnnnnnnnnnnnnnnnnnnnnnnnnnnnnnnnnnnnnnnnnnnnnnnnnnnnnnnnnnnnnnnnnnnnnnnnnnnnnnnnnnnnnnnnnnnnnnnnnnnnnnnnnnnnnnnnnnnnnnnnnnnnnnnnnnnnnnnnnnnnnnnnnnnnnnnnnnnnnnnnnnnnnnnnnnnnnnnnnnnnnnnnnnnnnnnnnnnnnnnnnnnnnnnnnnnnnnnnnnnnnnnnnnnnnnnnnnnnnnnnnnnnnnnnnnnnnnnnnnnnnnnnnnnnnnnnnnnnnnnnnnnnnnnnnnnnnnnnnnnnnnngctttcgggtgcggggagcggtactcatctcactcaacggcggtataccgttatccacagaactaggggatttggtagcgatagatatgtggctacaagggcactcataaggcacgacctgcttaatggcggcgttgctggccgttttccacaggctccgtcccctgtagatcattataaaatcgaactcctatgtatagggtgtcatcccgacaggccatgacgacgcacgagtttctccgggagggcctcgagggctctctgttcggcctgttcttactgatacggtctccttcccattttggaagctggggctcttcaaatactcgtcggttcccatctgtgtagtttcgtccaaggtggtcttgttacaccccgtccaccacctggtctacg

SEQ ID NO: 126782 - DNA, 2569 bp, Homo Sapiens
  misc_feature (763)..(763): n is a, c, g, or t
  misc_feature (1661)..(1677): n is a, c, g, or t
ttttagttgtgttacgagcttttatttaaaaagcacatttaatacaagtatagtttcgcagatacaagttttcactttgtatgctacaaaagtctttgaatattattctctttacaaaatggaaccttacaaaaatactgacaatttaatgtttttatacagttttctctagttgcagttatttcattataaaacaatgtctaccacagaactatgatattttagttgatatttaaaaaaattaactcaatgcttttttaagcagctaatgtaaataacacaggtcgagacacagtttataatcatagtggatatagctaaattgtttcagaaataatatcttacatagttaacttttaatgttttatacattatttatataatatttatatataaaaatcatagcttgctataagttgaaatgaaaggacggattctgtagtaaggatgtgcatgtggttgatccatatggttacatttaaccctttgaaaggtctgcatccaagatctaaacgcatttcttccttcctcctttcctcaaaggttcagtagaaggggtccctgtctatcacctagagtgggaccttgcatggaaggacacttacggatagaggatgaggaaaactctctaccgagatttaacccatatgttctgcccagcagaacctaccaagaactgccctagggctcaaccccaagacaatagtgctttacacagcaagagcaactccttacaaagaccctcagctctgtcatcctgaangggtaactctcatgcatgagactgcctgcttctctggctccttctgatttgcaccagctaaaaggttggttcgattttcagttctgcccccttcaccctcccatctgttgtacagaaggctgctttccgtcagctggtggcagaccatgccttgctcattcctgggccctcacaggaaatcctggtgggcacgcagcaaggatttcaagggagaaggcagtaaccgaagtcgaactgtttctaagagtatgcaagtgcccggtgattgacgtgcacaacatcagcatcctgcaattgacatttcaacatcacaggatgatgcgtcaaaagaagaaaagtgagggcctgtgccctcgatttcttctgaaattgtgctgtttgtgaaattcactcgtccacaaagagtctgctaatcactaatgtgaggaactatggttgttggcctatgggcaggggaggtgataaggccttagaactgggaatctagattcgggatctgatcacttgactgagcaaacttgctctttccttttatttaaaacacaaaacaaaacttcctgaactgaagtcacagtacagaatagaatgggatggacagaaagactcaagagggcagctccgcaatggctattttcttgattcagtgctatttctggcatcatgtgctgcaatgtgaatttttgcttttctcacaggcctgggattcctcaggtcacaaaaggtgaccagcagcctctactcaaatcgttttagtgtttgttcctgaacaagctgtgttcactagaacatgaacacttaaaccaattgcacatccaggactctggcacttggtgttagtttgctgttgtttccacataggcaaacactacctattttggaaggccacatagtaaaacannnnnnnnnnnnnnnnnaaaaatcagtcgggcaaaagtttttccctacattctactgtctgatgagattggagagcagcaagaacttgctgtcagcagtcattttacaaaaacagctcaggaggtgggtggcacctacatcatgttgtggtgattgttcctgtcaataatgtccacaggtgaaaggatttccttccggatagcaggggcaggcagggagagcgtcgtcttagtcttgaagaggtcagacacgaagaaaactatgcagcaggccaccagggctccttgagcaaatcctgccagaacatcactgggatggtgcttgtggtctgatacgcgagacagtcccgtgtagaaggccatcatgatcaaggtgaactgcaggaggggccggagcaggcgggctcctcgccaagtgaagcgggcctgcaggtatagcaccaaatacagcatagtgtacatggagaaggaggcatggccagagaagaaggacttcctggcttcctggactttgctgtcatcacctctgcatctgtagttctgaatgtagccttcagagcagttgatctggctgaaatcagggttgcagacactcaagaagtgaggacgcaggcgccctatggacactttggcaatgtctgtgaaagactggctgatggcacagccaaagaggaagcagcccacttgcttatagagtgctgcacgtagggggttctgaatcgtcgacccgcacttcttccagtaatagatccggtagaaattcccccgtgatgatccccaagatggcaatgacgatccccacgccaaaaagcacagcgtcatttatttgtctcccccagttttccaggggggacttggatgcctctcatccttgcaataaaaacccttcggtgggaaaggcttgatgggg

SEQ ID NO: 126783 - DNA, 1574 bp, Homo Sapiens
  misc_feature (391)..(408): n is a, c, g, or t
  misc_feature (418)..(429): n is a, c, g, or t
  misc_feature (1311)..(1331): n is a, c, g, or t
  misc_feature (1437)..(1446): n is a, c, g, or t
aagaattcggcacgaggttttatttaaatgtttttattaaaaaaaattaaagaccttcatggcacaacttcttcccagcacagttatggtttagtcataccaattacaatacaattacaaccaataaagcaaggtggggagggccttctggcttcaaacttaaaaaaaagcagaggaagaggggagggaccacttcaaacaaagtttaaaaatactttaaaaaatctttcagagtaattgccaacataacctttcatgttggccattccatttcctgccatctaagcaatgcagacacaggtagtgctgagaaatagtgtcccaatacaaggtatacagatgaggtaatttacaacaacacgtaagttgttactctgtaaacccttgcctnnnnnnnnnnnnnnnnnnaattgggtcnnnnnnnnnnnnctctctctccatgcttctgcagtgactcttaagtagcatttttaaaaacttctatttattttaaaaggctcttgggtggcacctcagagtcctctgcattcaccttcggtttattccaaggtctgatgggtgtaaggaggtccagctgtctgcagctctccgcatcagcctaagctacacctcaatttccgagctacaaggatagggtatgaagtcttgatttacaaccctctccccacctcaaaagaaagaactcattagttataagtgtcctgttcaaatcacaatccagtgcaaacataatcacaaattgcatctctggcacatctggtgcttttagcttctgcacaaattcaacatggtaaccctcacagcattctagggcataaaagggtcaagtacaataaatatccactgtaagtggtcataaggaagaaaatcaccctgccacacagtcagaatgttttcccttcagctctccctaccgttgagaagcgctataaaaggaggctttagcgtcctctaaagtttacccattatattcactaaagccaccaccttgataaagttactaaagccaagatgggttacaaagttagataagttcattaaattcaactccccaaacaattacgtttatctatgatgcctaggcgagaaaggcctgtgaatctataaggtaggagaatggggaactaagattttaggccttaaaatatgttggaagaatttttcctagttcccacaagcagctactgtaatgaaataacaggagaaaatacagagctgatggttttgctattgtgcttaaaaaaactaggcttcctcagtgaagcacctgataaacttaggtggttggattacagtggaaagtccactttnnnnnnnnnnnnnnnnnnnnnaaaactggcgactttttccatccccaatccctgcactgctgagacacaaaatgagttttatggcaaaggatccttaatccccagagacgctttggcttgtggtgcnnnnnnnnnnaaggcctctctgctctgcccggtaccatgggtcgaacgaggggtgtataaaatgggggccttgggaagcctccacggtacagggctgcaggcccctcagatgtgaacatgagacacccacccagcacc

SEQ ID NO: 126784 - DNA, 797 bp, Homo Sapiens
atctgaattgaaaaggctcctcaacgatttcaggaggcagtgattataaccgaacagtgttgatttccttaagattctggccaagacttgcctgtcttccgagtgtcaacatgctttgagagaattctaagattatgaaatattacttatgtaaatttcaccatcttacttctttgactacctaactagccaattataggctgcatttttctgtgcattatttgttgtaaagaaaaacagttgtgtgtgtttcaatttataaatgtatgtttgttgccatttcatggaaacaatgaaaaatgtgaaactcccttatttactgattcttggaacctttcacacaccaaagctcaggtttagcctctaaagcgcaaaggttttcagggtgaggtttgactcagtaggcctttcaaagtcacatctgtccatttctttttcgtgcatatacccccaagcaggcacaaatgcctgtaatgctgagaaccacacctaacaaaagggcgattgcatcaccggcttctactgcttccacaacaggcagcaccaaaagcagtgacatgaggactaaggacaactgtgttgaaactgaggtcatgatgttggaatcttgagggctgaaggttccaaagaaatggtatatatagaattctatctgacttgaaattttcccttcctggagctccggatgctgagattaagaggttccacgtgacacgaccttctaggaagcagccattacaggaatcccccggccgtaatggccgaattcccgggcatatgtccggtaccgtcgactg

SEQ ID NO: 126785 - DNA, 1146 bp, Homo Sapiens
tttataacataatgggtttatatttaatatagtacttctcatcaggaggatgttactcagttaatataaagttttttttcaaaacattaaatctcttttccatgtcaatgtctatagttttttttttaacattaaatttttttccgcatttcagtattagatacactgaatacatttttctaaatgttttttccctagagataaaagttttcctttttacctgactctctgatatctaaatataatattaacttgggagacaacaaaacaaaaatctaatttaaaagactcctcaacgattcaggaggcagtgattataaccgaacagtggtgatttcctaagattctgggcaagaacttccttcttcctatttcacatgctttgagagaattctaagattatgaaatattacttatgtaaatttcagccatcttacttctttgactacctaactagcaaattataggctgcatttttctgtgcattatttgttgtaaagaaaacatttgtttgtcaatttataaatgtatgtttgttgccatttcatggaaacaatgaaaaatgtgaaactcccttatttactgattcttggaacctttcacacaccaaatctcaggtttagcctctaaagcgcaaaggttttcagggtgaggtttgactcagtaggcctttcaaagtcacatctgtccatttctttttcgtgcatatacccccaagcaggcacaaatgcctgtaatgctgagaaccacacctaacaaagggcgattgcatcaccggcttctactgcttccacaacaggcagcaccaaaagcagtgacatgaggactaaggacaactgtgttgaaactgaggtcatgatgttggaatcttgagggctgaaggttccaaagaaatggtatatatagaattctatctgacttgaaattttcccttcctggagctccggatgctgagattaagaggttccacgtgacacgactttggcccggcaaggtccaaatttgctcctgttttacaaatacactggtgcaacctaagtatcctttggagacgagttcgtacattaccttctaggaagcagccattacaggaatccccggccgtaatggccgaattcccgggcatatgtccggtaccgtcgactg

SEQ ID NO: 126786 - DNA, 1423 bp, Homo Sapiens
tttttccgcataaatattgcttttattacaagaaagaagagaccacctctgaagtaaggcacaacacaattccattgtcactgtggcagaagtccctgttgctcatccctttgatctcagccaagactgtggtccacgggcctaaggcacttgagcttttccctcaactgaagtgtagggggtgcctgagagctgagcctcgtgggagtgtccatggtctctggacctgcatcgaagttcatgtgtttccactggtgctgaagatgaacatcaagaattactagacatgtaaaagtgtctttaagtgtctttcctcctgagtccacctttggcaatggtccccaaagcctggccccttagagatgcagctccagatcctggccaccctcagggttcaaagagactggcccaggggtacacaattgctggaatattctctgcgagtcatgcacacgtgcgggggtgaggtgcagttatatggtgacacacacagtgttactgtgagctctcagggtgcacagagggcaggtgacaagggcatcagctaatctgtcccacctggtccagcccatccagttcaggggcatcaagggggctgaggccccggtagccactgtagaccctgtgactatcactgacaccgtcactgggctccattgggcaaatgtagtccgtcgattcatcgaacttcttttttcttatgtttccgaagtgtgaaaatcctagtttccttggccggactttggctgtggtggtcagtggtgtgtaagctggtgaggccattttctctcgcttctcctgttcagcctccggaccaatcaaggcattgaacttggtggtcaggtggcgcctgaggagcgtcttttgtggggggatgttgagaagcatagccagggtgtccccagtgaagcgtggctccaggataatgaggcctccatggactccactccctcgaagattgggtgcatactctgccaggtccacagatcgtaaccactccatcaccctgtggttggaccactgtacaacttctgaaggagaaaggttactctcatcagctggccgccggtgcaggcagtgggggttgaacttgttgacatgcagcacgtgaatggcacatttgatgctgagatgatgtagttggctggtgacttttaagaagagtaaatcgttcacagttaggtattgcagcattcgtccgtcaactctagattcatgaaactggtctttgtactggggtaagccaatatcatcaagccaccttgtcacccaaatgtggtctagcagtgcagacttctcctcctgtttggtgttgatggctttcactgctaaaacaagcttcttcctgtggagtgggtgcttaattcctagctccttttccatgtcctgaggggtggctgtcaataaggtgtggccagaagat

SEQ ID NO: 126787 - DNA, 1031 bp, Homo Sapiens
  misc_feature (189)..(189): n is a, c, g, or t
cctttgaaaaaattcccaggccggaagggttccttttataaatgttccaattgcccagagacgggtaactttgtgctcaagcattagggcatcccaggaaatttcacaaaagttttttggccccaggtttgggtggtagatgtctcccgggctgttcctgtgaggggaccctttcccctttcaccgttnccattgggtctggagccaagtgggtgatgtccagggggctggcaaggagtgaaacggggacgctgggcccacttgcagggctcggtgaattcaggggtatcttgagcttggtatcttcctctgggaggctgaagttgtgcaactggaaatcatcaggggtgtctgcataggtgtaggtgcggatggagaagtcacagctggccatgggtacccggatgatgttatatccgattccttcttcagagaagtacgatttaagtagcaaattttgggcagggggtgacagggcaaggatgttgagagcagcagcatctgtcatggcccctccaaatcccttcactttctggaacttctgttctggctgcagggtcagtagcaggcctgtgcccgtgtgattagcctggatgggccccatactcagctccatccgtcgcccactgcgtgtactctcatagcggctgaaggtaccaagggcaggaaaggtcggggggtcaaaggagtcacagtatgtggcattgcagacacacaccaccgagctgtagccgaagcttttagggatgcaggggcgggcacctgatgcccacgacactgcctgaagtagaagcaatcctgtgaggctgccagccatgatgcttaccctactcaaaggcttgggacattcctctctggaaggacttgaaaactccatcccctcagggtcattagatgaagagaagaccacaggggttccagagtctctgaaggatagaggatccactaaacaaaaacaaggatgcaggtacctgccttagctataggcactaggttagccctgcaagtaattccggcttcccgatgtggat

SEQ ID NO: 126788 - DNA, 1455 bp, Homo Sapiens
  misc_feature (445)..(570): n is a, c, g, or t
cgcgcgtggtatgctcttccttcttctttttctctcgcgggtggctccccgttcgtcctgtctgtgagttgttttgtgttgtcgttgtgtcgtcttctcccgctctctgtttctcgtgccctcggctcttcgtggcttttgcgcgtctgcggcggcgtcctcttcttcgttggtccgccgttcggtctggctccgctccgtttgatgttgttgctcctctcctccctttttctggctgcccctctcctcgtgtccgtccctcctcgccctcttcttctcgtctcctcggtccgtcgtgttgctctctctcttctgtcgccttctctgcctcgcttgctgctctccttctccgctccctcctggtgcgttcgggcgccggcgcctgccgtccctctctgcttgctgtcgttctctctctgcctcggcgcctcctccgctgttgtcnnnnnnnnnnnnnnnnnnnnnnnnnnnnnnnnnnnnnnnnnnnnnnnnnnnnnnnnnnnnnnnnnnnnnnnnnnnnnnnnnnnnnnnnnnnnnnnnnnnnnnnnnnnnnnnnnnnnnnnnnnnnnngctttcttcttttattcggaagcagacacagggtgggaggcagtgcgacacctcctggtgagaaccaggataacagcagtcagagtcagggacaccaccacagccaggcctacgcccagcagcaccactgaggtgtcagaaggcaaagcccactgctctacttcatggtcaccactcctgtccaggaagatcagtggcccccacggtgacatctgcttcttctgtcacatgcctgcggttacgggaagcagacgtggaccactggctcacgacacgaggctgcctcctggaatggcttggagtgccacagtcacctttgttacagcattgacagatgtcagccgggccttccactgggaaccagctgttggaaggcttgctgaaggaacaggccttgttgagttcatctgggtcctgctcagctagggtgaccttcaggtggcaggtgatgtatatcatgtttctggagtcattagcaaagtggaagacatccactgtgaactggagtgtatctggcccgggtcgaggaactttgaatgcagaagaggcatcagtgagaccgtcgacaagacagcttcttttattttcctggccatcaaggaatatttggtcttcttcctccactgtccttttcttcttcttctctttgagggcactcagtacagtctcctttgcacatgggtctggggcattacttgatggtgaggacagtgttgagctgattatctgctctggtatcgcagaacgcgaaaatcttctgtcaggaggggcgatcctcagagtcactgggctacacaccatcctggagttgcgaggggacagcacagccttcttgtgataaccattccagcacactgtgccttcgtgccgattctacacccagcc

SEQ ID NO: 126789 - DNA, 2520 bp, Homo Sapiens
  misc_feature (235)..(254): n is a, c, g, or t
  misc_feature (300)..(308): n is a, c, g, or t
  misc_feature (414)..(440): n is a, c, g, or t
  misc_feature (596)..(618): n is a, c, g, or t
gtttcccctaaaggtggcggagctacacaaaaggggttggctcagaaattagctcccccgccatgggcgcggaattcccacaggggtttttcatagaaaaagggccccgcttctttttgtggaaatgcgggcttttttccccaatagtgctggggcggagagaagataggcctttaaaatttagaatttttcccaaacccaggtttccctgcccagaataaagaattgcggcaannnnnnnnnnnnnnnnnnnntaaaattttttggagaaaagttgggagccttgcggcgttagggagnnnnnnnnnggttgggaataagaattccccacgggaaaatggggcccccgagggaaacccccccatttctgggaaattgtttttcaagaaaccgcttccgggttgtacccccccnnnnnnnnnnnnnnnnnnnnnnnnnnnaatacccaaagcatctagttccatgggcccaggggtttttcttagggaaaacagggtagtgggccatgtgtccacttacccttactggggcccgcgccgccacaacggaatggtttatgaaaagctttttgaggggccgaaggcggccgaccaagnnnnnnnnnnnnnnnnnnnnnnnctttgttgtctttatgtattttatttttgggctcaaacattttctcctttaagagctgccatttttcctggctggtgccataggaatcatctgggtgcctgggcacacccgctgctgctttaaggcttccgccctgatgctgacactgctgctccacgggcccagttctgcatctccaggaaagacaaacagtctccagttttgggcccagctttcctagtctcttcttttccttaccctcagccctgatcttgtgtttgtacggacagtgagctcaccctaggcctggacccaggcccagtttccaaagcaagcagcacacagcgcatgttcacataagcatgggggctggggggacactggggcttactgatctttttctaggggcctccagcccctggcaccacctagaggggaaagtgagtcacccaaaccattgcccctgggcttacgtcgctgtaagctcacactggccctgctgtgccctctttagtcacagacagcgtgtgagctgactctgtccctttaatgcccaggctgagcccagtgcctccttgagtatctgctccatcactggcgacgccacaggtaggtgtgaatggagtagccaggtgagattgtctccaggaagcccacagcaggatccttgatggtaagaggcacatccttagaggagcggtttagcacgaccacaacagcagagccatcgggatgcatcagtgccactgcgtccaggtcgttcttctgactggcaaccagccccactctctgggagccctcaggaatgaacttgctgaagtggccaaggtggtagaacatgggctgtttgtaaaacgtgtccttggtgatgtctacaatgatgggactgtcgacaaagttacgcacccaattgggtcctccttcggggttcagggcaaggttccagtcggtccagccgaccacatggtacaggaggttcgtgatgatgctgtggctgtactgcatccctcgatcccaggagcctagccgcacactctgctcccagaacttggagcccacacaggcctctgaggcaaagagcatggtgttggggaacaggcggtgtgtctcccctagggtggctttggctggagccagaaagtccaggtaccaatgtacagcaatgccatgaacatatttagctgcttctggggtctgtcagtaccacctttgcccagtggggcagcagcaagcgtttggtcatccagcatgagtaggcggacattgtggtgagtactgttggcagagggtaggacctaggtcacgggcaatgaagtctcgctgatgttcaggggtgaagcccaggcactggaaggggtatccactcaacagcccagcagaaggctcattttcagctgtcactgcccagaactgtaacttgtgctcagcataggcatccaggaacttcacaatgtatctggcccaggtctggtggtagatgtctctgggctgtcccttgagtggccccttcccattccccgctcccttggtcttgagccgagtgggtgatgtccaggggctggcaaggagtgaaacgggacgctgggccaactgcagggctcggtgaatcaggggtatcttgagcttggtatcttcctctgggaggctgaagttgtgcaactggaaatcatcaggggtgtctgcataggtgtaggtgcggatggagaagtcacagctggcccatgggtacccagatgatgttatatccgattcctgtgccggtgcaattagcctgtatggtcctgtactcagctccatccatgcccactgcttctgctcttgtagcggctgaaggcactcatctgatgcccacgacactgcctgaagtagaagcaatcctgtgaggctgccagccatgatgcttaccctacccgaaggcttggg

SEQ ID NO: 126790 - DNA, 1043 bp, Homo Sapiens
ttcgtccatgattcgaatatcccaatctgggagtgttgagtacatgttcacttgttcccctccccgagaagacagcagcgtgaacttgtgccagctttacgctgcccagatgcctgccaggttgtagactgagaatgtcgatgttgttgtgttcttgccttgggggtttgtatctgcagcctgtttctgccctgggactccttgtctggctgccaatggagttgaagaactggaatgatgacacagctcttcttcttcttattttgcgtttgctggcctctccggtgtctgggagcgggatgaggctgggctagagaagggtgatgaactggggccatttctcttccagagctgtgagatgcctcgatgtggagctgtaggaactggtaatggcattgcggctggatgctagggatgccacttgtgtaagcgcctgtcaaggagctcatggaagagcttcgggatctcttattcaagtggtcatctgagctctgagaattgaggcctctcttcagagacccaggcttaggcacaaaagaagcggggactccattggccaccaggggctcaaatgctgaatgtccactgccactgctatcatggcgccttcttttattttcctggccatcaaggaatatttggtcttcttcctccactgtccttttcttcttcttctctttgagggcactcagtactgtctccttgcacaatggttctggggcgttacttgatggtgaggacagtgttgagctgattatctgctctggtatcgcagaacgcgaaaatcttctgtcaggaggggcgatcctcacagtcactgggctacacaccatcctggagttgcgaggggacagcacagccttcttgtgataaccattccagcacacggtgggaaagtacccccagacaggaatactggcactgatggatcggatagctcttctaggtgttattacaaaccgatttggtaaagtccaacaatgcactggactatgttgacatggaaattcacatcccgttatcaacagttctctctcactgta

SEQ ID NO: 126791 - DNA, 1111 bp, Homo Sapiens
ctagtgcctatagctaaggcaggtacctgcatccttgtttatgtttagtggatcctctatccttcagagactctggaacccctgtggtcttctcttcatctaatgaccctgaggggatggagttttcaagtccttccagagaggaatgtcccaagcctttgagtagggtaagcatcatggctggcagcctcacaggattgcttctacttcaggcagtgtcgtgggcatcaggtgcccgcccctgcatccctaaaagcttcggctacagctcggtggtgtgtgtctgcaatgccacatactgtgactcctttgaccccccgacctttcctgcccttggtaccttcagccgctatgagagtacacgcagtgggcgacggatggagctgagtatggggcccatccacggctaatcacacgggcacaggcctgctactgaccctgcagccagaacagaagttccagaaagtgaagggatttggaggggccatgacagatgctgctgctctcaacatccttgccctgtcaccccctgcccaaaatttgctacttaaatcgtacttctctgaagaaggaatcggatataacatcatccgggtacccatggccagctgtgacttctccatccgcacctacacctatgcagacacccctgatgatttccagttgcacaacttcagcctcccagaggaagataccaaagctcaaagatacccctgattcaccgagccctgcagttggcccagcgtcccgtttcactccttgccagcccctggacatcacccacttggctcaagaccaatggagcggtgaatgggaagggttcactcaagggacagcccggagacatctaccaccagacctgggccagatactttgtgaagttccttgatgcctatgctgagcacaagttacagttctgggcagtgacagctgaaaatgagccttctgctgggctgttgagtggataccctttccagtgcctgggcttcacgcctgaacatcagcgagacttcattgcccgtgacctaggtcctaccctcgccaatagtactcaccacaatgtccgcctactcatgctggatgaccaacgcttgctgctgccccactgggc

SEQ ID NO: 126792 - DNA, 730 bp, Homo Sapiens
  misc_feature (665)..(665): n is a, c, g, or t
gtctgtccttatatcagttttattggtgggtttgtagctccctgggccgggcctggctgcttaggccagtctcttgctcacgcgctcataggtcacgcctccgatggtggagacctccaccagcttgtcacccacgatctctgaggtctggtgatagttggggaaattcaccaccagcttcccgccctccatctgcacagtggccttgaacgtcttgccccccattgtctgtatgttgctttccttgccaacagtgaacttgttggtcatggtgtggcccccggagtagtgctgggaccaagtgaagtcctgcccatcctgctgcacctccgtgacgatcttgaagttgcgggccttttcgattacatcgctggagatcccaaggagcttcatgaactcatcataattcttctcactctccatctcgaacttgccggtgaaagccatgctgctgggaggctttcctttatgtgtctgtttcattctctgcaggtctcctttccggctcacccatgtgcacgcagacaacacagctctcagaacctgagtcagcgcctgcatctccaccaccatcatcatcgtcactgtcttcatcgcctctgggctggaccagcccctgcctgtgagctctctggagccagaggtgcaaagtctttctgctctgntacttgccagctgccttccctccaggaccctgtgtcctccttctagtcccctcgtgcccgattct

SEQ ID NO: 126793 - DNA, 1256 bp, Homo Sapiens
aatgttcgatgcatttatttccatgtgattcagaacatacacaactagctcactgacccttgatttcggcagtaatataaatttgccttttagaaataatttggtttacaaagacatgaactgattttaaaaaaaatgattaaggaatcgggggaggaagagatgcagcagaaagacctgggcagaaacccgtgaagatggtgctgggaatgaccgggctttgggggcttgggcctgcggcagagcaccagcccctctctgtgcattcctggcccacgggcccccacccctgtgctcccacacacccaggtctccaccattatcccagccttggggagccctaccttttccagaacatgctgggctgctccaccccttggcctttgcatgtgctcttcccactctccagatggcacaggttgtctccaagatattttgcaggactgttagtcatttatgttttttacattcaaagttttaatccatctgaagttgatttggatctctaagacgagtgcaattttattttatcccagatggatattcagttgtggctgggtaccacttacttcacagtctgcccttctcccaccgaatcaaaatactacctttggcatatatctcattctcatatatcctgaaacttatttttgtattctccattcctttccattgtctagtcctctgccaatgccatattgatctgattacagtgactttgcagtatggtcttatttccaggaaggcaaaacccccacagcagtcttttttccagtcttccctggtaattcttgggcatttattctgctgcataatctttcagatcattttatctagttttttaaaaaatcaccctgttggtaatggaatttgaattacattaaatttatatggaaaaaatgggaaaattgacatttttctgatattaagtttccccatccaagagcatgtcttgctcttttttagatcttattttaaaatctgtcagaagatttaattccatctgtttccaaacttttacttcatatgcttcattttcataaacgatagacagtgccctttcgtgatgaaaatcctgccagttctttcttcagctgaaatgctgtgtgccttgtgaacatcagcatggatgcctgcaaaggaaaggtcatgtggcgtccacctgaaaaaaggtcccagcatctgctatgtggtaccctcaggatgggccgtctgctgtgtcctaagtttatttctgtttcttttctttctttctt

SEQ ID NO: 126794 - DNA, 1349 bp, Homo Sapiens
  misc_feature (75)..(109): n is a, c, g, or t
  misc_feature (1245)..(1259): n is a, c, g, or t
atgataatcatatagggcgctagctcgctgtagcgaacgacgagcgcagcgagtagtgagcgaggaagcggccgnnnnnnnnnnnnnnnnnnnnnnnnnnnnnnnnnnncagtcgacggtaccggacatatgcccgggaattcggccattacggccggggtggcaggaagccggaagcagccgcggcccagttcgggagacatggcgggcgttaaagctctcgtggcattatccttcagtggggctattggactgacttttcttatgctgggatgtgccttagaggattatggcgtttactggcccttattcgtcctgattttccacgccatctcccccatcccccatttcattgccaaaagagtcacctatgactcagatgcaaccagtagtgcctgtcgggaactggcatatttcttcactactggaattgttgtttctgcctttggatttcctgttattcttgctcgtgtggctgtgatcaaatggggagcctgcggccttgtgttggcaggcaatgcagtcattttccttacaattcaagggtttttccttatatttggaagaggagatgattttagctgggagcagtggtagcactttattctgattacagtgcattgaatttcttagaactcatactatctgtatacatgtgcacatgcggcattttactatgaaatttaatatgctgggttttttaatacctttatatatcatgttcactttaagaaagacttcataagtaggagatgagttttattctcagcaaatagacctgtcaaatttagattatgttactcaaattatgttacttgtttggctgttcatgtagtcacggtgctctcagaaaatatattaacgcagtcttgtaggcagctgccaccttatgcagtgcatcgaaaccttttgcttggggatgtgcttggagaggcagataacgctgaagcaggcctctcatgacccaggaaggccggggtggatccctctttgtgttgtagtccatgctattaaaagtgtggcccacagaccaagagcctcaacatttcctagagccttattagaaatgcagaatctgaagccccactctggacccaggacattttgatgagatccaaaggagttgtatgcacatgaaagtttgagaagcatcatcatagagaagtaaacatcacacccaacttccttatctttccagtggctaaaccacttaacctctctgggtgttacctgctcatttgtttnnnnnnnnnnnnnnngtctcacctgctttcatgctgaggacaagttcagatgttcaagcctataatatttaggcagttcctcaaatttatgaaaagtgttctcag

SEQ ID NO: 126795 - DNA, 2238 bp, Homo Sapiens
  misc_feature (1458)..(1468): n is a, c, g, or t
acatggtaggatttttattcctggatttggtcttctgcgaagtaataaagacactgcttttatttagtttgatatgtttctttacagaatgcagaaaacacatcttaaaatcatatagaaggaaataaaaacacatcagtggttggtgaacacttgaatgtgagattggctctccatctcacagagtccaacggccatcaccagcccagcgctcaggggagcaggctgcctgcaaaggcattgttgctgttgttattctgttcactgccccatcgcctccagttgctatggcaacaggccattctgggccagccacgtctctgcatggcagtgcccaatggtggagttgctaggggcgacggagctgtttggaaggcctttcaaagccctcacctggaacattgggaattgtttattttttgatgaggtcatcagaaataatctcaccaggtcagatcccacttgtgctcctgtctctggggcaccagggaaactctgacttggaggcatgagcccagtcaccagtggtccactgagcccgcatttacaggctcccccacaggggcactgctcactccagagtaccccctggggactggggcaggggagaggggctgggccctgtgggagaaggcgcaaggggaaatgccctctggagagcagtaggacagagacctctccccccctcctaccagccctcccctcctgaggcagcacacacaaatcctctgcaaaacagtcgatatggcttagaagtagctgctctgtgtgcaaagggagcctgggtccacccacccaccctcaatcagggaatggatacattattgcgaaaggcattcctccctaaaaagtacccaaaataacgcttcagacatcaagaaaagtcatgctcaaaatggtttcttccacaggaggagaatcgaagcagagtgggcgcccctgagtcatgggacagagatgcagatggacggacggatgttctgctaaaaaaggcaaaagaaccccagtgtaattccagaatttaaaccattaggaaaagtagggggaaaagaatcaaaacaagcaaagccgtcaagttccatggaatcaacacttaagagctcgtacaaactgctgtaagcatcaccattttaaatcttttttttaataaaacaatttgaggctgtataaaaactttagtaaaaaattagctttgagagctaacagatttttattatgaactattgctggcactcctccccagccgccagaccttttccagtagttcaggcccaaggcctgggactggagtgccagagaaaagggatggggtgggtcggggcaggactgtggactgttaggacaaagcggccaaggtcaagtgaggaaagagcatcacatgacataaaaatattgcatcttcaccaaaatgtcccccactgagtgtttcaaaaaaccgtgatattccttttaggaggnnnnnnnnnnncaatgcacagaaaaagggtaaaacaaaataggttgatgtggtggagacctttgacctcccaggtgcccccacaagcagctggcccaccctggagcaccaaagttgggggccacagccaccactgcctcttggagtccctttttcatggaaatgaagaccccttggtcgtgggccactagtgtacatgggctggaagtggggatgtccatggcccaagagacccctccagcttccagcccctggcaacagcgggagagcaaacccagcaccagggacttggcgtgagccagggccgggaggcccccaatcaggctctggggtatcagagcaaccaagttgacgtagtgtgaaaaaatagtattcctttgataaaaaatactgtcccttggtcttctctaagtttgaaacaccctgggagcttatttttagcaaagcaattccccatacccacccaaaaattatacatacaagtttaggtaaacagcagattaaacgtaaaaacttaaccttaacttctgaaagtcctttgaatttaatctttagttactgttttccatgttacatcctgcagctagacacacgtgaatagaaaaaacagtacagttagtgttaaaggcaaaacgcagagagccagggggccgcccggcactgcctgcgagttcattcatggttcctcgctccctccacctccactccacatggtgctttcagagccagccatcaaaaatgaagcgaagaattctctatgaacaaaccaaaagctgttaggc

SEQ ID NO: 126796 - DNA, 1532 bp, Homo Sapiens
  misc_feature (1419)..(1419): n is a, c, g, or t
  misc_feature (1460)..(1460): n is a, c, g, or t
ttttgaagtaactgaagatatttaatctagagaagatttgggaaacacatgatagctatggttaaatacttaacagggcaatcacagggaagatgactagatttcctaacatccatgagtgaaatttatagaagtatactctctgacttgatataaaggaagattttaaaaaacatgactgttcaggagtgttcaagtagggtcagatgaccagtgattgggaatacttcgtaagcaggagcaagtaagatctgagccactgttctatcggtagggtgtctgtggtattccttggtcaaagaagtactctaagcaacttcagtctcacgaattactatcaccctcgtgggcatacatgatggttaccctaaagaggaagtttcagaaggcagtaatattggatcctggaatagtcagacaggagccttcatgcagatacccttttcagttctccatacacccattcacaagtggtcacaaaaacacccagtacctttacttggctttacccacttaacaatatgctcaatatgagcagtttgactcccaagcctaggtcaggcctgagtgtttctcatgagccatagtcttaggctgaggagccttgagagttggtggagggagagcccccctgcccgcagggggctgtgatcacagaagtctgtagaaagagtgggatctaaggagtcctggggaggcaggcctaaaggtccaggcctggcatgatcactgtccagggaaggcccccagttcctatggctctgtgcataggggccatttgttcttgaccgacttcactccaaggatctggtgtgggccaaggctagggagtgggcagaaggcgatggctggttggagagaagccaggccgtctagtgggggaggatggttggaacatagcattgaagtgggctcggctttcaagctgcatacggtggcccagtggggaggcgagtccacggacaaaatggattcgaaccagccctgactgccccccagataccagccatccataggagtccaggtttgggctgaaacgtaccttatgaatagcctccagctgcagcctgtccaggcagagttgagaatgcccctctccctcctgcatgcgcagcattggttctctacggagcagatcatggaatgaacccaaatctgtgtcttgaaagagcaagtagtgatggttgacagtttcagtgtaagttcgagccttgggagggttggggaccccagatgaagcagaagaatggtctggaccttcaggactgtcctgatacggtatcagatctgctttatatataggaaatcttcgctctacaggtcgcttgacatttattggattcagtgccatatctggtaatatagcagcaatgagctccccggatatatctcctgcagctattgtcccaaggcagtcgngcttcgtgccgattcttgggctcgaggggcaaattccctanagggagtcgtataaatttcgtatcatgtcaaaactggttcctgtgtgaaatggtatcgctcacattcacaca

SEQ ID NO: 126797 - DNA, 696 bp, Homo Sapiens
gacgtgaatatttgggttctgttataaatctttattttttaagacttgaacacctgcagaattaaatacaaaagcaatcaaaaatcatcatattttctaaaaacagttttccatttggggcttgcggccctcttcaataaaatcattctgaagatttaaagaggtttcagcttcaaattctcagaataaagactccttttgagaggggctacagaagcccccatgagcttcctgctcctcaaaactaacaggcaaaacaacaaacctcctagaaagcaaatatgacccttctcaatacagagcttttcccaccctaatttgtagtttttcagaaaagactggggaagcaggtaacagcgagcaagtcatcttgtgaagaaggtcctggagcgagccctggagcgggggctccccaggagggcccgagcagcggagacttctcactccacctctccagtctctgatcagcacacagtcggtggggcgctcacacttggaaaagcttccaggaggcagctcttcagtagtgaccaaggcacacgtggtccatggacaattttatcctgtgaagtggatacggcttctcacaaaggttgaccagcacgtacaaatgtctcaacgcatactcgtacgtgggggagtgccagttgaagcagtgggtacgaagtgcagcagggcctctgggtagcagctgtg

SEQ ID NO: 126798 - DNA, 937 bp, Homo Sapiens
taaaattagagttctcttttaatcctctttgagtaaagaaataatttgcaaacttctattttctactgtcatgaaaacagatcttttcttgggacttcacaaatgtcaatcacaacaatgcaaacagagtaattctttggaaagactgatctgagggtttaagggtagacttttttcattgaattcctgaatttttacactgtgggattggctatgagacaccataaaatgtaaaatagttcagacagctcaagctctattattttcaggcacaaaatccatataattttgtacaaaactttgaattttttatttgtgaaattaaaaatatggtattatatatatataaacttctattcctctataaatatagatgattttgtgatagtgaacagaataaatgtataccaaattcaaagaccaatatcattttagcgtatgacagacatagataaatttaggtcctaagtaccggcattttgataaattcttaaagtttaaaacaatacaatcaggaggattgcttttctcctcttcttcacagagaactaaagtgaatatttttaaatggctttgaaagatttacatttgacacatttctgtaaatccaaaagaggagcacacaggatttaatgcagtagacctgcacacattttccctttagcatgcatgcccatattttgtttatttcaggcgctatctccccgtcaattattccaccttctttacctcctgaaatcttaccaggttattattggtggtgtgaattgttcccccctcagaatgtgctgctgaataataatcgtaataaaatgttgaaagtgtacaacttttacattttaaagtttctgatatatgtctagttatttgattaaaaataagaaaatagcacttcattttgaggaagtccatgacactgaaatatccttcaagtttt

SEQ ID NO: 126799 - DNA, 764 bp, Homo Sapiens
  misc_feature (732)..(732): n is a, c, g, or t
tttgaagttaaatagtgaatactctttttattcagaagaatgcatttttaatagaatttcatgcgccagtaaatcagtacagtgaggagttacaggggtggggaacctctcttcaggaaacatctcaccctggcagagctctcaactcccagaatcccctttacccagctcaggtgattagagaccaaggaacagcagatggggctgacttgcagggtaactggttggatttataggtctctgagagcaagagagaggagaggaaagctcttgtaaaggaggagattattatattggaacgggcagttccacagagattctctgagaggttgatgaaggagaattggcaggggtgcctggttctccttcttggttacactcttcaagggcaatggtctggtctcttccgtctgtctctgagcctctggttcgcagtcgaggccacttcttccactctatggctagcactacccccaaggctacaacaaccaccacgattaggctacttttcggacaatgttccctacagtgcactcctgagcaacaggccctgctgcccccaccagctccaggggatcacttggctctgaccagatatcagggtaggcctggaggcggtagctgcagctgtagtttccaatgccttttccttctacgttgttgatgacaaagtctccatcctctgaaaactgctgaggtgcttcttctccatcatgttctaggacaattcanacctggcagggtcctcggactgaaggggatgt

SEQ ID NO: 126800 - DNA, 1317 bp, Homo Sapiens
ttccaaaccaggaatatatcactttattcatttccagattatgagtatgacacagcatatacatatatttagataatatataaaacatagaataaaccgcaggaagaaatattggtctggaattccttatgggccatctttaattctgtaagttcatggtaaaggtatctccccccacactggggcaggcggcggaataagctccagcgttcatgcgccactcacaggactgcttacccccactgcacttacaatgcagtcacagagttacggcatgttcaccggtgtccatgacaagcaacaccaagtataaataacagaactacagcagagcaaactaagataaatatgtttttgcatcgtcctccacatagtttccttttaaaaagaagagtcacatccaggggtctatccctcgagtcacaattccagttattgctttgccttgttctgaactgggagatacagtttgaactctgccggcagctcatcttctgagtagagtctgtctgagaagtaaacccgtcggatgcgacaatttgcatggatctgcactctgagggtctcgatgtaattggtgccgtatgctcgccgtgtgaagtctagcaagttgaactgaatctggttccagccgtcatccagccgcatgggcatggtgcagatgaagggtttgacccgggtggtgctctggtagttacttgcccgaaagcgacgacgcacattcttgtcatctagtacctgcacttcgaaggtaaaatacttcttcaggtttttgataatcatgacaaggaaaggaagtttaattcccagcgtcttcttggggtctgcagggcatgtgatatatgtggtgcttacatttgtcccttcaatctctagcaccagggactggatgtcattatcagtgattcttttgatgtggccattccgtacctttttgtcccagatttgcagaggcttgctgccgatgctgtagaggatggagaggaagccgctctggaacgtgtttttgaacatctcgccggcggccttctcctaagccgcccccggagccgacctaggccccggagtagatacaggcaccgagcgtcgagggcacagcagcaggccggccctgttccgaagaagggtggttgagctcctggcctccggatctgcagccactgatggccggactcggacgcggcaacgctaagtccgcgatcttcagctcctaagctgcgagctcagaacggaaaccacagcaactaccgtccgcgccgcgcccacgcgtccgcggacgcggggtcgacgatatcccgggaattccggaccggtcca

SEQ ID NO: 126801 - DNA, 481 bp, Homo Sapiens
  misc_feature (18)..(18): n is a, c, g, or t
cacatagtttccttttanaaagaagagtcacatcagggggtctatccctcgagtcacaattccagttattgctttgccttgttctgaactgggagatacagtttgaactctgccggcagctcatcttctgagtagagtctgtctgagaagtaaacccgtcggatgcgacaatttgcatggatctgcactctgagggtctcgatgtaattggtgccgtatgctcgccgtgtgaagtctagcaagttgaactgaatctggttccagccgtcatccagccgcatgggcatggtgcagatgaagggtttgacccggatggtgctctggtagttacttgcccgaaagcgacgacgcacattcttgtcatctagtacctgtgaaatacagagaagaagcatcacactagctctgtcttggaagaagcacacaaccttgtccagacaaggacctgaattcccacagcttgctttcccaaggctgagac

SEQ ID NO: 126802 - DNA, 1015 bp, Homo Sapiens
  misc_feature (723)..(723): n is a, c, g, or t
  misc_feature (903)..(903): n is a, c, g, or t
tttttttaactagttgaaagttttatttttataaaattaacataaaagattgtttaaaaatctgcagttatttacagcagtattgcacaagtaaagtggcaattaccctgtcaaaattcatcagtgcaaaacacaagtaagccagggaaactgcaatacaaatgctacatacgctgggtcctagaaaacaggttagtgatggatcagtatacagccagatcagtgctatttataagtgggtacctgatgagttctgatacagtaactagtggtcacagaatctggacataaaacataagagagcttctatagtctgaaattcccaaataaaagtagtcaagttacttaactgggagcttgaggatgcttcttacacacaatgctgtttagagtagaccccaactgatttagcgtcatctgtagacacgtttcccccaccccacgtgtacgtgagtggacacacacaggcaccaggctaaatcagcagggatggcagaaccacctgcatggaaccaccatgaagtctccttaaagctcccataagctttcacatcttgacacccagtccagtggggccccaacctcccctgaaggagatggagtatcagaaggagggcatcgacctgaagaagcaggctgaccaaatgcagtgaccgtatgggtggggcgtggggagggctgtacagttaattagctcctgaagacaagttagtccaacctcanagcacaggaagttgcacagcaggtggggggaaatcgagctactcacagttgtccacaaggggtagtggctgaggtggtcctaggcaggagcactgtcccaccatcacttgtcctgctggcctagcctgacactgcatgacactcggaatggcctctgcgatcttgctcaggcaatccaangagcgataatctacagtcacgttcgtgtgatgttcgcacatcaaaaacacggaaaatgtacggggcagatgagacatatgttgtacgcctcatggacgtcgatgtagacgag

SEQ ID NO: 126803 - DNA, 1716 bp, Homo Sapiens
  misc_feature (306)..(306): n is a, c, g, or t
ataagtctactatttcttttggtgaatagatgtagaaaagggggtggcgcagattgtcactccgctgtgctggataatgtttctaaggtgtcaggtcgcacaaaagattatcaccgaaaggctaaacacccccaaggggggaaaagtgtcatcgcacaaaagaactcataaattaggatctacatcctctgtcctcttcgtttgtgtttatccgctgtatgggaagtaatgtggtcaagtggtttgtagactggtgagaagtggggtgttcgccgcgtgtttattggaggcataatcgccctaaanagagcccgacaacgtgttgtttataatatgcgtaattttaaaaattgcgtcgggatgtttagccccgcagggtgttcgtggaaaagtttctttttggggaaatatccccagagagtggagaggactataggggcgggtgttcacgaccgaggtaatgttcggtggtgcgccgtttgaacgtgcccattgcagggcaggaggcctttctctacttaggtttggagaaaaatgttccccaacaattaataaagttagttccaaaggtttattttgaaagcgtgggaggcgtaggaggagtgatttatttacagcagcaaggactgattagaggtaggagcccaggctgatggaagggtcatgcggtagacagggtttcgcggcacccccaggggtaggtgagtggacgcacacaggctccagggtaaatcagcagggatggcagaacctcgtgcatggaaccaccaggaagtctccttaaagctcccataagctttcacatcttgacacccagtccagtgggggcgccaacctcccctggagggagatggattatcagaaaggagggcatcgaccttaagaaagcaggctggcccaaatgcagtgaccgtatgggtggggcgtggggagggcctgtacatttaattagctcctgaagacaagttagtccaacctcaaagcacaggaagttgcacagcaggtggggggaaaaacccagctactcacagttgtccacaaggggttagtggcctgaggtggtccttaggcaggagccacctgtcccacccattcacttgtcctgcgtggccctagccctgaacaactgcaatgcagcacctctggaagtggcacattttatttcttttctaaacgctgagttgtcagggataaattttcaatagaaaaatctttcccacctgctgataatactttggtttttttgttttcctaaagataaagcctggagtcagcaaaatttgcttgcatgataagctagttgctttggaacaaacagaaggttgctgggtatttcttggagtagaattttgtagcctgccagactgagtttctcactggcatcaaacacacacttcatcataagggcggcaaagcccaagaattgaaacccacttgactggaaataccaggacccgaaggtggagagccaccctggaggaccacgtggtctgcaatgagctctccagtcacccccgacaactctcaggagttaacttcatgggacggcaggggagtgggagacagggatgttaatacttttcagaaattaagacattaaataagcagaaaataaatatacaatatttctacaagttacagcattatgaaacagtaggacacatcacacagaaaaaagatctacaatatttacaatccttgattttaaaaagttga

SEQ ID NO: 126804 - DNA, 1020 bp, Homo Sapiens
  misc_feature (128)..(154): n is a, c, g, or t
  misc_feature (194)..(202): n is a, c, g, or t
  misc_feature (281)..(295): n is a, c, g, or t
  misc_feature (299)..(327): n is a, c, g, or t
  misc_feature (378)..(387): n is a, c, g, or t
  misc_feature (417)..(458): n is a, c, g, or t
  misc_feature (491)..(590): n is a, c, g, or t
  misc_feature (598)..(805): n is a, c, g, or t
ctccctcaaaaaaaggggggtttattcttggggggaaaaaaaggtgttcttcgtgggggcgggaagaaccacaaatcacgtgtggggcggggggttgcttcccccccggttttgtgtagtttaagaannnnnnnnnnnnnnnnnnnnnnnnnnnatcttttttgtttctccccgccctctgtttcctccccccnnnnnnnnnaaattattattgttgttggccagggtgggccaaggggtggggcgtggtcgccccacggggggaatttccacggggtctnnnnnnnnnnnnnnnttcnnnnnnnnnnnnnnnnnnnnnnnnnnnnnaaagagggcagaaaaagttccaccccctcattctcaaataaagtgccagcnnnnnnnnnncgttattttattttaagaaaccctttgggnnnnnnnnnnnnnnnnnnnnnnnnnnnnnnnnnnnnnnnnnnttggggttttttttaaacgccgcgggtcccccnnnnnnnnnnnnnnnnnnnnnnnnnnnnnnnnnnnnnnnnnnnnnnnnnnnnnnnnnnnnnnnnnnnnnnnnnnnnnnnnnnnnnnnnnnnnnnnnnnnnaaaaaaannnnnnnnnnnnnnnnnnnnnnnnnnnnnnnnnnnnnnnnnnnnnnnnnnnnnnnnnnnnnnnnnnnnnnnnnnnnnnnnnnnnnnnnnnnnnnnnnnnnnnnnnnnnnnnnnnnnnnnnnnnnnnnnnnnnnnnnnnnnnnnnnnnnnnnnnnnnnnnnnnnnnnnnnnnnnnnnnnnnnnnnnnnnnnnnnnnnnnnnnnnnnnnngcagtaacattcccctttaatagcctggtgggacctccagaggtggaggggtgggttgcctgggcccagctacccaggcccgttgcccacccactccacagcccagagtgggggctgaacaagcacccagcaggggggctagacaagccaattcatttcccatcgctgagtgggtcgggggaggcagcgccgaccttaatcacatggtgttaaat

SEQ ID NO: 126805 - DNA, 661 bp, Homo Sapiens
  misc_feature (191)..(209): n is a, c, g, or t
  misc_feature (273)..(306): n is a, c, g, or t
aatgattaataatgtttattataatgattgataattgttcatgatcatctctatatataattatgactattattattctattttctttattatactgaaacagtttgtgccttcagtctcttgccttgtcacctgcataatcctcagcccacaactgggactacaagtgcatgccaccaaacctgggtaannnnnnnnnnnnnnnnnnngtacagatgtggccttactatgttgctccggttagtctcgaactcctggcctcaagctatcctnnnnnnnnnnnnnnnnnnnnnnnnnnnnnnnnnngtgtgagccaatgcagccaccccaaaggtggtgttcaaagttgatttctcatccaactctgattctagactgaatagcacagaccctcaaatgtgaggtgctaactagcaatcctggaatccagagatatacccatgatggacagcccagagaaagccccagtgctggggcagaatccacctgctcaggtgcaagaggcctagccacttgggagtgttcatcacatgcacattatctgaggttaggtctgggaatgcctcagccaggtgtgcagagatgtgtatggggagcaggtgagagccatgggcacctggactccccagccaaagcttcaagacaagcttagtgcaaccaa

SEQ ID NO: 126806 - DNA, 1158 bp, Homo Sapiens
  misc_feature (195)..(213): n is a, c, g, or t
  misc_feature (696)..(696): n is a, c, g, or t
  misc_feature (1008)..(1008): n is a, c, g, or t
  misc_feature (1058)..(1059): n is a, c, g, or t
ttttaatgattaataatgtttattataatgattgataattgttcatgatcatctctatatataattatgactattattattctattttctttattatactgaaacagtttgtgccttcagtctcttgccttgtcacctgcataatcctcagcccacaactgggactacaagtgcatgccaccaaacctgggtaannnnnnnnnnnnnnnnnnngtacagatgtggccttactatgttgctccggttagtctcgaactcctggcctcaagctatcctcctgcctcagcctcctaaagtgctgagattacaggtgtgagccaatgcagccaccccaaaggtggtgttcaaagttgatttctcatccaactctgattctagactgaatagcacagaccctcaaatgtgaggtgctaactagcaatcctggaatccagagatatacccatgatggacagcccagagaaagccccagtgctggggcagaatccacctgctcaggtgcaagaggcctagccacttgggagtgttcatcacatgcacattatctgaggttaggtctgggaatgcctcagccaggtgtgcagagatgtgtatggggagcaggtgagagacatgggcacctggactccccagcaaaagcttcaagacaagcttagtgcaaccaatcccctgggctgttcataacaacccctctcntggtactgcaggagggaggtaggctcatatagaggcttcctggcagggccctacagctggagacagaggccacccacctaaggacctgcatcctgcaaggaagccaactcatgccctgaaacccaagtccttacccaaatggatcacatccccagatggatcacaaagccatggggctttcccatgtgctgtccctgcaggctctttctgaggggatcaggtacccccatcctcatcgtgggatctagggctttgtgtcaatgcacccttcctggaatgagcatatcgtgggaaaagaatctggggcaggangatcgggggaaacacaaaggggagacaggcaaaacaggaagggggggacnnaagaagggaaatggcaccggctggcgggatgctgacatcgtaccaacaggtggatctgtggaaaacaattgtcccacactactcaaagcgtgggaaagg

SEQ ID NO: 126807 - DNA, 742 bp, Homo Sapiens
gaccggcccctggttcgctcgggttatgggtacacgcttttctgggaagtgaggccaccatggctctggagaagtctcttgtccggctccttctgcttgtcctgatactgctggtgctgggctgggtccagccttccctgggcaaggaatcccgggccaagaaattccagcggcagcatatggactcagacagttcccccagcagcagctccacctactgtaaccaaatgatgaggcgccggaatatgacacaggggcggtgcaaaccagtgaacacctttgtgcacgagcccctggtagatgtccagaatgtctgtttccaggaaaaggtcacctgcaagaacgggcagggcaactgctacaagagcaactccagcatgcacatcacagactgccgcctgacaaacggctccaggtaccccaactgtgcataccggaccagcccgaaggagagacacatcattgtggcctgtgaagggagcccatatgtgccagtccacttcgatgcttctgtggaggactctacctaaggtcagagcagagagataccccactccctcaactcatcctctccacagtgcctcttccctcttccttccctgctgtgaaagaagtaaatacagttagggctcctattcaaacaaaacacatgcttcccttctacctagagtcccattcaactgcgtgaattttgggggtgaagaagtggattgtgaggtgggaccccaagttgaacacctcc

SEQ ID NO: 126808 - DNA, 1169 bp, Homo Sapiens
  misc_feature (153)..(153): n is a, c, g, or t
  misc_feature (181)..(197): n is a, c, g, or t
  misc_feature (199)..(200): n is a, c, g, or t
  misc_feature (202)..(209): n is a, c, g, or t
  misc_feature (1049)..(1083): n is a, c, g, or t
  misc_feature (1087)..(1127): n is a, c, g, or t
cccattcccaccggaagcgttggtaaaaaaaacgggacggggcccaaggggcccttaggcttattaaattcgggccttcccctataagggggggcccactttgttcccaaggaaaaagctggggttacggcgtaagcttggggccccctcgangggaatacttctagagccggcccgcccnnnnnnnnnnnnnnnnntnntnnnnnnnncaggggttttgcaactgcgttttattgaaagaaagagtggaggggttaacatggggcccacctcacaacccactcttcacccccaaaatcacgcagggatgggactcaggaaagggaagcatgtgtgtgttgaataggagccctaactgtagttacttctttcacagcagggaaggaagagggaagaggcagctgtggagaggatgaggttgagggaggtggggtatctcgctgctctgaccttaggtagagtcctccacagaagcatcaaagtggactggcacatatgggctcccttcacaggccacaatgatgtgtctctccttcgggctggtccggtatgcacagttggggtacctggagccgtttgtcaggcggcagtctgtgatgtgcatgctggagttgctcttgtagcagttgccctgcccgttcttgcaggtgaccttttcctggaaacagacattctggacatctaccaggggctcgtgcacaaaggtgttcactggtttgcaccgcccctgtgtcatattccggcgcctcatcatttggttacagtaggtggagctgctgctgggggaactgtctgagtccatatgctgccgctggaatttcttggcccgggattccttgcccagggaaggctggacccagcccagcaccagcagtatcaggacaagcagaaggagccggacaagagacttctccagagccatggtggcctcactttcccagaaaagcctggatctgcagcttggtgtctgagagagatggaaggccagtttctgcatccccggccgtaatggccgaattcccgggcatatgtccggtaccgtcgactgnnnnnnnnnnnnnnnnnnnnnnnnnnnnnnnnnnncggnnnnnnnnnnnnnnnnnnnnnnnnnnnnnnnnnnnnnnnnnacagagagtagcgccctataggatctatacagttggagagaa

SEQ ID NO: 126809 - DNA, 1074 bp, Homo Sapiens
  misc_feature (614)..(614): n is a, c, g, or t
  misc_feature (616)..(631): n is a, c, g, or t
  misc_feature (656)..(863): n is a, c, g, or t
  misc_feature (1009)..(1009): n is a, c, g, or t
tttagtatttcttgttatatttcataaacagtctaacaaaacactaacaaagttattttgcttattattctgatgctggaataatttggtcaaatattcataaatagttatcaactttaccaaggcacaaaaatcaagaatacatgctttctataaactcatttactactttaaagtttttaactgtttagcagttataggaaatttttttaatcgaaaagaaaactatttacatttcaaatacaaaagaaaattaaaattattcttgattgatctctaaaacccaaccacttagatgctcattattattattttctttcaccaatccagtatactctattcaacatgtgcatcctgtgtacttactaagcatttatttgcacaaggattttctgtgtcaggttaactttgctgtgtagattctgtgtagctacctgaattcgtccaagaaaaagtctcacattttttggaaaaccaatgctgctacactgtttccagatctgcctccaaagctgaacttgggtgttggtagctcttcgagaagttcaaatccttcactgaattcatttagcaactcttccttggtccaattacatgacgttattagaaaaaanannnnnnnnnnnnnnnnggggaggcctcgtgccgaattcttnnnnnnnnnnnnnnnnnnnnnnnnnnnnnnnnnnnnnnnnnnnnnnnnnnnnnnnnnnnnnnnnnnnnnnnnnnnnnnnnnnnnnnnnnnnnnnnnnnnnnnnnnnnnnnnnnnnnnnnnnnnnnnnnnnnnnnnnnnnnnnnnnnnnnnnnnnnnnnnnnnnnnnnnnnnnnnnnnnnnnnnnnnnnnnnnnnnnnnnnnnnnnnnnagctgcattatgatcgggcacgcgcggggagaggcggttgcgtattggcgtcttccgcttctcgctcatgatcgctgcgctcgtcgttcggtgcgggaacgtacactcatcaaggcggtatacgtatcacaaatcagggatacgangaagaaattgacaaaggcaccaaagcacgacgtaaaggcgcgtgtggcgtttccaagtccgcccc

SEQ ID NO: 126810 - DNA, 528 bp, Homo Sapiens
tttcaactaaataaaacaatttattttcactgaaaaataacctcagcaatgagtttaataataccaatcccactcctttgatacaaaataagagttgaaagcagcttgaagaggagtgactattgagatcagcgcatgtgaagccacacagctttgtaactgactgtctagcaccattgaggtacgaaagcatgccagctgggccagcattgtgcaccacaaagtatgggttgtgagcctaagtcctgaacacaaaccctgctttccaagttggcaggtgctgaaaacacagcaaatgtcacgcttgcaactcactggagggaagagttctggtaaagtaagtaagcatttatttgcacaaggattttctgtgtcaggttaactttgctgtgtagattctgtgtagctacctgaattcgtccaagaaaaagtctcacattttttggaaaaccaatgctgctacactgtttccagatctgcctccaaagctgaacttgggtgttggtagctcttcgagaagttcaaatc

SEQ ID NO: 126811 - DNA, 867 bp, Homo Sapiens
gagtgttttcagtagaggcggaagaataaaaagttcttcccagtttggagttgattaaaaacctgtccaaaaggtaaacaagccagagttaggaacctgagaaataaatttaacgtttggaccaaagtggaccaccgcagaagaacacgttttgttcaatcctcaagataaatcccagtgtgtcccgaatcactctacagaaaacccacagtggattcttttccatgaagatgaataatatgccagggaacaccaagaccgtccaagttattttttaatgtgaacaatatatttacagtaaaatattcaataatactttttacagcttacttaaatagaaacatgctttttctaatccataaataacactaatcattatccattcaactgcatttattaagtacttatgtctcatgcactgtgccagggatgcaaagatgaatatgatatggtccttgctgtagaagtgcccacaaccaagctaaagaagaaaacacgtaacattttctttcttacataatgaggccggttttatacaaatggtactgatctgctctttcctagtaaagtggttcccaaatcctgatcctatgggtcaacagatcaaaatgtttaacagttgaaataaaatgagatttggggtttcgtttttttactcagaaaaataaattaatgaataagatttcctctattaaagttttttcttggtttttaaaaaagtgacttgcacatatacaaccttttcattagtaaaattgcttagttcatgcaatcaaattaattatataagtatttcatggcattctccaagctctaccccggccgtaatggccgaattcccgggcatatgtccggtaccgtcgactg

SEQ ID NO: 126812 - DNA, 2343 bp, Homo Sapiens
  misc_feature (390)..(390): n is a, c, g, or t
ttaattatttgcaagcccgcgtgctaatttcgttacgtgatctacatggactctgagttggctgctgtgtggtgtggttcgcatgttcgtccctattttgcacggggttatatccgtggcatcatttcataggtcgtgtcagcttcaaaaaatattgctctctccttatagtaggtcattcccacagtggacgagggtccgccgtatgttttgtttctcgaggccagagtggttcttaacgtgacgggggatatcggtgagtcccctgaccttgggcgcgttaggagcccccagagtgacaagtaaacgcggtttgcgggagggcttgtctccttgagggatggcgtgggtaggcccggcctctcggaggtgttcgtttcgagtgggggngatattaaactatgtatatatttaacacacacatcttaaaaatagctccagatgacagaacagtattgcatacacaggtccatacatgggaccctccaagtcccaggcacccttccctgatcactgtgtcctagaaatgatttcctgtgtcagtgacacagaggaactgtccaagcaagcctccagtcccaagcaagcctccaggccctgagtgttctgatgcctgaagggtagtcataggtcccgaggtggagtcgggggtggagtgctggggtcccataggatgtcctcatatgggcttagaactgggcccgacagccatccttgagccccagtctgctccagcagggctttgagcaagcccacagtgagagggggctctgctccaggctcagggaatggggttgggggccccacctcatctgggaggtatgtcctcagtagaagcaggagctcagctggagccagttctggtgggcacaggcggcaaaggaggggggaggtgagcatcaagccggcggtgctgggcaaactcggccagcagcagtttgaagatttcacttcgaagcaggggactggaggggccgagggccaggccagcatccagagcccgatcccattgttccttttgcaccagctgcccgacagcttggagcacagctttaggccgcccactgctcaagagcagctctagctccagagcctcaggcctggtcccctcctcacctagcactgccagagctcggcgatacaggggcagtcctgggccccctgccccccagcccggcccgccctgctgctgtgccaagctccacaaagggtggcagccatcgaggctccagctggcacagacactggcacaggagttcaaaggggggcagtattccattggggggttcctttccagcggttattccccctaacactttcttccacacatcagggggtgcttgggacctcagcttgccattcccatctagctggagctgcagggccctgagggtggcaccccaggctgctgtaggaagggcttggaaaacggtgttgagctgggctagctggtctcctatcaactcagtcctcagcaggcgtgccacttcctgctccgccagctcagtccaaccagcctcctcatcatccccagccaccagctgggccttcagctgttctaagcctcggtaatcccgaagctcggtcctcaacatggtcagcagtgcagatgggggcaggtggccctggaggatggaggccagagcctgaggtgcccggaatgtgctgctgtgtctcagttcttctggagtgagctgggcaccccgcaggctccgccgctggtagtacccgcaggcctcctcaaacaccagatccttggctgaaggcaactcaacaccctgtggggcttcccagcccacacaaaacagacccaaggctgaaagcagacgaagattccctcgggtctccagctcttcctcatcctccatgccgggggctggcggttctagcagatgtaccctgtctgtacttaggaccttcctctccagcagctgcccactgcccatgtccagcagttccaatgtggagcccagcacacaggccagagtgccctgaaatgtgcactagggctgcagacccccacagggcctacaggtgcctcctgcagggtgcccacagcccgcagtaccaccgtgggactgcaataggctcacagtgcccccgaagtcaagcaacagcaggccctggggagttggggcccaggtgtgtacagccagtggctccctgggggacagcaacaccaggaaggcctcggagcagggtcacggaagtcccatgtgtcccctcgtccaggattcagactcttactgtaggagagaccaagtccgtggtcctcgtgccgattaaacagcccaggcctcgtacctagcctattgtgttttgcggggttgggggtgggtggtg

SEQ ID NO: 126813 - DNA, 498 bp, Homo Sapiens
tggggagttggggcccaggtgtgtacagccagtggctccctgggggacagcaacccaggaaggcctcggagcagggtccggaagtcccatgtgtcccctcgtccaggattcagactcttactgtaggagagaccaagccgtggggcagccaccatcactttgcccttgcctgggctccagatgagtagaacgtgggccacgccaggccaggtggtggcagtgggcaccaggaagagttgtctgcaggaggccagcagcccgaaggcagggcagtggtgcagcaggacgtgtgtgcggcccaggctggtgctagcttccccgctgggctccagagtccggacgcacacacagtggctgaaagcggctgctggcgaccctgacgggccctcggcccgggcctgccgctcctcgcaccacaccaggcggcctcggagcgccgccactgccacaacgcgggctcccccgcccggacacagctcggtgctctgcagcggccgc

SEQ ID NO: 126814 - DNA, 752 bp, Homo Sapiens
  misc_feature (673)..(673): n is a, c, g, or t
ttgcttttcaactaaaatggttttattgagatgttttggttggaggagatactttttctggcaacatttctgactcaaggtccctctgggccccagctcttcccatgagacagtcacaacactgtttaatcagctctgcagaggccagccctggagcagaggaggattcagggccatggaggggacctactctgccctgttctggtcactacttctctagactctcatgcactattgtctgtagcaagtgacatttccactggaagcacataaagatggcgacagcctcatttcttcctgagtgaactgaagcccaaagaaaggggaggtcccaccaaaggggaagagagccagggccccacccaacaaggatgctgaaataaactacatgtaatgctttctaggagacaacacagaaatctctactctgaaatccagaatgttaaatatggctccccctctataagttaactgtacaagcttatcaatcatttaaaaccccagcaaccaacaatagcaattaggaatccaaattcatagcacaaaagaacacagataccagtgttggacagtggttttgttatggggactgggtgacagcttatcctaaatcctgcgcatccgtccataccaggagccgggttacccttggtaccaggtgcctgccccacanagcctgggtcgggagagggcttggtgacgggcctgcagctccccgtgagtactgtcttttcccaggctgtgcacgcatg

SEQ ID NO: 126815 - DNA, 413 bp, Homo Sapiens
ttcaacttaaaaagttatttattaaacaagttaaacacaactaaaagtatatttagaggtccaagattcaagtatttttgtcaaactttctaatgataaggggaatgataaaaattgaacagatataaaaaatattcttaaacaaatattaaagcacatggaaaattcagaaataaaaacacaccaccatataaagaaatcaaaatatttcatatgtttttaaatgcttatggtatgagagccaaattgtctatttccaggttaataaacaatatataagctcacctttttaaaggtatcatactttgtgtcatatagaaataattttggaaacagtatgtgttgggtgtgtaaattgtccacattaagcaaaacatattttacatatgaatattttcatttatacttactgg

SEQ ID NO: 126816 - DNA, 691 bp, Homo Sapiens
aattaccatgcttcacaatgttaagttatatggggagcaacagcaaacaggtgctaatttgttttggatatagtataagcagtgtctgtgttttgaaagaatagaacacagtttgtagtgccactgttgttttgggggggcttttttcttttcggaaatcttaaaccttaagatactaaggacgttgttttggttgtactttggaattcttagtcacaaaatatattttgtttacaaaaatttctgtaaaacaggttataacagtgtttaaagtctcagtttcttgcttggggaacttgtgtccctaatgtgtttagattgctagattgctaaggagctgatactttgacagtgtttttagacctgtgttactaaaaaaaagatgaatgtcctgaaaagggtgttgggagggtggttcaacaaagaaacaaagatgttatggtgtttagatttatggttgttaaaaatgtcatctcaagtcaagtcactggtctgtttgcatttgatacatttttgtactaactagcattgtaaaattatttcatgattagaaattacctgtggatatttgtataaaagtgtgaaataaattttttataaaagtgttcattgtttcgtaacacagcattgtatatgtgaagcaaactctaaaattataaatgacaacctgaattatctatttcatcaaacc

SEQ ID NO: 126817 - DNA, 452 bp, Homo Sapiens
gtttccactgcaacacacactggcccaggaggtggccacctggcctccatgctcagttaagttcctctactgacgcattgtgtggcactgggcagaggcttcccttctccaccccagtggcttcctcaccagggctgtgtgtggtgcagtgtgtgagctggccatgactctgaaagggaaaatggggcccaaggcagccatgagacccgatagccaagaccacctgaaattatgccatgtaatatcagcagtccccactccccatgtctgcaagttccaacctgggaattcccagctgcactcatggagttggatgaaaaggaccccagggcttaaagggaaggagacatctcagctccagctcaaatgtacgagaagtggaaaactggaagccaagggccctagtttgtttgctgaatccttcactggccagcacaatgtattgttgcagt

SEQ ID NO: 126818 - DNA, 289 bp, Homo Sapiens
gtaatgtcaatcagtaatctttatttttcttcattagtggttgtgtcatattgcttaaaaaaatttttaaggatgaaaaaagttcagtcatatgctgtaacaattgatatacacattcaaaaacaatttaaatgaaggttttacatattattgtgatatcagtatgtggggcaggtgacatatatggcatgttccagtgagcagatactattagtatacttccaatagggagaatggcccaacagaacttgggagatgttttctcccagactacatattacattataag

SEQ ID NO: 126819 - DNA, 1539 bp, Homo Sapiens
ttcaagtgtcaaagaaatcatctttgtttatttagatgacaccaaacactacacatttacactcacactgcttccaggacccaagggtttcacagaccatttgccttacttggttctttcctctcctctttccagtgatttctagaataccctttcaaaggaccacatgaatatacgaactgtaaaattcaactttaatcttttgcgaaatgttttatttactgcttaaaatctaggtgggtggatatattcatgtatgcatatattgatagattaatacaaacataagtatgtatttaaatttaaggataagtaaagtgagagtacaacagccccattcttagttaaaaagaaaagaaaaagacaagagcaagccactgccaccacaggtaccagcacttaaatttgtcagcaggctgaccaaagagtggcctgtctgttggcattcatcggacatggcagctcccttcagctctccagtgagtttcaagttcagagcactttcagtccttgtcttgtttatctattactgaagggtttctaggaaggtttagcagtgcttcaattttcttagcatcattctcaggttcatcttcctgtaaactactttcaattttctcagggaggtgctcagtaacttgtagtctgcctttccactcttccagttttagctcatggagtgcctttcgatccttctgttttctttcctgaacagtctcaccagagtacttctgaaatgccatcagcaggcctcctacaggagtgcccagcaaggctccaattatgccaccagccaccaggccacgcaggcctacgtttatcctaaaaagacttcccgtgacagctcctgcaattacaaaatggcttaaggcatctttatttcggtatacattcagactagtgttcactgtgttgaatatagtcacaaacactgcagttctccaaccccagcgccagccataacgaatgaagcctcgtgtggcagcacgatgtgcagattgcacagcatcaaaccggttatgataaatttctgcctggctctgctcaatgtattgttgtttagcatgaataaaagctggtattcccccatacacccagccaatgatgcctgctgtagctgccgtcttacagatattagcaaggtcctttgaaattctctgctgttcatctttgccaaacagctcccggaggcggtcccatccagattccggggtaatagggctctgggacgtagggaagccgcttctgacgctcctcaaggacttccgaatcggcagtcacagcttcggcagcaaagactcggggaaataggcacaatgctctacagagaaagctcccgcggtgccggtggcggcacctccatggccttctctcgacctacggacaaacttgagcgctcaggacttcgagtcctcgcggacgtgccgcgggagagcgtaactgtacgaggtgagaatccgtgcatttgacccaggttaaccctctgccagagggctcgacacccacaccttcagtccccggcctcgctttggagtcccc

SEQ ID NO: 126820 - DNA, 1092 bp, Homo Sapiens
cggccgccgcggcgcggtgcagcgcagcggcgagaaggagtgcgttatcgtcttgcgctactgctgaatgtccgtcccggaggaggaggagaggcttttgccgctgacccagagatggccccgagcgagcaaattcctactgtccggctgcgcggctaccgtggccgagctaggtacccggctgcccacgcctgggcctcccgggccagtggcacgcgccgcgctgggggagggagcgcgggcggcttcgcgcccggcagtgcgcatcggagaggtcgccccttccatgcccgcctggcagaggtggcggtggaggccaggcccgcggtgggaggaggagggattgaggtctccacggccttttccttctaatctcttctaatgcttcccttaggcatgtgctgtggtgcttgaatgttgtactttaagaagcttcgcgagctgtcattcctctgtaggaatcattttccttttcatgaggatgacctttttaaaaacgtaatctgttttccatccttactgagatcatctctgtggtttatagtcttacacagccacactgtcattatcttgtgggtccaagttgtggacctaccttgtgggacttccgttattaacctgccactcacagagcatcgactacttgacctctttgagtgtaattcatctatactgtttaccttgcaggattctgagaagtcaataatatatgattgctaaacccaaggcaggacacccattagttgcgacatttttataattcctacaataccagggactgtggatatatatttgaaaagacccagttctgaccttcttacaggctgctggggagacagagaaagacaattataatgtgctacttgttataatgaagatattattaggtgtcataaaagcatagaagagcagttacatctgcctacatgagtaagaaaaaactttaagaggccatctagagtggaatgatgatgcccttgaatgagcaagtagcgtttattccaaggattttgtgagtagtatactcatgtgtttcctgtgaagccttaactgtgtattttaagattacccttacattttcttgcctgttac

SEQ ID NO: 126821 - DNA, 1539 bp, Homo Sapiens
tttcacgtttcatttttattgtgctgggggtcaggcagcagcccccactgaggccccacccagcctccgggctgcctggcctgtgccatgggtcccaggctccagcagggagctcgtaccttccctcagctgagggcccacctggccttgggatgccgttggggtagccagggtgggggtagccaggggtggattcacagagaagatcccagcccatcccatgccagggtctggggagcctcccgaggaaggggaggaggaagaggaggaaggccctgcctggccttccgctcagtcaccccgaggtggcttctggacccccagcatgttgggcaggggcatgggggctgcagggcggcgtgaggggctcagtccagcctggggcgctgggcagtcacgagtctttcttgcaggagcaggaccccagctgctcctccaggaaggaaatctgctcgctcagggagtcgatgcggccgagctgctggaaggagtgcaccaggaggctgccggggtccgggagcccatgctccagtgcctgcgaggccaggctgtgcagtggggccagcaccagctgcagcttctcctccagcaggtccaccctggactgcagcctctgcacttcttccttcattgcactgtccactcctgtcgggttgggggccaccctggggggccctcccttgggcacacagagtgtaccgtctgcagacaggctgtgcccctcccaacactggcaccagtaactgccggcggtgttgacgcagcgctggggacagccgcccctcctagcactgcattcatccacatctgactggcaagtgtcaccccgccatcctgcagggcagcggcagcggccaggctggacacagctccctccgttccggcatggcggctggcatattgctgctccacaggccccaggaagcccgctggtcctcttccagccggggcagcacgcgtagcgaggcctggcaggggccagcccagggctgcggcggtaggcggtcctatagatggttcggtaggtgctgcaggcccggtgcccgtcgcaggtggtgaggaagggctggtacacacgctgcacgaacgactcggagacagggtccccgtgagcccggacagcacacaccctacggccgggccggtaggcgtgctctgtgccgcccactgccaacaccagaagccacatcagcagcacctcctgagagcccctcatggcctgtgcctccaggcggggtggccttctcctctgggtggcctggcggaggagaatcagtcatcccccggacaggggcaggagctgctcctccgggtggtgggggccacctgtgcctccccggtcctgggggctgctgatgctgctggagcccaggcgtggccatggtggccgctgctgtgtcctgggactggagatggaccctagcccttgctggggcctcaggcccactggccgcctggaggcacctcctgaggcccacctgcctggcctgtccacaggagcctcccttgcagccgtgcagggccagcttgatcccggga

SEQ ID NO: 126822 - DNA, 979 bp, Homo Sapiens
cggacccaacccagccggagcagctgccagggccaacacaaccacttcccccaacagtccacctggacgcagctcgcacgtctgcctgcaggcacgccaacaccgtcggttggggccaccctgggggccctcctgggcaacacagagtgtacccgtctgcaaacaggctgggcccctcccaacactggcaccagtagctgccgcggtgttaacgcagcgctggggacagccgcccctcctagcctgcagtcatccacatctgactggcaagtgtcaccccgccatcctgcaggcagcgcagcggccaggctggacacagctccctccgttccggcatggcgctggcatattgctgctccacaggccccaggaagcccgctggtcctcttccagccggggcagcacgcgtagcgaggcctggcaggggccagcccagggctgcggcggtaggcggtcctatagatggttcggtaggtgctgcaggcccggtgcccgtcgcaggtggtgaggaaagggctgtacacacgctgcacgaacgactcggagacagggtccccgtgagcccggacagcacacaccctacggccgggccggtaggcgtgctctgtgccgcccactgccaacaccagaagccacatcagcagcacctcctgagagcccctcatggcctgtgcctccaggcggggtggccttctcctctgggtggcctggcggaggagaatcagtcatcccccggacaggggcaggagctgctcctccgggtggtgggggccacctgtgcctccccggtcctgggggctgctgatgctgctggagcccaggcgtggccatggtggccgctgctgtgtcctgggactggagatggaccctagcccttgctggggcctcaggcccactggccgcctggaggcacctcctgaggcccacctgcctggcctgtccacaggagcctcccttgcagccgtgcagggccagcttg

SEQ ID NO: 126823 - DNA, 740 bp, Homo Sapiens
  misc_feature (700)..(700): n is a, c, g, or t
aagggaaagtttccttttttgaaggcagaggaggaggatggaaaaggtagggagggagtagggggacaggaaagaaaaatcaatctacaatccagtggtgcatcccaaatctgtcactctgtacaggtggttccacgctcccattccagagtgcacgggcctctcggtctgcccaggttgagtgggcctgtcataggaacagcagcttggccactgcccacccaggtcactgagcttcagttggaagtggcagcaatgggcttatccagttcaaggtcaatgctggagcttgtgggatgtaggctgctatagcaagacttgcatactcgactgggttcaaagagctgctggctgggaactggaaccttctggttacaacaactggagcagaatacgttcccacaattcctgcagtggtgcttcctgctggcaagccagaaggcactgtcgcacgcatagcagtgggcggccaggtggtcaggaagccaacgggtcatctctgtgtcctgtttatccacctgctcccagctggcttcagagaaaatctctgtgctgcagcgagacaacagttctggtccagattgctttccgagtcggggattgaagtcacctcatccccaaagtctccattaaagtgtagggagctggtcaggtactggctctccaggcgactcttcagctcctggacttgtttcttcanagtttctacttcctgctggtggcctgactcaatctgacgc

SEQ ID NO: 126824 - DNA, 921 bp, Homo Sapiens
  misc_feature (767)..(810): n is a, c, g, or t
acggatagaacctttattgctgaacataaaacacctgcctgggaggcctggccagtggcctcttcactgggccgaaaacctgggtggggagggctgggggctgcagggccactgttgccaatggcagtcggggacaggcctggaggccagccctgcctggcaccctggaaggtggtggggtggggacaggggcctggcttgggggaggaagaccaggccctgcgcacacgctggtcatggaaggttgagggccaggcaggcagagcagtgtccctgtggcccccaggtgaggcttggtggcgggcggccctcctgtggggtagagtggtggacagagcctctttcctctccaaggatgagggtctgaggtaggtgcaggccggtccctggggtcctcacagacgtggtttgatgtgcagaggcttccctgagtccttggtgaggggggccctaggggcccggaccctgggctgggctcctgtgctcggcgaggactgcagggagatgaaggaaggcagcttgcagagcctgttggagcacgctgctgctaaggcagcctccctaaaaagaaggtggcctccggctttagggaaccggaaacggatttgtccggaggcacccaccccgtatcccccctcccacgattaaccaaacccctgcatccccaatgacccagtcccgagagtaccccccacgcgctacccacaaaagccactgacacttggactccccacgcccccaacgaaaccttacaaaccctctctttnnnnnnnnnnnnnnnnnnnnnnnnnnnnnnnnnnnnnnnnnnnngcgtattccccccactcccgcccatctctggcaccccgcaacacgcaccgagagtatcgaaccatcacttttgtcgagcccaccgtcacccagccccaatctaacccgccc

SEQ ID NO: 126825 - DNA, 1258 bp, Homo Sapiens
  misc_feature (390)..(405): n is a, c, g, or t
  misc_feature (1100)..(1100): n is a, c, g, or t
  misc_feature (1223)..(1223): n is a, c, g, or t
ggtaactcattttagttttattttgataaagaacttgaggctgtgaaacttgcccacagtcatacagctagcaagtgatgaagccaaactaatacaatgtgctagattttcttctagatgaactaaaaaatgaggttggctgaaactaacatttccccagtgctgaaaaaaacgatgaaggcagcaaataacttgttcatctcagactgtgggtatgcagttttaacaatatcaactgaaaaccagccttcttcccattcagagcttaaataattgcaacactgttaccatccatcaaataagagactcatcagatactcagtttgaagcactgttttaaaacaacttctcaaatttatttaactcatgtggttaacatggtattgtatnnnnnnnnnnnnnnnncaccactcaatacttactaagccttgcagacagctcagagttgaggcagcatattgggcatagagatcataggatttgtattatcccttgcaagatggaactccaaccaacaccagaattttccaattcaaattcagttttagtcgagaccccagcataatttttagaaaaaagattggattgttgcttttcttttaattttccattcctatttagacaaatgaccagaggcaatgacaaaagtaactgtttaaaagggatttctctccagaagttttttctaaaggtttaagtccaggctttccatccttctctccatcctttttcattttaaaaagaagggttttggaatatgtcaacctttactcagcttgctatacaaagccactgtttagtcctagacataatgccaggactcatctcccaaacttctggtcttaatcaagttcatgcttggttgctaaagaagctcatgttaatcccaaagtcagcacaatcccaaccttaaaaagcagacagctgattgcatcacttacgacatacaccatcttgaggcaaaagaagccagtcagacaccccttgtctgctacgtgtgagacacatcagcagttgagcctgaccccttccgcagagctcactgtgcaaaatcaccagcacaccactgcaatccactgagctcaccgcctgtccagccntaatggaagtcacttgaaggttatcattgtaatagatgattttccataagtaactaataaaaatgttttctttgatgtttagacctactaacaattcagtctctccctctccatcctctcttngggagcctgtacttttaagcaaatagggaagctaa

SEQ ID NO: 126826 - DNA, 565 bp, Homo Sapiens
gcaagctctcttagcttgtgcattcagaccagacatcacatgtaaatatttatacacagggaggtgggaggggagggccacacgatgcgttgctgcgccccccgccttcctctcactcctcttctaagaagcgcggagtgttctgccttttcacctacgcagccccagcccggcccccctggggaccctagagagggtgtcctttctgtttatccttctctttgctccagatggctgcgctctctaggggcgcgatgtgtgtgtggtggagccgggtccccttcagcaaggagggcggcccactgctctgctggtgctggaaggaggaccccgggtagtggccgatgatctgaacaaactccagctccgtgatctccatgctctggaacaaagagcgtttgcagttgcacgtgcaggagacattggggtcccgaagctggagggtgcaggggccctggtaaggtgggggcttctccccgtctgacagcgagatggtgggtggcaggtcgatcttgtgcctgaggtactgatagggtgcctggaaacggtggaagcgcctccgctg

SEQ ID NO: 126827 - DNA, 1395 bp, Homo Sapiens
  misc_feature (1059)..(1111): n is a, c, g, or t
tttgcaagctctcttagcttgtgcattcagaccagacatcacatgtaaatatttatacacagggaggtgggaggggagggccacacgatgcgttgctgcgccccccgccttcctctcactcctcttctaagaagcgcggagtgttctgccttttcacctacgcagccccagcccggcccccctggggaccctagagagggtgtcctttctgtttatccttctctttgctccagatggctgcgctctctaggggcgcgatgtgtgtgtggtggagccgggtcccctccagcaaggagggcggcccactgctctgctggtgctggaaggaggaccccgggtagtggccgatgacctcgctgtaggtgggcggcggcccctccatgcgcccgccgctgccgtagcacgtggcgctgatgcccgagttactgctgggggggcaggggccgcccagcctggcactatccatcaggtcactgtcgaagatggttctgtttgggggtgcgcgcaccgactcccggttcagttccagctgctgctcggggtcccgaagctggagggtgcaggggccctggtagggtgggggctcctccccgtctgacagcgagatggtgggcggcaggtcgatctcgtgctgcaggtacggataggtgggctggaagcggtggaagcgctcccgctgggcgaagggcggcacggccaggcggtcggtgggccgaggcggggcgtagacctgcggctctgggattccgttgcctgacactgtgctctccgagggccacaggcatccttctgaggacagggcatcttctctcctccgcccctggctgtgccggctgatgaaggaccgtgcagacagcttgtagtggctcagcaggcacgtgatcaccaccaccatcaccatcatcaccaccacgatgatgatgatctgaacaaactccagctccgtgatctccatgctctggaacaaagagcgtttgcagttgcacgtgcaggagacattgggctgcccggcggcggcggcggcggtgctgttgacccccatcaagcggtgcatggacnnnnnnnnnnnnnnnnnnnnnnnnnnnnnnnnnnnnnnnnnnnnnnnnnnnnntccggccggcgcccggagctggggccccgcatgcaggaggcgcgcggcgggggaggcgcgccccggctcgccgggctcgggtcgccgccaagttcccggggcgccgcggggctcagtgcgcgggaccgcgctccgctgcgcccccccggcctcccctcggcagccccgggggcgtcggcagtgcccgcgggtggcgtccggaaaatgggctggcagcggggcgcgcgctgccgccggggctgagcctctgccgctagctttcccgagacgagcgcctccgccgc

SEQ ID NO: 126828 - DNA, 1288 bp, Homo Sapiens
cgaaccttgtggttttttatttgacggggcagatggagtcagtacacaataaataacatgaatataggaactgcgccgtatcgcggctggcggggtggggcaagacattggccagacctttagtctgcagcaggacagaaggacagccggacccctgatcttgggcaactggcgacccgcggctgggaaccggggctaactcttccctcagagttccacgcgcgcatcgcggtaggcccggtccagagcccactcgggctgtgagtcggtgcccccttctcgggcaaggcgggccatctcctgttggaacagcgcttgccgcgctcggctggggtccacattaatccagttgttggcaatccacttggtgccgcgcgtgaccaggcagcccccgtgcagcgagtagtcgtctacgtcacccacccaaccttgcccatcaggcaggtagttgtaccagaagactgctgtgccctgttggggcttgacacgcaggtttcccttgtcacagtgcctccgtgtgtcacggaggtccacgtcatcctgaatcagactcatttcatcgtaggttctgttatctgctacagggaaaacagtctcgcccccaccagtgacgttgttcaaataaaacagcactgtcatgtagctgtaaggcagggggggcactgagcaggtccccagttgtggatgctcccaggggcttacctgtgggcaggataagctgcccaggttcctgttgccagggaccaggacagactaggatgggagacaatagggcaggccagtgccaaaatgtccctagcccctccttccccgaaacccagtctcttactgtgagttgcaatggttttttggccaagatcacaggtgcacttagttaaatgccatggccctgagcaagggcctggcagggaaaggtaggctagcagaagcaacagggcgcgctgaagggctccttggggatgggaaggggctgggccagaacagccacctgaagaggaaagaactggcttgacaggggagggaggcacagcttcagcttctctaagtggaatcaagatcaacacctggaggaatgggcaggacaagctaggggcccagccttgccccttgcttcagaactcagggggcaagttttggtgtctgtgggtacatcagtctgtgttgactccagtggtcacgatgaccagtagccacccctttccagccattgggtaaacaacttgtggggagaggtgagggcatcactaaccgggataacccagtgatctcctggccccatgccagggca

SEQ ID NO: 126829 - DNA, 2062 bp, Homo Sapiens
tcgaaccttgtggttttttatttgacggggcagatggagtcagtacacaataaataacatgaatataggaactgcgccgtatcgcggctggcggggtggggcaagacattggccagacctttagtctgcagcaggacagaaggacagccggacccctgatcttgggcaactggcgacccgcggctgggaaccggggctaactcttccctcagagttccacgcgcgcatcgcggtaggcccggtccagagcccactcgggctgtgagtcggtgcccccttctcgggcaaggcgggccatctcctgttggaacagcgcttgccgcgctcggctggggtccacattaatccagttgttggcaatccacttggtgccgcgcgtgaccaggcagcccccgtgcagcgagtagtcgtctacgtcacccacccaaccttgcccatcaggcaggtagttgtaccagaagactgctgtgccctgttggggcttgacacgcaggtttcccttgtcacagtgcctccgtgtgtcacggaggtccacgtcatcctgaatcagactcatttcatcgtaggttctgttatctgctacagggaaaacagtctcgcccccaccagtgacgttgttcaaataaaacagcactgtcatgtagcggcaggaggtctcgaagggtacagactcgttggctaccagcttggtatgggagcagatggtctctgggtacacaggcccactgtccacgtgggcatggtagtggcccccctcaccatatcgaacaacctgcagcggctcgctgagctccacgatctcaggcgacaggcgagtgaggcgcagcaccctctggcggatggcacgcatgatgtggtgggcaccctcaccctggtagagccaggtatggtggctgttccgcaccagctcactggactctgccttgtggctcctcatgtacttgtggaagtcccgaaggtccatgttggagaactcctgcagactcagcactccgtcaccatcagggtcagccttgatcgcggcgtacatctcctgaatgctctctggagtcatccaccatccatttcccaggcgagtctgggccagaacctcacggagctgaaggtgcccatcacggttctggtccagcagccggaagaggtccagctggctgacctgcatagtgctcattgcctcttcatactcttcagtaggcaggatctggctgcgctgtaaccccttcatctgcgccagatggatgatgagccgacactcttcatcagtcaggaagccggggatttcgaagagcagcggcttgaggctgagggttcggatgaagtgatccctgtcggtgaccagctggaccttacgctcgtgccccaccttgatgccctccagccgggtgaggggacctaaggtgggctcgggcccggggccctgggcacggtgttggggcccgggatcgctgctttcgtcgccgttgctgtagtgcacgaagagcagcagcgccagcacgttacccaggtacaggtgcacgaacaccatcagcaccaggaagtaggcgcgcgagcagatgccgcggggcttgcacagcggacgcaccggtgcgtcctcgccgtcgcccagcccggccgccgcctgagcctggcagtggtctggcggcgcccactgcggcctcgaggcctcctcggccgccgcggtctcaggccgctggcctgtcaccgccgctgccgccatggcacccaggtcgcgcgcgcgcccaggggaggggccgcgggggtgcccgcgctgcgcagtcgcccggacaacggccgccaggcccgcgagcgccgcggtcactaggagacggtgcctgggggtgctgagcccgcccggagccgcctgcgtccgcgccgggctcggccttcctgcgccttgagccccagcccacgctggggcttctcttcccaagctgggttgccgtcgggcagagctgtacactctccaagtcagaagccaaggtcccaagcgtagacgcggacaagagcggcaccattaaggcatacattagtgggagcttcttcggtgcgtgcgtgatgacgc

SEQ ID NO: 126830 - DNA, 2255 bp, Homo Sapiens
  misc_feature (132)..(191): n is a, c, g, or t
  misc_feature (1068)..(1102): n is a, c, g, or t
  misc_feature (1215)..(1227): n is a, c, g, or t
  misc_feature (1623)..(1634): n is a, c, g, or t
ccatcaactaaatgtttcttgcttggtcagcactctcagttatagtagcagtcctcgtaaactttatgtcagcctgaggattgtgtatctggtgaaatctgggccctaacacatgccagtttctaaagggtnnnnnnnnnnnnnnnnnnnnnnnnnnnnnnnnnnnnnnnnnnnnnnnnnnnnnnnnnnnntccaattggcttagaggtgggcattctagcatatggttaattattgcatctaaatatatcattttagaaccttttcatgtaatctcattttacctaatctgttatttggccacttaagaattaaaataaatgtatcaaagacaatggtggtcattgttgttatgttttttacctgtgagactattttagacaactaaattcaatgaagagtatgtcaaatggtaaaattgtgttaattttcttaatctgattctattagattaccagcaaggaattaaagcggtacttcatggggctgttaccatcttgaaatgtattccaattgtggtcaaagagaacagactgatgcactgtatatgcagaactgagtaaagaagctgaaatgtcttttaaaaaaacattgccatgaatttatttaataaaagggcatatttatttatgtttacaaacaagtttcaaaaacaaaaggaaaacatgtatgcttctacttattaacctttttcaaaatgccaacagccctcatgctgtgtgaaggtctctaaagattagaaaaatcaatacagttcactcacagttcaccaagacatcactaaactaacatgtttagacaaaaacaaaaaagactaaggttctcttgtagtttgatagtctgatttaatttgatttgcctgaaataacaaaagcatttcaagcatctttcattatgtagttgatgtcctgcattaaacaatctactaaattctgaacaaaaggttattagcaagttttcaaaaattttaaaaattaaacagttgcttcaaaaccattaagtagtaaatgtatttaagaaactaattaggacagatgtcataacttcattagaacaccactgctcatnnnnnnnnnnnnnnnnnnnnnnnnnnnnnnnnnnnaaacaaagcattagtgttatctatttggctattagtattagcaatttatctacaatatttaacaaggtaaattgtaggcaaaaatttagtacagtttcaatagaaacaccccnnnnnnnnnnnnncctgaaaatacagcagtatttgaaggactaatttttctctgcatcagttataaggaagcttcccatctatgaacaggaacaaaaaaagtatctacaaaccttgtaaacagatctgtatcatttataaacataaataatccaaattattaacagccaacagcagaaattaaactatcaattcaacgatccagggctctttgtcttgcccagttttactcctccctctctctcccatccaggactgagataaactaaagctctgctaatacactgttcaggaccatgcttgggtactactgatgatccacaggtcacttacgctgagttactgtttatctgtcagttcatttctcccaccccccaaaaagcaccctcagtctggcagaaagctttgcnnnnnnnnnnnnaaaaaaataaatctacattcgtacaagtgtgtcttctgttgaagtccaaagacaagaatactagcttgtccatcacaatatgtgaaaagacccagtttcaatttgtttctttacaatgcagctagtgtgttaacattcagcttacaatcagagtgatgtttccaaactatgtagtgggcttcctggggatgaagaggtagcagacttgttcatttctattgtaaggtgaattccactgtcaacagcattgttatttttgttgggagagggtggaggactggagttacgttttgtaggagcatcatcttcggcatcagtgtcatcaataagggggatatgaggctctgaatcttctatcctaaactcaggatgtgtcataaagttgtgaatcgaacttcttgattccggtttttctaacccttcatataaagaactacgaaatgcattcaccactcgaatctgtgtttggattctgttcagacctctaaaccacaagatttggccacgccgcaactccctttcagcgtgatcaatccggacgcgtgggtcgacgatatcccgggattccggaccgtaccagcctgcttttgtgtacacacttgttctatagttcactatgcc

SEQ ID NO: 126831 - DNA, 2473 bp, Homo Sapiens
  misc_feature (968)..(978): n is a, c, g, or t
cagcctgaaacaagtcttcatttattgactacagtacagtgatttcgcatcttagctggtaatcaaagatggttatgtattaagtaagagaagacatagtctctcttccaggtatcacctgtcagaaacctgggcaaatttaattttaagaactagaactgcatctcctggtggcagtcgtcaccctgagaacaggaacaaggcaaagaaagcatacaggattttgattctcctacacaggtgcacataaagttagtttattaatgactatattttgaagccagccattttgtccaatatttaaataacaagctgtttaatattaaagcagaaagtactgccacattgtgacagaagtacagctttatccataaacccttcacacaattatacattaaatgctatttttatttaagcaaggcacccctacttgttctaaaatatgggatgtactactccatttaaaaagcaaatgaggagactgatttttttcctatctagagctggtttaaattcaagtgaagccattaattttcttaccagtctggactgttctgacatgtcacttcacagttttgagactaacaaacacccttaggtctaccccaaaccaaaaaaagccagggagggacagtttagacaacttttaagttaagactagaatgcccccttaagtagataggcaccaccgttatacgcctttagcacaaggcttagaaaggcaaaacatttctaaagacataaaaccgccaaattgtcatttacactaagctgtggtattttttgttttgatttttaaaaattcctatctctaagtaatcaaatacagcaaaatttaaaactattctgccaaaccataccagttcaaaggtctgaaaccgttctttgctttggtgaatgtttggttaaaataaatcactgtttcactccatgagaagttttacatcagagcactcaattcacaggcnnnnnnnnnnngttactttttaaatgaaagcgtttaaagaacactgctgaataaaaatatgtggtctttacaatgagtaacatatcatctatgaaaacaaaccatttaatcatataaaacaaagaccatatttttaaatcagatcctggacagtttaaacaaaaattttaatttgtggtttatttcataatcccaaactggatctttcatttcttcttctaaacagtccactatgaaacttttcttagaagcaattaacccaaaacaccaaaatcatttccctagcagttgctgctaataaactggaactgtatatcccaagtccaagaaagatgtgcaaatgaaatgcttcttgcttcacccttattatctggagcccctagagtcttattttccttttggacatgaattcaggaacagttcaatatacctatgatgaacgtgggaccgatccttgagcatcgctgcaacagcatcctcatgggtctcaaagtgcacatcagcttctccagtggccttcccactggagctgtattccatggtgattctaacaggcttgagtggagcaaaaaagtttataatgtcttgggcattggcttggaaaggtaatcctctcatgtggacaaaatgcagagaagacgtagttccaaaatcagcagcctctggaagcttttctggcacctccttaggcaattctatttccttctcactttcaaaagctgtcatgggttgaatatcctcatttacttcatgttcttcaaagaccatttctggctcagttatatacttagcagtaggaaaagatgcgattttctttcccttataagaaccgacatgtgttcgaacttcattccttctgcttggaaatatctcgatgtatcgattaccaatttcttccctgtgtttcaacagggcttggttggccatttctggttcttcaaattgcacataggcttcccctgtttttcgcctccctctatagtccatcacaaaagtaatgtcaactatattcagtcctgcaaagaagtctacaatgtctttctcattgcaactataaggaagtcctctcaaacgaaccacaccatcatttaccacaggcgaagatttgacctgcaagctcttcattaaggcatccacatcttcattgtttatctcatatacttccacataccgctggcccatgtacatgcggtgcttctctaaggctttctgcacatcctgctctgactccatttcaattaaggcatcaccccttcgtttcccatctctgtttaggagaaaatgtattccattctcaccgttgcggattctgcagtctgaaaaaaagttaagcacatcttccatagtgcatgaccagggcagtccttgagctcgaatgagaaagacatcatccacttcctcttctaacttggacggggccaattcatactcagggggtggtggaaggtcttccaggtaagtagttttggactcctggctgtagctgcgcgtcgggacggcggccgc

SEQ ID NO: 126832 - DNA, 543 bp, Homo Sapiens
gacagtttaaacaaaaattttaatttgtggtttatttcataatcccaaactggatctttcatttcttcttctaaacagtccactatgaaacttttcttagaagcaattaacccaaaacaccaaaatcatttccctagcagttgctgctaataaactggaactgtatatcccaagtccaagaaagatgtgcaaatgaaatgcttcttgcttcacccttattatctggagcccctagagtcttattttccttttggacatgaattcaggaacagttcaatatacctatgatgaacgtgggaccgatccttgagcatcgctgcaacagcatcctcatgggtctcaaagtgcacatcagcttctccagtggccttcccactggagctgtattccatggtgattctaacaggcttgagtggagcaaaaaactaaacgacaaacaaaggcagtcaagaggaacatgatggatgtaaacctacctagaagtctggtggctcttcatctttctttcagactttgattcatacacttgatacatttcttttt

SEQ ID NO: 126833 - DNA, 1432 bp, Homo Sapiens
  misc_feature (43)..(66): n is a, c, g, or t
ccagtattatttaagctggccccatccaggacagattcgctgnnnnnnnnnnnnnnnnnnnnnnnntttctctgaggctctgaaaagcacaatatttaactatttcttaatagaactaccaaaacacttcagaaacaattggctcacaactcattttaaatttgtgtattgcctgtgcatgagaaaacagataaacccaaaagatagttctatttttttatggcgattaaaaataactgaaacatcaagacactttttcagtgaaagcaacatttcaattacaaattttaatgcctgttaaactacctatgggagaagctgagaagtcctaggcaaatgcactttggggtatactacagtgttccttcagtctgcacaaagattaaggtaatttacagtcaatctgtgaatgaatgttgagacaatgttacattatgtgtctgtacaattaattgtccttaaagagataaccagaatcagcttttctactgtattttcaacaaacctgactaaccggcacttttgctgggagatgtttgtcaaagatgctgtaagattctatacaattaggaaatactcagctttaagagtattttcttatcttcacttttttagttacaggtgttttgctcagagagcctattgcagtatgtttccagaaatgcagtcccaaatgtgcatactctatattgtatacaaataaaacaaaattatcagtagtataaatcttacagcattgtttgcaaaaatgcatgccaaagtcacaataagcaatactgtaccacaaattatagagtgcaaatgatttgcttctttttaatgcttttattctacataaattactaccataggctaatgtttaaaaagcaaataaactggacagatgcaggacaaaatctggtcacccaactataaaaggtgatgtttttaaaaaattacaataaatgcagaagtgatgcatgcagtagccttaattcccactgttccagaaaagaaaaaacagaaaaacccacacatcttactgtactccaccttaaaatgcatcatattgggtttgtttataacagcacagaattccaagagtcaaaatgaaataaagcaggtattttaaagtttaagagccgttatcaaaaataaattacattttttcaagatacagaaatgctgctatgatggctgggagcccagtaacctttcaatagctgcattgatatcacctcctgttgctattagagcttgcaagtttgcttcacggttcaaaaatcccattgcactgagttgttccagttgttgctgaaatctgacttctggattctgtagctgaggatttactccagcaagagcctgcagcatctgctgaataaactgctgatgtccaggttcagtggttcctgctgtgggacttgtgttttcactaggtgtggcgttagat

SEQ ID NO: 126834 - DNA, 1255 bp, Homo Sapiens
  misc_feature (598)..(598): n is a, c, g, or t
ctggtaccggtccggaattcccgggatatcgtcgaccccgcgtccgcgaaagagaaacccggagggcgccggggaggccaggaggccagctcgggggaaacactcgtggagacagcccctggacagggccacggatcccgctgccttcccgggggaggcccgtatcagcaatgtctgacctggaggccgagaccacgccacgcacttggcggcagggacccggaggccgaccccttggcgggaaccagcacaaagtgttggcatcgcccggcgcccgggacagtcctgggcacagcctcggctctgggtccctccgcctcccagcgacggacgccaaagggtcccgggccgcctgaggctcctccccaccacagccatctcgtttatcggaccaggagcaggcatccatgagacctcagagcttcagatcgaggccttggggggtccgggcccccccaggaaacacggtgaggccccagcgcctgcagccaaagctggcacgatctatggggcaggtgccgctctgcctagaaaagccaggggctctgctgccgtgccctccagagcccacagcgggcaggactcctccagcaccacncacacccagtggcccgagacccctctgagaacagtgaggctggtcctcgtgccgttccagccggtgcccggccagtggggaggacacagcctaggaaccagctgcctgagaccagggtgcctctgggctgtcctcccgcgtggcggagaccccaagcacgcagccacccatttccggagctgcaggatagagccttcctcttgatctctgtttttaagcagaaattcattgtgcagaaaagtcctccagagctctgtggccccgctcggatccgctggacccccatgcctggctgatccctgcccacgtggggcaggcccacatctaacccccacaagtcactgcctcactgcacctgccaaggctgccctggcgctgagtcctggggtccctcccggagttcctgggagaaaggcgccgtcgtggccgcctcccgcacgccaggcccgggctccaccgtgggtctcaagacgccctgcggcaccggcaccgtctgctttagcatgggacccccctctgaggggtggcctggccttcggggtccccacgctcctttgcgaagtccactgtgggtgccatcatggtctccgggacctgggccagcgggaacgtgggggcactgggtgtgctgatataaagtcggcattactcaagctg

SEQ ID NO: 126835 - DNA, 680 bp, Homo Sapiens
gatgatcagtatttaattttatttttcatgtggtaaatttcaaagcatgggacaaaggcagaacatcccattctgcacaaaaatattgcgtttctctcaggaccttcttgccatctttatcactgtgtgctcagcaaactttgcagcgaccagttggattccatttccctgatgttggtggtatgctcttggggaaatgtcttccagacagggaagaagcgtgacatcatcagagcacggatgaccttgaagactttgctgccctggcctgtgatgcttttccagcattctttcactcagcgtcagtctgaagtttatatggctcatcgtgtgctcaggattgtccttccagaacaggatgtaggagcttagcactgttctgagttttggtgtccctcgatgacaaaatgagagcttcaggctacatggtcaccgaagatctcttcctacacagcagtgaatctctcatgttctattgttgccttgtcagcacttcatcactttgctcctgtttttatcatccagcaatacaaggtgtccctcctgagcttcagaaaactggctgaagcagggaaggatgcaaatacatcatgtctcttcctttgtgtgcaagagcctgttcatccattcattcactcaaccactgaaccaagattttctgtgcaccattattcttctgt

SEQ ID NO: 126836 - DNA, 955 bp, Homo Sapiens
  misc_feature (211)..(214): n is a, c, g, or t
  misc_feature (216)..(219): n is a, c, g, or t
  misc_feature (221)..(241): n is a, c, g, or t
ccggtttaatttccccgggtaactgccagccgatttcattaatggcaggtttaccctggcttattggaaattaattccgactcactatagggaggccggccagatctaccccctttgtacaagaaagcttgggtcaggaaaccagctatggcccatgtcccatttcattacctcttttctccgcaccccgacatagatgcctcgagttttnnnntnnnntnnnnnnnnnnnnnnnnnnnnnttttaagttttcacgtttattaatactcttctgttgccctttggaggtctgagggggagtccttgcagggcctctggtctgtccctgttcatggaaggcagtgctcaggaggcagcagcaaagtgccaatgaagcagggcgttagtgccgatggagcagggagccagtaccggtggagctgggcgttggtgccaatggagcgaggcactggtgccggtggagcggggcgttagtgccgatggaatggggcaccagtgccgttggagctggacgtagtgatgatggagcagggtggtagtgccgacggagctggacatagtgatgatggagcggggtggtagtgccgatggagccggacgttagtgacaatggagtgggacaccagtgccgatggagcagggcgttagtgctgatggagtggggcaccaatgtcaaaggagcgggtcattagtgccgctggagttggggcgttagtgccaatggagtggagcattagtgctgatggagtggggcgccgagtggggcattagtgccgatggagcggggccgatggagtggggcgccgagtggagcattagtgccgatggagcagggcgccagtgccgatggagcagggtgccggggccgatggagtgaggtgctagtgctgatggagtgaggtgctagtgctgatggagtgctagtgctgagtctggtgcaccccacctctggagg

SEQ ID NO: 126837 - DNA, 730 bp, Homo Sapiens
  misc_feature (82)..(92): n is a, c, g, or t
attttataatatctataataaatgcaaagaaatcaatacaaacaaaacttggctttagcaaactgtacatacataaatatcnnnnnnnnnnnactataacattcaacttttttcacataaagccttccatgatcttatttattacatctagtttttctttatacctctaaaaaaaagtgccttttagatttacagcttgtgcttctaaagcaaaggttaaaacatcatgccccaaaggaaaacaaggtaaaaaggaagctgccatataagctcttaaaaattgtatgttacaaggttctaaaatctcttcagcactggttggttggtagattgtacgacactgacatggtgcttgggagggtcatttatctgatggttggagcagcaccatgggaaagctgcccagatggtctactgaagtccttggctgtgcacagaatgggccaagggcccagaattcatgagtccggggaactttggaggtccttactcaatctccttagtgctaaggttcagagtctcaaaccagatttcttccaaaccttcttgttgtctgtttgttcccccgtcactgtttatcttccacctctgaagccataatttgcacacatgtgatctggaggagggctaaagctgccacaccgagggctttcgccaagatcaaggtcctcttgttggtagtttgggattgcttatgacccgattctccttatgctaccagcacttctgc

SEQ ID NO: 126838 - DNA, 516 bp, Homo Sapiens
gaggtggtcttacttgtttaatgtcacatggcttagtagggacagatgcacacccaaggctgcctggcctcaaagtctgttcctttaatgtctattctgtgttgctctgccctctgactgagagctgagggggccttttagtcctctctggttgtgtcttcatctgctgcccctgtggacaggagagtgttggtctactcaggcggtgcttgactattagccagaagggaggttttctttccctgagttgtctcagcctttctggcctcactctccctgcactgcagtacagtccttggctccaaagctcagctccactgccagcccttctccatggggtggaagcttccggattcagacctaggccttgcaatctctcccacagggtgccttctttctggatggggtcttcaatcaactctgggacctgcaaggtcacctcacacttcctttcagataagggagggttagagctgctagggtggtcacaggactcatggttcaagaaagtactca

SEQ ID NO: 126839 - DNA, 1181 bp, Homo Sapiens
tttgaggtggactcacttgtttaatgtcacatggcttagtagggacagatgcacacccaaggctgcctggcctcaaagtctgttcctttaatgtctattctgtgttgctctgccctctgactgagagctgagggggcctgttagtcctctctggttgtgtcttcatctgctgcccctgtggacaggagagtgttggtctactcaggcggtgcttgactattagccagaagggaggttttctttccctgagttgtctcagcctttctggcctcactctccctgcactgcagtacagtccttggctccaaagctcagctccactgccagccccaggctggtgccagcccttctccatggggtggaagcttccggattcagacctaggccttgcaatctctcccacagggtgccttctttctggatggggtcttcaatcaactctgggacctgcaaggtcacctcacacttcctttcagataagggagggttagagctgctagggtggtcacaggactcatggttcaagaaagtactcaaggttccagaaagctagacaagtgattgctggactgggctgggaacagagtgatcctggggcagtagtgaggaacaggccacggtcctacttgtggatgaggtgaggagagctgcagaccccgttaaggaatccctcagcctgcctgtgtagttacaactctgaagggctttctgagggtccctgggaaagtctgatgaccggagctgaaaggtgattctgtccaaggaagatcacgatggccaagaacctatgtagggtcaagtttcaggtgtctgttgcggaggaatcaaggctgaagtactctgaactatccatcctttcttccatccatccaacacatatttagggagctcctgccaggggccgacgatgcttagtgtctccagcgacattactctgttcggaggcatcaactccctttgtttaggtgttgctcggaggttccatctaccatgtgggactgtagagtcagaccaggattcacatcccagctctgtcactttctgtcactgactttaggcaagagacttcatctctttgaacctcattttcttcatctctccagacagctgggtggtcctcgtaacccggccggggctccaccttctgggtgtgtgggcctcgtagcgtgcggcccattccc

SEQ ID NO: 126840 - DNA, 645 bp, Homo Sapiens
aggatctatactttattcagctattgggaagattaaaaagaaaaatatacacattggggtacatagtaaacactcaatggtcagtaacctgtcttttgaagctttaccttcaaggtccaagttaaagtatcaattcttcaaatacaattttttatattggtccagccaaaattaatctttcccttattcatacactggtggcatgtttttagagctctattatagaaatcagtgcctttaagttgttcatatataggtctcttctaataaatttgatggcagggattaggtttttagtttgcatcctgtacaagatctttaccacaacaggttcaaatcatgtgttcataatatagttcttatgttctggattttttctttttaaaaagtaacagaaaacttgttaaatttgtccacctaaaattaataggctaaaactgaaagcatgaagtatttaccaaagtgaaatctcattagtgtaataatctaccactactctgttaaagaacagatttttgttgaagtatatattttcatgcaaataatctgttctcatttacatgaaacacgacagatgaaatctttcaataaatctaacttaaactatgcaatatccgtaagtataacattttatttcaatttaag

SEQ ID NO: 126841 - DNA, 1104 bp, Homo Sapiens
  misc_feature (860)..(915): n is a, c, g, or t
  misc_feature (955)..(1017): n is a, c, g, or t
tgtcctttgtacaagtttatatgtttcccttaaatcttccaaggcagatggttcttaaccctggctttacatctgagccacttttggggctctctaaacaattagatccccgggccccagcccagatgttatgagttacaagattatggtttagacatcttttactttttccaagctttgtgtgtgaccaagatacatactttactataaggctctaccaaattcatcttaaaattgacagctaaatactgtaattatatagtaggaagaaaattcttttctgaacataggagttcctaggatcacctaaagtagggctcctacctggaattctccagtgactgaaaactataactgggcaggatttgaatttacctacaaaaggagataaatggtttagttggacaaaagatcactcttcagtcttatcctttctgttcctcattgttacaaaagaaagtggatgcttcactcataactaggaatggtactgcctttcccagttctactgaaggggaagttaaagggccacaccctaggctttaggggatagaactgcacccagcagtgtcagcaattcctgaaacaacttggatgaaactgcgtgatgccacacccttgacagggcatttctgagcagagaacagtccttgggagatataaacatgcagtaagctcagctgcgtggcaaggataaacaggaacccatccttagggcatggacagcctaacaagaaaggcccttcagctgttctaatcaccagggtaggcctgggaaataaacatgtaaggagagaaagagataataaattttgaaagaattttgaggtgatgaactatggacccagtcagtctacagnnnnnnnnnnnnnnnnnnnnnnnnnnnnnnnnnnnnnnnnnnnnnnnnnnnnnnnnatgtagtttctagccatatttcagatgctccgtagctacnnnnnnnnnnnnnnnnnnnnnnnnnnnnnnnnnnnnnnnnnnnnnnnnnnnnnnnnnnnnnnnatagtgtgtagagaacatctggttctcaatctggtggaaaataagacagtttaaaggggtctcatttattgtcactgttccaaatgt

SEQ ID NO: 126842 - DNA, 1096 bp, Homo Sapiens
  misc_feature (976)..(1010): n is a, c, g, or t
  misc_feature (1014)..(1053): n is a, c, g, or t
gtccccccattcatagttaaggcaaataaagtaaggttccttgcccctggtatcaaaatctttatgtttcttcggtccaggggaggggcagattccaaaaaatgttttcctgggataaacttttaattttggccactggtcattttttgctctgtatatgccacagtcttgtcctcaaacttgttagtgagatgtgaaggacgaaataagatgatacccctctccattatcatcatactcgttcaccagagactcaacattcgtatgtgcaaatcggtagttatccctcaagttgctggctgcttttaggaactcggagtgagcctcactgaatgaatcatcgaaaaaacctactatagaggcatctttatcactaatgaatttcttaaattcttcctcagtcctgagaggcactgaagctggtcctgcctgcttcttcaagtggctgacaattccatcagcagtcctaggtccatcataagcacctgcttcttcaccatctctaaatatcttcagggttggatatccactgactccatatttattacaggtgttagtgttggcagtgcaatcaacctttgctaatgggactattccttttaatctggtagctgcagcttcatactcaggtgcaagtctcttgcagtgtccacaccagggagcgaagaactcgacgagcatgaggcccgcagagcccgtgtcggagatgcgactctcgaagttgtcgtccgtgagttctagcacgtcggaggcagcggcgaggcgggccgcggcaagaagcagcgccacacccgggaacagcgctaggcggcggaggcgcatggcggcgaggtggggtggggacggccggaagggtcgcggctcggctgggactgcggaggtcgggcgcgcgaccactaacccgctgcttgcgctcgcgcgtctccccggccgtaatggccgaattcccgggcatatgtccggtaccgtcgactgnnnnnnnnnnnnnnnnnnnnnnnnnnnnnnnnnnncggnnnnnnnnnnnnnnnnnnnnnnnnnnnnnnnnnnnnnnnnatacaaagcggagcgccactataggtgatcgatacatgggggg

SEQ ID NO: 126843 - DNA, 947 bp, Homo Sapiens
ttcaatagttccccattcatagtaaggccaataaggaaggtcccttgcccctgtaatcaaaagcttattggtctttcggtcaggggagggccagatacccaaaaatgttttcctgggataaacttttttaattttggccactggtcattttttggctcggtatatgccacagtctgtccctcaaacttgttagtgagatgtgaaggacgaaataagatgataccctctccattatcatcatactcgttcaccagagactcaacattcgtatgtgcaaatcggtagttatccctcaagttgctggctgcttttaggaactcggagtgagcctcactgaatgaatcatcgaaaaaacctactatagaggcatctttatcactaatgaatttcttaaattcttcctcagtcctgagaggcactgaagctggtcctgcctgattcttcaagtggttgacaattccatcaggcagtcctaggtccatcataagcacctgtttgttcaccatctctgggtatcttcagggttggatatccactgactccatatttattacaggtgttagtgttggcagtgcaatcaacctttgctaatgggactattccttttaatctggtagctgcagcttcatactcaggtgcaagtctcttgcagtgtccacaccagggggcgaagaactcgacgctgcatgaggcccgcagagcccgtgtcggagatgcgactctcgaagttgtcgtccgtgagttctagcacgtcggaggcagcggcgaggcgggccgcggcaagaagcagcgccacacccgggaacagcgctaggcggcggaggcgcatggcggcgaggtggggtggggacggccggaagggtcgcggctcggctgggactgcggaggtcgggcgcgcgaccggacgcgtgggtcgacgatatcccgggaattccggaccggtccag

SEQ ID NO: 126844 - DNA, 2354 bp, Homo Sapiens
  misc_feature (188)..(243): n is a, c, g, or t
  misc_feature (283)..(345): n is a, c, g, or t
taagctcagctgcgtggcaaggataaacaggaaccattccttagggcatggacagcctaacaagaaaggcccttcagctgttctaacaccagggtaggcctgggaaataaacatgtaaggagagaaagagataataaattttgaaagaattttgaggtgatgaactatggacccagtcagtctacagnnnnnnnnnnnnnnnnnnnnnnnnnnnnnnnnnnnnnnnnnnnnnnnnnnnnnnnnatgtagtttctagccatatttcagatgctctgtagctacnnnnnnnnnnnnnnnnnnnnnnnnnnnnnnnnnnnnnnnnnnnnnnnnnnnnnnnnnnnnnnnatagtgtgtagagaacatctggttctcaatctggtggaaaataagacagtttaaaggggtctcatttattgtcactgttccaaatgtacaaaaaaaattagaaaatacccccaactcaaccccacccccacaacatttcccccaacacaaataatttttcccaaaaccacaaacataaactggtcctggtatttccataaacagtgcagctaagaaacagtttagagaaaatttaacaggattcagattatatccattctgtcctctcggccctgagaggtaataattcccatatgggtcctagtcctccccaatggttttcccatctctgatggaagagtccttttacaaagtggtgtttggctactgctttagagatcctcctgtgccttcttcttcttcttgggtttttcttcttgaattacaggggggtttgtagcttctctttgtagatagctaataaaatcacttaattcacggccaccttcatatttctttggatttagcttcttgttggctggagagaagtatatggtaggaaaacctctgacttcatatggagaaggcacatcattggctgtggcatccatcttggctatgacgatatttgggtctttgctgagcttctcgccaagttctttatacttgggctccaggttcttacagtgaccacaccaaggggcataaaattcaatcagcacatctttattttcattattcactatttcatcaaaattctctgctaccactaccttcacaggcccatcattgctctctgggataggttcagacttcaggtatctcttcagattgccatcaaagtaatcctgcaggaacctctccagagccttcccatcacgcgagaactcctcctgcatgacaaacttctctcctttagcagttctgatagcaacaacaggaatctctccagcagtgctctccaagccaaaatcagaaagttcatggctaaaggttttgcggctagctacagcaaagttgagtttgtgcccagcatccaggaatttctttgccaccatcattaccctgtttctccagtagttggaacctttagcgttcttttcatagtccacatcatagtaagcaataagtaagtccttgccctgtatcaaatctttattgtcttctgtcatgtgagggcagataccaaaaatgttttcctggataaactttttaattttgccactggtcattttttgctctgtatatgccacagtcttgtcctcaaacttgttagtgagatgtgaaggacgaaataagatgataccctctccattatcatcatactcgttcaccagagactcaacattcgtatgtgcaaatcggtagttatccctcaagttgctggctgcttttaggaactcggagtgagcctcactgaatgaatcatcgaaaaaacctactatagaggcatctttatcactaatgaatttcttaaattcttcctcagtcctgagaggcactgaagctggtcctgcctgcttcttcaagtggctgacaattccatcagcagtcctaggtccatcataagcacctgcttcttcaccatctctaaatatcttcagggttggatatccactgactccatatttattacaggtgttagtgttggcagtgcaatcaacctttgctaatgggactattccttttaatctggtagctgcagcttcatactcaggtgcaagtctcttgcagtgtccacaccagggagcgaagaactcgacgagcatgaggcccgcagagcccgtgtcggagatgcgactctcgaagttgtcgtccgtgagttctagcacgtcggaggcaagcggcgaggcgggccgcggcaagaagcagcgccacacccgggaacagcgctaggcggcggaggcgcatggcggcgaggtggggtggggacggccggaagggtcgcggctcggctgggactgcggaggtcgggcgcgcgaccactaacccgctgcttgcgtaagcgcggcggcgaggcctcgtgccga

SEQ ID NO: 126845 - DNA, 1162 bp, Homo Sapiens
  misc_feature (1145)..(1145): n is a, c, g, or t
ctcaacttaactttatttcaataatttaatagaaaattaaaataataaataatatgaaacagactgataacgctgagctgggcaggcccaggccagtctagtacaaagttaaggaggtagggaggatggtggggaggagggggcctgactaccctgcaggacgcgggaggctgctcaaactgtggtgatgtcaggaagggccgcacactttggcatggacgatgcacttggtctgcttcttctccgtagcatagacaatggaggtgcagcacacctcggcgattttgcggccctgcccgtagaaagaccagcagcagatctcgtcccccaggacatccttgaggaagagtagccgcccgtggaagcgcagggccagcttgtcgaacagctcgatgttcttaagtaggttgtcatctgaagtgctggtgtaggagtacttgttgttactgcggttgtgcaggagcttcaccacgggcttggaggtgctggccaggagctgctgctcctcccggggagatgtcaccatggggatgaggcacagcggggacagcgtctcccttttttgctgcagcgccagctggcagtcctcaatcaggccctgcaccaggtagtagcgtgtcttcgcccagcagctcccccagttctctcgtactctccggcagtggcacagacccatcccgcaggtaattgaggattgtaccaaagtgacggccgctccggtcaatcagcacccaacctccggcatcggtcagcacctccacgcggccgctgaacatggctttgagcatggtgtcctgtcccgtgagggtgcgcagcgtggtgtagtgcaacgagccgcccacgttcagcttcacgtatttgctgttcggggtcagcggcttgagaccgtaggcggcggggccaggctcgagacccgagggcttgggggcttccagggacggggccgcggcggcagccgggcccgaggcctccgccgacatgccgggtagcagcggcggacggcgatcccaggatctctccgcgccctgcggcctgctcccgaagaccctcggccggcccccagcccttgggccagaccgctcggcgcacacgcccactcaccgcagctactctgcaagaccggccctcgtgccgagtaagccacncaggctcgctcctagac

SEQ ID NO: 126846 - DNA, 1025 bp, Homo Sapiens
  misc_feature (472)..(472): n is a, c, g, or t
gatacctcctaacacaggcatctccccgtccctctccccaggagccagcaccagtttctcaacttaactttatttcaataatttaatagaaaattaaaataataaataatatgaaacagactgataacgctgagctgggcaggcccaggccagtctagtacaaagttaaggaggtagggaggatggtggggaggagggggcggactaccctgcaggacgcgggaggctgctcagactgtggtgatgtcaggaagggccgcacactttggcatggacgatgcactaaaaaaagagaaagggaattctaaatccctcttaaccagctggagagggaaggacgcagggccagggtggggacaaagtgttggcttcggaaggctctgagtggtggggccggaatgtaccatgttgttagcacatggggttgggatgggtggagaagggccaaagtgagctgtgccatgcaatgaangggacagaggaggacccacgacttggccagcagagccggggcaaaagtctgggaaggggagggaaagagagagggactgggtcccaaggcaagaggaaggcagggggaagggtcagaggtcagtccttgaagacaatttgttggccatgaggacgctcgtcgtgggtgatatggcgccggacatggatcctgcggacacggtgctctcggttctcttcatcctccccgcggccagccccaccagctccagctgctccccctgtggcctccaggagggctgggtctgggccccggggagtctcgtagatgaggatgttcagggtctcctcgaagatccgggcctctggaaattccaccttggtctgcttcttctccgtagcatagacaatggaggtgcagcacacctcggcgattttgcggccctgcccgtagaaagaccagcagcagatctcgtcccccaggacatccttgaggaagagtagccgcccgtggaagcgcagggccagcttgtccctcgtgccgaattcgccacccagcctcgtacctagccgta

SEQ ID NO: 126847 - DNA, 2022 bp, Homo Sapiens
cagtggtatcagtttaattgtaacaatatatttaattcaagtccaatccatgtaatcagtattaagagtgtgttttaccattcatctttaaaatcttcaaatcaataaatctcagtaagttattcttaaaagatctgtccaagcatgatcttggctcttaatagtaaaaccatattttaagatggaaaaagaatcattatgaagcatagagagctttcaaccatttctttgaaaatatatcttgatataatagcaaccgttcatcataatacaaaacagaaggaagattaatttactgtggcacagaaagtccctgccaattcctaagtgccctaagtagtttctcttcagactttttacatttttttcaggcctcaagcaaaaccaaagcccccacctccaggtttggtagcaaacaaactttgcttctccggtgctaagcttccatcactcctctggtaataagctttgtgcacatttgctagaaagctgggcagcttgtccgcaggtaccattgatactgtgcagcctccccatcctgctccagtaagtcgtgacccttgagccccaaacttccgacagatgtccaccagctgatccagctcggggcagctgcactcatacatgtcccggcagctcatgtggctctggttcatcaactctcccagcagctggaccatgttttcaggtgcttcttcacatatcttcttaaactggagcactcgcgcagcctcgctgtacacatgctttgcccgctgatagagtttgaagatgagcacatcttgagtgtttggactcaggatttgggttcggagttcctccaggctaattcccagacacctgcagatctcctcagggttatagggttcaggatgaagggcatcttctgtgaccaacagcatttcttctagactaatccctagtttagcctgcacctcctccagcctcagtactttgtcccattgcaagcttttgtatttagccaggagcttcgcagccagccgacactccatcaccctgatattgaaatgggaagttgctgccttattcatctccacacaactgttggcaatcacaaacactgctccacttgggagttttacatcggttgccctcagaggactaaattctatcaacttggcagttccttcttctgcaagaaatgatatagactggtccatgcctcctccttcagtgccaatgtaacgctcactcttggccacagatttctgcaagttccaccttggatagattccttcccagcactgtgagcgtcaccaagccagcactacagacctaagcactggagctggagaggccagaacttgcttgggatatttccatctaccaggcagttcattccagtcaggttactaagaccaaagtgttcctttggcacagatttctgtaagttccaccttggatatattctttgccagcactgcttggttttatcaagtctggacaactgttcttagcactggtgctggagtggccagaacttggtgggatatttccatctaccaggcagttcattccagtcgggttggtgagaccaagtgttcttgagttcctttaagtccacataagaaatggttgtggcctatctgcttggttttatcactctggctgttgttagccctgcagtcctgaagtccggatacaagggatttgtattggccagttggagagcgtacgttttcacaggttctacagctattagcacatcttgttctacagccataggaagaacagaatatccacaataatctatatgctctcctattatgttgactcttcctggtgctcgaacataaaacttgggaatagatccaaacttggagttaaacatctcctttagcttcagtaacctaggatgttctgccacctggacccgacgcgtagcagggctctctgtagccatatttcgctagatccttctttctcctgtagtttcaagtgtctaagcaagctcccagagcaatcacgagacttctgtgacaggagccgttttcttccggg

SEQ ID NO: 126848 - DNA, 2270 bp, Homo Sapiens
  misc_feature (1204)..(1246): n is a, c, g, or t
  misc_feature (1997)..(1997): n is a, c, g, or t
  misc_feature (2017)..(2017): n is a, c, g, or t
  misc_feature (2042)..(2042): n is a, c, g, or t
  misc_feature (2055)..(2055): n is a, c, g, or t
  misc_feature (2062)..(2062): n is a, c, g, or t
  misc_feature (2090)..(2090): n is a, c, g, or t
  misc_feature (2121)..(2121): n is a, c, g, or t
  misc_feature (2185)..(2185): n is a, c, g, or t
ttgtgggagacggggagcgctcctcccgcagggggtgagacgggtgcctgccagtgttgagttcgagctgacggtgtgccaaggtcctgttttgctttatgccgttaagtgaagcgctggaagtgctggtgctcagaaacacccctgtgtgaagtttcggatgtagtcaggaagggcgctggtctgttctttctctccaacctcagagcgccggggactctgtacactgctgaggctgcagcccttctcagtccctacacttttccatctaatggggagctaacctgtgctttttctctttgctgatgacaccaactggccatgaacccgccacccaagccaagcagtgtgccgtggccacagcagcgcttctcatcacggtggatgaggagccaaagaataagaaagggccagagacgccggggtgctgggtgccctccttcccccaggccctcccgaacacaggcctccgcacagccactcacccgtcggaccaaagccacaaaattctctacaaagtccctcaattcttctaatgtattcttcatggcataaaacatgccttaaccaagattaggaaggaagtgcaaagagagaaagcactggtcctcacataagagcagcacatcagaaatgtcgctgaggacatgggtggccaggggtatctgctcatctgccaggctgtggggtccccctggagggacatgggatggcccacctgccacacaccacgatggcactagcagccccaggggcccccagcgtcctctctcttgaagtgtaagcacttgagctgtaactgtggcagtgaaaggcgtaacgacttccctcaatgacaggagccccagaggactgaaaggagttataaaaatatacaaacatagatattttttattctggcatagttcatgtttttaagaaagtaattagtaattaattatctgacactgggtaagaactggaagattgtgggagacttataaattatataagacttataatttataagacatataaattatgactctatgtaaaatatcagtggggagaaacccctcattttccattgaaaattctggtaacttttaagtactttccaaaaatagagacaatttccactggtttaaataatggatgcggaaatgaacaaaagaccatccctaaataactgacgcatttagggtggctaataaaataaatgcannnnnnnnnnnnnnnnnnnnnnnnnnnnnnnnnnnnnnnnnnnctgaataataggggaaaaaaagttttgaattgcattgccccaagtcaggagaaagcacgcggcattctcttcaaggcccgttctgtcctacatcactggaaagcggctgagggcctgcctcagcttttctgcaatcgtttcgtaaaattgcacttgctgctccaggtacaggcggatgacactgttgtaatcatagatccggttactgtgaaagtgattcatctcagcttgcaacgcgtaagacatgatgctgactctcttcaccatgttctgtttgtcttgtagggtgattttacttgttgcaactagtttgtcactttctttcactttttctattgctcccttgtgagtgccaatgatgtcagggaagcagccaagaaaacctttatactcgtgattacattccatcaggaaatggagatctttctttggctgttctgccacgagactggcaatttcttcataagtctttcctgcttctgttattgcatcattgagatctgtttcaccttgatagccactggaactgaacactgtggccaaactctgcaaggcctttcctatcttctgatattccttgggtaatgggcccgtgcagcgcttccagtgctcctgccccaccgtcagcagctccttcacgccgtcatccatggccttggtgaacttccccacagcctcgcacttctgctctatttctactaagtccaagtcaggtgcctctggttccatggtggaaaatatcatgactccncgcagctcatctctctcggncttcctctttccagttttccatccnttctcatctcggnaatttangaactgctgggaaactcactttctgagnatactggatggcgaacatcctggtcatccangcctgagtctctcatgcgcatttgataattcctcgtgcgattctggctcgagggcaattcctanatgatcgtataaatcgtatcagtcaagtgttccgtgtgaatgtatcgctcaatcaacacaagagcggagaaagtgtagctggggc

SEQ ID NO: 126849 - DNA, 975 bp, Homo Sapiens
  misc_feature (896)..(896): n is a, c, g, or t
tttttgttttgaaaaagtgctttgagaatttactgtacagtttttttaaacaatttatttatatgttggcttctacatgctcttacattcgtgtaaaacatttatacatattctttacaatttgtacatatattaaatggctatagcataaacattgttctatgggattttatagaagaaaaatcaagtggggagaattacttatgaaacattaacaaaaacccgtgatattgaagaacaagatgttctcatattcatttgatttcatctacttatttttggtgtcattttattgatgctggcccagactttccatttcccgtaattattaggtcagaaaaatgaaagcagcgggagggaacgcggtaaggcacctgtgggagacgggagcgctcctccgcaggggtgagacggtggctgccagtgttgagttcgagctgacggtgtgccaaggtcctgttttgctttatgccgttaagtgaagcgctggaagtgctggtgctcagaaacaccctgtgtgaagtttcggatgtagtcgggaagggcgctggtctgttctttctctccaacctcagagcgccggggactctgtacactgctgaggctgcagcccttctcagtccctacacttttccatctaatggggagctaacctgtgctttttctctttgctgatgacaccaactggccatgaacccgccacccaagccaagcagtgtggcgtggccacagcagcgcttctcatcacggtggatgaggagcctaagataagaaagggcagagacgcggggtgttggtgcctcctttccaggcctccgacacaggctcgcaagcatcaccgttggcaagcacaatcctcaagtctcatctctatgatctcaggataacagctacanatagaggatgaactctcgatctggccgaggcatctaatgatcgtaatcgacatcaacgttcggtaattacgccatcaca

SEQ ID NO: 126850 - DNA, 2276 bp, Homo Sapiens
  misc_feature (1827)..(1835): n is a, c, g, or t
ggcacgagggaagaagttgctgatggttttaagtctaaaatccttaagcaggtcatctctctgcagacaaaaaatcctgaaggtcgttttcctgatttgactgtagaattgaaccgatgggatacagcctttgaccatgaaaaggctcgaaagactggacttattactcccaaagcaggctttgactctgattatgaccaagctcttgctgacataagagaaaatgaacagagcctcctggaatacctagagaaacagcgcaacagaattggctgtaggaccatagtctattgggggattggtaggaaccgttaccagctggaaattcctgagaatttcaccactcgcaatttgccagaagaatacgagttgaaatctaccaagaagggctgtaaacgatactggaccaaaactattgaaaagaagttggctaatctcataaatgctgaagaacggagggatgtatcattgaaggactgcatgcggcgactgttctataactttgataaaaattacaaggactggcagtctgctgtagagtgtatcgcagtgttggatgttttactgtgcctggctaactatagtcgagggggtgatggtcctatgtgtcgcccagtaattctgttgccggaagataccccccccttcttagagcttaaaggatcacgccatccttgcattacgaagactttttttggagatgattttattcctaatgacattctaataggctgtgaggaagaggagcaggaaaatggcaaagcctattgtgtgcttgttactggaccaaatatgggggggcaagtctacgcttatgagacaggctggcttattagctgtaatggcccagatgggttgttacgtcccctgctgaagtgtgcaggctcacaccaattgatagagtgtttactagacttggtgcctcagacagaataatgtcaggtgaaagtacattttttgttgaattaagtgaaactgccagcatactcatgcatgcaacagcacattctctggtgcttgtggatgaattaggaagaggtactgcaacatttgatgggacggcaatagcaaatgcagttgttaaagaacttgctgagactataaaatgtcgtacattattttcaactcactaccattcattagtagaagattattctcaaaatgttgctgtgcgcctaggacatatggcatgcatggtagaaaatgaatgtgaagaccccagccaggagactattacgttcctctataaattcattaagggagcttgtcctaaaagctatggctttaatgcagcaaggcttgctaatctcccagaggaagttattcaaaagggacatagaaaagcaagagaatttgagaagatgaatcagtcactacgattatttcgggaagtttgcctggctagtgaaaggtcaactgtagatgctgaagctgtccataaattgctgactttgattaaggaattatagactgactacattggaagctttgagttgacttctgacaaaggtggtaaattcagacaacattatgatctaataaactttattttttaaaaatgaccatttttccattttctttctaggaaattaaacccttttaattcttatctaccttctacataatggttattgaatactccacaatatattaagtctagatgttatggtacatgcatacactttcaggctgttttatacccactgtcaccaatacacataaatgggggaggaaaagctatgaaactgtatagggctgtatatatacttgtctcagcttaatgcaggaaattggtttaatttccagcagttttgtctaaactgttcnnnnnnnnnctatgaacagagttcaaatacaggactgtttgttttgaagagactttctaaagtgtacttaaaacatagtagttttttacctttcacaaaactgagttacaagaatacttttgttttacagtgcatcccttcctaggaagtctcattaaaacactcactttttctaggggtgattttgaatgctgcacagggaagggaaggaaataatagtcttaacttttcttaaaggataccagaaacattgctggatataatttaagattagtgttttctctttcatagaaagaacgtacatactgggacatgagtacagttacagcaagtctaggtgtgctaacaaaacagggcacattcaagtacagtaagattttgcttgaaattaaaaacaaactacatgagattaaagcattaaaatcatatttctcaatctgaatacatgtt

SEQ ID NO: 126851 - DNA, 1163 bp, Homo Sapiens
taggcagtgatgataaggggtatgagggatactcacacacctgaggtcacacctgcacatacaggtggcatcaacacatgcaggactgtcgcggttgcttctggaccgaacgaaggacgacgaatgcagaaatgagacagacaaaaggatctgtttgaaagaaggggtcagggggctccttgatattagggaacagggacctgagcttttacagcccttcatatttattaggtagagtgaatagggaggaagggataactgtcggtcagctatttgatttaacacaggcccacatgattcctttctttgttcaacaggttctggatgttcctgtggataacctcaaggagcacgggacctgggacatgactgcccccagcattccttctggcggcagacagagtttgtcagttcgccaacatcctgctttcatgagaacagtttgctgtttgctcacagagcctccagtggtatactgagttggtcacgaccctcattccttcggcctccaacatctccccttttgtttttgcattaattgaataaaggtaatttcaggctgtgcagctttcaattgccggttggtggttcacccgatcctatagacgcacaggacactacagctagcatggccaagaacatggagtcaggggtttttgcctgaccctggcgctccagtagtttctcagcttcttgtgtcgttttcttgatctgtccccatgttatggggttggatgtcattgtgactccggtcggcccttgttctgtctttgcattcagattccgctggctcatggctcgtactggaggtaacaggcccacggttgaataccatggatccctccggtctcccgttccatggtcacacacacctggagggcacccacacggtttgtccatctccttatattctccgccggcagactctcccgtccaggggttcgtagttcgtctgatcagtttcactttctctgctctggcagaccttcctcgttcaggtccctggtcgggcaccacttgtcacggttgcttcactgtggcagcctcctcagagagcctagccgcccgatagtccgcgcgcccgtgagcgtccctcgtgccgaattcgccacccaggcctcgctaccttagagaccgttatagttactgcacccagttttccc

SEQ ID NO: 126852 - DNA, 414 bp, Homo Sapiens
  misc_feature (359)..(359): n is a, c, g, or t
acagcctgaaattacctttattcaattaatgcaaaaacaaaaggggagatgttggaggccgaaggaatgagggtcgtgaccaactcagtataccactggaggctctgtgagcaaacagcaaactgttctcatgaaagcaggatgttggcgaactgacaaactctgtctgccgccagaaggaatgctgggggcagtcatgtcccaggtcccgtgctccttgaggttatccacaggaacatccagaacctccataaaggcaggccatgcttatcatcattgcagtatccaatctgcagtggtgctggctgcctgttgtgggtgctcagtatttatctccaagtcgccgcctattcgcgcantcgcctgctgctctcccactcagcgccacctcagtcccacaaaggccgggctggg

SEQ ID NO: 126853 - DNA, 410 bp, Homo Sapiens
agccccatcactcaaattgtatggattatatggaatgggctccctttgatatttctccccccctccttggactcagtgtcttggccccttggccagacaacagtctatgttaatgggaaacattgactggggtccccgtggccatttagaggggagagatgaaaatcagacctcttggcacaaacttcactggcactggtggtggaccttcaacacctcttcatcacatcacactgggattcagtcccccagttggctgcacaacttgcttggtataggacaggctttaacccgcccttacctcagtgacgtcatctaggaaacagaggcccaattcagaaatcgatatggaaggcaacactcccatttatgaataacagcatctgggtgacagagcgagactccatttc

SEQ ID NO: 126854 - DNA, 838 bp, Homo Sapiens
ttttttaaaattacggattgcaatgtattcctttttattaaattataaaactgttgtcaatacatgtgcttttggaaatagtgttttcctcaagtatctgcttttgtgcagcacttgggtttaaacaaacaacaaatttcgataccaacttcttgggcttcaagctattgagcacttatagccaaactatcaagtatagttatgatatagacagtccaaatttatggaaaatattacaaagacaaatgccttgaaaagatgacacagtgcagggaaaactacagctattaagctggtataaaaacttagtcaaaatgttttagtccattatggctctgcctaaagcttcaaaggaagaaaatttaagacacttctcatccaaggcacttaaaagagttgcaataaagtacttctttgaatttagtttgagcccaacagtattttttattcctttttcacattctgactcacactgaaacagtccttgaaggcagctattaatgaggaaaaatagttattgcttcttaatatacatattacaagtacgcaaacagaatacagatttcggtccactgaagcaagtaacaggatctgactgcagtgttctgcttaattctgaacaaaaagccacagactcctctaacccagtcccacaaacagagccctcagttctgaatttgcaccagctgtcccctgggttctccatgaggacacacgagctggagtcccaccacgtctccatggtgcattctaactggagaagaaccatcccggcggcctggcaggagtggctagtctgatgccatgcaggcagcctgggatggttgttctccagtta

SEQ ID NO: 126855 - DNA, 784 bp, Homo Sapiens
  misc_feature (739)..(739): n is a, c, g, or t
tttttttagttttaaagctgtggaaaagctttattatagattttagtacagaattaaaaaagttcaaacaataattgtttggaaccacaaataattaaaaggaaacacagcaatcccataaacaagcattctggcatctgttagaaattttccctcaaattatgaaatgtagctctccatgctttccaatgattgttataatacccacaaatatctgtgatttcagtggaatactttaacaaaagttttctttttaaggcatgatcctgattcattttttcttcaatatctcagtcatttcaggaactaccttaaataaatctgcaactattccataatctgccacttggaaaattggagcttctgggtctttattaattgccacaattgtcttgctgtctttcatcccagctaaatgttggatggctccagatattccaacagcaatataaagttctggtgctactatttttcccgtctgtccaacttgcatgtcattgggaacaaagccagcatcaacagcagcacgggaagcaccaactgcagcatgtagttgatctgccaagtcatataacaacttaaagttctctccactcttcaagcctcgaccaccagataccaccactttggcacctgttagctctggtcgatcactttttgttaatttctggtcaaccactctgatatttcactggtgaagtattgatgcttttctgactggactacggcattgttgctnagcatcaaggagttcacggacagaaaactttcacttctcacaact

SEQ ID NO: 126856 - DNA, 1388 bp, Homo Sapiens
  misc_feature (1343)..(1343): n is a, c, g, or t
  misc_feature (1370)..(1370): n is a, c, g, or t
tggggtgtgttgtgtaaactgtggaaagctttattatagattttagtacagaattaaaaaagttcgaacaataattgtttggaaccacaaataattaaaaggaaacacagcaatcccataaacaagcattctggcatctgttagaaattttccctcaaattatgaaatgtagctctccatgctttccaatgattgttataatacccacaaatatctgtgatttcagtggaatactttaacaaaagttttctttttaaggcatgatcctgattcattttttcttcaatatctcagtcatttcaggaactaccttaaataaatctgcaactattccataatctgccacttggaaaattggagcttctgggtctttattaattgccacaattgtcttgctgtctttcatcccagctaaatgttggatggctccagatattccaacagcaatataaagttctggtgctactatttttcccgtctgtccaacttgcatgtcattgggaacaaagccagcatcaacagcagcacgggaagcaccaactgcagcatgtagttgatctgccaagtcatataacaacttaaagttctctccactcttcaagcctcgaccaccagataccaccactttggcacctgttagctctggtcgatcactttttgttaatttctggtcaagccactctgatatttccactggtgaagtacttgatgccttttctgaactggcactaccgccacttgttgctgcagcatcaaaggatgttccacggacagaaaacactttcactttctcatcacacttcactgtacatagagcatttcctgcataaatagttctcacaaatgtgtcaggtgacttgattgcaatgatgtcagaaatcggggcaacctcaagtttggctgctactctgggcaaaaggttctttccgaaggcagatgctccagcacagatgtgtgtgtaattgaactgcttctgagttgccaaaatcaatggtgtcagttcctctggaagtaggcctttgtacacatcatgctgagccaccagaacttttgctatgcctgctactttacagagatcttgtgccaccttgtcacatttggttccagctactaagcaggacacttcacctccaaggcgtgtggctgcagtaatggtatttaaagtaatgggtgctagggaatcatttgcatgctcagctattaccagggtactctgaaatcgtagcaatgaggccgcccgccggagctgccccggagccgccgctcggaacatggtctccgcttccgccgcaacctcggcctcgtgctgaaaaacccacccatatcccggaagacccgcgccntgcggaggggaccgtaagagagccctnccccaggcgccagggggg

SEQ ID NO: 126857 - DNA, 458 bp, Homo Sapiens
ttcaactcagaaggctatttattgaaagaatacaatgatgttacaaggatgcatttcacgtagccctaaaaggctgggtatccataagtgcatggttcatggctgttgggactaagaaagccttctggtcaatgagccacacatatgtcctgggctccctccctgtcaatgaagatgtgatgagtttcagagtggtggctggatctaggccaagcaccaaacacaaaccagtactctcctttgggtcttctggaactaaggttttataaacttccgtaacagtgggggcagcactcagttggttacaattcatgccattcctgaaagtagtccactatggggatccccaaacaaccagtagcataatgagttcctgacaggcatcctagccaatcagtagggagggtctgagtagaattacccattgtcaaactatgtatcagataatagaagcacag

SEQ ID NO: 126858 - DNA, 1170 bp, Homo Sapiens
tcctctctgatgatttggatattattattacaaagaatttaaatatacaagtttggctatgaaagacccagctaagccacttaggcaaaagtctatctttgatgtcatagtttccaagaagtatcataagagtcaaacagttaaacatttctctgtgcttttttttctattttctagaaatgttgtagagagaagctcatcaacttacttatacaaatcagatatactgaggaggggagataaactgacatttccatattttataatataatgtggaaagattcagaaatgactgagaagatacagtgatatgatatttaaagcaaatattggcatatcttatacaagaaaggcatcttacaataatatttctgttggtacattacaatttttcagctagtaattctaaaatgccagaggtcctatgatgcaatatcaaaaaaaccagggaactgacatacaaagtcaaatataaagatagtaacattcagtcatccacagataaaaggctatctggacataagcctgaaacaagcaagacgccatccactgcgatttcgccggttttgcccttgccacgttctgcttcaaaaatgatgcttttggtagcatcagttccttgatacaactgaattttccctgtcttccacttttcatcctcactcgtggtcttctcccatgccagggcattgttactgtttttcacaaacactcgaagtttcccgactttgtctccggccagccggtaatcaaagagcaaacagaagttgctttggggttgcaggtcaggtaggagaagtttcaatcggccaatgtctttcttgtgacctgccaaggccggaactgccatatagaagccaatagcattatctcgatcagcaggattccagtcaaaatcatcttctctatcctgtttccagtcacagatcccatgattgaagctgcagtcaaccgagatatttaaatctgctttatgttccagtttggaagttagcgctttcctttggaccagaatcaggccgaattcacctgcttcattcaccttagggaaaaacacatctcctcgcaggcttcgctcctctatgtcattcttcagggctttctcttctcttttctcatcctcaagcccctctttcattttctcttcattcccttttttacctccatgag

SEQ ID NO: 126859 - DNA, 1795 bp, Homo Sapiens
  misc_feature (1573)..(1684): n is a, c, g, or t
ttttttttgaagctgccacacgactttatttgtgaagcccccgggcacagcccagacacacacagagcacaaaggggaaagcatggggcagtcacgggtgctcagggaggtcatacagcatctgcccagtccagaccctaccgctcccctgccccaggaggtcctttaagagcagcgtccagatgcagctcggacattggggaccctgcctctccctccccagactggagaacagctttgggttgtcaacactccccctccagccaggccagtcacagacgacatctcagcagccaggagaaggcccactaggtccggggccagcgcagtcccagcagctcctgctcctggacaatctggtgtctgcctgtccacacggtgtggggcccagggttgccctctgccaacaaccccacgatccgacccccacagtcccacccatggcattctctgctcttcaggctgagcggtcagcacagtggtatggatggtaggggtgacagctgccgcaggaccagggcttggtgacgagaagcagccccaggcagggcaggaaacaacccaatcacaacacagaggggaaggacagcacgcgggcaactccttgggttctggctccgccagggagccgggccggaaggcaggtgggtggggacggccatcagggcccaggcggagatcagcagagcgccctcaggtggaggtgagtttaatggcggagcagctcacagccctttcccctgggggccaactccccacaacagagcagggctgggccagcagaagacgttaaaacccaaatcccgacaggaggcacagacctgcacatgcgccacacccacacacatactcaggggactgacaggacacatgggacacagacccgccctgcctgtggccagagtcctgtccaaggcaatggcgtaggctgcgcctcagttcatccgagtccctccccagctcactggtccaggccaagggatgggagaggctttgagtctagaccttgtacagcgtctgcagcagactgtggcgggcgaaggagcaggattccagggcgctgttgggcttggtcacgaacgccagcagcaggggtgcaagggccttggggaaatagtcctgctgcaccatgtggttcagcgccatcagggggccgtacaggttggcaatggccttgaccttgtcttcactcttgagcagacccatgtgcacgagcagcctggtgaggaaggtgttggagttgaaggacgaggagttgaaagccttctgcatcagggcatctactgcatcctgcactgccatcctcacagtagcttcgtccttgaacacagatgacacctttaggaaggcagagaccaccttctcggggtcagacgtgtcagtctgctgggctatcagcacggagctcttgggccctaggcgcagcagcttctctggagagggaaaagccaggaaggtggagacgtctgcaggaggtggggaggacagcacgggagctggctccccagtgttagggtccagaatcttccgtgagggcgtggctgacttctctccctgccctcgctgctgaggnnnnnnnnnnnnnnnnnnnnnnnnnnnnnnnnnnnnnnnnnnnnnnnnnnnnnnnnnnnnnnnnnnnnnnnnnnnnnnnnnnnnnnnnnnnnnnnnnnnnnnnnnnnnnnnntcatcactgaggacgccagcaccttggccatgttgaagccctccagcacctcacgaagctgttcacacctcgtgccgatataacaccaggcctcgtacctagcctagcgtt

SEQ ID NO: 126860 - DNA, 849 bp, Homo Sapiens
  misc_feature (46)..(69): n is a, c, g, or t
  misc_feature (88)..(126): n is a, c, g, or t
gacggtttgatttttataactttcctgtgatctgggatagaatacnnnnnnnnnnnnnnnnnnnnnnnngcaaataattgaaagacannnnnnnnnnnnnnnnnnnnnnnnnnnnnnnnnnnnnnnccctgccaaagcatatccttgttttctgccagttgtgtcaccaatcagcgatctcaaccacaaaaggcgttttcacgtctatcttgccactgttgatgatcgagcagttggtgagtggacggtcatgcccatcagttgcttggagctctatggagtgcaccactgtcatcccatcaatgacttttccaaacaccacatgtttgccgtccaaccaggtgggcttggtcaaggtgataaagaactgagagccattggtgtcaggcccagcgttggccatgctgacccacccaatgccatagtgcttcagcttgaagttctcatctggaaatgtctcaccatagatgctcacacccccagtgccatctccagtggtgatgtcacctccttgaatcatgaaatccttgatgacacgatgaaacttgcttcctttatatccatatcctttctctcctgttgctagagcaacaaaattttccactgtcttgggcacaacttttccaaagaggccaatcacaattctgccaacatctttgtctccaatcctcacatcaaagaagaccttggccgtcaccgaggggcctcgcttgcggaagccctcggcccccgaagaaaacacaagtgcgccgagccccacgcaaagcacgagaggtagcagcagccgaggacccgggcccatggtgagcggtggcagcggcgctaccggcacgggcgctaccggcacgg

SEQ ID NO: 126861 - DNA, 1509 bp, Homo Sapiens
gattattttgtaacgatgcccctaacaaacaccaacaacttcacttggtcttcaaacaaagaaacagtctttttttccaacataggaggaaaagctacttgttgtggatgtacaggtttccaacatggcacccttctaaagggctttcaaggatcatcctaatagcccattttacctatgtactgaccttggaagctaacccctgagtatgatgcaactccactctaatgtaaattaaaatgccatgatcttaaaaatgccataatattgtcagtataatttaatttccagtttagttccatcttcacatttagcagtgtgtgtctgtggccgtctcctggtgccagcatttcagaatgtactatcactggctgagaaaatctcacggtgagaagagtagtgtgtcataagatctgaacaaaaaagctaccaaagttgatcagtctcagtatgattcaggatatgattttcaattagcaaatggtgcgactgaagcagagagtggctttgttttgctacacccagtgctcccaggaatctcctgtggcctccttttcatgggtttctacgctggcagctacactctacttcttaaacacttggccttagcctgaccaccgccccggttcagtttctatttttaagagcaccattctaatggaaatgtccctgccctgaattaagctgggactgtgcactttaccactagctagagctgttatatatcatagcgtttaggttaaattggtaggtattgatttccttgactgtgacttcgaaacttgcttctgcttcttttagccatgtaggatttctacctgggctgtagatgagggtaaaatatcccatggaggactccttcaataaccacatttggaaaatcgctggctgcaggcaagacatatggatccctgaggaacagcagcacaggctggtgggacagtttgcttgactcttcagactctgtttcatcaaaagatccacaactttctgcctttggtagagagggcaagtgtcgcacatttaggaaatcaagaaacagtttgggaagttcttcattttctaaaatgacagcctgtaagtatgtttccaagccttgtcgtcgctgttccaagactttggggacccagttcctaacatgtttagaagggatttctggagtttttatacatttcttaagctttttgtgcaaagcatgaaattcgctgtatctcttttcaacaaaatgttttcttccattcattagcacttctatcttaaacaccgtgtatccccgctccaggtcgctctcttcatagcgaaaggacgggatgtagacctccatggccgcgccggccagccggctgagggcgagttgggggcaggctcacggccgcggccgccagctccagcccacggccaggccgcccacgcctcccagccccagctgcagctcgcaggggcccacgacggcatgcggcacagcctcagtgccagaattcacacacaccaggcctcgctacctagcac

SEQ ID NO: 126862 - DNA, 949 bp, Homo Sapiens
  misc_feature (473)..(524): n is a, c, g, or t
  misc_feature (540)..(562): n is a, c, g, or t
  misc_feature (723)..(746): n is a, c, g, or t
gctctagccaccgggagggaaagggttttgggttataaaggaaagccggttttcatcgggtcatccaaggatttcaagattccaaggaaggtgactcccccactggagatggccctgggggtgtgagcatctatggtgaggcatttccagatgagaactccaagctgaagcactatggcattgggtgggtcagcatggccaacgctgggcttgacacccatgggctctcagttctttatcacccttgaccaagcccacctggttggacggcaaacatgtggtgtttgaaaagtcattgatgggatgacagtggtgcactccatagagctccaagcaactgatgggcatgaccgtccactcaccagctgctcgatcatcaacagtggcaagatagacgtgaaaacgccttttgtggttgagatcgctgattggtgacacaactggcagaaaacaaggatatgctttggcagggnnnnnnnnnnnnnnnnnnnnnnnnnnnnnnnnnnnnnnnnnnnnnnnnnnnnctttcaattatttgcnnnnnnnnnnnnnnnnnnnnnnngtattctatcccagatcacaggaaagttataaaaatcaaaccgtcaccctttagtttgcttgaactttagtaaaccacctgcttagggactttgaacttaaatatatccccttcctcaagtggtgctattttaaaactaaaaaaaactttgaattggctannnnnnnnnnnnnnnnnnnnnnnnctgaattcattatgatccccatattgggtaatgctgaacatttatctgaaacagatgaggatattattattttgtatccaaaaagaaattcagataaagggaaatttgactagtgtaatctgagatatgtcatagggatttctttctgacaaaagggtgctttgctgttctttatattaaatacttttagatcaacaaaaaaa

SEQ ID NO: 126863 - DNA, 406 bp, Homo Sapiens
ttttttaccaagagcactggtttattggcttattattaagcccgggaccaatgtcactctgttagacctgtattaaaaacgtggtttatgtggtgcagggtcagatcagtaaagagctgttagcagatgacaggtttgattaccgctggctgcaggcaagacatatggatccctgaggaacagcagcacaggctggtgggacagtttgcttgacttttcagactcttgtttcatcaaaagatccacaactttctgcctttggtagagagggcaagtgtcgcacatttaggaaatcaagaaacagttttggaagttcttcattttctaaaatgacagccttagaatatagtgagatagaatcgaaatagcgtatcactcttctagcgttttcccatctaccaatgca

SEQ ID NO: 126864 - DNA, 641 bp, Homo Sapiens
ttttaccaagagcactggtttattggcagattattaagcccgggaccaatgtcactctgttagacctgtattaaaaacgtggtttatgtggtgcagggtcagatcagtaaagagctgttagcagatgacaggtttgattaccgctggctgcaggcaagacatatggatccctgaggaacagcagcacaggctggtgggacagtttgcttgactcttcagactctgtttcatcaaaagatccacaactttctgcctttggtagagagggcaagtgtcgcacatttaggaaatcaagaaacagtttgggaagttcttcattttctaaaatgacagcctgtaagtatgtttccaagccttgtcgtcgctgttccaagactttggggacccagttcctaacatgtttagaagggatttctggagtttttatacatttcttaagctttttgtgcaaagcatgaaattcgctgtatctcttttcaacaaaatgttttcttccattcattagcacttctatcttaaacaccgtgtatccccgctccaggtcgctctcttcatagcgaaaggacgggatgtagacctccatggccgcgccggccagccggctgagggcgagttgggggcaggctcacggccgcggccgc

SEQ ID NO: 126865 - DNA, 1602 bp, Homo Sapiens
  misc_feature (195)..(252): n is a, c, g, or t
  misc_feature (380)..(402): n is a, c, g, or t
  misc_feature (421)..(457): n is a, c, g, or t
ttgatctaaaagtatttaatataaagaacagcaaagcacccttttgtcagaaagaaatccctatgacatatctcagattacactagtcaaatttccctttatctgaatttctttttggatacaaaataataatatcctcatctgtttcagataaatgttcagcattacccaatatggggatcataatgaattcannnnnnnnnnnnnnnnnnnnnnnnnnnnnnnnnnnnnnnnnnnnnnnnnnnnnnnnnnagcaccacttgaggaaggggatatatttaagttcaaagtccctaagcaggtggtttactaaagttcaagcaaactaaagggtgacggtttgatttttataactttcctgtgatctgggatagaatacnnnnnnnnnnnnnnnnnnnnnnngcaaataattgaaagacannnnnnnnnnnnnnnnnnnnnnnnnnnnnnnnnnnnnccctgccaaagcatatccttgttttctgccagttgtgtcaccaatcagcgatctcaaccacaaaaggcgttttcacgtctatcttgccactgttgatgatcgagcagttggtgagtggacggtcatgcccatcagttgcttggagctctatggagtgcaccactgtcatcccatcaatgacttttccaaacaccacatgtttgccgtccaaccaggtgggcttggtcaaggtgataaagaactgagagccattggtgtcaggcccagcgttggccatgctgacccacccaatgccatagtgcttcagcttgaagttctcatctggaaatgtctcaccatagatgctcacacccccagtgccatctccagtggtgatgtcacctccttgaatcatgaaatccttgatgacacgatgagacttgcttcctgtatatgccagatcctttctaaagagattgcttcagttgaataacaagtaacagaggccatactgaaagataaactcagtgttgatctagaaaggacaaactgagaaaattaaacaaatgcctacagaacttgattatatcccagctatggtttactgagagaaatttatcattagctgaccaaaaaataaatatgttatggaagtagagtattaatgtgaataagttaaaagagagcaaaccatattttcacttgatgatgattttctcccaatttccagaagcctaagggcactgagtgcccaaataatacatatttaattggaaaataaagtcaaatgtggtaaggttcatctgacatactaatttaatacttattttctcagatgacatctttatatttggcttcaaagaaagaagacccaatttaaaggaaataaaattgagacatacctctcctgttgctagagcaacaaaattttccactgtcttgggcacaacttttccaaagaggccaatcacaattctgccaacatctttgtctccaatcctcacatcaaagaagaccttggccgtcaccgaggggcctcgcttgcggaagccctcggcccccgaagaaaacacaagtgcgccgagccccacgcaaagcacgagaggtagcagcagccgaggacccgggcccatggtgagcggtggcagcggcgctaccggcacggc

SEQ ID NO: 126866 - DNA, 804 bp, Homo Sapiens
  misc_feature (662)..(694): n is a, c, g, or t
tcaaacaataacttttattttatacttctctatactttgtagcaaatctttttttgctgaatttaatttataataaactttttaaattacatctctctctctatttttttaaaaatcaaggctcttttatgtcaaaatctttttttagctatattttagattaacatttaacatcccccccttgtgatctataccgttggatattcaggtattactgtgtgtgtaacagctaaaacaagagggaggagggaaaataaaggcagtgaacttggacggatgcatcaacaacagcagataaagctaacccctcagtgaccatagcagcatgtcttctggaagcctttactcttaccccagagatttcctcagccccttccctctctccctcctatcctccaaacacaaagccaacagtctgtcctttcgcttttcttgaggagaaatgtgcagtggaaatgatcaaaacaagatactgtggaagaacgacgtgagcgtgaattattcaccgtatgtttcgtccgtggacatctctcttgaattcattcccctggccttctcctctcctcgccttcctattaggaggagcccatcatttttcatgttactagcatgattaatatagtaggtggcccagggccgttcctgagattcttttgccaacnnnnnnnnnnnnnnnnnnnnnnnnnnnnnnnnngggtgggtttgccgttttcttatttgtgtgtgaagacggactaaagctgaggtccgattttggctgtgcttgcttgctcactgattggtaacatttggcaaataaaacac

SEQ ID NO: 126867 - DNA, 793 bp, Homo Sapiens
ttttagatgctcgcttgtaaagtttattgacaactgtttggtcccaacacacaaaacagcacttgaaccacaacaaaagtgttcaaacaaagtagacaactaagaaaaacatctctttcccccaaacccaatccaaaacaaacagtgcaagatgggaaagggggttttggtgataacttttgtcatttttttaaacagataaatttaatccggtatatctttccacccagaaataaagaattacattgtcttaatgctcaaacatcattttaccacatcatttaattaagcctctggataaaaaaatagatagcaattggactggccattgtggagtacattatgaacacaatgtgcttccgaagtcttctctctcattttcagacagcaattgttaagagtcacacacacgtcccagacctaagcagcaactccagtgaatggtactcagacacactcacgggacagcacagaacttgattcttctttgtctgttgcccaaagaacctgttctttgagtctgttccaggtgacttgtaatgatacctcttacggttttaaagtccaccactctttacatgctagcagaactgaagtccaagcgtgcaaactcagccttatgaaatcttagaataaggcaactgatgttctcaacaccaattattattactttgtttaaaagctcctttaaaaaaaattgcacatttgcatttcacttcctggtacactatgtctgtagaggaaatgcttcaggaggattcggagagtgcataatactacaggttttttcatg

SEQ ID NO: 126868 - DNA, 1921 bp, Homo Sapiens
  misc_feature (74)..(108): n is a, c, g, or t
  misc_feature (1779)..(1795): n is a, c, g, or t
ctgtcgatcctatagggggtagcgcttttgccgaacgacgagcgcagcgagtctgtgagcgaggaagcggccgnnnnnnnnnnnnnnnnnnnnnnnnnnnnnnnnnnncagtcgacggtaccggacatatgcccgggaattcggccattacggccggggtcacaagtaacttggaaaatagaagcagaatagtaaaggttctattcagcaacatagttcatggattttgtggaggttctattcggtaatatggttcatggatttagtggtgactgataagattttatttttgaaggaaaaattgcttatactaagtccagagacatgcaggtgagcccttttgtcaggctgcaaatcatgacatgccgatggttgtttattttgtttttaggtgtgcattctttttcttcttagcaattcctttatgatcaccttcccttcttgtttcactccctcccgctctctcaaaaggaacttgggaaacttgtgaaacccaggaaaacctttagtcttatacctcaactacctttcagtcctgtctgggttttaaataagtgaagtagaagaaattgagtattttctgacataagaatatattatcaatacagttttatgcagtaagctctccttaccataaatgtttcttggttgacaacatctaagacaatattagtgggatgaagaaagaaaagcaggggtgcttttggaagcagtgttagtgttcctcaaaagtcggaacaattgcctgttgatatattaataagacattaaagtcaaattttaatgttggcctctcaaatgatttggataccactctgcaaagtatttctaacctttaattcccagttttaaaacagatataataatagcatttaattggaatatactaggcagctggaaaagtatttgaaactaaattgacattaaaattaagatttgttttcaagtggatgtccattaaaagtagaaaaatatttgggataagtgagtgtgtgtttccttacatggctactaaataaaatataatgagtatacaagtatatctcctcttttgctatggaggctccatgttcaaggcaatggctttttaaatcttggctatctaaaattttttccctttgttttgaatatttgtaagtttttaagaagttagtgtcagcaaattaattgaagttatgcttctatactgggacatatttaaatactgagtatagtactgctgctactgcttctacaatgtaaaatgtatgacttggtgttttaaagtaaaaattatgatgttacttgtggagaaactaaaaatgttgtacaactgaccgaaagaaaacccttggggataagtttagtgaggggattggaatccccaaaaagataacatttttcttctgcttttaaaaactgaaattccctgttctagttcctaacaattctcattacatactatgccagattacaaaatacttatttttaaaatgaaatctatatattgactttcttatcaatcatcttactgtgcaatcaaaattagagtactttggtttgaaaacaacacttagagcctccagataacttttaagacttatttagctttgtgggtggtattttcatgcaaataagtaagggtgggttttatattttgtagaagttttcggtcctattttaatgctctttgtatggcagtatgtatatattgtgttaagttcctcaagaatctccttaaaaactttgaagttaatacttttgtgcaactgtgttttgaataaagccatgacagtgttnnnnnnnnnnnnnnnnntttgcagtactcctgattattcttttattgtttttgactgttccctgtttttttctgtgactgctgtaacttaaagtttttgaaactgaattgcttcaaataaattgaagatttgttataatgatt

SEQ ID NO: 126869 - DNA, 575 bp, Homo Sapiens
  misc_feature (514)..(514): n is a, c, g, or t
tttttttttgactaagagtgtttggttgcttttttgtcacaagtaacttggaaaatagaagcagaatagtaaaggttctattcagcaacatagttcatggattttgtggaggttctattcagtaatatggttcatggatttagtggtgactgataagattttatttttgaaggaaaaattgcttatactaagtccagagacatgcaggtgagcccttttgtcaggctgcaaatcatgacatgccgatggttgtttattttgtttttaggtgtgcattctttttcttcttagcaattcctttatgatcaccttcccttcttgtttcactccctcccgctctctcaaaaggaacttgggaaacttgtgaaacccaggaaaacctttagtcttatacctcaactacctttcagtcctgtctgggttttaaataagtgaagtagaagaaattgagtattttctgacataagaatatattatcaatacagttttatgcagtaagctctccttaccatanatgtttcttggttgacaacatctaagacaatattagtgggatgaagaaagaaaagcagggt

SEQ ID NO: 126870 - DNA, 738 bp, Homo Sapiens
  misc_feature (243)..(277): n is a, c, g, or t
  misc_feature (443)..(518): n is a, c, g, or t
agtttggctacatttttattcgagcatggtcattttcaaaagaaattacaaattgaaaattcaataatacttttacaaagacaattcaggaaagatttttgtcatggtatcatacattgtatttaacagtccctctttttagctaaaaaacaagatgaagaaagtggaattttcagtcgaaaatacagtgttttcacaagatcgtatcaaaagttcccaaatttggaatttccagtaattggnnnnnnnnnnnnnnnnnnnnnnnnnnnnnnnnnnncccatctcacaattaatgttccaaaacacaataaatgctcttctctttacgtaaaatttgcccaaatgatcaacgtcatgttccttttttactaaaatatatctatatattgaagaactataatactgtacactacagtatgaaataaataaaattaggaaatatnnnnnnnnnnnnnnnnnnnnnnnnnnnnnnnnnnnnnnnnnnnnnnnnnnnnnnnnnnnnnnnnnnnnnnnnnnnncagtttggtgtaatactgacaaaattaatgaacaaaaagtacagaaaataattgcacaaacatatgtaaactaaggaactgctgcctattcttctaatactgacatgggtgcttcaaagaacagggtgagcttaacactgaagctggtgcaaaggtaacccatgttaccccccggccgtaatggccgaattcccgggcatatgtccggtaccgtcgactg

SEQ ID NO: 126871 - DNA, 1503 bp, Homo Sapiens
gttttttgttggtttttcctgcaaaaattcctaagatttattggagactaggcctcttctctggatccacaaccgtgtccagcccagaatcaggacccccaaacgtgtctgggaccctgtccctttcattctggtctagacaagtccccacacgtggccaaaggacagcacccagactctgcccctgaccagtcaatgtgcagcaaacccacttcagtaggcagaagagtctacccctagggagaaggcgccaggagcaggcaggtgggagggaaagtgttcggcagggcagaaaccctgcctggctgtatccaactgtcactcccactggaggcgctgtgtatgcagggcccggcagtaagcccagctgcctacagccaaggcccagcgacagacatcctccttcggtagcagcagcagcctgtcctcctccagccggctcaggaggcctgccacacccagcatcgccccccccgacatcccataagtgttggccgtgaagacagctacaatgaggatggtcactgcgaccaccaacagcattgcctgaccagccacagagcggccctcagggccgaggtggccgccagccactgccagcaccatgcctcctcccaggagcaggttggcagaggagcggtccccattcacccagtggaaatcgaaggccagaaggggaaggccgatgacggtggccacccaggctcccagcaaggcagtcttcatgtgtgctcagccctggggccagcgtggtggtggcagccaagacctggagcaggaagccagcagcagcccctcgacttgcctcggctgtgctcacggctgcgtgcagagacaccactcccagcaccagatgggacagggctgtgctccactcggcccccggcttgggggccatggcacctcaggcggcagtatgtatgaggacacagataggagatactcaactttggagaggaagaaagcgcagaagccagcgacctggagccctacgcgcggcactctagtacgcccaggttccaggtccccattactggatgttaggagaagttcagtcctagactttccggatccctgaggccactgcacacacctgtggagaagaagaacctaattcagccgggaaacgggggaaaacgactcagggtctaagctggggggaacgtcagccctggggccctggagcccaagtgggagtgcgggcctggggaagagagagcggcgaggcgctgcaggcccacgcggcggcctcggcctgctccctgcgttccgggaggcgttgtcctgggaacccgggtccaggaggagcgacggcgcaggactccgggaggccagccgtgcgcagttaccgggctgcgcggtcccaacgcagcggcgagcgggaggcccgagcctgcgcaacgcaccgcccaccgccgtcggccctgcctcctctgccgtgcccccagttgcgggagcgagcgcggtcgggaacctccaccagcgatcccgggaattccggac

SEQ ID NO: 126872 - DNA, 944 bp, Homo Sapiens
  misc_feature (913)..(913): n is a, c, g, or t
gccatgtttcatttcctttaataatgaaaatccataagggtttaaaatactcttagacacacctagcttagcaaatatcatggacctctacatttatgtgaattcacacatgagctagccagcacctcagttctggctggccccctttggcaccaggacacaataatttattaagcttcgatacttaataaatgtgcacaaatatcatgcatacattacgaccaaacaaaaaatgtattagagacataggcttatacaaaacatcttgtaaacaaaagggaagaggttgatattttctgtacaaaatatgcaggtttttctttcttttttaataatctgtaagatgcatcatacttctggcattttcagcaaagtgataaactgtatagaaaataaatattctactgtacaaacacacacacaggccaatccaaggttagaggcatcacttgttccagcagccttggactggtaagccatcttcgcccaatgggcagggggcatctaatccaggcgctccttggtctcccttatcccctttaggccctctagagcctttcttccccctctccccccggtttcccttgtccccgggtggtccatgtaaaccaggaagcccagctgctcccgttggtcctgtcatcccagggtctcctttgctgcccctctcgccctttggtcccgctgggcctggaactccaattggtcctggagtaccgggtagtcccaggggaccacggtctcctttttctccctggaagcctttctctccttttgctccatctagtcctgcttccccctttggtccaggaacaccttggagccccggaggtccgggaggccctctggccctggcagcccaggaatcggtgagcctgcttgtcctgtctccctttttccccttctctcctgngctcctgggtgccgttttctccttcactcct

SEQ ID NO: 126873 - DNA, 1432 bp, Homo Sapiens
  misc_feature (1148)..(1213): n is a, c, g, or t
ctgaataaattatttattcaagaatttcacacaaagtaatttctattttcctaaacttaaggaagccctactcagtagaactcaatttctaaacgtaaaccgagattgaaagcagtcactggacggttcagaaggggaaatgctgcggcagagagatgccaggcggcgatgctgggccctgacgcaccccatcccctccccacactgcgcacctgccccaggtctgatgtgagatgctggggacaaccgtggacacctggtggtcccccgtgtccccctactccctccccaaggtatgcacctgcccccagttcagatgtgaggttctggaggatgacgctggatgcccacagccccctgcaccccccatcatgtctgcccgggtcagggcgtgagtgagaactggtcctgctcggtgggcttctccacccaggcccccagccccgccttgatgaaggctgtgaacagacgcgccttggcggcctggtactcctttgccgccagcttggactcatggtacacgttgggcttggtaatcttggagcgtagtaagtgggagggaaccttgccgtgcacacgcatccagcgacagtacaacgcgtgcttacacaggcgggacgcgcggcccagctcatccttcccagtcgtggcgttgatgacctcaatagcggagtcgcctaccgtccagttgacactgaagttgggggccttccctggctgccgtgcttctgcattgctgatgccactgagcaaaggcttgttgagggtgtagagaggtggcaggtcctctatgttggagatccgctggtacatgggcctggaaaggtggtccccgtggtaaaggctgcccaggatgatgctcgagaagtaaatgggctccacgaaaatgctgagcagggatccctggatgcccaccacgttccagcgtgcaatcttgtcactgcaggacatggtgagcagccgctccccttgcagcaccccgtcccacgtttggatgctcgcattggagcgcactggaatcgtcccctcaccagactctattttggtccgtagctgtcctcttgctttacgatttgggtgtctatctgctggttctgtagtcccagctccttggaaggttgaggtggaaggatcgcttaagagcccannnnnnnnnnnnnnnnnnnnnnnnnnnnnnnnnnnnnnnnnnnnnnnnnnnnnnnnnnnnnnnnnnccttccaggacttggctcatgtggtgagaagattctggcatctccacagggagaggtgctgatgtacagatgaaactggacattctccttcagcctaaacccccctcgctctgatttctgaaagatggatcttttttcgggacgcgtgggttcgacgatatcccgggattccggaccgtaccagcctgcttgtatgcccactgttctatattccctacc

SEQ ID NO: 126874 - DNA, 706 bp, Homo Sapiens
acaaatctcagaactccaagatgtttttatttatttcaaattccaatagaatgaatatgttttatctaaatatttttatcacacaactaaaacattgaattactttttcagaaatagttaaatacatcaatctagttacaaattctaatataaagagtacaaaatataatgttataaattgtattttaaaaaaagaaatacaaattctatggtcttttgcattttactgcctcaaagcagaattagcaaagctgatgaagaatgaacattttcccttgggcgggtggcccttggtcactcccacaggcacgttaccgggctccggcgtgtgctcccaccaaccacggcaaacaaaggcgtcctcctcacttgaagtcctggcctgtggttgtttcatctgtttttttgctcagtgaacaaaacgttctgaaattagaactcaccaaagttaaaagcagtaaaacaacatatgctacttaagacattttgaagcggaaagtaaagctatgtgaatgccgtccttccttccttcctttttctacagcttggaaacctctgagaatttgctgggggtggcagaggagggtttgtctagtttgaaggaaggaatgttggtagacagtctccagccacgaaagcccaggaggtgccctcttccacacaacagactaagcactgcacccactttctttgatccagaaagcat

SEQ ID NO: 126875 - DNA, 665 bp, Homo Sapiens
  misc_feature (384)..(384): n is a, c, g, or t
  misc_feature (533)..(533): n is a, c, g, or t
  misc_feature (637)..(638): n is a, c, g, or t
ttgccaagaggagacagcattctttaatcatgctggacggcagggcgtggcggggtcaggcaggggcaggatcaggcagggtggtttatagcacaggtcttcctggcacttggtcagaccctgtttccgtcatctggccatggagccacggctccctcgactgtgagcaccagagatcaccccccggggcacctcagccccagagtctgcatgagcaccaatgggcggaggccgcctccctctggggagaagggcaggccacctgggtttggaaggctaggggaacaccaggccaccccaccctggaagaagaaacggaaggcctgaggtccctcctttgctctagctccccagacctgctgagggctctaaagcctggggctntccgtggcccttctcctgcaggtgtttgtaaaggcagcaccaggccggaggagggctctgagacgaggagctgcccacccgggccttagcaccttgataaagcctggagagtcggggcactgggccggtgagaggggcatgaggggcanagagcacctggggacagacatcagtgtctgagggcagctggaggccctggggaaacggaagttcagatgactttggtggaagggactgagcaaggccctggcannaccctgggaggaggcaggaaggggatc

SEQ ID NO: 126876 - DNA, 723 bp, Homo Sapiens
ttttatcattgtagttatttatttagattgtttttaaatgagatagtgcctttaaatatgacttcatagcccattatccattaccattcattcatccactcatttgttcattcatgaattcatttagttcaaataatatagaggtggagatggggagaaatcactggggtgggggtggatgtcaggaagtaagcaaatgtaagactgcagctctagtatagaagagatgatgaacataaacaagtcttaggagaggacaggaagaaaaccttccctgtaggcccgtaaaatgtgcttgaatgaagggaggttgggcgctaccagtggaacgtaacaccacagcaaatgtgcgcccacaggtagagggttacatgttcgcctttgtagttaaaaaagaaaggtatagtccttttccatgtacaaagcattctatcattcattaccaaatgtaatcctcacagcaacagtgtgaattaggagtgttcccatttaacaatgaaaatgccgaggccttggggagaatggctggtccaatgttgtacaaccggtaaggcggcgatagaggagaaaagactaaaacccagatctttcctctaaattaggagctttgtgcacaatcctgctaccaccaaatgttataatcggaagggagcttaaagaccaggtctagtcctttcattttataggagttgggaatgggccctgatttgccccagctggtac

SEQ ID NO: 126877 - DNA, 801 bp, Homo Sapiens
gggggggccgacaaaaagttattctattttcccccccctgggtggggaaaggttcgtgggaaatttctcccttttcattcccattaagggaggtggtggaaacgcgaaatgggtctcccgggctttggcgaaaaggctggcctggaaataatactttcttttggcccatgggggccagcctgccggtttttttggtggcttccaggctggagggtggggggcccctttcccacccaacttcccaaaaataatggccaataaacccttctcccatgatccccaaaggggacctctgcccatggtaggcggatgcgtttccagggcactggcctcgtcctgaggtggactcagctatatataaattggacctgaattccacgttatggtctctcactgccatatcttgtgcttctaagagaacctctttaattattttggccccttttttgtcattgaattccaactgagccaaagcctggtcaatagacattcctcgtatcaattttgccaaataccacatcttgtctttgctatattttatttgtcttcgacagtggtagatttctgctggtctccgaggttctccaggcagttgtggaggataaacaattttattcttcttctcccattttcgagaaatgtcaagagaagcacttgtgtggatatatgattgaggtaaaacacccaaggccagcttcccccggctcctcaggttatgtatccataacgcacccaactgtcccagtactgccgccgccatctttcgccctcccgctacggaagccgccgagttcaagcccc

SEQ ID NO: 126878 - DNA, 905 bp, Homo Sapiens
  misc_feature (97)..(100): n is a, c, g, or t
  misc_feature (103)..(111): n is a, c, g, or t
  misc_feature (113)..(117): n is a, c, g, or t
gtcactttaccctaggtggggcccggcgccgccaaaccgaaatggtctaggaaaagcttcctcgaagggccgaggggcggcccgaccatgttttttnnnnttnnnnnnnnntnnnnnttttttggccttcaatttttgtttatttttagaaaataaatggcaaaatatatacactgtggagtctgaatctcctcatcatagagtgtgaacgatggtccggctgcgaagctgctgaatatactctttggcatgggcaactgccgtctttggtggctcaggtggaggtgggggcccttccaccaacttcacaaaataatggcaataaaccttctccatgatcccaaagcgacctctgccatggtagcggatgcgtttcaggcactggcctcgtcctgaggtggactcagctatatataaattggacctgaattccacgttatggtctctcactgccatatcttgtgcttctaagagaacctctttaattattttggccccttttttgtcattgaattccaactgagccaaagcctggtcaatagacattcctcgtatcaattttgccaaataccacatcttgtctttgctatattttatttgtcttcgacagtggtagatttctgctggtctccgaggttctccaggcagttgtggaggataaacaattttattcttcttctcccattttcgagaaatgtcaagagaagcacttgtgtggatatatgattgaggtaaaacacccaaggccagcttcccccggctcctcaggttatgtatccataacgcacccaactgtcccagtactgccgccgccatctttcgccctcccgctacggaagccgccgagttcaagcccccggccgtaatggccgaattcccgggcatatgtccggtaccgtcgactg

SEQ ID NO: 126879 - DNA, 855 bp, Homo Sapiens
gtggtacatgctcaagaagtggtagcttcttcttattattatttattgctgttgttatcccctctgttcctgctacaggaaattctttccatgtaaaattcattcttgtccccaggcctagttcacagccatactgaatgcaattcagcatgtattcaccatgctctgttagttgtgtccagatgttgcatgacgggggagcacactcacattgtgtctgtgtgactcatgtccctggagttatgcagcgcacagcctacatggctgtacagggcagatctgattggatctcctaagagcaggagtgagctgccttctttgtacctgcgcctgctctgttgctgccagttgatggtgcctgtcagctggtgggcagccctggagtgtggatggaagaacaggcatgcacctggttttattgaggccaggggagagctggtgtgggagcctcaggccccagagagccctcgggacctcctgatggacagccagactccaaagctatgagaagtacagaaagcccacagttggtttccggtcctgggactctaacctgtgcttggttgactctgcaggtctctgatgagggggcagctgctccctggtggggctcctctggggacaggcagcttcccaagggtgggcgtgttctctcctccaaattccccttccttccatttcctttccctttcagttccaattccttccatttaggaaagaggcctgtggaaatcctgtacctccagagctcctgggaggaacccaaggctataagagagagctgcatatggagactgccgaagacgcatcaggtcccctgctgtggtcagtcctgccccgtgctgtgcctggtct

SEQ ID NO: 126880 - DNA, 1066 bp, Homo Sapiens
  misc_feature (45)..(64): n is a, c, g, or t
  misc_feature (806)..(806): n is a, c, g, or t
  misc_feature (896)..(896): n is a, c, g, or t
  misc_feature (932)..(932): n is a, c, g, or t
  misc_feature (1004)..(1004): n is a, c, g, or t
taccctcaactaaagggaataagcttgcggccgcggctgtaggcnnnnnnnnnnnnnnnnnnnncaaaaagaacataaaactttattaagaacatcttatactgtcatcagatacagccaaagaagaacgggtaaacaaacagggaaagttcatcttcccatgtgctattgccacctcagaacagactcctgtgtggatggctggaacaacagttggcaacaaatgctctgtataaataattcattaagtaacacaatgtttcctttctatacagagaagaactgggcttacattttaagttttgatatagtgcaacaactatgaaacaagactacatccttaggagctatttcttaatagaatacaaagcagtttagtagctttatgttatttcagataatgtaatttttttaatgaaaaattcagaaaggacattctaactttcccaattagttaatttgtactgttgagttttttctctctaaagatttctcagaatcagttcagtaactatactttaaaaagatgagttgctcatctacagtgataactgacaacttagttttgtgattttgcaaatcaagatgcctgggtcatccccacttttgctgattctgaaagatttcttatagaaaaaccctgattcagagtgcatgtgataggagataccaaaatagctgcatctggacagggaggttggctattgagcacagctgattctcagattcctggttcccctctatggtccttttacttactgtagtgatggaaggagagaaggagcgcccgagaatctgttcagatngtgactccagacagctctctgcactgtatgtggagaaagagtgatggcatcactcacacatagcagcctacggcacatgctttctcttgngggtcgaccaactgactcaagatgatgattgctcanggcacatggagaacgctatgattacatttgtatatatacccactatccattctgagaatgatctctttaganatgttgcgcaggtacagttataaacgtgaacctgcgatctgctcagccatctaatgtcttaa

SEQ ID NO: 126881 - DNA, 817 bp, Homo Sapiens
  misc_feature (48)..(81): n is a, c, g, or t
tgcaacccccccagggggtggcccgttccactaaacttttttaccagnnnnnnnnnnnnnnnnnnnnnnnnnnnnnnnnnnccccccagtccaggccagggcccgaaggcccccaaattccaggagggcccaggcctcaggatgccagcccccaccctagcagtttccacaacttctggcacaggaggccccccaggatttgcccaaggccgctgctgcccatcaccccacattggaagaacttgtcccgacagaggtcagctgggaggagctcctcatgggcacacactgtacgaacacagatctccttgttaatgacgtacacacggcggaggctgtagaagcagacctcgttgagacactgtttgcaaggcctgtgtatggagtagaggcgggtgcacgggtactgttcctcacggcagtcaagaggcccaggctctgtgggctccagctctgcatttcctggttctggggttggggctgggatgacttcctgttggacttgctgctgggactggaactggaactgttcctcggagggccgaggagtcacctcttgataatcatagtagtctgggttgtcgatctggtcgctatagtgggtgtactggacgtggtcagggaacggcggcagcgggtccaggtcatactggccctgagccagcaagcctgcaggcaggaatagcaggaagaggtaggcagctctcatggcaacaaagaggcaggccggggtggtgtcagagaggacagctgtccgggtcactccgccgcccgctccgagtccgcccgccggagccgccccttggcccgctccccc

SEQ ID NO: 126882 - DNA, 1431 bp, Homo Sapiens
  misc_feature (502)..(581): n is a, c, g, or t
ttgcggtggctgtataggccctgcgctgtggtctcgcgcggcttgcagccctgtccgtacaacggctcgcgtttcggcccattcgcgtccgcgtgatagtactgagcgtcgcttgctgctgccgcccccgtactcactgcatcttcggttcattagtgcgtgaggttgtcgtctcctctgcttcgggtccggtggcgtccgtgcgtggtggtggggtggtgctgctgccctcggggcttgggccgcgccaggcgtgggttttgtcgtctggtggtggttgtctgtgggactagcgcgcgctcctggccgcgccggtctgcgttctcacctaggttgcgacgcgtcgctatgagatgccgcagctgtgtgcctgtgctctctaagatgtgtccgtcgttctgttgaggagccgccgccgtgctattctacgctgttggctccgcgttcgttgttgttggcctccttttgctgcggcttatttttttgcgtgttcgtcgcttcnnnnnnnnnnnnnnnnnnnnnnnnnnnnnnnnnnnnnnnnnnnnnnnnnnnnnnnnnnnnnnnnnnnnnnnnnnnnnnnngtaaaaacttgtttttaattttgtataaaataaaggtggtccatgcccacgggggctgtaggaaatccaagcagaccagctggggtggggggatgtagcctacctcgggggactgtctgtcctcaaaacgggctgagaaggcccgtcaggggcccaggtcccacagagaggcctgggatactcccccaacccgaggggcagactgggcagtggggagcccccattgtgccccagaggtggccacaggctgaaggaggggcctgaggcaccgcagcctgcaacccccagggctgcagtccactaactttttacagaataaaaggaacatggggatggggaaaaaagcaccaggtcaggcagggcccgagggccccagatcccaggagggccaggactcaggatgccagcaccaccctagcagctcccacagctcctggcacaggaggctgccacggattggcacaggccgctgctggccatcacgccacatttggagaacttgtcccgacagaggtcagctcggaggagctcctcatgggcacacactgtacgaacacagatctccttgttaatgacgtacacacggcggaggctgtagaagcagacctcgttgagacactgtttgcaaggcctgtgtatggagtagaggcgggtgcacgggtactgttcctcacggcagtcaagaggcccaggctctgtgggctccagctctgcatttcctggttctggggttggggctgggatgacttcctgttggacttgctgctgggactggaactggaactgttcctcggagggccgaggagtccctcgtgccgaattcgccacccaggcctcgctacctaggacc

SEQ ID NO: 126883 - DNA, 752 bp, Homo Sapiens
ccttcagcacactccctgcccctcccagtatctgtgaggtcagggggccttcctaggtctgccaagtttagcctccagccaggcacactggggacagtgtgggacctccatggagctgcctggatgggcctgagtgatgccagcctacggcagtcatactgcccacactgccaagagcccacatgggcaagggccaaagaccctccagcccaccagcaccaccccctactccaccccaacttcagggcgtgcctccatttttccagctgtcaagaaagcccttaccaagaggcccaggctctgtgggctccatgctctgcatattcctggcttctggtggttgcgggctgaggatgacttcctgttggacttgctcgctggcgactggcaactggaactgttcctcggaggtgccgaggacgtcacctctcgcagccagagggaggataagggggtctgctccctctacccctcccagggggtctccccaccccagctgccggcccagctcctatcctacccctagcccgttaccttgataatcatagtagtctgggttgtcgatctggtcgctatagtgggtgtactggacgatggtcagggaacggcggcagcgaggtccaggtcatactgggcctgagccagcaagcctgcaggcaggaatagcacaggaagaggtaggcagctctcatggcaacaaagaggcacggccggggtggtagtcagagaggacagctgtccgggtcactccg

SEQ ID NO: 126884 - DNA, 1642 bp, Homo Sapiens
  misc_feature (942)..(960): n is a, c, g, or t
  misc_feature (1518)..(1552): n is a, c, g, or t
gcctgggtggcgtttcggcacaggctgggacaccgccggcggggagagaagcggatcccgtccgagccccggccccaagtaacgccgccgccccggagccgccttggaggtccccctccccactaagtgcctctttgcatagcaccagtccccacccgcacgctctctggaccactacagctggacgggcaatggcgggtcggggaggcgcagcacgacccaatggaccagctgctgggaacaagatctgtcaatttaagctggttctgctgggggagtctgcggtaggcaaatccagcctcgtcctccgctttgtcaagggacagtttcacgagtaccaggagagcacaattggagcggccttcctcacacagactgtctgcctggatgacacaacagtcaagtttgagatctgggacacagctggacaggagcggtatcacagcctggcccccatgtactatcggggggcccaggctgccatcgtggtctatgacatcaccaacacagatacatttgcacgggccaagaactgggtgaaggagctacagaggcaggccagccccaacatcgtcattgcactcgcgggtaacaaggcagacctggccagcaagagagccgtggaattccaggaagcacaagcctatgcagacgacaacagtttgctgttcatggagacatcagcaaagactgcaatgaacgtgaacgaaatcttcatggcaatagctaagaagcttcccaagaacgagccccagaatgcaactggtgctccaggccgaaaccgaggtgtggacctccaggagaacaacccagccagccggagccagtgctgcagcaactgagccccccttgcctgccccgctggcccccgcctcctccgcctgaatgacccgactggaatccactctaaccaatcgcacttaacgactcgggccaccactnnnnnnnnnnnnnnnnnnntccaccatgatttctccatataattttgatcataggccggagtgagtcattccacctgcacctttctgtacaaatactaattcaattttaagtcttaagtcacttttttaatatatatgatcttctgctcttcccacttcctcccctttctactgctctcccattttcccttgctgggagtagccacatgctcttgccccccaacccttgtatatggggacagtggggtcagtgcagctaccctttctttccctcctgcggaacagcggacccagcaagagcatccacatcctcactttgttcggagtggtctttggtttgggcggtggggcagaccttgggaaggggcttaggaagggagaggcagctcttccttcagctggctctcatcaggctgcagccccctccccgctcccacctccctgctgggaaaccacagcattatcacagcattattgtgacagccacgaacccattgcccacaacccctccaccctcggtcaccccaacctctggctctgagccctgttctgaccaaatcatgatgatgagtatttnnnnnnnnnnnnnnnnnnnnnnnnnnnnnnnnnnncggaaccaactttttctgtattttgtattgtatgttttcttcaacatgtaaccaatcagtatcttgtcaatatagtcagccgatcgatcg

SEQ ID NO: 126885 - DNA, 692 bp, Homo Sapiens
  misc_feature (31)..(31): n is a, c, g, or t
  misc_feature (563)..(597): n is a, c, g, or t
ggagggtccaccatgattctccatataattntgatcataggccggagtgagtcattccacctgcacctttctgtacaaatactaattcaattttaagtcttaagtcacttttttaatatatatgatcttctgctcttcccacttcctcccctttctactgctctcccattttcccttgctgggagtagccacatgctcttgccccccaacccttgtatatggggacagtggggtcagtgcagctaccctttctttccctcctgcggaacagcggacccagcaagagcatccacatcctcactttgttcggagtggtctttggtttgggcggtggggcagaccttgggaaggggcttaggaagggagaggcagctcttccttcagctggctctcatcaggctgcagccccctccccgctcccacctccctgctgggaaaccacagcattatcacagcattattgtgacagccacgaacccattgcccacaacccctccaccctcggtcaccccaacctctggctctgagccctgttctgaccaaatcatgatgatgagtatttnnnnnnnnnnnnnnnnnnnnnnnnnnnnnnnnnnncggaaccaactttttctgtattttgtattgtatgttttcttcaacatgtaaccaatcagtatcttgtcaatatagtcagccgatcgatcgacctc

SEQ ID NO: 126886 - DNA, 968 bp, Homo Sapiens
ggtatttttttgtgcgccccccttttgtggttgtggcttgtgtggtgtttgccttgtgttgtttttttcacagagaaataaaaagctttattattccctctaagggattaatgccagggaatgaatggtccccataccccccacccctgggggagactgacagaacagtgctggacaaggcatggcccccttcagtttgggctgaacttccaacccctgaagccatcactcaagctaaaatgagcagttctggtcctcagggaaacagccacctgggccaggcccaggaatccaagcctccaaagctcttggggaccaggcctgggggccaccacggctgggcaaggttcatccctggccaccagctactctagaggggctgggccccaacccaggagacctctcacacacagtgaaggctgggacagagctgcacgcttgggggtgcctgaaggtccagaaagagctgcaggatcgggtccggaggacccttggctggagtgtctcaagctgagtcgggtccgtggggccagggcaccccctaaggatcagatcagaatccgaggtggagacattccaggtcagggctgcggcccaaagatgggcctacttgtcaatgaggcctccctccttgagcttgaagtagaagaacttctccagggcgctggcacagcggcagtactcgctgtccggggggttgtactcgcgacagttggcgatgacccgctgcaggtcggccacaaagagcttccgggtcacgtagtagcggcttcgcagccgctcagtcatggtcttcaggtcaatggggaagcggatgacctcgtagtagtcaggggcctccgacttcttcacaggctccatgaagggccaggcactggggtgagacttgatttgggccagcaggtttttgagggttgtgtagagccctcgtgccgaattcaccacccagcctcgtacctagccctata

SEQ ID NO: 126887 - DNA, 2971 bp, Homo Sapiens
tcacccccagtgaaggcctgggacagagctccacgccttgggggtgcctgaaggtcccagaaagagctgcaggatcgggtccgggaggaccttggcctggagtgtctcaagctgagtcgggtccgtgggcccagggcaccccctaaggatcagatcagaatccgaggtggagacattccaggtcaggggctgcggcccaaagatgggcctacttgtcaatgaggcctccctccttgagcttgaagtagaagaacttctccagggcgctggcacagcggcagtactcgctgtccggggggttgtactcgcgacagttggcgatgacccgctgcaggtcggccacaaagagcttccgggtcacgtagtagcggcttcgcagccgctcagtcatggtcttcaggtcaatggggaagcggatgacctcgtagtagtcaggggcctccgacttcttcacaggctccatgaagggccaggcactggggtgagacttgatttgggccagcaggtttttgagggttgtgtagagctggtcggggtccttcagctccttccccttctccttccccaatggcttccagcctgtctctcgaatgccaggaacgctctccacagggatctgcctcacgccctccttgaagcagctgagccccgggtagaccttgcggatctgggcctgtttgcgctcaatcagcttcttgatgatctctttctgcttcttgatgatgtgggacagctccgtgtaggggatgcggggattcagctcacactcccatcagcgtcgctccctcgtagtccttgatgtagcccaggtagcggctcttgggcaccttgatgtccttggagaaaccctgctttttgaagtagccgatggcgtactcgtcggcgtaggtgaggaagtagagaatgttgtgcttgatgtgatactccttcaggtggttcatcaggtgggtcccataacccttgacctgctcattcgaggtgacagcacagaagacaatctccgtgaagccctgggtgggaaacatgcggaagcagatgccaccgatgacccgcccatccttgatcaaggccagagtcttgtgcttcgggtcaaagacgaggcgggcgatatactccttaggcatgcgcggcagctggtgggaaaagacattctgcagccccacgagccacagcaacacccgccggttggccttgggcgtcagtgagttgccgatgacatggaactcgatgatgccgcggcgctcctccaggcgggctgtctcatcccgggccgcattggccgaaagcaggctcgtctcaggccccagcatggcagcagggtcagtgatggtcagcatgacctcattgaccagctccatggggatgtcacccatcacacggagccgcttggcatcctccagggtcaggttctctgggagcgtcctcttctcgcctggcataggctcggcccctgcagaatccagactcagggagctgttgctgcccccacccatgctggggctgaagatgggggtgctgggaacaaccgctgcactgactgaagctggccggggaaccagctgtgtcccctctgagggtggcatggtgaagcctgactcccagattggagagtttgccccatagatctcctcctccagcatggacaggaatttggggaagtgagtgaggatgagggtcctcttctcgggcaccaatttgtccttctccactcggaacttttccagcagctgccggcgggtaacggtgaaaatggaccggagaaggcttcgcccaaagacatgagtggtttcgtagcgggggaggctatcacagctctggggcacgtggcagtaacagagccatctggtgtaattgaccttgtaggtagccacgtcctcagcctgagacctctgccgaaactgggcaggtgtctcaagcttccagtagttaaggcagagcaagaacatctttgagagctcgaacatcgtctgccgctcccggggagccaggtgactaaacttgtactgcacaaagttcagcacaccctgctcaatattaggtttctcaaatggagggctgcccagggacccctccaccacaggccgggtcatctgcaggatgcatttccgcagtagcttgaagagcgtacgcaatagacctgcttggtgtctgtcgtcctccttccttgtgaacagacatgaagagattctccacatccaccacccatccccagcagtcggtttatctcatcctctgacacattctccaagtgggatacgtggtcagccaaggggtgctcacaactgcggcacagctcactcaggttggcagctggctgctgcagatccatgcggggtgcagtggggggcttggggtttttccagccattacacttacaggtttcattggcctggaattccacggctctcttgctggccaggtctgccttgttacccgcgagtgcaatgacgatgttggggctggcctgcctctgtagctccttcacccagttcttggcccgtgcaaatgtatctgtgttggtgatgtcatagaccacgatggcagcctgggccccccgatagtacatgggggccaggctgtgataccgctcctgtccagctgtgtcccagatctcaaacttgactgttgtgtcatccaggcagacagtctgtgtgaggaaggccgctccaattgtgctctcctggtactcgtgaaactgtcccttgacaaagcggaggacgaggctggatttgcctaccgcagactcccccagcagaaccagcttaaattgacagatcttgttcccagcagctggtccattgggtcgtgctgcgcctccccgacccgccattgcccgtccagctgtagtggtccagagagcgtgcgggtggggactggtgctatgcaaagaggcacttagtggggagggggacctccaaggcggctccggggcggcggcgttacgtgggcgccacccaggcctcgcgtcctt

SEQ ID NO: 126888 - DNA, 363 bp, Homo Sapiens
cggtggggcagaccttgggaaggggcttagaaagggagaggcagctcttccttcagctggctctcatcaggttgcagccccttcccgcttcccacttccttgctgggaaaccacagcattatcacagcattattgtgacagccacgaacccattgcccacaacccctccaccctcggtcaccccaacctctggctctgagccctgttctgaccaaatcatgatgatgagtatttgggggtgggtgggtaagggggagagtgggaggggacggaaccaactttttctgtattttgtattgtatgttttcttcaacatgtaaccaatcagtatcttgtcaatatagtcagccgatcgatggacct

SEQ ID NO: 126889 - DNA, 1224 bp, Homo Sapiens
ttttttttagaaaataggtggtttttaatggaaaattttataaaagggagagggcatgtaaaggggcccctgggccaggcccgggaccacgacatcagtgggaggcgctggtggaggcgggagcagtgcagggcgtcgcagcttccaggcgtccgtaggtcccttctccaggtccaggcgggcggccccgtgcacatacgcataagcgggctgcaggatgcgcggcaggggccccgagtggcgggcgcgggtgggcggccagcgggtgccagggctcaggcccggggccgtgcgggcgcacagtggtgcggctggtgcgtgggtgcgaatcccgggcggcagatgcagcggaaggagccatccgtgttgaggcaacgcgcgttgacgcacagcggggaggcagcctcggcctcatcacactcgttgatgtcaacgcaggccatgcgggtcatgtccaggcggtagccgtcgaagcaacggcaggtgaagccttcggggacgcgcacgcagcggccgttggtgcagccgtccaggatcccgcactcctccgcctccagctcctcgtagggctcagccagggaaccagcatagcttccaccttcaggaggctcctcgggctctgggaaggagcggcgggtgtcccgggaccgatagggccagcgggtgcccgggccaggtggcgcaggagcctcagattcgccataggggccaccatcgtcctcaaagtctggcatgtcgaagcggggtgccccataaggagcctcccggcgggcgaagggcccaggtggcggtgggtaggggtcgtagggtagcgcaggtggtgggtacaactcaggcccatatgggaggccctggtaaggtggacctaagtctgggccgtactcgtaggggagtccaaagccacctggtcgcggggggctatatgcgggggggcgtagcacattgcacagggcctcgaagtcatctgagtcctgcgcagggcagagggcgcagtccatgccccaggcctctccatacaggcagcagcactctgtgtaggtggcctgacggtccagccgagggtggctgcacacgaggtcagcccccacttcctgccagcacactcccagattgtcatcgaggctctggctctcgttggagacgcagcggcgctgcgagccatccagcaccagtgggggctcgcaggtacagtgataagagcccacagtgtgacacagcggccgc

SEQ ID NO: 126890 - DNA, 395 bp, Homo Sapiens
tactctcagaccctgattcttagcaggcttcattacccttgatctcagcacgtccgaatcccagtctcagccttcagattctcagcgctggctccagaaaccccggggccacccaggaccctccccatccagtcctctgcctcctctcccaaggggggtatgtgagtggtgggtgtgggggccagcaggggctgattgtttgccttggctcctgttcccagatgacttcgaggccctgtgcaatgtgctacgcccttcgcccgcatatagccccccgcgaccaggtggctttggactcccctacgagtacggcccagacttaggtccactttaccagggcctcccatatgggcctgagttgtacccacaactgcgtaccgtacgaccctacccat

SEQ ID NO: 126891 - DNA, 1293 bp, Homo Sapiens
  misc_feature (1172)..(1206): n is a, c, g, or t
  misc_feature (1209)..(1249): n is a, c, g, or t
tttgggccacactgaggcatctttatttctctgggtcacacagagcttgggcctgggagcctcttctgcatgggggctgcagctgccaagggagcggctgagaccagaacaagcgctcgggtgggccccagtgcaggttgggatgtgcccggtggagtaaggtgtgagaacccccagcctcactctctgcctggtcctgaagcagacagcagcaggctggcccagcctcccctttatgagactatcctagggtttgacagcaagtcccagatgaagggtgacaggcagctggggtccacctggtctctcctcagcagggggaaccccctgcgggcagctgggaaggcagtggccaaaggtcaagaagatgaactctgcccagacttctgctgcctgtggctatggtgggacagggctgcctttctggtcacactgggcagcaggcgactgccagggacctcccagtcccagggctgcattccctgcccggcagcccctctgctgcagctttcggatgagttccagcaggttcatctgcagcatcagctcctgtgggttggtggtcacgtagaagccagccacccccgccttctccagtgtgctctgctggtcagccaccttccggtccagctccaggatgatcttctggtccatcgcccgctgctcctcacggatccggtgttccacggcctctagttctcgctgctgagccgcctgaaccacaggcaggttgtggggccggcaggcctgctgggcttcctggtgcttctgccgcagcgcctgcctgagcactcggtgctcgttctgtaggcgcaggcgctggttgtacaggctcttttcggtgaggtgctggatctccagtagcccctgcacgatttcgaacacggtgccgtcgagaagcgccagggccaggtcgctgagcgtggtgtaggacaggcgctgctggaaagagctgggcaactccttcaccaggctctgtagcgccgacagcaactggtagtgtcgctcctgctgccgggcaccgtccgccacctcctccaaggcggccgcgtagcgctccatggcgcggacgcccgctagccgccggcggcggcgacgagctcccccagcttcacgacatccccggccgtaatggccgaattcccgggcatatgtccggtaccgtcgactgnnnnnnnnnnnnnnnnnnnnnnnnnnnnnnnnnnncgnnnnnnnnnnnnnnnnnnnnnnnnnnnnnnnnnnnnnnnnnttgcagacgcgctagcgccctatagtgattctatacgatctttt

SEQ ID NO: 126892 - DNA, 2099 bp, Homo Sapiens
  misc_feature (1930)..(1958): n is a, c, g, or t
gcacgaggtttttttgcatggcgacccgcgtttattttattaggaaggaaacaaccaagcaccccatgctcctgcccggcactcccggtgggaacatgccaaacagccggcgatcgcacccagcccacctgtcgtggaggtcccttccttctcaggccacagaaataaacccgtgtacttcttattgttagcacaacatcaccagaaaacgataacgacagccaagcaggacagacagttaagtagtacttccacactcccaaactcagggagccctataaccttaaggagggagcatttgctacacaaaagcactatccacagccagggatgatgtagccacaagaataaataaggagaaaggagaccctagaattcatgtcccttacgcctcacagcgacgaaccctgggaagctggttggtctagcatctacgcagaatatgtacaccttgttgggagagatgggggcagcccaagaaagctcctcagcgggctgaagagggagcaagatgggctgaggggagcttgcagttcatgctgcagtaggaagagggaagctcttcagtccagtgcgctgcagggtgggaaagcaacaacacggacaccgtcccaccctcaacccccccactggcacagggtcacacaatctgggtcaaagaaatagtggggcccttgtggtcatcaaagcgatccatggtcttgaggctgaggatcatgtgcaggccataggtgaagatgaagagcatgaacagggaggtgagcagccccatccagatgccgggggagaagaagctggcacagtcgctggcgtaggagaactgctcccccattacgttgaaagcctggatctggaagtcctgaagcatcatctgccagggagagggctgcgtgcgggccacgaggagactacccttcttgctcaggctgctgacatactcgcagtggaaggagtagatgctgggccctgtgacctgggaagcattgaagtaggcgacggagccattgctgtggacttcgaggcgctccatggtaaaccagtgccgggcagacactgggtagaggcggttggccagaatgaacttgaatgtcactgtggtaccaaagagtcgttcataggtcagtgagagcctggcaaaggagtcattccagaaggagccagtcaggttgagttcctgcaccccaaaggtgaggggagtcaggtcctcccactggtccttgtacgccacagagaagttttgggcccagaacaggatccggggagcggtgtcattgtaactcacaggaggatggatcacaggtgatactggctgtttttgtagcagctggcgacctagccctccggccaccacggctacatcacgggccaccctggaagggcggaccgctgtgagggccgctgtgtatgggacatcttcggacttgagtgtgctcaggacctgcccgatgacctcatcgttgcctgtgaggacttccctgggtgccatcagaccagagctggctgtgtagggcaggcgaatgagcagcagagcagggaggctggcattgagcttcagctcccgcagggtggccaggtccacatgcaaggggctggccccgagcttctcctgcaggtaagtggtcagagtgctgactgcataccagtcgacggcaggaagcaccagtgaggagggggccaggtccagggcattctctaggttagaaaaggcgctgtcctgcttgtttccaaacacaccgccatatgctgtgaaatcctcaatgctcagcttgtcctgcaggaacagcagcacattcctgggacccagctccagggcgggatctaagtaggtagagagctgcaagtcgctggtgatgtggccttcatgagtgtcggccgcaggagcccacaagtcccggtcactcgaccacagcaccagcgggacctgctgctnnnnnnnnnnnnnnnnnnnnnnnnnnnnnaacgacaaaaacaccggcagccacggcatgcgccagagcgcctgggcgcaccgcggccccatccgcactcgagccgtcgccatggccgccatcatagcctcagcctccactgcctcagcggcctcgacagccgcagatcag

SEQ ID NO: 126893 - DNA, 1036 bp, Homo Sapiens
tttactttgtaacgtttttaataagaaaagttttaaacaatttatttttggcaaaaacaggtagggcaaccaccaccccacagccctgagtggaataggaagacttggaaaagcacacgaagagggcagggacatgaggtgtcatcttgtagcagcttctgagaaagagctcagtccaatggcaagttcaagtccacgggtgaaacagccaggatgccctcccagcccccgtgggcctggatccagggcgtgaagctgtgcacgtgctccacgctgagtccggccagggtgccccccagcccggccacgcgccggctcagctccatggctagggccaggcgggccaggggctccggggaaggaggcgggggcccggggcatgctcggcttgggcgagagctgtcatcccggctacagaacagctccaccaggcgggcgaaagagtcggaggacaggcggaccagcttgctgcgcagggcggggtccgaggccagcttctggttaatgacttctgcctcctcctccagcagggccaccagcctccgcagtatggcttccttctctgtcgatgggggaccctgtaattctgggctgggcggagatttcagctgctcttggaccagctgttccagccgctgggccaccaaagcatagaagtctggagtagctgggccaggctctaaaccatagcaggggcggatgggcagagagcaaggccgaggggactcagagggggctgctcctcgccccagggagcagggaagacatcttcgaaggcgggctcaggaagtctgttggctcttcttgggcagggcttctaggtggagttggaacaggagacccggcagcctcaccacgcctaaggaaggcagctaggaccctcagcgtgtcttcccggagccccagctcttcagagcctgccatggaggcacctggtccggggccccaccgccgcctcctccactcaacttgcggtctcctccactgaactcgtacaaaccctcgtgccgaattcgccacccaggcctcgctacaa

SEQ ID NO: 126894 - DNA, 621 bp, Homo Sapiens
  misc_feature (549)..(549): n is a, c, g, or t
cctccagacttcctgctgtgcgccagcagctctggtgctgtgcttcccgtgaggacccaggaccccttcctgccatacccaccaaggtcctgcccacagggccaggctgcctctagcgccactactcgagaccctgcccagaggtaaaggaggcagggtgggggagccctggccaccttgcccgccatgccctgagccacgtccctccccctgcagggtggtgctggtgttgcgggaacgctggcatttctgccgggacggccgggtgctgctgggctcgagggccctgagggagcggcacctaggcctgatgggctaccagctcctgccggtgagtggccctggcctggcccgtggcgcatcctcactcccagcctgcgggtaacctgccgccctctcctctccccacagctacccttcgaggaactggagtcccagagaggcctgccccagctcaagagctacctgaggcagaagctccaggccctgggcctgcgctgggggcctgaagggggctgaggggatgatgtggggttcaggatggccccncccatggggggtggatgatttgcactttggttccctgtgttttgatttctcattaaagttcctttccttccc

SEQ ID NO: 126895 - DNA, 851 bp, Homo Sapiens
gggaagattgcggactcgtgtggctagccgatgaggaggccgcggggggaacccggcccccgggccccgagacctgactgaggtgagcgacctgcgcagtgtcccggggagtcatgtaggggtggcgcctgcgtgggagtggctgcgggagtggcagcgtggagctggtgttagcgtgcagctggccacggtctcctggcgtccctgggccggggtgggtgtttggggccccctgacttcgccgactccgctgccatcgcaaagcggtgcactctgggctccacgctgcgccctgcgaggtgggctgctgcgttttcatttcacgggtgaggagacttagagagacgaagccacttgtccaaggtcacgccgctgggtctccatcacccaactccatgcttcgagtcctgctctctgctcagacctcccctgctcggctgtctggcctgctgctgatccctccagtacagccctgctgtttggggcccagcaaatgggtgggaccggcctgttggaggaggccccagtgcaggtccttgtgcaaggactgcagcggcttctggaacaggcgaagagccctggggagctgctgcgctggctgggccagaaccccagcaaggtgcgcgcccaccagtactcggtggcgcttcgtcgtctgggccagctcttggggtctcggccacggccccctcctgtggggcaggtcacacttgcagggacttgagtcagcgtcatcatccgaaactgctcctcctttgacatttcaccccatccacgtgttgtctgcaccttgcagtcttaacttgggtttccatctgatggtccctggtgtgtgccctggacagagcgaa

SEQ ID NO: 126896 - DNA, 1822 bp, Homo Sapiens
  misc_feature (902)..(902): n is a, c, g, or t
tttttgggaaggaaaggaactttaatgagaaatcaaaacacagggaaccaaagtgcaaatcatccaccccccatgggggggccatcctgaaccccacatcatcccctcagcccccttcaggcccccagcgcaggcccagggcctggagcttctgcctcaggtagctcttgagctggggcaggcctctctgggactccagttcctcgaagggtagcggcaggagctggtagcccatcaggcctaggtgccgctccctcagggccctcgagcccagcagcacccggccgtcccggcagaaatgccagcgttcccgcaacaccagcaccaccctctgggcagggtctcgagtagtggcgctagaggcagcctggccctgtgggcaggaccttggtgggtatggcaggaaggggtcctgggtcctcacgggaagcacagcaccagagctgctggcgcacagcaggaagtctgtgcagtagcctggaggcacagtcaggtcctggcggtatttctcctcccccagcagctggcgcaacccctcagctactatgtccttgtgactgtacttgcagcgggcacggtcggtgatgagaggctggggaaagatgggcacttgctgccttcggggaaggcggggaccccggtatcctgggagctccagctccacggccgtgtccagcagggagaggtagcgacgcacaatcagagcatgaggggtgccactgatgtagttgatgaagccaggggaaaaaacaaagtgcagggctctgaagggcaggcaccgcagttggcacagtgacatcaagatgttgactgtagccaggggtgccacccctgcttcccgagccaggatcctctcaaggcagggcataaactgctgttccaggggcaggtagttcaagtcncaaagggcaggaccaatttctgtaccaccttgctgttgagttgcgtttcctgaaccaccaggaagtgggcaatggcttccagaagctgggcttcccgcaaccggtgccgggccaggtgctgggccaggagcaccatcacgtggggagtcagttcctctggccttgcctctgccaggctgctgatcagatgctgccgtggataccgcagaaaacgggggcagcttagagcagcttccaacccttgcccacctcggagaaggggctgcaaagggggaggtggcttcggagggaggcggagccttcgctcctgttccagggcacacaccaggggaccatcagatggaaagccaagtaagactgcaaggtgcagacacacgtggatggtgtgaatgtcaaaggaggggcagtttcggatgatgagctgactcaagtcctgcagtgtgacctgctccacaggagggggccgtggccgagaccccaagagctggcccagacgacgaagcgccaccgagtagtggtgggcgcgcaccttgctggggttctggcccagccagcgcagcagctccccagggctcttcgcctgttccagaagccgctgcagtccttgcacaggacctgcactggggcctcctccaacaggccggtccccccatttgctgggccccaaacagcagggctgtactggagggatcagcagcaggccagacagccgagcaggggaggtctgagcagagagcaggactcgaagcatggagttgggtgatggagaccatgactccccgggccctgcgcaggtcgctccctcagtcggtctcggggcccgggggccgggttccccccgcggcctcctcatcggctagccaccgagtccgccatcttcccagcagcccctacctcgtgccgaattcgccacccaggcc

SEQ ID NO: 126897 - DNA, 1036 bp, Homo Sapiens
gccccgagggatctctttttttcaggcgcccggggccctaaaaactggttttttccccggggggccgggttagtttccatttccccccaaaagggcccgggacccctcttttttgtccccccccttgctgtcgggatttggcgtttcccgaaccccccccgggaaggtgggccaatggcttcccagaaaggtgggggctccccgccaacctgttcccggggccaggtggctgggcccaggagccccattcccggggggagtcagttcctttggccctgcccttctgccaggctgctgatcagatgctcccggtggatcccgcagaaaacggggggcagcttagagcagcttccaacccttgcccaccctcggagaaggggctgcacagggggaggtgctttcggagggagggcggagccttcgctcctgttccagggcacacaccagggggccatcagatggaacgccaagtaagcctgcaaggtgcagacccacgtggatggtgtgaatgtcaaaggaggggcagtttcggatgatgagctgagtcaagtcgtgcagtgtgacctgctccacaggagggggccgtggccgagaccccaagaggtggcccagccgacgaagcgccaccgagtagtggtgggcgcgcaccttggtggggttgtggcccagccagcgcagcagctccccagggctcttcgcctgttccagaagccggtgcagtccttgcccaggacctgcagtggggcctcctccaacaggccggtccccccatttgctgggccccaaacagcagggctgtactggagggatcagcagcaggccagacagccgagcaggggaggtctgagcagagagcaggactcgaagcatggagttgggtgatggagaccatgactccccgggccctgcgcaggtcgctccctcagtcggtctcggggcccgggggccgggttccccccgcggcctcctcatcggctaggcaccgagtccgccatcttcccaggagaccctagatagccgcccggacatccggaga

SEQ ID NO: 126898 - DNA, 1333 bp, Homo Sapiens
  misc_feature (133)..(186): n is a, c, g, or t
  misc_feature (198)..(198): n is a, c, g, or t
  misc_feature (460)..(460): n is a, c, g, or t
cttttttaaaaaaagtttattttccacactatttgtacagctgtaaactcaaggaatcatccaatacttgtacaaatctgggagaacagttaataagcaccttcagtggtttccacagtttaagaatttaccnnnnnnnnnnnnnnnnnnnnnnnnnnnnnnnnnnnnnnnnnnnnnnnnnnnnnncctaccaaatcntgatgaacatttgatatagagggtttaatatgaaacgataaatacaaaaagtgagactaatttatggatttgggctacgtaaaagacctacatgggcctcgaatcttgtgattcttggggctatatttgcctctcaagacaaactccaattattccaggaagactttctttccattcaggttccaatgtactgcagaagccagtgaggaccaagtcaggagaaggtgggggcagagaggctgagtgtactggggttggaggnaaagaggagagactcttttccccaaagagagtatcaggcaaattcttccatgttctcaagtataagtggtctttggcaaaatgtacccattttctttttggagttacttaagagttttacttattgctgttcttaaattccttcccctaccacttcctcttgggcttttttatttctcttgttgatcaatctcttttttgtgatacttttcattgaatcatctcgactcctttatcccatcctttactgactcaaactccttatgctgaacttttcaatccaaaatttctattgttttaggactctgggaagcagttgataaaaagataacacgagctactgatatggtcaggagatgttttctaaacaaattgtagaaatataaacatgaaatgtggcaatgatccctttaattagatcattgagcaataaaggatatgaaccattagtataaatattcaattcagtctttccggattgtgttgttagataagaatacatccaaaaagggccacagatcgagggagaaaccaaggaggggtgaggtcatggttgagtgtaaattggttctgtcatgtggaggccggaggtgagggactgtggtgggacatcatctggtgccagccccatcctgtacctcagataggtctccgtgaaaaggagggacatcagtgcaagcagtggggctaaagaccagcacagcaacagagactagaaccttggatgcaagtattttgggcaaagaggaataattagtaatctttggtataatttaaggcacatcaaaaaaatcccctattctcaaatatctgacctacaccttgaaattcctaccattggacattcttttgatttaagcctcgtgccgaattc

SEQ ID NO: 126899 - DNA, 895 bp, Homo Sapiens
aaatttccatccatactctcacgaattaggagaacagttactaagcaccttcagtggtttccacagtttaagaatttaccattaaaaaattttagaataaatctaataaaatgaataaaatagttataaaaatcatacaaaatctatgatgaacatttgatatagagggtttaatatgaaacgataaatacaaaaagtgagactaatttatggatttgggctacgtaaaagacctacatggtcctcgaatcttgtgattcttggggctatatttgcctctcaagacaaactccaattattcaaggaagactttctttcaattcaggttccaatgtactgcagaagcaagtgaggacaaagtcaggagaaggtggggcagagaggctgagtgtactggggtttgaggaaaagaggagagactcttttccccaaagagagtatcaggcaaattcttccatgttctcaagtataagtggtctttggcaaaatgtaccattttctttttggagttacttaagagttttacttattgctgttcttaaattccttcccctaccacttcctcttgggcttttttatttctcttgttgatcaatctcttttttgtgatacttttcattgaatcatctcgactcctttatcccatcctttactgactcaaactccttatgctgaactttttcaatccaaaatttctattgttttaggactctgggaagcagttgatcacaaagataacacgagctactgatatgggtccaggagaatgttttctaaaacaaaattgtagaaactatgacacctgaaatgtggcattgatccctttaattagatcattgagcaatcccggccgtaatggccgaattcccgggcatatgtccggtaccgtcgactg

SEQ ID NO: 126900 - DNA, 733 bp, Homo Sapiens
  misc_feature (622)..(622): n is a, c, g, or t
  misc_feature (688)..(688): n is a, c, g, or t
tttggaggactaccccaacatctatttatttacttataatcacatattctatgagtatattacagaaaatatgttttatcacatcattttattagaaaattacataatagcaatgggttaatgtatgtcaagaacctactgaggctccataatggaaactgttactattaatagcatagtaaatagccaagaaaaactaaacactgtcaggaaaagctcagtttctcaaaaaacataatagggaaccatgaaagacaaaaccagtacctcagctcatcctacatctcagcaatgcctcagacatttctgctaacaagacatacattatgaagattacacatgctcttgttcacatgcccacaggactactgagaatcttccagagaacacaaatgaaagccacttttctaatcatcaccagcttaaactaagctttggatattaatgcaccaagtctccctgtctatgggaatgcagttttcctctctctgaatcgatacaaaataatactaatcataaaatatacactaaacttatttaaaccttttgattataagtgaaataacttttaaaaaagaaactttagatacagtatatattttgatctttatcaaaatcctgngctggcagttctatccaaataccaacattttaaaattaccccagctacaatcctcaatacgcacanaatcacaatctgatggacaagtttaatcatgcaatgagtatgtga

SEQ ID NO: 126901 - DNA, 890 bp, Homo Sapiens
ttttgtataaaatttaaattttatgatcatgtctggacctttttacacttaacacaatggaaatgttcatattcatttttttccccaaaggaaaaatttctgaatcatcactatgttgcacagtagaatagaaatatgaattcaggtacttagtcaagtttctaaagaatgcaaataacagacatgatttaacttccaaaatctgaagtcatcaacatgattttgtagtactctatctcaggttttacctaaaaattcgttattattcagataaagatagctccctaatcacatgtttttaaaaagcctctgccccacgacaacttcctgagatctgtgaagaaactgcagtcttgtgatcagactccatataggactggcagttttgtaatcgtagggaaaaaacggtgactgattttacgtgtcaatcagttgtagtctgctgatctgattagaagccttgacaaatgcctggtggcgattgcaaataactgccaagcatatagggatgatacagtagcccactgttttgggatcagctcttgtacaagagtataggaacaaaaacatctgtaagtaaggtaccagaaaaataactgtccacacccaaaaaggcaaggagagtaattgagctttcaaggagtgtgtccatgtggttccttcaaggggctcctcagggtgctgttgaatgtgttccaaggccagcctgttgtaagtctcactgatttcaaaaacatagtaaaatgctgctgcactggctaacagatacaatcccactccaatccatcccatccgctgacggaagttcatcattctccatgctctgtgccttcctgtcccgtggtggccagcccgcccgccgtcccggatgccgccgcagtcggagcccc

SEQ ID NO: 126902 - DNA, 1843 bp, Homo Sapiens
  misc_feature (1466)..(1587): n is a, c, g, or t
  misc_feature (1734)..(1756): n is a, c, g, or t
tgagatgtaagctgggcggacatgggggagactgtgaaggaatggtcccccacaacagtgattttattaaattagttgctttataaaacattgcagatgtcataattgttaacataacaatttaccaaactgtagttaactggtgcagtttgctgagcatgttttataaaggaaaggaaaggaaatgccaaaaccctggtaaagttgttccattgcagcctaagagaacaaagatttgtttctcagacacttaaatcaggcaaataaaaataagtttccctcccccacctgaagcagttcatcagtagaaatagcctgataaataactagacagtctttgcactcgagagattccacaacatgtaatgcaataatggaaaggtttaccttctttagcttcaaagttggagggttttggtcattttaattttatatcaaactagtgcttttcagccgcagtatcttcactctgagataagcagtcttcttcacaatgtatttttaatatcctcatgttcaattttaagacaaagcaattttaatactaggtgcacaccacatgcccttgctgcaaactgcttttcttgacaagttatgaagtagttcaaggaggtatggttaaggctgtattactgaatggtgctggtaaatactacacaattttttttgtcacgttgcaaccttttgtttccaatttagtgactgctgctatgaaatcagatagcaacaacgacaacattattaggttttgaactatgatttagtagcaacttaggttcccaattttaaccccttggcagcaagatccaagttccctcatttgcacattagcacctaagtgtcaaggggttaaataaccagcacaaaagatactgcacttctgattgtagcatttggcagaactgaaaggaaaggaagttgtgctacatgttcaagggattgtgggcaacataaagatgacaccaagaaaagataaaatgtcacatgaagtcttcatagtcttgtacatatcctccatcataaccaccataatctgccagatcatctttcatggtggcttttaatccccctccaggaaccacacctttcttcttctttttggctttgctttgcttttcttgcttctgtttttcactgcaaagcacagtcagtgaattggtaatttttttcaagtcatcaatttccaatgaaatacacacatctcgaactaagacttccaaaaaactggcataatatagtgacttttcatattgtgtaattttatcttttagtaactttccaaactctgtaaagtcatctcttgaagatgggttcatagcatctattccataaactgcattattaacaccaaaattttcctttgctaattcgaggtctgactcttcctgtaatttctttagccgcagtttatctgctaattgttcttctggtgttagcactttaggttcttcgggttcttctaaccnnnnnnnnnnnnnnnnnnnnnnnnnnnnnnnnnnnnnnnnnnnnnnnnnnnnnnnnnnnnnnnnnnnnnnnnnnnnnnnnnnnnnnnnnnnnnnnnnnnnnnnnnnnnnnnnnnnnnnnnnnatcatcatcgtcatcccagttatccttgacgtcctcgtcctcgtcctcgccttcccagcggtccccgccggcagtgccgccgccccccaccttccgcactgggtcttccacggagaaagcgtcggcgtcccaggagtccgagtcccnnnnnnnnnnnnnnnnnnnnnnnatctcgagccgggtgtgagcgtgtgtgagagggagagctagcgaggagttagcacggcggaggtgagtcactgggtttgctctcccc

SEQ ID NO: 126903 - DNA, 882 bp, Homo Sapiens
cagaagaaacagatttttttatttcttttaaagagaaaacattaagatgacttaatgtagataatttgtttcaaactagcattcagttaacatagttttaaccagtttgtattacagtaaataaggccgatgagtataatcggtttcattttcagactggtaagcagagggccatttagccacccaagacttatatttaggatcattcaaaatacatcagtggttgaaccttcatatgggtttttctgttgcactgagtatataacaggtttaaacttatgtattaatttataatacaagtatagtgacatttaattttaaatggctcttcaagtttttagactggcttgagagaaaaaaacagaagggtgtcttttttccctctcatcactattaatctaattgtaacatgtaatattattttaattgtaattattctaattgtaacatgtaattgcaaagcaaatatctcctaaaggaatatggagaactcattaaacagtgtacaattcttgatttttccatccatacaagaaaagatgcacgtgatcacctaaatattcgcatttggtatgaaaatgcattaattgtccctcttggaaactcataatagctttttgcttgtttttttctaactagataccatacatagttatgatctaggcaaatgctagctttttattactaggtatcaattcacagcaggtaaaaaagttccaagaacaaatcaatttagagtaaactataaatttccttcaagtaaaatccatatatgaaataactctgacagagaaaatataagacataatccaaccccatgaagactaaatctcccggccgtaatggccgaattcccgggcatatgtccggtaccgtcgactg

SEQ ID NO: 126904 - DNA, 1356 bp, Homo Sapiens
  misc_feature (109)..(117): n is a, c, g, or t
  misc_feature (158)..(166): n is a, c, g, or t
  misc_feature (268)..(276): n is a, c, g, or t
  misc_feature (294)..(343): n is a, c, g, or t
  misc_feature (387)..(401): n is a, c, g, or t
  misc_feature (411)..(549): n is a, c, g, or t
cgcccccctgttttcccccggggggaaaatttttatcccaaagggcccaaggggggtataaccccgtggggattaggggtccaacaccgccgttgggaggggttctcannnnnnnnnaaaagtttaaaaaattcccacccttttccaaaaaggggccnnnnnnnnnaaaatttataaaagaactcccggggcaccccggttataaaccccaaaaaggccccaagaccccctttgggtttttttaaaaccctggggttcccccgggggnnnnnnnnnggggggaaatcaaccccnnnnnnnnnnnnnnnnnnnnnnnnnnnnnnnnnnnnnnnnnnnnnnnnnnctttgggggcccccgcccaaaaaaaaggttttaaaaattttttnnnnnnnnnnnnnnncgcaaaaaannnnnnnnnnnnnnnnnnnnnnnnnnnnnnnnnnnnnnnnnnnnnnnnnnnnnnnnnnnnnnnnnnnnnnnnnnnnnnnnnnnnnnnnnnnnnnnnnnnnnnnnnnnnnnnnnnnnnnnnnnnnnnnnnnnnnnnnnnnataaaaacttcctctttaatcaaggcttttaacatgaacagatttcttgaataaaatggaaagtttccagtacactgaaacataaatccgcaagtcaccacacatacaacacccggcaggaaaaaacaaaaacagcaagtttacatgatccctgtaacagccatggtctcaaactcagatgcttcctccatctgccaagtgtgttctggatacagagcacatcgtggcttctggggtcacactcagcttaggctgtgggtccacagagcactcatctggctgggctatggtggtggtggctctactcaagaagcaaagcagttaccagcacattcaaacagtgtattgaacatcttttaaatatcaaagtgagaaacaagaaggcaacataataatgttatcagaaagatgttaggaagtaaggacagctgtgtaaagcttgaggctgaaaagtagcttgccagcttcatttctttggtttcttgggtagtgggcgccggaacagcaagatgtgaggttctggttcatggatcatataatggacccatccctgactctgctgaacgccaagattcctccattcagattcagacatcagatgggttttagggaccagcttggctatgtccttgggcagcatgacatgtcgatactcaaactcctcgtcgtcgtatttgtccgaatagtaaatttgtttgtgcgacatgatcgctcggtttgctagccttcagccccgcgccgccaacctccaagcaactcccaacagcacgcgctcccacccactttggcctcgctttcaaacacccc

SEQ ID NO: 126905 - DNA, 840 bp, Homo Sapiens
tttctttgggttaataaaaaaacttccctcctttaaattcaaggccttttaacccatgaaccagatttcctggaataaaaatggaaaagtttcccagtaccactgaaaccataaatcccgcaagttcacccccacataccaccacccggcaggaaaaaacaaaaacagcaagtttacatgatccctgtaacagccatggtctcaaactcagatgcttcctccatctgccaagtgtgttctggatacagagcacatcgtggcttctggggtcacactcagcttaggctgtgggtccacagagcactcatctggctgggctatggtggtggtggctctactcaagaagcaaagcagttaccagcacattcaaacagtgtattgaacatcttttaaatatcaaagtgagaaacaagaaggcaacataataatgttatcagaaagatgttaggaagtaaggacagctgtgtaaagcttgaggctgaaaagtagcttgccagcttcatttctttggtttcttgggtagtgggcgccggaacagcaagatgtgaggttctggttcatggatcatataatggacccatccctgactctgctgaacgccaagattcctccattcagattcagacatcagatgggttttagggaccagcttggctatgtccttgggcagcatgacatgtcgatactcaaactcctcgtcgtcgtatttgtccgaatagtaaatttgtttgtgcgacatgatcgctcggtttgctagccttcagccccgcgccgccaacctccaagcggacgcgtggcggacgcgtggtcgacgatatcccgggaatccggaccgtacca

SEQ ID NO: 126906 - DNA, 799 bp, Homo Sapiens
gtcccccaccccataaaaccatcccggcagggaaaaaacaaaaaccaggcaagtttacatgatccctgtaacagccatggtctcaaacttcagatgcttcttccatctgccaagtggttctggatacagagcacatcgtggcttctggggtcacactcagcttaaggctgtgggtccacagagcactcatctggctgggctatggtggtggtggctctactcaagaagcaaaagcagttaccagcacattcaaaccagtgtattgaacatcttttaaatatcaaagtgagaaacaagaaggcaacataataatgttatcagaaagatgttaggaagtaaggacagctgtgtaaagcttgaggctgaaaagtagcttgccagcttcatttctttggtttcttgggtagtgggcgccggaacagcaagatgtgaggttctggttcatggatcatataatggacccatccctgactctgctgaacgccaagattcctccattcagattcagacatcagatgggttttagggaccagcttggctatgtccttgggcagcatgacatgtctcgtacgcatgcgccaattctatcgcctcagttcctgttactaattccttgtgccctcagcggccaaagctcacgaccctcgctattgctcccgcgccagcactaaccgatactcaaactcctcgtcgtcgtatttgtccgaatagtaaatttgtttgtgcgacatgatcgctcggtttgctagccttcagccccgcgccgccaacctccaagcaactcccaacagcacgcccc

SEQ ID NO: 126907 - DNA, 1047 bp, Homo Sapiens
  misc_feature (12)..(12): n is a, c, g, or t
  misc_feature (31)..(31): n is a, c, g, or t
  misc_feature (41)..(41): n is a, c, g, or t
  misc_feature (50)..(50): n is a, c, g, or t
  misc_feature (55)..(55): n is a, c, g, or t
  misc_feature (91)..(91): n is a, c, g, or t
  misc_feature (231)..(231): n is a, c, g, or t
ccccctccaaantaaccttttccaaacaaangcccccggantggcctaanggganttatgaaaagccaaattggcctactggggaggtgangggtccaaaagcaaactttagatggtttttcacacccatcctgttcatccatgactcaaagggaaatgcctagcccacccccattttttccagtgaagccactgctttacacagaagatacacatagcttccctattgtntattttcttttctaattatgtacatttagaaaaaaaatacaaccactgtgttaaacagcaggacagctagcaatggaacatacaccactatgctgaaaaaccacaccagcttggttaagcggaggagagaaacagagatggccttcatggagtgaagctgtcaatgcctgccatctccttagtctgtgacggatctgcactctgagggcaggccttctgagcgccgccactttgccaggcgctgcttaaaccatttctgggtctcctcctcggaaaggcctgcctcggccgcgatgaggcacagcgtggtggaatccgggtgcttgtcgaccttgttgaagttgtactccaggatttccacctggtcctctgtggggccgctcgcggtctccgccgacatggtccctgcgcggtggaagaggcaaaggcaagcgcaagccctgggtttggaagctgtgtttgctgatgccagcctgcttaaatagctgggctggctgacgcaggctgctgatagcacgtttatttacgcctatgagcacacactcgagcaaggacctgaaaaacctgcagcgtgggcaggaggtaaaccactgaaagtatgccgaggttacgtctctcctggttattcaggtttgatgttcaggctgggacttctgagagtctcatggaactttctcgtcactatcttctcgtccctgacctctctcctagccaagcaagcttcttcaccaagataggataagagagatgtggctgagagaagacggggaagagaaaagggaccctgagcctcgtgccgaattcgccacccaggcc

SEQ ID NO: 126908 - DNA, 1253 bp, Homo Sapiens
  misc_feature (69)..(87): n is a, c, g, or t
  misc_feature (1136)..(1170): n is a, c, g, or t
aacgacgccagtgccaaaccaaaattaacctcacaaaaggaaaaaaccttccggccgcatacgcggtcnnnnnnnnnnnnnnnnnnncaacaaaaagttaaggttttatttagaatatcattttagagacaaaaagcagttcactttatttagcaaaataaacttaaccaatgcatttaaatatagtaaattcaagaactttggtggttttttttcttagatgcttgcttttttgccagttggagtttctgtcttctggcccaacaggcttctttccaagttaatgcagctatattccaaggaagtgttttatgaaatctgaatactcaaacaccccttctgtattttcactcaaccatcattgtattagatgatacataaggaaagtgacttagggaagtaagttcagaaggaaatgtgttcccttctccctcatattatcttttcaacagaggcctggattgctaaatggattatgaaagcaaattgctactgggaggtgatggtcaaaagcaaacttagatggttttcacaccatctgtcatcatgactcaaagggaaatgctagccacaccatttttccagtgaagccactgctttacacagaagatacacatagcttcctattgttattttcttttctaattatgtacatttagaaaaaaaatacaacactgtgttaaacagcaggacagctagcaatggaacatacaacactatgctgaaaaaccacaacagcttggttaagcggaggagagaaacagagatggccttcatggagtgaagctgtcaatgcctgccatctccttagtctgtgacggatctgcactctgagggcaggccttctgagcgccgccactttgccaggcgctgcttaaaccatttctgggtctcctcctcggaaaggcctgcctcggccgcgatgaggcacagcgtggtggaatccgggtgcttgtcgaccttgttgaagttgtactccaggatttccacctggtcctctgtggggccgctcgcggtctccgccgacatggtccctgcgcggtggaagaggcaaaggcaagcgcaagccctgggtttggaagctccccggccgtaatggccgaattcccgggcatatgtccggtaccgtcgactgnnnnnnnnnnnnnnnnnnnnnnnnnnnnnnnnnnncggccgcttcctcgctcactgacttcgctgcgctcgtcgttcggctacagacgagtagccccctatagtgatcgatacagtct

SEQ ID NO: 126909 - DNA, 415 bp, Homo Sapiens
tttaaaagtccagaactttattaattctccctggtcccgcccccgccccatgggatgcttgcaaggtcaccaggcctcaggtccagggggtccgaagcgccgcaggagctgctcctggtcttccaggtccttccgcaccttcttgcgcatgtagaagatggggcagtcccggctggtgcagatgacgtcctcgtgcaggctgccctggcagcgctggcactgcgtccagaggcgcgagaagcgctcctccagggcattcagatgggatacctccttctgatacagctcagactcccggggctggcagaactcacacacggctcctgtggggaggcgggtcagcccaagtgctggggcccatccaggaactgggccaccccattcctgcccactgccaatcccagcttctgaaagt

SEQ ID NO: 126910 - DNA, 2132 bp, Homo Sapiens
aatggtacggtttaacttgggccctcgaggatacttttaaaccgcccgcccttttgtttttgttttatagcaaaagtccagaactttattaattctccctggtcccgcccccgccccatgggatgcttgcaaggtcaccaggcctcaggtccagggggtccgaagcgccgcaggagctgctcctggtcttccaggtccttccgcaccttcttgcgcatgtagaagatggggcagtcccggctggtgcagatgacgtcctcgtgcaggctgccctggcagcgctggcactgcgtccagaggcgcgagaagcgctcctccagggcattcagatgggatacctccttctgatacagctcagactcccggggctggcagaactcacacacggctccctggtggctgagcactgtgcggcagccaatgcagcagttgcggcgtttggcgaaggccaggaggccgcccaccttgcccgtgagcaccgtcttgcagcgcgtgtggtccccccgcagtagcacagcctcggcacggccctcgcccaggatgggctcgaagatgcgcaggaggggcttggccagctgctgctccaggtagtactgcgtgtcaatgggcaggctgtgctccagcacgaacagcgggtcctccgacttcatgtaggcggccacacccttggcggcactgatgatcacgtaggggacgcggtcgcccaggctgggcgcactcccggggtcccgcttcctcatcctctcggccagctccacgtgggcctgcttgccggcatagtcggaggccgcgcgggtcagctccttggtgatgaccagctgggagatatcgatgcggttgcacagcaggtccgagatgacgtcctgtgcgtgagccaccgcgccctcagggtctcggtcgatgagcaggcggcgcagtgaggcagtgaccaggttggccacgagggggcagttgtccctgcgcacggcctccaggcccttgcagtccatgcggtcgtgggcgtcgggccgggaggagaagagcaggcccgcgtagcgcttcttgctgataagcaggtatgggaagtagaccttctcaaactccagccggatgggcgacgggaagtgacctgacacccagtccgcggcctcccgccccagggccatcgcctcagccaccgaggacacgccgaatcggcacatgacggagtcagtgtcaccatacaccaccttggcactggtgctgtagccattctccactgtgtacttagactccaccagctgcttggttttcctcgatcatcctgacgtccgaaccccgtgacgctctgtgagatctccaggcacggcaacttgcccacctgggcgccagtgaagccgtatacggagttggcgctcaccttcagcgccagctgccgtccatccaggacctggcgccggagggggtctgtctccttggccagctcggccttggccctcttccgggcactgagcaggttctccaggatctggggcagcagccccttccgcactgaggtcttcacaaactcgtccccggtgggggtcctgatgaactgatcctcagtcaggcccagtttctgtgcagtcccgggccgaaggagcgtggtgtaacacaggttgtgggccatcatgatggacgggtacagcgaggagaagtccagggtggcgatggggacgtcgtagtaccctttgaggggctcgatgacagtggctcccgtgtagtcctcgccgccctctgacttcaccacgggcatcagcagcccctcgtgcatggcctgccgcaacagctgggatacgaccttgacctgctggccacgactgagcaggtagctgaggggcacgccagtgaccctcgccatctccacggcgttcaccagcaccatgagccgctccagcagccgcagtggcaggtaggcatccttcaggcagtacacagccaggcggcggcgggtctggtcgttcccattctgcaggtcggtgatgatgctgtgctgcacgtcctccttctgctcgcccaggaagtggaagctcacggcattgagcgtgtaggagcggagcttgtactcccgcagcagcacctgcagcatgtccatctgcacgcgcctcgtgccgacttaaccccagcctgacctg

SEQ ID NO: 126911 - DNA, 1475 bp, Homo Sapiens
cattgagcgtgtaggagcggagcttgtactcccgcagcagcacctggcagcatgtgcatcttgcaggcggcccaccatgctgacaaccttggtgtcccgccggcccgtctggttggactggaatgaagagtcccggatgttggagcaaaggccggccacacggcccaggaaagggaatgtttgtaccttgagggtgtgggcccgagagaccacctccggaaggtcgaagttgtggatgttgtaaccggtgatcacgtcggggtccatgatacggatgaaggtggaccaggcctgcagcaggtcctcctccttctcgtagctttgcaccttggcacccaggatgggggcacagggccgcagggtgagcgccaggcgtaggaagggctccggctccccccagcgcaggcccagcgagcagatctggatgacagggtcccgctcaggctcagggaagatgcctttgcggccggcgcactcgatatcgaagctgagcacgcgcaagggcgcaatgcgctgccatggcccttccggtgggtgactgaccacgtcagaccacagcacgtccgcctccagctggcattgcgtagccttttccttcagcctcagggcgtatttcccagctgggagctccagccagttgcagccgacgatgtccgtgtccaccatgaaccggattctcaaagtcgacgttggcctcgtagggcgcgaagctgggcgtgcccaggcctgccacacggatgccctgttccaggagacggcgggccggggccacgaggcgcggcagcgccacggtgatgcgcaggaacggggaggggccgtgcccgtggtacccaaacatgctctctcgggagcacagttccacagccagcacggccggcccagtcagctccctccccccgcgactgtcccggctgatggccaagttcagctcccgttgcaggtcacccatgtgctcgggcccgaaaccagggggcgctggggtgtagaagtagggagcgaagccgtggatgtggcagcagacagagaacccctcatcggtgaccccgaaggcgcggagcacaggcacggagccgcgggatggtgggggccccccaggcacaggctgcgctgggcccacataatggtcaatctccaactgttggaagatgaggggctctgtctgggggtccagcgctggtggtgtgggccgaagccagcgaggatctatggctgatggtgggacctgcccgtctgcaaccccctccaggactgactgcagctcctcctcctcctgctcctgcagcctgtgttctgcctccatctcctccatcagtgccaggtcctcctcgaattgggatggccgaggtgcatcatcatcatcccagaggcccccacgggcccgctttgggggcaccccgggccctgggcctggccgccgcttgccatccatcccgcttcaaacagcgtttcccgccacccaggcctcgctccttgac

SEQ ID NO: 126912 - DNA, 589 bp, Homo Sapiens
atatacagaatacaggaaagtttctgtaaagtctaaaacattacaattactatgtacattggtactggttgtgggggtgggaggagaggagggaaccaggggcaggaggaagaggagagaagtggccagagaacacaaaagggagaccaaaccggtttacgaccaaaacatttttgctacaatagacgatttgagaaaacgctctaccacatgtagtactgtacacggtttttaaaaacattgaaaaaatgtcatcactagatgtatttacacataaatccaaatacacttttccttatttgaaataaaatagatggacagccagaaaaagaattcatttctcatttgtccataatacacagtagctacctgtagtgcaaccgctgcagaaagggaaaataacgtggagggtgggaaccatggaaggaaggtgggtagcgatctttatattaaataaaacaatgatattgtagattttgctgtatgaaaactgtattttttcttttaatataaaactattgtcactgccacaaaatagaacaagtttctgattattttacaatggtgggccgagggggagggaccacga

SEQ ID NO: 126913 - DNA, 1465 bp, Homo Sapiens
  misc_feature (119)..(131): n is a, c, g, or t
ggagtggtagtcacctaggcatgcatatttggtcaaagtcatggtctactcgggtgaatgagtgcatttttatcatgtaaaaatatgaccttcatgaagtggacttgttaaaagttggnnnnnnnnnnnnngcttaagaacactataccatcgtttgtaaaattaaagagaaaaaattcaaaatgttagcagtgcttccaatctcccagtgcttatttctctcccagagcggtcttgcgaggaggtcgtgagaagagtcctcctcccaccgccatttctgtggccgggtggtcccaccaaaggcagctcagtgactctcctggctggtctgacccaggccagcctcgcagacccagtggtagggcctctggcagacgtcgtcattccacctgccgtctggatggaagtgagcacagtcctcgcctccacccagcccgtgcccctgccagtcgtctggctggcctggcttccagttctggaagccggtcgcatagtctgttccatccacccacttccaggctccttcagggtcactgaggcccatccaggtgtatgcggagcctagatatttctggacaaaattctgctcctccctggagttgatgaccaccaggtgggcgttcttcagctggcagtacttctcagcctcggcccaggacatcccagagtgagagaaccagtagcagctgtcttggtgctccacccagttgacagggcagcaggtcccttcagtggaggcttcctcaccattgttgttgagagtagccacctggcaggtcagtttcttcaggtcttgcaccagctgctggactcgcaggagcatttcagaatgaactgcctgccgttcctgcttgaaaccctccacctcagctttcagagatgctatcgtttcttccaagctgctgccctgggaagtcagtgcctggatctccgccacagtgtttgaggtgaagttgctaaaatctgttctcagggtcaccaggtccctctgaaatttggaattttggaatccaaccacacagatgatgaccagcagcaggaggccgaggcccagggacagcaggagatggcagggcccagagcagagacgctgcaggagggactggagaggaagtggcccatttttaaacccctggactttcaccttattctccaagtactggaagttttcatacgtccttgtcatgcttgggccaacacggctctgaggttgtcacagctgaaatggaggcagggccggcgcccagtctggggtggagctgtgggaggtctggagggtgtgattcccacgttggttgtgctgcaaggaccagaggtgggacgtcactcagagttgggagcgctgtgtcctggagagctggggtagaggtgactggagtcctgctggtcttgggtctgaaatcccaggagccctatcatctgggacatcccatctcctcaactttagacagtaaatgagaatgaa

SEQ ID NO: 126914 - DNA, 575 bp, Homo Sapiens
  misc_feature (70)..(82): n is a, c, g, or t
actctttaaatgagtgcatttttattatgtaaaaattataccttcatgaagttgactttcaaaagttggnnnnnnnnnnnnngcttaagaacactataccatctttttaaaattaaagagaaaaaaattcaaaatgttagcagtgcttccaatctcccagtgcttatttctctcccagagcggtcttgcgaggaggtcgtgagaagagtcctcctcccaccgccatttctgtggccgggtggtcccaccaaaggcagctcagtgactctcctggctggtctgacccaggccagcctcgcagacccagtggtagggcctctggcagacgtcgtcattccacctgccgtctggatggaagtgagcacagtcctcgcctccacccagcccgtgcccctgccagtcgtctggctggcctggcttccagttctggaagccggtcgcatagtctgttccatccaaccacttccaggctccttcagggtcactgaggcccatccaggtgtatgcggagcctagatatttctggacaaattctgctcctccctggagttgatgacaccaggtgggcgttcttc

SEQ ID NO: 126915 - DNA, 1049 bp, Homo Sapiens
  misc_feature (723)..(723): n is a, c, g, or t
  misc_feature (748)..(748): n is a, c, g, or t
  misc_feature (751)..(751): n is a, c, g, or t
  misc_feature (783)..(783): n is a, c, g, or t
  misc_feature (793)..(793): n is a, c, g, or t
  misc_feature (805)..(805): n is a, c, g, or t
  misc_feature (809)..(809): n is a, c, g, or t
  misc_feature (812)..(812): n is a, c, g, or t
  misc_feature (816)..(816): n is a, c, g, or t
  misc_feature (831)..(831): n is a, c, g, or t
  misc_feature (834)..(834): n is a, c, g, or t
  misc_feature (849)..(849): n is a, c, g, or t
  misc_feature (860)..(860): n is a, c, g, or t
  misc_feature (873)..(873): n is a, c, g, or t
  misc_feature (895)..(895): n is a, c, g, or t
  misc_feature (906)..(906): n is a, c, g, or t
  misc_feature (914)..(914): n is a, c, g, or t
  misc_feature (924)..(924): n is a, c, g, or t
  misc_feature (929)..(929): n is a, c, g, or t
  misc_feature (952)..(952): n is a, c, g, or t
  misc_feature (964)..(964): n is a, c, g, or t
acatataaaaaaggctgacattttatttccaggttggcacgtgtataaggcacaggggcaaatggctttggggtcctggaactggaaatggagaaaggtgtgtctcaggtgtccctgcctccaccaccccctaagtgcacttgagacaggaccagtggtggtggttccagcccagggtcctgaagggtcccactggctctaggggagagccatggggacagctccccaggcgggaccctctactctccagctacccaggagggaccctctcctcctagggggcgaggccagctccaaagtgcttggtggctccccaggcttaagggaccagcctgccagggagggctggggtcagagagagaatagtaagatgagaacgaggagaagcacccccactagcacggcgatggcacaccactgtcggcggtctgggaacgagaaggtcaggggtcacggggagagggtaccacctacaacctgcccccaccaggactgacccctcccctgaggggactcaccactcgtcatgtgggatactttggccaacttcctgaggaccccgtccatgcgggactgggtgtggtccatctcttgggcgaaggcatccagcatgatgccctgctcgtccagctcttctccaacgcggccggacatgtgcttcagaacctggatgctcccagacaccatctccagctgttgatcctgttcatccatgatcagctnctgtgtggcctgctgctcctcgatntancgagaatgtggcgagactgcgctggcatccancaagtcgctnggtgacttctgngcanctngctngcctgcgagtatctncangggcacacaacatangtcagggaganaccccactcacancggggctgtggggcaatccacnggtgtaatcangggggganatctggggangaaanctgcatcccactcacactaatanaaggtgatcacngacccacacttggtccttgtgcccacttctccaccgttattaaaaaacaagaggggcagggggtcagctgtatccacatctcgga

SEQ ID NO: 126916 - DNA, 427 bp, Homo Sapiens
  misc_feature (348)..(348): n is a, c, g, or t
tttacatataaaaaaggctgacattttatttccaggttggcacgtgtataaggcacaggggcaaatggctttggggtcctggaactggaaatggagacaggtgtgtctcaggtgtccctgcctccaccaccccctaagtgcacttgagacaggaccagtggtggtggttccagcccagggtcctgaagggtcccactggctctaggggagagccatggggagaaagaaaagcctcggaggcccgacgtgcggacacttccgccctctcctcagccatcttggttgtgggcagaggcagcttccggtgcacatgcccccgccccttagccctctcgtgccgcaccgtanggggcggtgtcggagttctgtctgggcctattcgggtccgagttcggaatttcggttcaaggcccagttcctcggattg

SEQ ID NO: 126917 - DNA, 1238 bp, Homo Sapiens
tttttttacatataaaaaaggctgacattttatttccaggttggcacgtgtataaggcacaggggcaaatggctttggggtcctggaactggaaatggagacaggtgtgtctcaggtgtccctgcctccaccaccccctaagtgcacttgagacaggaccagtggtggtggttccagcccagggtcctgaagggtcccactggctctaggggagagccatggggacagctccccaggcgggaccctctactctccagctacccaggagggaccctctcctcctagggggcgaggccagctccaaagtgcttggtggctccccaggcttaagggaccagcctgccagggagggctggggtcagagagagaatagtaagatgagaacgaggagaagcacccccactagcacggcgatggcacaccactgtcggcggtcactcgtcatgtgggatactttggccaacttcctgaggaccccgtccatgcgggactgggtgtggtccatctcttgggcgaaggcatccagcatgatgccctgctcgtccagctcttctccaacgcggccggacatgtgcttcagaacctggatgctcccagacaccatctccagctgttgatcctgttcatccatgatcagctgctgtgtggcctgctgctcctcgatgtagcgagatgtggccgagactgcgctggcatccagcaggtcgctgggtgacttctgggcagctggcttgcctgcgagtatctctctgttattcctctccaaaaatgctacggctgttgggctgaccatatggtccttcatttcctggactgcctctcgcatccgctccacgaacacctttctctcctgcaggtccccggctgggagcttgaacttgcctgggttggcttccactataccgatggtctcttccaggtcctcgaggtcccactcgatgctgcgcaggccattccgcagctcattggtcgtccagtccagctcctcgcgtccgaccgccgcgctttcctgcaggagctcgcaccagcgctggtacagcccgcgggccgtgttcaccgccttctgcacctcgcctcggactacaaaaaaggggtcttcgagagacatgtcagtcccttcccccccaggccgaacccccctcccggcctgggttcgcgggctggttccctcccaaccgaggagaacgcgccgccacccccgcccccgcctcgtgccgatttaaccaggcctcgtacta

SEQ ID NO: 126918 - DNA, 1151 bp, Homo Sapiens
taagggcacttgagacaggacccggtgtggtggttccagcccagggtcctgaaagggtcccatgggctctaggggagagccctggggacagctccccaggcgggaccttttacttttccaggtacccaggagggaccctttcctcctagggggcgaggccagctccaaaggcttggtggctccccaggcttaaggggaccagcctgccagggagggctggggtcagagagagaatagtaagatgagaacgaggagaagcacccccactagcacggcgatggcacaccactgtcggcggtcgggaacgagaaggtcaggggtcacggggagagggtaccacctacaacctgcccccaccaggactgacccctcccctgaggggactcaccactcgtcatgtgtgatactttggccacgttcctgaggaccccgtccatgcgggactgggtgtggtccatctcttgggccgaagggcatccagcatgatgccctgctcgtccagctcttctccaacgcggccggacatgtgcttcagaacctggatgctcccagacaccatctccagctgttgatcctgttcatccatgatcagctgctgtgtggcctgctgctcctcgatgtagcgagatgtggccgagactgcgctggcatccagcaggtcgctgggtgacttctgggcagctggcttgcctgcgagtatctctctgttattcctctccaaaaatgctacggctgttgggctgaccatatggtccttcatttcctggactgcctctcgcatccgctccacgaacacctttctctcctgcaggtccccggctgggagcttgaacttgcctgggttggcttccactataccgatggtctcttccaggtcctcgaggtcccactcgatgctgcgcaggccattccgcagctcattggtcgtccagtccagctcctcgcgtccgaccgccgcgctttcctgcaggagctcgcaccagcgctggtacagcccgcgggccgtgttcaccgccttctgcacctcgcctcggactacaaaaaaggggtcttcgagagacatgtcagtcccttcccccccaggccgaacccccctcccggcctgggttcgcgggctggttccctcccaaccgaggagaacgcgccgccac

SEQ ID NO: 126919 - DNA, 728 bp, Homo Sapiens
ttttttaataaacactttagatttattctgccatttctgaagccacctcatttaatttatacataggatataaatggctatacatttttacacacttttatacaagtttaggttgtactactgagtttgttaaaatgtacccattatttactcaaaatatttattgttacaagaaaaccgtaagaagcttgtgtaacatgaacagcaagtattgaaaacgaatatgtaaagtaaatggttttgccctgactaaatcagcctcagtattttatgcttttagtagaaaagcccattaaacaaaatagaatcctgggggatcaaatcatatgaatgattcatgaaataacacttctgaagcaaccccagaatcatataaatgtaagggttaaaggtcatatgtactaagcatgggtcagaggaatagaatggatttgttaattttaccctaaataaaaggcgcttgtgggcaacagctctgccatcaatacacatgggcagatgtttccgaatccagccattcccagatttcactgacatgcccttttccacaggctccctgctgatgagatttccccagcagcagaagtttgacatcactgctcccggatgggagaatcagagctctcctcatttgggtcaggggtggctggctcacgaggtttggtccaccagcagaccagctccttggtctggaaatgcagtacgaaggacagaaaagcagatgtttc

SEQ ID NO: 126920 - DNA, 732 bp, Homo Sapiens
ttttaggtttcagttaatacatttattacagcaggtctttagtcattattgccattaaaaagttttcatgaaatttcacaaaatcttttaggctattagtattagctttctttttatggagtgacactttgttaatttatgaaatatttacagcatttacaaaaagtaagagaatgtctaataaaatttcttatacttacaaaattcatacattatactactgtatttgagatgtcttacttggtagaccaattaaactatgacataaaataatttacaaagatatatttaatctttcttaattcattgaaaacaaaaccatattagttataaatagtcctttacaaatcattgtaaaacacttcattgttttaactcgagccttagcttttacaaatatacttaataaatgaattagttcagatagcaaatagaactgtgcatttaaaatttcacttaatactataaaacaaaacaacctgaaaaagcaaacggcctggtacttcaagtaaaaatttgtagaaccagtttttatgcacgcgtggggtggggaggggaagccaacaccattgaaattgaaatgcataaacacaatactttcaagaatacgctcaacacatgtacatctggggcactgatttctaaggatgatgctctagcaatagctcatgcatccaagacggtagccctacattttggcagatgagctggactgactagagcacatttgcg

SEQ ID NO: 126921 - DNA, 1488 bp, Homo Sapiens
ttttccaatattgtgctttattaaatgctagttcattggaatgttaatacatgtttcacacacacaatcagcaggagaaaatgtttctatagccaaatgacattgataaacagtgttcttacacaaagttaagcctgtttctttattataagacttttcagatactttcccagtgcatagtgtgaatctccacaaagcaagtgaaacatgaatagctccctaaacttacttgaccacagaatgcttcattctatctccatggaaaccacttgtgaaagtctcctactccaactttcttctccaacaaaactcacctgtttgtgatcatctgaactcattttgtgctcttgcctttatataaaagagaagttctgtgaaatgttgaagaagcagggttatggcactagtaatgatccaggcactatacaaattgttaaaattttccattattttagttcagaagccctaaccataggtattctaacagtggattgtggaacccagtatgagtgtttgagacatgttacaaaatataggagctatttttaaaatgaatccatttaataatactgctagatgctgtgagagacagggactccccggcccagcacacacgcttgagcaggaatggagacatgggcatgggtaggcaggctggtggtcagcagataccctttctgtccctcctctgtgacaatcacccccaagtaatttttgggattcagaataaggcagctgctctcccatcctggttactatgagtcgctcttggcagaaaggaccacagatggagagcttggcactcgctccaactttgccgaaaagaggacaaccaccaaagtagtaggtaaaaacacaattttagcagcagtgaaataaaaagaggaagtgaggatggggccaggccgcaactataattaaactgtctgtttaggagaagctgaatccagaagaaacacaagctgtaaagtgagagaggacagggagcagggcctttggagagcaggagaggacaggctgtcaccaagcgctgctcggactctgccctgaaagatttgaattggacactgtccagtcacgtgtgtggcaaaccgtactccaagcacttttctcacggcagaggaaggagctgccatggctgtacccctgaacgtttgtggggccagcgatgtgcgctgggcctctgtaatggaggacctccagtgtgcagacaaggcgccggcagtgcccacggagggctgcgtcctgggtcctgggtgaaagtcacagctgctgagggagcgagagctccatctggataccagagacccctgggccatcagtgcagcaggaaccaccatgtgagagccgcggccaggcagccccacgtcacgcggcctggctcaggcaaccccatgtcaggggggtcgagtccccccacgcacaaggcctgctatgggctgccccatgtcaggggggcaagtcccccacatcttgaggcccgcttcc

SEQ ID NO: 126922 - DNA, 685 bp, Homo Sapiens
gaaatgagaaaatattttgaactgaatggcagtgaaaacactacacatcaaaacttagggaaatgtggttagtgtggtacgttgagggaaacttataacctcacacgcttgtttcacaaaacaacagcagacaacagagatttccaactccagcaatgacaggctagggtacctagatgaaccatcacactgaaaacacatgctgcagtaaatactgaatttctccttaagagctgtgggaatctgacaagccaggaaggtagaaacaagggagaagtgagggacccaggggcccaggaaggtcgtgagcgccaagcacccagtgctgctgccccagggcgtggccagtccaggcttacggggctcaggtcctagggggctgaccagcagggtggggcagacaccaggctccagcccagcctcaggtgagagtgaagggagcacctatctgcagcaagctgaagcccccaaatctaggccctgagggtgaatcggtaccaaccccctcgccctatcctgaatgtgagcggggaaagtgctcacctggcaagatctggcctgcggcccttcaggggtcagcatgacttgtgtgggtcagaaagcctcagccccaaacccggtctcagaggcttaagaaccctctccaggaggatgatccatataacagctctcaaataggccccca

SEQ ID NO: 126923 - DNA, 784 bp, Homo Sapiens
  misc_feature (17)..(17): n is a, c, g, or t
  misc_feature (36)..(36): n is a, c, g, or t
atgtaaaagatatatangcagtaagatacagtttcntcaatctatcaaagtggtacatgcattccttctctcaaatctagaaatgccttagaatcacctaagatgtctgtttattcttgaggcacacctcagactgaatgagtcagaatctcaggattagagcctaggaatctatattttaggaggttctccacaccactaatgtttgggttgctggcagagtggcatcagccaaggctggttaggctgagccaggatttgtcatcagctaaataggaggactctgccaaatcaatctgggcaagaagcaggatcctgagtctgggcaatgagagtcagagaacttaactcctgtgtgcagggtagaattttcccatggcagaaattctgagttttctgccttatttttcttgggataaccagccacaaggagaccttcaggtaaaatgtggttcaaatatgggaaggcagaggtacctgggaccttgctactcaagtatgatttgtgaaccaacagcatcaacatcgtattgaagtttgttatttatagaaatgcagaagtttgggctctgctccaaacctattaaatctaaatctacattgcaacaaagtccccaggtgattcacaggcactttgtagtttgagaagcactgtactaagattactgtgttgtcttcacatgaatgaggctataatgtagaattaccagtgaatgtgactaatgttttctgacaagggacctctgcttacaaggtccctgggcatggtgcccagaactggaaa

SEQ ID NO: 126924 - DNA, 509 bp, Homo Sapiens
ttgtttttcttgtcatctttattcaagtatttcacagcagttatattacaaattacagtaaatgttcaaattccagaattcaaaaattaaataatttacttcaactaatgtcaaatgaagtcaaatgcaaaacatcaatttaacacaattctaaattaaaactacaaacccaaaatagaccatagttgatgaagtctacttaaactacaaagtagacatacatgactgaaaccaaattggactcccaaagtctaagtaaccagatgtacagaatacaaaagatgcaggtacaagcccaaattcaagcttacaatgtgattacaaataataattataataacaatggcattcagctacgggacctgacactgaagatacctactgaatagcaccatagctgaaccaacttaatcaaaaaagggaagaaattacccactccctaaaaataaaatccagtaaacctacaaatacattggcttatgagaaaaatcaagtcatgaaacaacatt

SEQ ID NO: 126925 - DNA, 796 bp, Homo Sapiens
  misc_feature (289)..(321): n is a, c, g, or t
tcactttaattgaggaacactttcagtttgtgacaaaattatgctgtgaatcaggtgttgcaaattatggcccactgcctgcttttgtgtaagttttattggaacacagctacattcagtccatggctgcttttagaatacaacagtagactttaacatttggaacagggaacagaaaccagagccatacagctaataaacttgaaaatatttacaagttgatgctttacaaaatccatctgctgacccctgctctgtaccattgttctcttctgatggtctgtttacnnnnnnnnnnnnnnnnnnnnnnnnnnnnnnnnntagatttgccatttaaaatgtgcttttcaagtttgactttttaggatgcaattaattcactaaatacagaacttaactaaggacaaaaatttaaagatcagcattctttcccttcccatcacgctcaacttaacatgaagaactgtaaacatcctaagcttacaacaaacctatctagttagacttcagttaaccacttacacatccccctcccccatgaactatttggaaaaagctgcaggcgtaatattggatccctaaatactttattctccttataccattatcagacccaagtatcatctaatagtccataatcaaactgcctaaacagtttctacactgtctttttaactatttcaaactatcaaggttcgcattttcttccttagaacttttagtctttttcttccccaaaatatttgagtccatgccagttgcctttagttgtaccaaataatggtttgtctattcc

SEQ ID NO: 126926 - DNA, 1044 bp, Homo Sapiens
  misc_feature (713)..(714): n is a, c, g, or t
  misc_feature (757)..(757): n is a, c, g, or t
acaacagattcccatttattttaaaatgaaattagctaggcatcatatatatgaatgaaagatcagaatgaaacacatgaagatgttaacaatgattgttttgggccacagaatcaggcacaagctcgggagagaagccaacaaaagctcttctgcacaatgggagggagacaccattgaaaaaggcatcgttccttcttcatgcaagcgaggcctggctcccacaggcatggtctccttgcagctgcaacagcagaggagggcgctggcagggctctgcgtccaggtgtgcctctttttctctccatactctttctggaggttgactagtaccttctccactggtcatgctcatactgtctgcttcctggtccctggtctctccacggctgtccctgactggaacggctatacccagagcccgtcctgtggtagctggagccctgtcttccccacctccctgcgtggtgtgagccccagtgggctcggccagtgatgcgtctgttctccttcatgcaggccttgcagacgactgccttcaggttgtggaatttggtgagccgagatctattttgttctaaaagaacctccacagcataacccttttcagattgcaagtacttctgatgaaaaagcttcccgtcaaatacattccagggcatgaaatcactcgtcttccaggggaagccacatgcgctgttgactaaaaccannagtggtgaggccgcgggacgagaagggagcccagctgccgggnttctgggggttgatgtaaaccaggctgtaaatttccaagctggcgaaggtggattttcccttgggagggacaaaggcccgcgccaataaacgcatgccaaatcctccagggcaaaggggggtcccccggggacaaaagagggaaaatccagaaggcccgcccaaaagtttggaaaggggcttttttcaccagccgggaagttctttttctttgggggagtgaaaatatggaaaacgggcttagcagtgggtcccaagcgccccaaaacctgtatttcccgggcctct

SEQ ID NO: 126927 - DNA, 936 bp, Homo Sapiens
  misc_feature (884)..(884): n is a, c, g, or t
tttcacattcacatagcttttattagttattggttgctgttaatctctcactgttctttgttaagctttatcatggtatgtacgtagaggaaaaagccacggtatagatatgtaggattccatactatccagtctcaggcatccactgagggtcttgggatgtctcccccgcagacaagggaggactactgtatagtgttttctgactttttaataacaggagataacccctcataatctagtgttgctaataaaaaatcagaatacaacagattcccatttattttaaaatgaaattagctaggcatcatatatatgaatgaaagatcagaatgaaacacatgaagatgttaacaatgattgttttgggccacagaatcaggcacaagctcgggagagaagccaacaaaagctcttctgcacaatgggagggagacaccattgaaaaaggcatcgttccttcttcatgcaagcgaggcctggctcccacaggcatggtctccttgcagctgcaacagcagaggagggcgctggcagggctctgcgtccaggtgtgcctctttttctctccatactctttctggaggttgactagtaccttctccactggtcatgctcatactgtctgcttcctggtccctggtctctccacggctgtccctgactggaacggctatacccagagcccgtcctgtggtagctggagccctgtcttccccacctccctgtgggaacacatagtcagaagattagtaagttgtcaaatgtcttaacccaaatgacacagcatgtaaagggtggcaaggcagcaccaggtcagcagtatccccgtacttaaatcagagggagggtcattaaaaaacgcaaatttaagggttgcatcnccagagaacccggctcaggagtggagtcacagatctgcgtgttaaccctacc

SEQ ID NO: 126928 - DNA, 479 bp, Homo Sapiens
acaacagattcccatttattttaaaatgaaattagctaggcatcatatatatgaatgaaagatcagaatgaaacacatgaagatgttaacaatgattgttttgggccacagaatcaggcacaagctcgggagagaagccaacaaaagctcttctgcacaatgggagggagacaccattgaaaaaggcatcgttccttcttcatgcaagcgaggcctggctcccacaggcatggtctccttgcagctgcaacagcagaggagggcgctggcagggctctgcgtccaggtgtgcctctttttctctccatactctttctggaggaagcaagagtgttttgaaaccaagttaactcggcaccaggtcagcaggattcaatatctgagttctgtttactttggtacttgatatggaagatttatgttattaagacagacatgtgactgatttcttctggagatgcaggtgatgaacttacctg

SEQ ID NO: 126929 - DNA, 671 bp, Homo Sapiens
  misc_feature (357)..(370): n is a, c, g, or t
tttggctgctataagataatttattacagactagcctataatctcctgtaacaatggcacatataataattaacaacagcaaagatgcttggtttcttgtttcatgtaatggccagtacatctgtggacaatgtcgagtcctcaggaagtccaggaggctgctacagaggaaatccaagaaccatgtcacatctctcaacaagtcttgggaagtccatctgactctctgaaacagtttgtctctgacctcccaggaagtgtggagggccccttccatccagcctgtacagagggatcagagtccaggctccttctatagggttgaatatcagaggggaatagcaaatgaccccgatnnnnnnnnnnnnnnccaaaggctagattctttctgcaaggtggaggacggctagaaggcagtggccacagatgagcaggactttttctagactggtttctacaatttttggctttgttcagggcccacccaagaagaaaatactcctggatccttcaactagccctcaggtagacacatgttagaacagcctgtcacgtcctgaagcatcactcccctgcctagaggagtgaggcagggagactcccaggcaggtggcccctagtgcctggggtccaaagaaatattcttctcagggctttgaagcacacgtgaa

SEQ ID NO: 126930 - DNA, 781 bp, Homo Sapiens
tttttacaaataattatgttatttattttgaataaaaaagtggccaaaataacaatactaatggctctgtatacaaaccacaacatattcaaggttatctcacatttacaaaactgccattatgtacagcactacatattcacagcaactctattagactctaagtaccagaatcatgtaagcaattgaggggaatcccaaatgagaaagagctaaaaccaatggtagttcatcaattggagaaatggccaaccagcgacttggtaaagaaacagaggttctgttacccttttaacaagtaataactaaaatatgattaccccacagggccttatactgacaaaccaccctccccaaatttccatttcattttctccataatcttccccacttcaaaattttcctaggaacctcagctctaatattagataaaaacgcaggacactgatatgtaatcttcaggaaaagaaggttaagtagtgctaaggatgtgggatgatctggttcaacccaaaaaagccagttcaaacccaagaaagaactctgccctcttctggcaggagtagctttgtagtgttgaacacaggggaagtgaaccacatttcatcctgatgaggcaggaagttactcactcattctacacgtcatgagcacctaccctgtgcaaggcactttacattaggtgctgcaggaacaacaagataaacattcctgccttgaggagttacatctagtatgaaacatgtacatattacatggagagatcacaattttctggttg

SEQ ID NO: 126931 - DNA, 619 bp, Homo Sapiens
  misc_feature (11)..(11): n is a, c, g, or t
  misc_feature (283)..(351): n is a, c, g, or t
  misc_feature (434)..(444): n is a, c, g, or t
tttcctaggancctcagctctaatattagataaaaacgcaggacactgatatgtaatcttcaggaaaagaaggttaagtagtgctaaggatgtgggatgatctggttcaacccaaaaaagccagttcaaacccaagaaagaactctgccctcttctggcaggagtagctttgtagtgttgaacacaggggaagtgaaccacattacatcctgatgaggcaggaagttactcactcattctacacgtcatgagcacctaccctgtgcaaggcactttacattannnnnnnnnnnnnnnnnnnnnnnnnnnnnnnnnnnnnnnnnnnnnnnnnnnnnnnnnnnnnnnnnnnnntatgtacatatatacaatggagagaagtcaccaacttttctggattggggggtattccaagcaaaatgcattgttatcaaacnnnnnnnnnnncaacaccaaaagtctataaaacattccacctaatcagatggtaagaattgaaaaagcatctcctttccaaaaccttatgtttttagatgactgttctgtttatttcaaaaaaaagtcataggtaaacacatatataattcttaggacgtttagcatttaatcctcgttccgaatt

SEQ ID NO: 126932 - DNA, 678 bp, Homo Sapiens
tcatgttttacaaataataaatttatttccaaatcctgaattataaccaaattacaattccctttaggtcttttttgctgctttacacaaggattaaaaaagacagccacagccaagtcacgcatacaccaagtgtcctgggccagttttagatgcgatgggtccagccacctcccgctgccccggcagaccatcggatactctgcagccccgctcccgccatgccgtgctcctgcatggaagaactccacctcctctgccagagagtctggtccagcaggaactgccctgctgccatcctctctggggacagcctcagctcacagaccaaagcgggctggcgtgcggcgaggggtcatgggctccccttgctctttccggcctggagtgtagatcttcgtagacctgacactggccagggggtgcgcttctcctgctcctgccgccgggctcgcagctgctcctcggccagcgccatctcctcctccatggcagaggcttcctctttggcccgacgacggttctcctgccgtgacttgcccgcctgtttcacgctatagaacatggggcccacgtccgccagccactccccgtccacagcggtcacacactgcatatactccttggtggtcatgaccaactcgtgatacactatgtaatctggggtgtagcccattc

SEQ ID NO: 126933 - DNA, 943 bp, Homo Sapiens
  misc_feature (911)..(911): n is a, c, g, or t
ggtccaaggtagcgaggcctgggtggcgattccggcacgagggttttacaaataataaatttatttccaaatcctgaattataaccaaattacaattccctttaggtcttttttgctgctttacacaaggattaaaaaagacagccacagccaagtcacgcatacaccaagtgtcctgggccagttttagatgcgatgggtccagccacctcccgctgccccggcagcacctcggatactctgcagccccgctcccgccatgccgtgctcctgcatggaagaactccacctcctctgccagagagtctggtccagcaggaactgccctggggggccgtgatatgcacagatgaaagtcctcagatgaaagggctttgtccgcagcctcagggctcccgccagaaggctgaggacccaatacctgctgccatcctctctggggacagcctcagctcacagaccaaagcgggctggcgtgcggcgaggggtcatgggctccccttgctctttccggcctggagtgtagatcttcgtagacctgacactgcccagggggctgcgcttctcctgctcctgccgccgggctcgcagctgctcctcggccagcgccatctcctcctccatggcagaggcttcctctttggcccgacgacggttctcctgccgtgacttgcccgcctgtttcacgctatagaacatggggcccagctccgccagccactccccgtccacagcggtcacacactgcatatactccttgggtggtcatgaccaactcgtgatacactatgtaatctggggtgtagccccattccaaaaaagggaagctggtggggtgcaagtggcaaggcatcccctgtgcgggatgttcacgtactcccccgaattcccttgaagctgggctgcctggngggaaataaggcagcacagatgcactttccta

SEQ ID NO: 126934 - DNA, 1291 bp, Homo Sapiens
tacaggcatgagccacctctcccagtctcagttattattttaataaatgagactgaacgtcctcttataaggctcactcccttgttcctactacatttgctctgtttaagtatctctttaaattcttcagttaagatcatcccttttatcagaaacctagacaccacaaagtagctttctcacctttaattctccatagggatcactattatactataatatttgcatacgtatgtgtatatatgtatttgcttttttaaaaaagtaaaaatgctcttctcactctttgtcgatataggcacccaggtacgtagttagaaattaaataaaggccacaataatttcccaaggaagatcattaaaaagaaaaatcctttcttcctctaatatcacatagctggcctttatggcatgccagctaagaaaaaaggtattgcctatggtgacaggaagactcaatctttctctctttgggttgtagctgaatttctatcaaaagtcctagtaaaatatataactcctcatttgttctaagccaagtcttttcttcagttttccttcaaacaatacctttactttcccattagaatatgaagaattggagactgtgaacagcaaggtttggggtgggtatcagtcacttcaaatctggctatgcagagagagggaaagacatggcagaatagcaggggtggagggtgagtgaaatgtatcttcattgggagtattgaaagagagcaagtttttcaaagttgttgccggtatctcatgaaagcccaggctgctaccatggtgagggcaaacactggcaccagcaccataaatatgggaataccacttgggtccccttcacctcgatgtcctataggtccattctgcacctgtaacctgtgctgcactctcagagacacagcatagcctgcattacgaaagaggtctacagcatcctggtgcagcaggttctttaggtcttggccatttaccgaaaggatcttatcaccctcctggagccgcccatccagggccgcagccccattttctttgatgcggctgacgtagatgccactgtcgttggagacatactgctgatctgtcccaccgacgatgttgaagcccagccctgagggccctctggtaagattgatctcttcctcagtgaccaaataatccactcttccgttcatgttttacagctcgtctggcttcctacttgggtcagctggagtgcagcacaggtgaaggtgaatcaatctcggcgctgcgcccacagcacagcggtttcggtttcccc

SEQ ID NO: 126935 - DNA, 953 bp, Homo Sapiens
  misc_feature (136)..(249): n is a, c, g, or t
ggggaatccaacccttatgtctggccagggtttccttgggaacaggtatggccaagttccctttccttttggggccgcgcgccaaaagaaaggttttgaaaaatttttccgggggcgaggcggccgcaaaagggannnnnnnnnnnnnnnnnnnnnnnnnnnnnnnnnnnnnnnnnnnnnnnnnnnnnnnnnnnnnnnnnnnnnnnnnnnnnnnnnnnnnnnnnnnnnnnnnnnnnnnnnnnnnnnnnncacatctgcatcagatttattttttaaaggaatggattttgagagaaaacaacgtgggcagaagtatggaatagaaaataaatacaaatgtaggctattctgctaattgttttataaccacgacaaactagtacagagaatgccctgtacaaaacacaacaaaggttcaaacatcgagatgttcccttagcaaggctgaaaatttcagtctctggtatttggaatttaggctgcagtccttgtttttggatggatcactgggtgtgtggcacagtccatgcttttaaccagatttgaacagaagaatggccacttggcccaggtagaagtagatgaagtgtttggtttcatgtgtcacataactaccgaagttcctccccacgatgcaatgccaggtgggattgtacttcttgtcaaattccttcttgatatgagccgcaatgtccttctctatgttgtatttctccagcgcctgagtagcgcactccaccgagtcctgttgcatctcttccgacatgtccgcatttttgatcacggcctttcggtcgcacatggttaccgtggagaagggggctggccgactgcaacggtctcctggggggggtgctagcacagctcaggcccggctagagctaccgtcgctaccgaaacccggacgcgtgggtcgacgatatcccgggaattccggaccggtaccagcctgc

SEQ ID NO: 126936 - DNA, 1118 bp, Homo Sapiens
  misc_feature (97)..(97): n is a, c, g, or t
  misc_feature (400)..(400): n is a, c, g, or t
cggcggcggagagtgcagtaagaggagggggaaaagggggcaggcaaaatagataagatgacaggtgggtgcgacgtgcacgcagaaaatctggggntggaagaggaaacattgtgacgctagagcgggtggtagtatcggaaaataatggtggcgtgccgtatatgagagttcgctacgtgaggcagtgcgccgaagagtgcgaccgagaataggggagtgggaatagaaataggcggcgcgtctcgtaaatataagggttgtctgctgcggagtcctacgagaagcgggggcggggagggtgatggaaccggcgcaattgcgtggcgcatgtgcagggagagtattaaaattctctttttcaaaagaaagggcaaaagtggggaatttttttgggaanggagggaggtggactccaaccctgtggggtggccccgggtaagaattaaatgggggaaattgggggaaaaaaattaaaaggttccccgacagtggttaggggcgttggttggatggtaaagatttggttgtgttattaacccccacgtacaaaatcttaggttacagggggaatggccccgtgtacaagaaccgcaaccaaaagggttcaaaccattcgagaggtttcccgtaggcaagggctgaaaatttgcagtctctggtatttggaatttagggtggcagtccttgtttttggatggatcactgggtgtgtggcacagtccatgcttttaaccagatttgaacagaagaatggccacttggcccaggtagaagtagatgaagtgtttggtttcatgtgtcacataactaccgaagttcctccccacgatgcaatgccaggtgggattgtacttcttgtcaaattccttcttgatatgagccgcaatgtccttctctatgttgtatttctccagcgcctgagtagcgcactccaccgagtcctgttgcatctcttccgacatgtccgcatttttgatcacggcctttcggtcgcacatggttaccgtggagaagggggctggccgactgcaacggtctcctggggggggtgctagcacagctcaggcccggctagagctaccgtcgctaccgaaaccgtggcgcatctaagcccc

SEQ ID NO: 126937 - DNA, 839 bp, Homo Sapiens
  misc_feature (58)..(64): n is a, c, g, or t
  misc_feature (66)..(68): n is a, c, g, or t
  misc_feature (72)..(80): n is a, c, g, or t
  misc_feature (82)..(84): n is a, c, g, or t
  misc_feature (87)..(113): n is a, c, g, or t
cgggcccaaaccgaatggtttagaaagttttcgaagggccgaggcggccccccatggnnnnnnntnnntttnnnnnnnnntnnntcnnnnnnnnnnnnnnnnnnnnnnnnnnntttttacacatctgcatcagatttattttttaaaggaatggattttgagagaaaacaacgtgggcagaagtatggaatagaaaataaatacaaatgtaggctattctgctaattgttttataaccacgacaaactagtacagagaatgccctgtacaaaacacaacaaaggttcaaacatcgagatgttcccttagcaaggctgaaaatttcagtctctggtatttggaatttaggctgcagtccttgtttttggatggatcactgggtgtgtggcacagtccatgcttttaaccagatttgaacagaagaatggccacttggcccaggtagaagtagatgaagtgtttggtttcatgtgtcacataactaccgaagttcctccccacgatgcaatgccaggtgggattgtacttcttgtcaaattccttcttgatatgagccgcaatgtccttctctatgttgtatttctccagcgcctgagtagcgcactccaccgagtcctgttgcatctcttccgacatgtccgcatttttgatcacggcctttcggtcgcacatggttaccgtggagaagggggctggccgactgcaacggtctcctggggggggtgctagcacagctcaggcccggctagagataccgtcgctaccgaaaccgtggcgcatctaagcagccccacgccagccgccgccgcctagtgctcaggccccgccctgctcccccc

SEQ ID NO: 126938 - DNA, 926 bp, Homo Sapiens
  misc_feature (119)..(146): n is a, c, g, or t
acccgggtttctccctgaaggaaaccagggttttaacccccagtgtcccttgatcctcacggggggcccgcgcggcccaaaagaaaaaggttctagaaaagctttcttgaagggccgannnnnnnnnnnnnnnnnnnnnnnnnnnntgatatgtgggcgggcgcaagtcggcggtcgtcggggtccgtgggttccgacggtgggtggttttcacatgtgcatcagatttattttttaaaggaaatggattttgagagaaaacaacgtgggcagaagtatggaatagaaaataaatccaaatgtaggctattctgctaattgttttataaccacgacaaactagtacagagaatgccctgtacaaaacacaacaaaggttcaaacatcgagatgttcccttagcaaggctgaaaatttcagtctctggtatttggaatttaggctgcagtccttgtttttggatggatcactgggtgtgtggcacagtccatgcttttaaccagatttgaacagaagaatggccacttggcccaggtagaagtagatgaagtgtttggtttcatgtgtcacataactaccgaagttcctccccacgatgcaatgccaggtgggattgtacttcttgtcaaattccttcttgatatgagccgcaatgtccttctctatgttgtatttctccagcgcctgagtagcgcactccaccgagtcctgttgcatctcttccgacatgtccgcatttttgatcacggcctttcggtcgcacatggttaccgtggagaagggggctggccgactgcaacggtctcctgggggaggtgctagcacagctcaggcccggctagagctaccgtcgctaccgaaaccgtggcgcatctccccggccgtaatggccgaattcccgggcatatgtccggtaccgtcgactg

SEQ ID NO: 126939 - DNA, 1223 bp, Homo Sapiens
  misc_feature (912)..(912): n is a, c, g, or t
ttatttatttaattcccttgaaagtctcatatacaccactaagtagtcacattcacaaacttaatttttataaattcagcagcagtcttaggattcttaggagaagaagacctccataaaaatgcaacttgtaatagtcagtgagagaggtgaatttctgctccattcaataagtccaggtcttcatcgaaggtatcttaaaggctgaactcactgggttataaattcccattttccttttcagtgtggctcagaatggcctcctgaggaattcattaggtccagatcatctgcattcaggccaggaattcatctcccgggtattgaatttgggtgggctaagttctctcctcttgagggaaactgcaagcccgctgtctctggtcttcgctttttaggtcaaggaggataatgcgacggaaatggccaacagaacaaccccaaggatcccgactgcaataaaggatgactgacgggatgagcgacctgttgtggctttttgtggggttttctgcactgaaatatctgtgcaattcactgcagcgtcttccttgtgcccacactcactatggccccagcgtctggcaggacaatcccacaaggaagactcattccctttgcacttcacttcattgagccatatcggtccagtcccctgaccaaactctgcttctttgaatgctttcaaagctggaccacagccaagttgttgacacaccacctgagcatcgtccaagtcccaagagtcatcacacactgtcccccaggaacctccatgccagatctccacacgtccagaacaggaagtgggtccttcctgaagtccttaatcttgttgtcacatgtgatcccggtctcctcccgaggggctggccagtctccttctcccatggagatgaatgggcactgccnacagcgtgtcaggtccttttggacactgaaacattgtccacccacatgggaatggacatggccttgtctaaagatgcagggttgattttccctttgtctgcacagcccagctgcctgcacaccacacccacagtggtttcagacatgctactcttgccaacagtgccccaagctccattgtaaaaaacttccagacgccctgcacaggcctctctgctggcttcactggtcagtctcagagacatgaattctgagcagataactcccgcatcctccttgtgcctgcaattttgctgcccccagccgtgtga

SEQ ID NO: 126940 - DNA, 1020 bp, Homo Sapiens
  misc_feature (92)..(92): n is a, c, g, or t
gcggaggcccggacgcccccctggggaccctgtgcggcccgcgaggtccgggcccggccacccccgcggcccccggcggtccccgcctgccncaggacgcgctcgctgcggggccccgccgctgccgcctcctgcgcgtccccgacgggctgctgagtcgcgcgctgcgggctggaaggagtcgccgcctggcccgcgtccgctccgtctccagcgggaacgaggacgaggagcgccgcgcgggatccgagtccccggcccgggccccctcctcgagcccgctgtcatccagggccccgcttcctgagcgcctggaggccaagggcaccgtggctctgggccgcgccggcgacgccctgcgcctggctgctgagtactgtccgggaacccggcgtctccgcctccggctgctccgcgcggagagcctgttcggaggcgcccccgggccccgcgccgtccgctgccgcctcagcctcgtcctgcggccgccgggcactgcgcgttggcaatgcagcgctgtggtggggcgcagccgcaaggcctcctttgaccaggacttttgcttcgacggcctctcggaagacgaggtgcgccgcctggccgttcgcgtcaaggcccgggatgagggtcgcggccgggatcggggccgcctgctgggccagggtgagctgtccctgggcgccctcctgctgctctgagggcccagccctccccggggcgctctgccctggagactccggacactgacagccgcgtggtacagaataaacgttatttatttttttatttatgatactgctttattgacgttttacttcctcaccatccacatttgtcatcgtctattggtaaagaagaaaaagataatgactccctgttctgttcacaggacccccatatctctttccagaccatttttgcattccaaggaaaaatgggttggcttgggactgggagagaaaggaagtacacccatctgcattgtttttaattccttccggttttctatcaatgttacag

SEQ ID NO: 126941 - DNA, 1182 bp, Homo Sapiens
  misc_feature (100)..(151): n is a, c, g, or t
  misc_feature (296)..(340): n is a, c, g, or t
  misc_feature (580)..(712): n is a, c, g, or t
  misc_feature (1009)..(1009): n is a, c, g, or t
  misc_feature (1045)..(1045): n is a, c, g, or t
  misc_feature (1060)..(1060): n is a, c, g, or t
tctacaaaaataatttttaaaaattagccaagcatggtggcatgtgcctgtggtcctagctacttgggaggctgaagtgggaagatcactttgagcccannnnnnnnnnnnnnnnnnnnnnnnnnnnnnnnnnnnnnnnnnnnnnnnnnnnggacagagtgagaccctgtctcttaaaaagcaagaaaagaaagagaagactgagaataagaagatctctttgaaaataaaataagactgctaaaagtatttggtatacagtctggaaaataaagttgagggaatctctccagatnnnnnnnnnnnnnnnnnnnnnnnnnnnnnnnnnnnnnnnnnnnnngacatagacaatcaatatgtaatgttaggagttcctggaagagagaacagagacagtgtaggtgaagaaataaaaagaaaaagaattgaagaacagagccagctaagtctccagatttgagagggcccaatacaatctacatctagacacaatattgtaaaattttggaatattaaggatagaaggaagatattaaagtggccagggagaaaacaaatgaggtcatcacgattagctcannnnnnnnnnnnnnnnnnnnnnnnnnnnnnnnnnnnnnnnnnnnnnnnnnnnnnnnnnnnnnnnnnnnnnnnnnnnnnnnnnnnnnnnnnnnnnnnnnnnnnnnnnnnnnnnnnnnnnnnnnnnnnnnnnnnngtcaagaagaacatcaaagtgaagacattttctgtcaggcaaattttcagaaagtctcctttgcacccttactgaggaagtatcttgaggaaattctccagcaaaatgaggatgaaaaccaggaaagaagaagaaatgggatccataaaacagtggaccttacttaggatgtctcattctagagtgacagccaaaagggtatctcaccctagagtgacagctatccagcagactaatttcagatgagagcatactgtctcgggctttctgggaaagaatgtgcattcagtgccatanatagtatcattgaagagctgggaatgctttgagaangattattttagtccngaaaaaaaggaaagaccactcccccaattatggtcaaaaaaatttcacggtgcccaatttattggagcccaaaaataaaaatggagggccatgaattttgtggaagcttatttccactgaac

SEQ ID NO: 126942 - DNA, 1342 bp, Homo Sapiens
  misc_feature (240)..(294): n is a, c, g, or t
  misc_feature (381)..(432): n is a, c, g, or t
  misc_feature (577)..(623): n is a, c, g, or t
ttaacagttatgttgattcttaaatgggaatggtgagttagaaattcccagacatgggcgatggggagggaagaggaataagaaaagtcacgaggtagaattaggggccttgaaaatatgacaaactctgagggaaacaaagacaatgtggaaagaataacttaattttaattccatctccagagagatttgaggtgtatttaagatgaaaaacaggatactacaaagaaacggaaaacnnnnnnnnnnnnnnnnnnnnnnnnnnnnnnnnnnnnnnnnnnnnnnnnnnnnnnnatttttaaaaattagccaagcatggtggcatgtgcctgtggtcctagctacttgggaggctgaagtgggaagatcacttgagcccannnnnnnnnnnnnnnnnnnnnnnnnnnnnnnnnnnnnnnnnnnnnnnnnnnnggacagagtgagaccctgtctcttaaaaagcaagaaaagaaagagaagactgagaataagaagatctctttgaaaataaaataagactgctaaaagtatttggtatacagtctggaaaataaagttgagggaatctctccagatnnnnnnnnnnnnnnnnnnnnnnnnnnnnnnnnnnnnnnnnnnnnnnncatagacaatcaatatgtaatgttaggagttcctggaagagagaacagagacagtgtaggtgaagaaataaaaagaaaaagaattgaagaacagagcaagctaagtctccagattgagagggcccaatacaatctacatctagacacaatattgtaaaattttggaatattaaggatagaaggaagatattaaagtggccagggagaaaacaaatgaggtcatcacgattagctcaacacaaaaatggatgagaaatagactgctaacagatttgtcatcagccaacactgaatgcccagaagtcaatgggatcaacatctttcagagctttaagggaaatttttgtacctagaatttcatagtaaggcagactgtcaagaagaacatcaaagtgaagacattttctgtcaggcaaattttcagaaagtctcctttgcacccttactgaggaagtatcttgaggaaattctccagcaaaatgaggatgaaaaccaggaaagaagaagaaatgggatccataaaacagtggaccttacttaggatgtctcattctagagtgacagccaaaagggtatctcaccctagagtgacagctatccagcagactaatttcagatgagagcatactgtctcgggctttctgggaagaatgtgcattcagtgccatagatagtatcattgaagagctgggatgcttgagaagcttaaatagtcaaga

SEQ ID NO: 126943 - DNA, 748 bp, Homo Sapiens
  misc_feature (246)..(246): n is a, c, g, or t
tcaggactgcagggaagaggaagcacgcacagcacgttcctctctccactgcattgtttcactgggctcacctgcttctgaaaacggctccctgtcttgggctctaatgaggatctggggttgggagaggctgttggtctgagggcagtaatcacaggctgcaggctagagggggcagttatgactgcctgaaagtgggtgagggattgcacttcagaaaaacatctaaaaaacttagtctatgtntgaattccccacctccatcccatctatgggaagagccgttcagtgtttagagagtggggagatgggtccctgcacttggcctctccataagccttggagggtcagggctgataccaggggtcctggcaagccattgggcagagacagaccacaagagcagggcatttttttacgctgggcatacatatgcacacaagcatgcacagaggcatgtcccgtgcccagcctctccaccgtcactgtccgctgctggctggaggggatgcaggggtagtgtatgcagaccttccactgggcaaatgccatgtgtcaggagggaaaggcctaggaagcccccatggggaaggttctggatttattccctcctctaaatgctataaatacgttagcacttgagtcgactggaggctgccaggaattcaggatgcatacagctgtaatttaacccagagcagctccacgtgagagcattaaagatgtaatgaagatgtttacatggaaa

SEQ ID NO: 126944 - DNA, 1269 bp, Homo Sapiens
  misc_feature (158)..(187): n is a, c, g, or t
  misc_feature (190)..(256): n is a, c, g, or t
  misc_feature (258)..(262): n is a, c, g, or t
atttggggggggaatctccaagccccttgttccttgcccggggtttttcctttgggaacccggttatggcccatgttcccctttcccttctgggcccgccgcggccaaacgaaaggtttagaaaagctttttgaggggccgaaggcggccgaccaagnnnnnnnnnnnnnnnnnnnnnnnnnnnnnnacnnnnnnnnnnnnnnnnnnnnnnnnnnnnnnnnnnnnnnnnnnnnnnnnnnnnnnnnnnnnnnnnnnntnnnnngactggacgacagcactcactagggtgctatttataaccatacaatgcaggaggctagctgcgtgtcgatctgggggacagtttaataaactgccacacaacacagctgagctccacacagccacatgaggatggggacagccattccttgggtttctgaataacgtatcaagtgagcagtgaatttcaatcaagcttgtacatcaggaccgtcttgccaaaacaacagttgcttttggctgctggaagctgtagcttttcaaaacgttcacacatttcaatgtatcgtcgatgtttttaaatagacttacagggagggtggcacacagcaaaggcccgcaggccctcgtagcaccgcagtccaggtaggatgctgggcggcggggggtggtggagggggttctatttacagtgtctgggctttgactccactaactgttggttttgttttctttcttaaaccttttccttcaagtctggaagcctgtggagggcctgtcaccttaaaggcaaggattccttgtttgcaccaggcagacaaatgtcaaaccacgaccccaggggctgcactaggcgtcgggcccagaagcccctggccatccagccccgactctttcatgcctctgcccctgatgaggggacccagggtaccctcaaggggacacagaagggaggctgcatcctagtccagtgtcaaagtgagggggggcgctgcaggagcctggacaggaccactagcccagccagggacaggagggtgagaccacctggaacaaaggcacagagtgctgcgcagagaacgcggcatgttcccagactgccttgggctccggcgtaaggggatgcgaggctcgaactggccattgttgcccagggatctcgggcctcttactccatgggccaggagggcaacccctgggggctgcctggggcccttcgtgctagcgtgccccgaagtaccctcgctgccttgtcccgggcccgttcgcgctggcgcccttgccgca

SEQ ID NO: 126945 - DNA, 1305 bp, Homo Sapiens
  misc_feature (57)..(96): n is a, c, g, or t
  misc_feature (359)..(367): n is a, c, g, or t
caaatacaaatatactattttattctaagggaatatttctgtggtttctgtaagggnnnnnnnnnnnnnnnnnnnnnnnnnnnnnnnnnnnnnnnnggatgatttagatgtttttgtttgatgtttttttctcccctggaaaaaaaatgtaattttacacaattttcataaaattaaaaaagcaataatcagacgcacacatcaacagctacacttatgaggaatgaccaataattaatcaatattttctcttatgaataaatttagggttctgggcaactctgtggactaacatgcaaatgaaatcctgatacagtcatttatctgggtattgggtgttctcagtaaaagatacagannnnnnnnnctggtatttcataacaatttatctactatgctaacaatatttgttttttcatacaactacagaaggggaaaatgttagtgtttatacaaaccataaaattcgtatagtggggactattacacttgctatttctggatagtttattggcagacttatcagacaatccaattatttgtcctccatatcgaacaaggtatggagtaagaagttttccagtcagaaatgacaaacacagatggaattaatcatacagaatcggggtggatttacttctttcatacagttcttggtaacaaaaatgagatttgttacaggcagagggacagaaccaccaagtacacaatgtcagaaggcctacttttttcattttagttttacttaaatgccttttatttgttaaaaaagaaatacacctgccacccccacctaaaaaatgagataccctgaaaagtctttcaagattaaaatttctaagaggctttttgacatctctcagttttatcatagcgtcaaattaaccttagctgaagaagttctgcaattggcaaacgtcataaaagctttgattccaaattttgtggggaagaaactgagaatggagatgagggagatggactgatatgccacacacacctatgacttgcaatcctcatagaactactgaaacagctagagtttggaataatgctctaagacctgcttatggatatgcaagacaatgtctttgtatcctcaccccagaatccctattttcaagtttcaagggcaacaaggtcatcttccaaatgctttatataggaacctaactaggaccttttctatcataattcagatagctaagtaatactgtatctttgtggaatcactcacaggtttgccagagtaagaaaagagactatcctttttgaaatgacaagggcctccagaaactggtgcaa

SEQ ID NO: 126946 - DNA, 1455 bp, Homo Sapiens
ttttttcacatgatacttagctaggacttagggcagttgagaggcagatcatcatgcctctactttcttagcagagacaaggaagactggggctgtttgataatgaggaaggggaaaatgggacaaaatactcctctttcaaatgaacactgtggagaaaatctttctgggtttggggaagtcagagtaaagacttaggggagtaataaagccagagaccccccttcttttcctttccctgccttggatctaaggcaagtgagccaaatttggaagagggagtaggaatttaagcttaaggctgcttaatgtcttcctgggggctggtgttttgggaaggcagacaaagagaaacaggtcaacctcaaagctggtctgctcatcctcttagaagaggtctggtatctgtggagtagagccaagagaggcaccacagagagcacagtctcccaaacagaagtaataaccggctcatattttatcagcagttttcaaaagcaatgttttccggggttggagaagtgccatatcttcctccctttccccaaagctactgctgcgacctttctttcatccttgtacataagttactggctctcttctaagggagataaattctgagatttcacattttccctctcaaccccaataggctacccagcttcagtgagggggaaggagagctatgcaaagggcccctcacttgaggcagctagactgtccttatttccttggtacctgatctccaaaactcttgatctgatcccaaggtccaaaaggcatcagggtacttacactgaaaacttcaagcaagtagcaccagggctccccctaagcataacaggggcctgattagcaccccagaagaacccctcaaaaagtatataaatttattgcgtcctagcaaagatctgcagcttccagtattcacacaatgtgaagatattaacaatacaaaatatattttgaaagtcaaacacctgtagttcatagtgcttttttagatttgttaaaaaaaatacaatgcttagtttcctatataggatatacaaaagcaaaaaatatatatgtatatagtagaaataaatcagccatagtaatttacagcttttgtctccaaccctcccctaatcataatctttatcccacacttcagtatatactttctgggatcaaaggatcaatttattctgaaccaggctgagaaatatccattaaattgcattctgtgtagcacccacagagtgccagttggaaatccctgaaggaagacggtgtgggttgttactgttctgggtaaaaagtgagacagtcaaatgacatgtaaatgaatataaatgggcaacctgaaaacctgaaaggatgagggaataagtgttttactatctcaccactcttctgggcatcccctgccctgcaagttttggtcatctaaaaaatttaaaaaactcattc

SEQ ID NO: 126947 - DNA, 802 bp, Homo Sapiens
gagccactgcgcccagccagcagtttcagttacattatagagagagtttaatggcatttccacagttcaggaccagggaaagaaacacagaggctgcctggccctatgtgaaacttttgggggccgactccaggcctgagcctgctctgaggggatcagtcatgtccccgccttagtcccaggacctgagggagctctggattggtggcttggcccagagccaggtggatggcagtgttgaggggctggtgcttgagactggttggcagagtgggccctgtgctgaggatgggacatcttggtcacaggtcacatgaggttcctgctgagaagggctaggggatgatcatccatcttcatgggtgtgttccggttgaggaaactcagtcccagaagtgagcttggaaagggcggctcagcccaatgctccggagctgaagtggtgctgggacgtggctcaagacccgagcttgctgcaggagcccattccccttctgtcagagggggtggtccgccaggagacagtcttgcatctggtccaggaagcagacagttcagtctgctcgggtgtccagggccacacaagcctgggggtgtcagaggaactgggctccggtacttcaagtaggacaggtacgtgtcccagcccagcgtcaggccgttgatgtaggtgactcgaaattgggggggcacgaagaggaagttcacgaactgcgcagcaggccacacgcaccagtctgccttgtagaattcccagaacttctccctcgtgccgaaatcgccacccaggcctcgctacctt

SEQ ID NO: 126948 - DNA, 763 bp, Homo Sapiens
  misc_feature (1)..(1): n is a, c, g, or t
ntatacaacagtagactgtctggcttgcatacaaagaaggccattgcccctttgggtgagccgggcaaggtcagggtctaagaagcgcctctggtgagaagcggttgtcaggctctgatggctgcgggaggagtgactcctcccaggatgagggtctgtgtcctctcagtgctcactcaagttccgtatttccaagtccttccagggggcgtaacgcacgtgagaactgccatttctgtcacagatacgtggccgcatgcatttccaggaaatgtccttggttcgcgaactacagctggcacaatccagcccagggcgttctgtgagctgtagtctccagcaagtgaattccaaaaaaacctcaaagacctcaaagaccatacagggtggacagcgtagtagcagggtttgggaagagaggagctcttttgctagcaaaggcgagagctcgcctggtacaaggtctgcccacgtcccgggagataaacattagtgtgagcgcacgctagacccagaagagtttgccacggccgcacggttttctgggaagtgtagtttcttggtcccggcgccattgtccttaaaagtagagggtggcccttggttccgaggtgtatctttcacctcatcagtatgactatatgccccaggacacttcccgcatggtcctaactgccgggctctgggacgacagccccaggcggtttagttttttaggaaaccgagatctgtttgcccgcggcgccccaggtccgcgcggccg

SEQ ID NO: 126949 - DNA, 751 bp, Homo Sapiens
  misc_feature (732)..(732): n is a, c, g, or t
gattcaacaaggacaagttcaagtattctttattcaaagttgaaaaatgtaccatactgcattattgcaaaaattcactggtacaaaacactttgcagctggtgagaaggcaataaaaagttgatttttaaactcattactataaattattcttacagtactttgcaaattcagaatttcaaactgcatgttctttttctaaattgcccacagtactcgaggttcctgaagctaaggcagctgtttcagaggagggggaggaggtagcagatgtcaagggatttccatttctctttcgatgccgacatacttcagggcatcagcctggctgtatctgtaatcaaaaaacagctcttcgccagtctggatggctctcttggcaaaaatacctatcctgtgatcaccgttaaccatcataacttttgcatagcagtttggatttaccgaatgatttgcaaaacgaattttgttacccttgcgggttgcatccaccacaaaatcattgttcaagttgaacagaaagctgcacatgtatttatcatacactttcccccttctgtcagcttcatcttgagaaataatctctccacagtattctgagatgaattcatttttctgcacaggatctttgataaaaatcccccagcctgccacgtcagatggtgccagcaatagatgctttttggagccccgctgaatactgcagttcttgcaggaccatttttactgtcncaatggtcagcctcgtgcc

SEQ ID NO: 126950 - DNA, 449 bp, Homo Sapiens
gctatcactgtaaatcctcagacctgtttgttctaaggatttacagtgatagcttttgttttcattctgtagtctactttgtccccagtccattttcaccgtccttttttgatgatgcgattgtgttttattctctagcatctattgctggcaccatctgacgtggcaggctgggggatttttatcaaagatcctgtgcagaaaaatgaattcatctcagaatactgtggagagattatttctcaagatgaagctgacagaagatggaaagtgtatgataaatacatgtgcagctttctgttcaacttgaacaatggtatgtttcagagctgggatgcattgagtttctgagttgcatgtggcagccttctgccggccgagtgttcagaaacgagggtagaggtcagtgaggtgaccacaaggatgatctccttataggcatggggggc

SEQ ID NO: 126951 - DNA, 1238 bp, Homo Sapiens
  misc_feature (158)..(168): n is a, c, g, or t
  misc_feature (198)..(198): n is a, c, g, or t
  misc_feature (262)..(352): n is a, c, g, or t
  misc_feature (381)..(390): n is a, c, g, or t
  misc_feature (402)..(410): n is a, c, g, or t
  misc_feature (414)..(602): n is a, c, g, or t
  misc_feature (1053)..(1090): n is a, c, g, or t
  misc_feature (1131)..(1163): n is a, c, g, or t
cccccccctctttttcccggggggagatttttttatgacaggcggcccggggggggtttcctctcggcgccttgtgagatatttttacccccgtggggggagggttcccctgcgcgcggggtgttaaagtttttccccccctctttaaaatttgcccnnnnnnnnnnnttttttatatgaccccccttcttccccctngggtaaagccccgggaacctcccgagccccccctcggttttttcccaggcctcggttccccccnnnnnnnnnnnnnnnnnnnnnnnnnnnnnnnnnnnnnnnnnnnnnnnnnnnnnnnnnnnnnnnnnnnnnnnnnnnnnnnnnnnnnnnnnnnccgggccccccaaaaaaagttttagaaannnnnnnnnngcccccgggggnnnnnnnnntttnnnnnnnnnnnnnnnnnnnnnnnnnnnnnnnnnnnnnnnnnnnnnnnnnnnnnnnnnnnnnnnnnnnnnnnnnnnnnnnnnnnnnnnnnnnnnnnnnnnnnnnnnnnnnnnnnnnnnnnnnnnnnnnnnnnnnnnnnnnnnnnnnnnnnnnnnnnnnnnnnnnnnnnnnnnnnnnnnnnnnnnnnnnnnggcttccttttatttcttgaggattacatgaaacgtgaactatacaggaaagtatggcagccaggtcctggggccaggggctggccggctgctccctgcccacggtgggggcttcctccgagccgccggtcctctccggccatctgcatccaggcggtggctacttggaggcagtcatgaagctgttctcaatgcagagcacgatgtaggcgtgatggcagctcgcggcactctgccccaggagcctgccccccagcagcgaggaggcctggcccgtggccgagggagcctccgtccgccacgtctcacagtagctctcggtcagcctgcgcccgttggggtccgagccatgccacgaagatgagccagccctcgggaacctcgtgcacctggcccagcatggcctggcgtgtagcccagagcctcacccctgaggaggcgcccatggttnnnnnnnnnnnnnnnnnnnnnnnnnnnnnnnnnnnnnngggaacgctgatagtctgcctgtgagggccaggaaatgaannnnnnnnnnnnnnnnnnnnnnnnnnnnnnnnnccctggcgcccctcgtagccgatgccggggggtctctgaggtccaggtgggccgggctggccccggatgctctct

SEQ ID NO: 126952 - DNA, 587 bp, Homo Sapiens
cagtgtaaaaggtcacttttatttgcctgtctgaattggcttcacatcacacacaattacagaaccaggatgtcatctgcccgccagcggcggcgcgtggggtgggggtgctcccgccgcgggtaggggttgctgtcgtgcagctgcaccacggggggctgcaaggcggccacttcattgtccgtccctcgtgggagtggtgtccgggcctccagctggaccttccggaacccgttctgcacgcggacgtagagctcctcctgctcggccacgaagatgagccagccctcgggaacctcgtgcacctggcccagcatggcctggcgtgtagccagagcctcacccctgaggaggcgcccatggttccgagtgggccgatggccaggggggccccttcagtcccaaggagggtaaggatatgggtttcctaggagacagccaatgcagagcacgatgtaggcgtgatggcagctcgcggcactctgccccaggagcctgccccccagcagcgaggaggccgtgcccgtggccggagggagcctccgtccgccacgtctcacagtagctctcggtcagcctgcgcccgt

SEQ ID NO: 126953 - DNA, 1838 bp, Homo Sapiens
ttttttcagtgtaaaaggtcacttttatttgcctgtctgaattggcttcacatcacacacaattacagaaccagccccaccggtttcgtcgcagtcctgaggcaggtgcgtgttggctgtgctgtggtcagcctggcgctgccctgagtccacttgtccctccacagaacgaatgactcgggttgatgttgccggatctcaggggtggctgtgactgacagaggaccttgttgcacctcgtggctgctttgttcacccgcagggcggcctgtgggcaccccggggttccccttcagtcccaaggagggtaaggatatgggtttcctaggagacagccaatgactgccctgcatctggagccagcctgtccatgggcagtgcacagatgacagccctccctcactgccctgtgtgctggctaccgcatgtcctgtgccagcctcagcctctttgatgtggccgtgttccatcctggcgctcagctggacaagtgctggctgagccacgtcccagccaggggcatgagatgggggccctggatgggaggctgccagaccccaactcatgggtcccttgaatctcccagcttggactcggccagggtggagctgtctgctttggatgtatcatctcatggctcatttgggaggccagccccaggctgctgtgcttggtgttggaggacaggccggagctgggggtcacagtgcgcctctgagcttgggaacctgcttcagcctggggttgctgtggagaatggcccagagctgagcagaagggctccccctagccccagggacctgagcctccctcccatctaccgcagggcgagcacacaccctggaggagcccagatggccttgtgctgagtgtggcctcagctcccattgcctcacggggcctgtctgctaacaggtctgggttttgtgcacagaacggtgctgctaggtgggagatgaagtcagcacctgctggggcgagcacggcttcccaaagcaggaaatcctggagaaatcgagccgtggtctgatcaggccaagaggttgcacagggcatgatactgcaccctgcctgacccagctgggctcacaggtcaggggagagttggggcaggtgaatgtcagcatcaggcttctgttttaaacttttaaaaatatacactctttggcttccttttatttcttgaggattacatgaaacgtgaactatacaggaaagtatggcagccaggtcctggggccaggggctggccggccgctccctgcccacggtgggggcttcctccgagccgccggtcctctccggccatccgcatccaggcggtggctacttggaggcagtcatgaagctgttctcaatgcagagcacgatgtaggcgtgatggcagctcgcggcactctgccccaggagcctgccccccagcagcgaggaggcctggcccgtggccgagggagcctccgtccgccacgtctcacagtagctctcggtcagcctgcgcccgttggggtccgagccatgccacacgctcttctggggccaggtggggtgcctcaggacgtccttgccgtcacaggagaagatgcgtgccccgggcttcagcggaccctcagagcctgagaacagagccttccatctgggaaacagcagctcgtccttgaggttgacgatgggcacggctgcgcgcgtcggcacggcgcacgatgctgtacaggtcctgcaggcgcgaggacaggaaaggcgccggaggtgcccgccagccccacggcccgcgcctgctggaagcactggaagtcggctctgtccgccatccgcatccagccgctgctacttggaggcag

SEQ ID NO: 126954 - DNA, 1344 bp, Homo Sapiens
tttgttttttgggcagttcattttctttattttttcacaagctttgaattcagaaataagagccacaacaagttggttgttaagtaaaaatgggagtgattacaaaggaaaactttgtacaaaactttaaaaatctgactgccccgtcaactgcctcagagggaccaggactcaggccacgcaggggcagccatcagccccccatcgtcagccccgaatggggatggggagacctctttctgagtgtgaacctggctcggcctgaagcctagagctggcttgaagaacacacacagaccagaagacagcacggtgagttacaagtgccacggagaccagggtttctgacacaggatgtggaggatgcttctctgcaacctagtgcaaggcttcccctgccattccgagaattcacggatctcacaggtggaggtggggcgagcttctttctagtgtggaccagaggtgggggcaatgagtaaacatcttcactgtaagggttttgggactgcccctcagggcttgaggtctcggcatcgtgtctcagtcagtccttggcgatgtcccctcagacgcactcacagacttgcatacgtaatttagtaacatgcatcaactatcctagaacatctacagggtgcaaaggaaccaccactcagagaatcatggagccagtggagttagaagtggaagggacagaacaagacaatgctaaaacctgtggttcactaggaagggggaatgaaaacaccatgctccgaggtggattcagcatgaacacaactgtggggcaaggaatttccaagcaaacacaccacactagtaccacttcttcctaaacagaaaagggaaagagcatccttcgacttccccctccctccatcagcaccaactaaaactgtgggtttcaaaaacactgacaggaaaagggatggacatgattcccagaatccttcaggctagctcctccgcgcatccacgttcaaccgaggctggtgatgttggagcggccaccagggggcgccacgatgcggtggccggtgcgcctgggattgttgtcatctatctgggcacctgaaagagagcgccaatcgctgctggatgggatctgttagcatcagttccacgctgctcctggaggccatgtactctgccatgcactccactggacccaccttcattcagggctcagtccaggaccagccatgggaagcctccctggcctccacagagtccactgctccctcttctgtgcccctcagtccctgggctccccccaccttcagccctgaccaccttgtggtgttcttgtcaaaatccccagtaaaatccgacattcctgag

SEQ ID NO: 126955 - DNA, 969 bp, Homo Sapiens
  misc_feature (874)..(922): n is a, c, g, or t
ggccttggcctttccagacgctttgtcgggagctccaatggccgtgttcgcgtgcaccagttcacagctcccagcccttaaggcaggtaaaggtatcattgagtttgctgtcggaacatttgggtagacatcctataggcccattgtaggactgggaagggagtggacgccttcttgtccggcaccagcaacctccagctccctcccggacggccatcgtaccagcttgtgatgttcaacgtggaggggagtaatcacagcaggatttgggtgttcagctgcttcgtgccacttctcgaaagaggtccagtaggctgacccaggttcagaacacatggtcaatgatcatcgtgctcccgcccaccagtgccgacctggtcccttggaagaagtcatcagccgcagtcatccctgggagggcttctgcaggtacgtgttgacatcaatacctccgggaataaccatccgcccgttggcttcaatggtcttcactccaccaggaacgattaagttctctcctatttgtttgataagtccatcctccaggtagacgtcagcataaagggattggtcatcgttgatgatccgtccacctttgatgaggagtcggtcactcgtgatgtgcgggatgctcttcttgcctggtacgacatggccccctctggcgccctcggcccggccggtctgacctgcggggctgtctgactggaaccggcgctctcggccccgctcccagcgggcgcgctgacaaaggcccgggagggatagagacacggacggaggctcggcgcccgtggatgcccacgcgcggctgccccggctgctcggcccgcccgccgccgctccggactgccagcaccgcccggatcggcgnnnnnnnnnnnnnnnnnnnnnnnnnnnnnnnnnnnnnnnnnnnnnnnnngcagcctcgtgccgaattcaaccccaggcctcgtacctagcctaatt

SEQ ID NO: 126956 - DNA, 2298 bp, Homo Sapiens
gggagctgccccttcaggggtttggaggtctagggccatggggttttcagttccgtccctgggggaggttcccctcacaaatgccgttcacaagttttggcttccgtaattttagtaacagagcatacaattttccctagaacattttacagggtgcaaaaggaacccaccttccagagaattcatggaaccagtggagttagaaagtggaagggacaggatctaggccaatggtacaacttgtggttcactaggaaggggggaatgaaaactccatgctccgaggggggattcagcatgaacacaaactgggggcaagggaattttccaagcaaacacaccacactagtaccacttcttcctaaacagaaaaggggaaagagcatccttcgacttcccccttcctccatcagcaccatgtaaacctgtggggtttcacaaaacactgacaggaaaagggatggacatgatgtcccagaatccttcaggctagctcctccgcagcatccacgttcaaccgaggctggtgatgttggagcggccaccagggggcgccacgatgcggtggccggtgcgcctgggattagttgtcatctatctgggcacctgataagctgaagttggactggtggaggtttctgatgggtgggggctggtgtttagaaggcgaagatttggctgaaggagcgggagttgcatatttgggtgtagctggtacctcgtacacaggaccgtcatacatgcccctggaaaccccttgcaatccaaaaaccttattcctgattttgacgcgctggtacaggtgctccgggaacgccttccgcggaatgaagcggcccatgcccttgttgacgttgatgtttccgtcttcaaagacgatcttgccctggctgatgaccactagtggggagccgtggcactccataccctcgaagatgttgtactccaccgccgacttgtgacttttggctgttatggtcttcaacttgtcggggtcccagatgaccacgtcggcatccgagcccacggcaatccgccctttccttgggtacaggttaaagatcttggctgcattggtgctggtgacagcgacaaactccggtctctcatccattttgccagtagccaccgccttgtcccagacgacggtcatccgctcctctatcccgttgacaccctcggggatcagggtaaagttgtccttgcccaccgccttctgggcagtgctgtagggacagtggccgctgcctgtgacctgcaagtccccacaggccagtagggaggtcaagtagtcgggcgtggtagggtccgggctcaggggaggggaagtcacgaacgccgcagccttggcccagttcttgctccagtaatgggtgccatcggtccccaggctggcggcaatgggctctccaaaaactaggggccctttcttcctggccagagcgatgatttcggctggcactcttgctcatgaccttggtgatgtacacagggcagttgatccggcccgcaatggtgatggcccggaacaccgcctcggcctccagctcttcaggtctgctcagggcatggccctcgggacccgtgatgcccatctccaggatccgcttttgttcctgagctatcaaatctccattttctgcatggaccaagatcacagctcccaggcccttaaggaaggtaaaggcttcatagagctggctgtcggacatttggtagacatccttataggccatgtagacttggaaggaattgacgcctttgtcctgcaccagcacctccagctcctcccgaacgccatcgtaccagcttgtgatgtccacgtggagggagtaatcacagcaggatttggtgtcagctgcttcgtgccacttctcgaaagaggtcagtaggctggacccaggttcaggaacaacatggtcaatgatcatcgtggtcccgcccaccagtgccgccctggtcccttggaagaagtcatcagccgcagtcatcccctgggagggcttctgcaggtacgtgttgacatcaatacctccgggaataaccatccgcccgttggcttcaatggtcttcactccaccaggaacgattaagttctctcctatttgtttgataagtccatcctccaggtagacgtcagcataaagggattggtcatcgttgatgatccgtccacctttgatgaggagtcggtcactcgtgatgtgcgggatgctcttcttgtccctggtacgaccctcgtgccgaattcgccacccaggcctcgctaccttagaaccgttagagtactgcccgttt

SEQ ID NO: 126957 - DNA, 603 bp, Homo Sapiens
  misc_feature (17)..(17): n is a, c, g, or t
ggccttaaggaaggtanaggcttcatagagctggctgtcggacatctggtagacatctttataggccatgtagacttggaaggaattgacgcctttgtcgtgcaccagcacctccagctcctcccgagacgccatcgtaccagcttgtgatgtccacgtggagggagtaatcacagcaggatttggtgtcagctgcttcgtgccacttctcgaaagaggtcagtaggctggacccaggttcaggaacaacatggtcaatgatcatcgtggtcccgcccaccagtgccgccctggtcccttggaagaagtcatcagccgcagtcatcccctgggagggcttctgcaggtacgtgttgacatcaatacctccgggaataaccatccgcccgttggcttcaatggtcttcactccaccaggaacgattaagttctctcctatttgtttgataagtccatcctccaggtagacgtcagcataaagggattggtcatcgttgatgatccgtccacctttgatgaggagtcggtcactctggccattgtcccggccgaggggcaggtcgcggggcgcggggcggcggatgcgcagcgtcggcggccgca

SEQ ID NO: 126958 - DNA, 448 bp, Homo Sapiens
gtttgatcacctgtctcaggaatgtcggattttactggggattttgacaagaacaccacaaggtggtcagggctgaagggggggagagcccagggactgaggggcacagaagagggagcagtggactctgtggaggccagggaggcttcccatggctggtcctggactgagccctgaatgaaggtgggtccagtggcgaacacctgaagatggggcggggttacgacttctgctaaggtggagtgcatggcagagtacatggcctccaggagcagcgtggaactgatgctaacagatcccatccagcagcgattggcgctctctttcaggtgcccagatagatgacaacaatcccaggcgcaccggccaccgcatcgtggcgccccctggtggccgctccaacatcaccagcctcggttgaacgtggatgcgcggaggagctagcctg

SEQ ID NO: 126959 - DNA, 765 bp, Homo Sapiens
tttacattctggaatcatttattaatccaactggttacttttgaagagttttatggttagactaatatataacaaattgccaatcgttacaggtattacagagaacccagcaggcccctacgggcagagaacagataaagagcttatagactggttgcggctgcaaggagctgatgcaaagacaattgaaaaggtaaatttacaacaaagaaattcttatgctgttgttacacagctgctcagctcttaaggatctgatctttgtttcagattgttgaagagggttatacactttcggatattcttaatgagatcactaaggaagatctaagataccttcgactacggtaagagcctcaaaacagtttgtataagagaatacaactttttatgtgtgaatatgcttcaagagcagaaaacaaagggctgggcctccccccaaactctggagttctattaggttcaagctgggaaaaagccaaggtggggcagaaactgaaagccaggcagaagtcagaaataggaatgtgacagagaagagctggccaatctcctgccattaatgcctggctgggagtgggtggaggcacatggcaagcgtgcctgcacgctggacccacccccttctttaaactgcagcctgccttcttgttcccgagtcatttgaaatagccagctctctgcaggtacgtacctctaaggccatgtcctactactgctgggacacgagcgtcacctccatatgtgaggagaatgttttatttt

SEQ ID NO: 126960 - DNA, 961 bp, Homo Sapiens
  misc_feature (499)..(522): n is a, c, g, or t
aaaacgcagttctaattttatttctatttttggttgttaaaatcaaaacaaaacctacacacacacagtcccagggttttctcaaacgaaatcaacagttctttggcaatgttaagagtgtgtaacatgactgccatgctaattagcataatttataagacttctaatagtgttgaaacaggaaaataactataaacttgttagagaagttcgtttgaaagacactgtcaaatgtcacactaagtctttttaaaaactcaatttagtaagtagaaaatataaatgaacaaatttaatttttccagataataaaggaagttattcggcatttttcccagttacgcaaagacaattatcacgtgaaaaatttatagaatgtaagcagtaagagagtattatgcaaaaatatcctaaggtaatttcagtataaattataggaccacatttattaataatatacgttatgagaacaatcatttgcagtctcactgtgaaggcnnnnnnnnnnnnnnnnnnnnnnnncccaaaggataaacagaaatagcacagtccaccgaatacactgcatggtgtttataactgtataaccaaactaagtaatctttcccctctctttaacttttatgcaccacctgccattctagatactatcaatcacactaaataataataaaaaccaaccaccttcaatctgatcattctgggcaggaaactgaatacagttttgaccagatcttcgagaaagattcatatacacgaaattaactagttctgttaaaaggctgctataaaaataccatcattacgagctatacagaactttagaatccagctaagagtgcagaaatactgaatttcttaatttatgtggagggggctgtaaacccaaaggtagaagggcatttcagcattctggcgtgttcagagtttctagggtatagtatctctctaaacacagaga

SEQ ID NO: 126961 - DNA, 1313 bp, Homo Sapiens
  misc_feature (71)..(93): n is a, c, g, or t
aaattataggaccacatttattaataatatacgttatgagaacaatcatttgcagtctcactgtgaaggcnnnnnnnnnnnnnnnnnnnnnnncccaaaggataaacagaaatagcacagtccaccgaatacactgcatggtgtttataactgtataaccaaactaagtaatctttcccctctctttaacttttatgcaccacctgccattctagatactatcaatcacactaaataataataaaaaccaaccaccttcaatctgatcattctgggcaggaaactgaatacagttttgaccagatcttcgagaaagattcatatacacgaaattaactagttctgttaaaaggctgctataaaaataccatcattacgagctatacagaactttagaatccagctaagagtgcagaaatactgaatttcttaatttatgtggagggggctgtaaacccaaaggtagaagggcatttcagcattctggcgtgttcagagtttctagggtatagtatctctctaacacacagagagcatttcaaagggtggctatggccaggaaacctcagagcgggttctgccgtcacacttgatcccgaaggcgggccagtctctgagacagttcatcctgctccgccgaagccacgctcgtgcccacggagccggtctggccctgcggcagctccatgttgaggtcgaggcccgcctcatctgccatttcctggagcagcatatccacttggttctggggagtggtgagcgtcgtcgtgctgctcatcgtgtcttccatttgctgcgtctggacgtccagagtctcaaactggtgctcgaatttgtccatcaaagcagaaatcttctccagattcatggtcttcaatgtcgcatccatcgacttaaccacaccagccatcgacttggtcaccttgcccatcgtcaccgccgtctggaccctggcagccactgcatcgactcgcgcactcattctcaagaaattcaccgcctggttcttctggcggatggcattttcggcgtgtatcctcgcaacttccatgttgcccttctgaatggcctttttaattttggccttttcggccttttcctccttatcgcattttttggcactcctactcagttctttggccgcgaacttcaggttgaacaggtgtttctccatgttagacatagtcggacggctcctttgggtcggcggcccggctgagaagcgcgccgaaggcagagaaggtaaggtaagtccgctcccggccgccggacgcgtgggtcgacgatatcccgggaattccggaccggtccag

SEQ ID NO: 126962 - DNA, 516 bp, Homo Sapiens
ccgggggcgggatttatttacaaggaacgaaggggccactgactcagagcggcaagtacagcgagtagtccgagagcgcccaccggcgggcggggcggctggtacggccgatcatgggcagtttctgcacgtagcgcgaggccgggctaggcccgtacggcgcggggaaggcagtctggaaaaggcgcccgcggcagcgcctcccagcctgccgcccggctatgatgaaacgaaagtgcggggcgccgcgcggggcgaaacggctcttctggaaaacgtcgcgggtgccggtcccggggccctgctgccggggtgccccgcgcgcccgatgcacgcgcggcaagggcctgctctcagaggcggcgggcccagaggccgacgcggggccgcctccgccgctgccccgggggctctcgtcgccgtgcgggctgactatggcgcttgccgtcagctgcggcatcttccgcaccgagtccggggctgccgccggctccttcttgtccccgggcggccgca

SEQ ID NO: 126963 - DNA, 1674 bp, Homo Sapiens
  misc_feature (1432)..(1432): n is a, c, g, or t
  misc_feature (1458)..(1458): n is a, c, g, or t
  misc_feature (1525)..(1525): n is a, c, g, or t
  misc_feature (1545)..(1545): n is a, c, g, or t
  misc_feature (1557)..(1557): n is a, c, g, or t
  misc_feature (1586)..(1586): n is a, c, g, or t
  misc_feature (1594)..(1594): n is a, c, g, or t
  misc_feature (1638)..(1638): n is a, c, g, or t
ttttttgataccagatgcatgtaatgaaatatcctgttaatgtagcactgtaaggaagtcatatacagaataagaaccaaatttttcaagaagacgagaagtagctatttcacctttctttcatttaacataaaaaaacggtgcaggcagcctctccattttccctgaatgtcatcttttggctgatggcagaagccaaccactatttgcatactgatgctcccataattacagttgagtcccttaaacatagtctccaagttacgatttgtttgcaatataatatagcagggttaccaactttataagcaatgctatgtgtcatttgctttaggctacagtatcacatcatcttgtaagcatcaaataaatacaattaaatatgacaggtctttaaactgggcttgaagggtgatgggcattagcagacggcggatgtggccgacttctttcaggcatctgcttattgtaaggccgccccaggcacgagttagctctggaaacctctctgtcagcattttagttcaccaatcttgtatccccaaaattttcatccttcaagtcatttcagttatgagattccatgggtcacatgcataatatgagataggaattttattctccctttttttcttgatctgtacagatatacttctgatattccatccactaaattattttccaccatattcacccaatagttacagaatattgccagaccattcatcttctttttaattcccttcagattctaagtgagaaggaactctcattccctaaagattttttatatcaaggggacagtaatgcaaagcaatccctttctgaggcttttgctcttacaaagatacaacacaccatagtaccaaaggacacacgtccccaccttgttacatcagattttaatatggcaataaatgccttgaaaaatacacattttaaacttaaaagggtattgaaagccattcttctccaggtaattaccaattacccctaagggtggtagctgtaaaaccacttgatcagacaaaagtcttggtcttttcaaaagttaaagttaagtcaggggcagttgattctgctttctttactgttcccatctgagagaagtatggaatttcttaattgggaccatttgtgggaagacattgagaaagctcctttgagacacttttttttctgcttggccaactgctctagaaagaagaaacgtcaaggtgggtggagacagtggtctgggcccaccaccctcccggctgaacagcctgtcatgctatttccaaagagaactcgccaggaggggagatgactgcagaacaccaggagatggatagaatagggtaggctttaggtgcagcgtgtggcccccccatcctggggcccccagggaggaagagggggcttccgttgagataaaggccacatgccttangaaatatccccccagaaagaacccanaggtccagtgttctttgagatccaatggagtccttgtagaaaaggaagggtgtgtgacgcctgctgnggtattggtacggtgccagntcagcgtcttgngggccttgcattgtcacatccagagcttncagcagtnctgacagcgcacgggcagcacagtggacttaacccacactggcnaacggtgacaattgagtggtacttcctcagacatga

SEQ ID NO: 126964 - DNA, 982 bp, Homo Sapiens
  misc_feature (93)..(142): n is a, c, g, or t
attgcctcttaatcctttaattaggctgagtctttcagaagaaagcaccattcattgttattgaagggaaccgagagcaaacggagatagtgnnnnnnnnnnnnnnnnnnnnnnnnnnnnnnnnnnnnnnnnnnnnnnnnnnttacatgaatgcatgtatttgtaatgattataattaaactctcttgctgaagggctcagagtttacaaaaaaatttatttgtgtctgagagccacgattgagaacattaaaaaggtcctcctgggaatgtaacttgggggaaatgtggcgagagggcaggactcggcagcccatgggcatgccacaagatgcgcccaggcgctctggggtgaactctgctgtgacttcaggccagaggtgtctgcccccgcagtgccctgacagctgagtggtcggaaggccccggctgggaaggattcatttggaatctttcttcttcttctttttcactagcgtttcttctagtgtagcgtcctctgctatctctactggtttttgcagctttttcttccctctcctctttttgggcttcagggtgaagtcccggccctcaggcggctgcacatggtcccctgcatcctgagcagaggccttggaactctggtcccagcaggggcctctgagctgctcttctgctggcgcgctcttcttcttggccactcgctcctgggcctcggccctctcgggctttccctccgtgtgcctcttggccttaggctggaggtaactttccacatctttacctgtggcctctttatttcttttcttcccccttttacgttccacctgcgtctcagaaatgtcagaccctggaactggaacctggggcttgttcttcagtgctgccatccgcttggcaaagtactcctggatggtgaaggcgctggttgtcgtggtttcgttctcctctggagtggagggactggcatcgccctcggggagtctctactctgtcttttc

SEQ ID NO: 126965 - DNA, 1272 bp, Homo Sapiens
  misc_feature (79)..(105): n is a, c, g, or t
tttctttcacaaaaaagataatgtttatttattttttcaaattatagaagttgtagatgcaaaatatgccattttattnnnnnnnnnnnnnnnnnnnnnnnnnnngcactcccaataccccattccataggattaacagctagtatatatggtggtgtgtatgtatagtgttgtatttcaaccaggtatatgtacatttttttaggcacttagaccttatctccataaacattatcgtcaatgacatccagattttagaagaaaaagtctggtgaagtttccatacttgaatcaggattgagtatgtctttcttgtttttcctggtcttgatgaccttgatgtgactatgaattacagatctcaactccccggtattcccacttttcggtgccaattcaaagcaggtgagtttcagtttatctccttcctcacagttgattgtggtcagtcgtccatgcaccaccacttccatcttccctgtattatcttgtatttcataataagtgaattcaccccttacatttttcttatgtacctcaaacaccccattcacaaaacttcctttagtttgtgagcaaagctgattgattttaggagttacgctggcacttctaatcaatccttttgggatctccatgtttcggtcagcattcacatcagccacaagtgtgaaaggatatacctccaggaacccattgcggcaaacataatttgctatggcaatgatcttctttggggtgaacttctcctttaggtcaatattaaaaaccttcactcggaagacttcattctcagttgccactgtggcatgaaacattttcttctgctctttgggctcatatacaaatgattctgttgcgttcagcaccatcacttctttgaggtcactctgggcactgtcttctatggaaacttcttcaggttcagtcttcagtcttggtttcaacgtggttaagaaactgctgcttggtgttgatggaggcatctgaggagtgtggggatggctctcagctgggcctatgctggtcatgaacggtcctggaaaatgactcccttccttcagtatctgcatcctcatgaagtcattcattttggagattgtgtcttcacttttcgtggttaagaaactgctgcttggtgttgatggaggcatctgaggagtgtggggatggctctcagctgggcctatgctggtcatgaacggtcctggaaaatgactcccttccttcagtatctgcatcctcatgaagtcattcattttggagattgcc

SEQ ID NO: 126966 - DNA, 728 bp, Homo Sapiens
tttttttaaggaggaataagtttatttctcctccatccactcaaaatatatcttaacaccagtggcattatggagacagcatttggttagggagtgccaagcattctacagcatttgatggtggaaatagtcatgctttttatttctgctctctaggaatgtaaggtgcacagcaggtcagggtactgctgtgtgagacaaaaggtccaggtagaggcaattctccggatgcaggcagggcaggtgctcactgggcagagtgcttctcatacaccttcaggaactcgagcacgtcgtcgggggaccccaagatcaccggcgccctctggtgaatgtctgtgggaatgacgtctaacacggcctccttcccagtggtggccattcccccagccttctccatgacgtaggccatggggttgcattcgtacagcagtctcagctttccattggggctcttcttgttagcggggtacagaaatatccctccgtagaccagagtgcgatgaacatcagccaccatggagcccacataccgggccccataaggagctgaattatctggggggaacttcttcctctggatgtactcagtgacggcagggtcaaagtccttggcgtagccctcgttaaggctgtagattttacctttcttttttatcttcacatccttgtccaccaaaatgaactccccgatggccgggtccatccgaagcagtgctaaactcctg

SEQ ID NO: 126967 - DNA, 1092 bp, Homo Sapiens
gttgggctcttctggttagtcggggtacagaaatatcccgtcggtagaccagagtgcgatgaacatcaagccaaccatggaggcccacataccggggccccaataaggagctgaattatctggggggaacttcttcctctggatgtactcagtgacggcagggtcaaagtccttagcgtagccctcgttaaggctgtagattttacctttcttttttatcttcacatccttgtccaccaaaatgaactccccgatggccgggtcacagcatgaagcagttgaccccacagtccatggcaaggaccagcatggtggcactgccatacagtgcgtagccggctgccaccaggttccggcctggttgcagagcatccttctcagaaggctcatcagttgatttctttctatagatgccaaaaatggttccaacggacacaaggcaatcgatgttggaagatccatcaaggggatcaaaacagaccacatatttaccccttttctccggttccactatgatggcgtgtttatcttcttctgacacgagaacacacgtggcaaaggatgactttaacatgttcataaccaggtcgttggagaggacgtccagcttcttaacttgatcacctgtcacgttggtagaaccagcaatgccatagaggtgcgcgatgcccgccttgcgcaccgccgaagagatggctttgactgctgtgcagagcgagttgagcagctgggtcaactcgcccgtgccgcgggccttcctgccctcctccatgacgaagcgggtcagggtgttgacgtccgtgtcgaagggcgcctggtcagccatgcttgaaccgggtagagcgcggggctgcaggtgcaagcggcaggtgcggggctgcaggtgcgggcggcaagagagggcagtaggcactggccgcaggtgcggagctgcaggtgcgggcggcaggtgcgggccgcgggacctggcgggaggactgacagaccgactgccgccccgagtgtccgcagcgctcgtggtgcaactgggccaggccaggaaccggcgggtgaatccctcgtgctgaggcgccacccaggcctcgctacctt

SEQ ID NO: 126968 - DNA, 347 bp, Homo Sapiens
agatggctacgtgagggaatacatggcgttgccatcttctgtgctcctactgttggaaattcctggagtctccttcctggcattctccgagattgccacccagccaggccagcccttcagagacgtggtcacaaccctggggcctgctcttttctggcagagtggccccaggttcttcatctgggcctcctaggctctgccaaaggggtaaatatgtggtctgttttgatccccttgatggatcttccaacatcgattgccttgtgtccgttggaaccatttttggcatctatagaaagaaatcaactgatgagccttctgagaaggatgctctgcaaccaagtggg

SEQ ID NO: 126969 - DNA, 688 bp, Homo Sapiens
  misc_feature (656)..(656): n is a, c, g, or t
gggaagaggggcacaaaccaaagatttattttgcaagtgaaaggggcagcccaggagacccagaaaaaaggaaggcaaggctgagagcagaaagcctggataaaggaagaccacagaaaggcctgcaggagccagattgcggcccccagggaaaacccaggaggcaggctgtagagtgatcctgggcccagcctcaaagctgggactggaggggctttagcgactcaattccaggtgcagcatttgcaggagttgctgaacaccaggcctgtcgggcagctttgctggaacagccgccccgctgcacagctgtagaagctggaccgttcccgaggattgggatagagcccatcagctttgccctggcagaacgtgtcttgtccagggctggggccatgctcaggttcagagggctgacctggttttggaacttcaagctctggggtgcctgaaggcaagtatggaagactcagttcctgccgtagcgtctggatgagggggtatcggccctggttgcaggagaagccggcaaagtcatctaagtccagtgcccagaccatggccccgcccagtcccttctgcttcagatagctgaccttggttttgaagctctccacatcatcaaagcccacccactggttgtccggaagatgtanggcaccttctgatctggatctctgtttggtgg

SEQ ID NO: 126970 - DNA, 1974 bp, Homo Sapiens
  misc_feature (139)..(148): n is a, c, g, or t
  misc_feature (378)..(464): n is a, c, g, or t
tccagtcgttcctgcccgcacagcaattgcggcgctgggggtgaccgccgcggttgcagccgtgggagggtgtattgtgtgcccctgaggggcttgaagattcgtttgtgggggtgtgtgtccccgccgatgttgccgnnnnnnnnnngcggagtattggggttcgttccgccccagggtgtgccgcagtagcgcacattggttgccccgtcggcccgacgggggtttgtagcgctccgggcccgcctgctctggcgtttaatatagcagcccccctcttatggggggccccccgtgggcccaaagaacgcgggggccgcgccgtaaacctgggcgcccccccggggggatctcttttgccgccggcgccccccctcnnnnnnnnnnnnnnnnnnnnnnnnnnnnnnnnnnnnnnnnnnnnnnnnnnnnnnnnnnnnnnnnnnnnnnnnnnnnnnnnnnnnnnncctctgtcacttttaattaagacacaagttgagtaagcagcctccacaggctgtattcccaggcccccgcccaccctgacctttggcccagaagctactgcttcagtgtgtggggtggaggagtgagactgggtccacagtgacattattgctgacctcttctgtgtgaggaaaaaggccacgagaccctttgtggggccagccctgagtgctcctctcccaagttttaaggcagggagggggaaataactgtacagcccttttagcccccagctctggagtggcagacagcaatgaggccacatccctggagctgcccgggggaagtgggtgaggaaccaaagccgtggtccctgtagagcagctgtggggaggggagggccagtcccctgctcagtcctgaccacataagccttggtcacaggtgtaggtggagagggcactgacggacactgccctaaggtgcagtcctgaggcacttaggtgggcgcctatctaggccatgcttctcagttggccttgaccttggcaatacctggagctccattttgctgaagtgcacggggcagccgcttgcccttggtataagagtgataccagaagttggagaacagcatgaagaagatggtgccatacatccagatgaggtgaataatgactgggtactggtagttacagctggacataaagtagtactgggagatgtgcagtgagaccaggacaaactggatcagctgaatggctgtcatgtgctttttccaccaaaggtagggttgtgccacagggccaaaggcagataatccgtagtacaggtacattatgacatgcacggaagagtttatcatggcatggaaagagcccattcctcccggggcaatctttaccccccaccaccagctccagggaagcacagagtgatggaagacatgtaggaaggtcacctgcccgtctttctttcggagaataaagatcactgtgtccatcagctcaatgaacttggagaagaggaagagccaggccacccgaaccatcctaagtgcctcagggctgttggaatagtccacagggtcacagcgccaggtataggtgctcagccagcccgacatcaggaactcatagacaatgtagagggagagtgccaccagtgagaagttgtagacaatcatgaagccacggagctggaagggcttccgattagccatgatgcgaggcccaagtgagagaacgaagtacacgtaggtcaggagaatggaggtcattagcaagggggaccccatcagagggtagccctggatccggggatctgcgtgcttcatcacctcttggtacaagttcacaacagcctccatcctggctaaggactccgtaggggccaggcgggcaacggcggagcgctcggagggagcagggccagagagaagtccccggggccagcctgcctgcctgccacttcctcatctgctcggacgcgtgggtcgacgatatcccgggaattccggaccggtccagc

SEQ ID NO: 126971 - DNA, 636 bp, Homo Sapiens
ttttatttgcttatgtctttactgatggttctgtcaaactacaactccagagttataaggttgcctctcattacagaagtgtcaattagatttaagacaattttacttttctttaaagatacagcatttaaaaaatactccaaattgagttatgccaaagtttctaacacttgtgcgtgtaacttgttacaaaattcccagaaaacgtaagagccacacacatttttcccctccagaaatagcttgcatttataaacaatatatatcacttgctgacatgcaagacccctaaatttggtacaaaagccaagaaaaaactccatggattttcatcttgcatagacagaatgaggtattaaaaatgcttctgcaggtcctttcaaagaattgttagttcatggtacatctcacagttagttctgagctctgggtttcagaatcatgtcacactaacagcatttactaccaaccttccctattaacttgattcaactccaattacctctttgcttttctgcttttatcaaggaggatgctgccagtctgcatctaacagagcgcttctttcagagctcttagaaccctgccgtaagtacatctcagatactaacggcatctgacaataccactagtgtt

SEQ ID NO: 126972 - DNA, 1092 bp, Homo Sapiens
  misc_feature (298)..(447): n is a, c, g, or t
tttttttggctagaattgcatcgtaacagtgtggtcacactggtaagaaatgcagattggcaatcatgtacatctctgattaaaacaacactcacataaccaacacaatttgctaggccaaagtcttcacgggcaatccctggggtgggagtctgggatggggtggataatgaaggatacctggggttgcagaagtggggtgggaatccctggggcatcagtccacaggaggtgggggccagcgatggcttcaggggtgatatttccaatatatatcagccctgggcactctcgcccnnnnnnnnnnnnnnnnnnnnnnnnnnnnnnnnnnnnnnnnnnnnnnnnnnnnnnnnnnnnnnnnnnnnnnnnnnnnnnnnnnnnnnnnnnnnnnnnnnnnnnnnnnnnnnnnnnnnnnnnnnnnnnnnnnnnnnnnnnnnnnnnnnnnnnctgcagacttctgagtgcaggaatgcggcaggccctgggtaggctgtggttagaaggcctggacggggaggctgtgcggaggggatgatgaaagcatgggtgaggggagaagaccctaaacagctgtcctttgtgagtccccgccacgctggccgggatgccaggcaacgacggccacctgcagtctgcccctgcccactttcctcaccactcaagttggctttgaaggcagggtgtcctggaagcctaaagctctgctggctgcgggtaagaccaccaggtggggaagttactctgagacctaggagctggggatgtacggagaagcggggcccctgggagcctcggagattcctggttgggacggcctgggcagagcagaaggcttgtcaagatcagagggccaccacatgcgtgcatcaatgcgggcaacagaaagcgtccatgatgcacgggactcgtgaaccccgcgtttgccacggcaggggggtgcaagggtgaagcagccgaggaaggcaagaaagagcaggatgcatggcacggaacagcgtaagaggctgaggggcccagagccccacggaaaagcgaggccagacatggttaccaaatatctaaggaagcaggtggggacatcagcgaagaccc

SEQ ID NO: 126973 - DNA, 515 bp, Homo Sapiens
cactcatggtcttccaggttatagataaactttgtcctatgtgtctggtttgcgggcacagggtccctccccaggttgtctagggtcagagtagaggcaaagaactcactggtgctcagcccgccctcgtggtttttgatgtagcgtttatagtttttcctcaggcactgccacgtggtggtgtacaggatgaaggcgaaggatttgagcgcgatggcgatgctgacatacaggtatcggtagaccacattgtcgtagaggacgcaggcgccttgctccccacagaacgtgctccagaacaggcaggtggagtcgatgccagccccgaagatgaggggtggagggatgaagcccaacaaacgaaggaggagaaaaagaactcccaaagcgtaagacttgagttcagggctgactgtcctgatgaggatgatgactgagggtgtctgtgccatggcaccgatcaggctgcagatacacatcacacagaggaaagtgaggaaggcctcttggcaccc

SEQ ID NO: 126974 - DNA, 901 bp, Homo Sapiens
  misc_feature (52)..(96): n is a, c, g, or t
agtagagacagggtttcaccgtgttagccaggatggtctcgtcctgactttnnnnnnnnnnnnnnnnnnnnnnnnnnnnnnnnnnnnnnnnnnnnntgagccaccacacctggccccggcacgtatcttttaaggaatgacaccagttcctggcttctgaccaaagaaaaaatgtcacaggagactttgaagaggcagacaggagggtggtggcagcaacactgcagctgcttctggatgctgctggggtgctctccggagcgggtgtgaacagcgcacttcaacatgagcaggcgcctggctccggtgtgtcctcacttcagtggtgcacctggatggtggaagccagcctttggggcaggaaaccagctcagagaggctacccagctcagctgctggcaggagccaggtatttacagccataatgtgtgtaaagaaaaaacacgttctgcaagaaactctcctacccgctcgggagactggggctcctttgcttgggatgagcttcactcaacgtggagatggtggtggactggtccctgaaaagcgggccttgcaggggccaagtgaggtcctcaggtcctaacccagtggccctctgaaagggggtgtgccgccgagggagacagaggttctctctagtccctggaggctggcgaaaagagtgtagcagacgtggaatgccagcgggaggagcggaggatcggggaagccaaatgaggatgctcggtccgggacccggtcgggggccggagggacacttcgggaagaagtgataatcacaagcggccaaaggagggagaacgaccgacgggacgccttagaaaaggagaccggagtaacacaacacgcccgccctgggctacaaagcgtgcgggaacagtcgacccagatggtgccg

SEQ ID NO: 126975 - DNA, 609 bp, Homo Sapiens
ttttttttaccagtatagaaatttatttgaattcaaaataatatggctatatttataataatataataattatctaaagcaaatatcatcattggctctgaaatgcgtctaaagatgtcattcttaagtcaaaaaatacgtagtaagaatgtacaagaaagaaaaaaatataaaaacaagtctgctgagtgtcgggagttggtgagggatatcctaccatattgtgacggagtccaaatagaaaacatgcagcaacagttctcctgctttatcagctccctggaaaataaaccagtaaccctggtagtgcagtaaccatttggttaacaggacaaacttcctgatggacacagatagtaattcactgcatttcccttctctaacttctctcttcacaccaattccttttctttcctttaagatgggtttcatcctgttgacaaaagatttggttttatttgtaaagtaaagcagataatatcctgattgaagtattcaatgatttagttgaggatgcttggggatcaaactttgtaaaaaggtcaattaagctagttagcagagactatcagtggcttgcagaaaaaaaattcggataatatgtttgtt

SEQ ID NO: 126976 - DNA, 996 bp, Homo Sapiens
  misc_feature (842)..(842): n is a, c, g, or t
  misc_feature (849)..(849): n is a, c, g, or t
  misc_feature (897)..(897): n is a, c, g, or t
cagagttgccctttatttttagattcttaaatattctagaatgaggtaaaacgagcctgccagtacaaagtgaaaattctacatggtgcatctttggcgcttcatgcatgattatttcaatgaacctcttcctggtcactcttaagatagatctgagtttttgactcgccagtcaagggctttggcgacactcaatgacataatattcttggaaaaagcagtagcatttctgacttttcatattcagctcggaggtgtattgtctcgggctcctgtgcagtcgagcgccacggctgctcatcggatgatccaggatgggtccttggcaattttcgggttctcgggtccgaggatggccaggccgtgtgtgctcttcccagtgccgaggtatctatcgctcacggccaggagcttgtcgtggctgacagcaaagagctgctctctgtgggcctgcttcatctcatccgagaggccgtacaagaagtggtccattcctagaagacaatccacaggcacgatggagccgctgcccgggagctcgcgttgtgggctgtgcactcatgtcccggaggggacacaggcatctcactgtcatttcacgtgcatgtttcaaccacagggatgtgtctaacaacccagagatcacaccccgacctccagctcccacgttgcacgctgacccctactcacgcctgcttctgcagcagggatgcagtcagcgccgcgtgaggctgatgatgctgtgagcaaagcggctcagagagtacgtggccatgcccaggcgtgcccactcctcctttcaccctaagagcgtgcactgcatggttggcccatgggctcangcagtanacaatgaaggatgcatctctcgccggatgtaggagctgttagatgtcnacgtgaatctttcaaacaggtggggacatactgtgtcggcatcagcggactggaaacactcacggaggtggtgatcacgtaccaaactggcgggggagg

SEQ ID NO: 126977 - DNA, 3735 bp, Homo Sapiens
attggggtggggaaatcccaagccctttgtttattgccccggggttctcccttaggcaaccaggtaaggggccccgttctcttgaccttctggggcccccgggccccaaccccaattggttttggaaagctttttcgggggccgagggcggccgccaaggcttttatgggccgttcgctccgccgtttttcaaagtcagaagttgcccctttatttttagattcttaaatattctagaatgaggtaaaacgagcctgccagtacaaagtgaaaattctacatggtgcatctttggcgcttcatgcatgattatttcaatgaacctcttcctggtcactcttaagatagatctgagtttttgactcgccagtcaagggctttggcgacactcaatgacataatattcttggaaaaagcagtagcatttctgacttttcatattcagctcggaggtgtattgtctcgggctcctgtgcagtcgagcgccacggctgctcattggatgatccaggatgggtccttggcaattttcgggttctcgggtccgaggatggccaggccgtgtgtgctcttcccagtgccgaggtacctatcgctcacggccaggagcttgtcgtggctgacagcaaagagctgctctctgtgggcctgcttcatctcatccgagaggccgtacaagaagtggtccattcctttgtctgaaggagcgacaggagcatctacggttgagaagacagaaagtttggcttcgtcgatgtcttgctgtgtgaattttccagacttagcccagtcgacagccttcccaaaagactggagcgtctctattgtatttgggtccctgtaagagtaaagggtgaaaatcccattgtggctgagttttgcgcctccaccataagcaccgcctttttctcgaatttctgtatgcaagaatttggcagtcatcaaacgtgcaaggattttaagactggcatgatctgggtccgtgtaggggacagttcggatgcattcacccacgtaattcaccgggaagggcatcaggaagtgagtcttcatctgccagggcttgaaggtgggttccatgaccagcttcctaatgacctgggagccatggggaacgtgggcatctccaccagagctgctgggcacaggtttctcgaccgtgtgtgggcgcacaggcctccgttcctttttactccgaccgatgcttctaaggaagtcttcgaccgctttttctgtctgaggcatctgctgaggagtcgcattcactgaacacctcatattatcaccatttaacaagtgtttcttgatacgtgggagcttcctcaggatgggtttgatatctgtcatttctgcaatcctcttcatcagccgcacctgatccatcccgctgaaggtctcctgcaggtcccctgcgggcgtgagggtccggcctgccctgatggatgcgtacaggtgcccagagtcaggaattccattggcgagctcctgggcggtcatcttcaccagcaccttgaagtgctcctcttcttcaaagcacgggttgttaaatatttcactccatagctgcatcatgtctggcaggtttcgatccaggcagagagaggagaaaagcacaccctgctcgtaggtgtccatgtgtgagtcgtcggggagcacgtggggagaagcactcatccctccggtcttcaattctatctgctgagcctgctcccggtagtcaagaaggtcgcagcccagcttggtgaggacgctgcagaagaggggcacatagggcctcagctcctcggggagtgtgttcaggctggagaaggcccggaaatacaccatgccattggtgggctgggcgcagtactgaacagggatatctccagctgtcaggaccacgtccaactctgtgacaggtatggtgggttcaatatcggaaactttcaacgctggcagacaagaggcatcttgaggtttgctttgttgactccgtaattctagacctttctcgtagatctgctgcctgtctccgggggacagagcctcgaccttctgcttgagcttcgtggcttccacctgtgcctgcttctcgtgatacttgtcatctggcctcatcgataaagtcagcttatgctggttattcttaaaatactgttttactttttcttgcaaaaattttggattttcctgcaggcactgtctgaatttagctaactgatttcccaacttcaagagctccacagggtccccatcatggttccagcaagaagctatgtatgatgtcagcatcagcccaaagctggtagactgatgtttcatctgtatttcaattttatgaagtaaagcctccaatttcgatcattttcaaatccctttctcaactacttcatcaatcgttctgtctatgaggcttctgacggtctcaatgtctttctccgccaatcccttggaggccgaccctaaaagtaggcctccctcgtgtagccattatatcccacatcaggagaaaagtctgtgccaaggccagattcaatcaaggctttgtaaaagggagaattggcccagaagtcaggagtgaagacagaagacttaatgtgaaggcttcaaatgtgtcgggtgatgtccggtaagaggaagctaacgctgatggttgtttgtttagaggggatctgtagcaaatgaatccggggccacatgttatctggaattccctaggcttgtcccagggtgtctgagctggcaccacggtgcttggttcaattttctggaatttgctcagtgcttcctcgtgaatttgtttcagatgctgttctaatggaaaattaccgtacgtgaagaacctagcattgcttgggtgatagtgagtggcatgaaactgcttaagctgctcccatgtaagctccgggatgcacagtgggtcacccccggagaccactgagtacgtgtggtcaggaagaagtctgttctgaaggtgctgggagaatatcctctcattgtctgtaaacgctcccttcatctcattaaagacgactcctttaaagaccaagggcgtctgggggtcgctcggattctcatgttccagccgccatccttcctgccagaaatccagctcgcgtaaacatgggaaaaaggtggcatccaaatacaccgagaggagattctgaaagtccttgggattttgtgtggaaaatggatacagagtataatcactagctgtgaaggcgttcatgaacgtggagagggaccggttcaacattttgaagaaagggtctctgcacggatatttctgagacccacaaaggacggtatgctcaagaatgtgaggaacaccagtactgtccatgggagtggtacggaactgcacgctgaacagattattcgtgtcttctctggccaggtgtaaatacctggctcctgtgtcatcatgggtgagcttcactgcagtcaggaacagctcgggaacagatgtcacctggtttacggtgaatccatggatcttgtctcctagtttatactgcagagccctctcacaagcccggttactgttccatcgccacgctctgtggtgtgcatgtcacgccgctcagccgcctcagcacacacaggccccgccgcccgccgcagcgccacattgcgcctcgtgccgaattcgccacccagcctcgctaccttaggaccgttatagttactgcccgtcgttaaaagccggctatctgacaactgaaccgggggtcgcgggttgtggtggac

SEQ ID NO: 126978 - DNA, 1445 bp, Homo Sapiens
tgagagcacaactccaaatcatcttttattaatataaaaagggcatatttagcaaaagacacacagataaaagagtcactatggctcaggacacaaggcagggaggtgccaggcctgtgcccctgctgggggagaaggaggctcgggacaaagtgggagaagtgctgggaagggctgagcggtaggggccacaaaagttccggtgggcaacactgtcggcaggtcatgggtgggactcatggggacctcgctgctaactcttgttgtgggggggtgtccttagtgctgccacctggagggccactccttggttcctggaggggacccaccaagggacacaggacaggaagcccaggatggttagtgcaactcgggatgaaggccagggagaagcgggtgctctgcagtggccggataggtccagacgctgaggccgaggcgcttcctgttacgtgcgggcgttccgctctgtctctgccaggcactctctgactagggcccgggcatggatgatacctctcttcaggcgctccatggcgctcttgctgccagcataggtaggccggatctctttgcccatctcctctatgactgacagcaggtccgtgtaggtgctctgggagccctgggcgccgggtggcttcatcgcctgcacgtagcccatggaaggcggtccaaagtcgttaaacagcggtctgaaaggagcgccggctcctggcactgagcccgacggcgacgggacgcttcctgtagggaccggggtgcccggcccaggggtgctggagccaggggtgctgctgggagcaggggcgatgggtttgtaggacatccccaactcctgggcgcggcggacgccagccggccgctcctcgggggttggctgcggggccgctcagccgcgctctgattggcaagcgggctgcacgcccctggtaaatagaggtctggccggaagggcgagcgggcacgaatgctccctcactcccgattggtgcgcgaagatgtcactcgagcctccttattggccgagacctgccccagcaggtcgcaaccgccgccgattggcctccgccttccggacctcgcacctgtctgctccggattgggcggtggccaccgccctccgcaattggcgagttcgcggcccgggccggcgcgctctcaatccgattagtccccaggccctagaggcggggccttgggaaccgggacccggggctgggctgccggttcgcgccgaggggtcttcccgggcgcgggcgctaccctcgcgcctcactcgcgctgcttcagacgtctgctccgctctgcccagtttcggcccagcaggggttgctgtcgcagctgccgtcgccgctgccaccggtgccttgcgcgcttctccgctctgggggccgaaggacgcagggctttgaccctcgtgccgaattcgccacccaggcctc

SEQ ID NO: 126979 - DNA, 1373 bp, Homo Sapiens
  misc_feature (571)..(636): n is a, c, g, or t
tggactcgagttcgaattcgattcattacacctgctctggtaataaatactggacatcctgttaggcttggctcaggtgacctccagatgtccttccttccctcatgaaggatagtccagtgtcggttttcctgagcagggcggcctgtcctcacttacctctcttcaggcgctccatggcgctcttgctgccagcataggtaggccggatctcatttgcccatctcctctatgactgacagcaggtccgtgtaggtgctctgggagccctgggcgccgggtggcttcatcgcctgcacgtagcccatggaaggcggtccaaagtcgttaaacagcggtctgaaaggagcgccggctcctggtactgagcccgacggcgacgggacgcttcctgcagcaacaggcgcgagtaagaggtcagcgcggggcagggacgccgcctcccagcttttccaagcccaggaccgggttcgcccgattccctccaaaggatgcttcattccatgctgatcaacttcagggacaaatccctcccactgcgctccacctacaagcccttacgtgaccacgnnnnnnnnnnnnnnnnnnnnnnnnnnnnnnnnnnnnnnnnnnnnnnnnnnnnnnnnnnnnnnnnnncaggccgtcttctcttcgagacctcgaccgcccggcaggcgagcaggggtggagctggatcctcacctgtagggaccggggtgcccggcccaggggtgctggagcacaggggtgctgctgggagccaggggcgatgggtttgtaggacatcccctactcctgggcgcggcggacgccagccggccgctcctcgggggttggctgcggggccgctcagccgcgctctgattggcaagcgggctgcacgcccctggtaaatagaggtctggccggaagggcgagcgggcacgaatgctccctcactcccgattggtgcgcgaagatgtcactcgagcctccttattggccgagacctgccccagcaggtcgcaaccgccgccgattggcctccgccttccggacctcgcacctgtctgctccggattgggcggtggccaccgccctccgcaattggcgagttcgcggcccgggccggcgcgctctcaatccgattagtccccaggccctagaggcggggccttgggaaccgggacccggggctgggctgccggttcgcgccgaggggtcttcccgggcgcgggcgctaccctcgcgcctcactcgcgctgcttcagacgtctgctccgctctgcccagtttcggcccagcaggggttgctgtcgcagctgccgtcgccgctgccaccggtgccttgcgcgcttctccgctctgggggccgaagacgcagggctttgaac

SEQ ID NO: 126980 - DNA, 1264 bp, Homo Sapiens
  misc_feature (29)..(29): n is a, c, g, or t
  misc_feature (79)..(79): n is a, c, g, or t
  misc_feature (916)..(1038): n is a, c, g, or t
cttggctttaaccgtgaccggagcctgtncacctggatcaggcagccttcaggactttgggccatgtgatgccaagagnctcaggaactggcatttacagcaatgctgcaccaccacctgtgacttaccagggaaacttatacaggccgcttttgagaggacaagcccagattccaaaacttatgtcaaatatgaggccccaggattcctggcgaggtcctcctccccttttccagcagcaaagtttgacagaggcgttggggctgaacctctgctcccatggaaccggatgctgcaaacccagaatgcagccttccagccaaaccagtaccagatgctagctgggcctggtgggtatccacccagacgagatgatcgtggagggagacagggatatcccagagaaggaaggaaataccctttgccaccaccctcaggaagatacaattggaattaagcttttgtaaagctttcccaaatcctttcatcattctacagttttatgctatttgtggaaagatttctttctcaagtagtagtttttaataaaactacagtactttgtgtatttcttttaactgtgtatatttctactgatctgatctcactgtttatgttgctttccaaagatgtatgttgcataatacagtggatctgaatttattattgcttataaaacacatttgatggaataggagtactggtttttcataatggttaaaaatgaaaccagctgtggatttcaaaacacagtgtattctagatcatctaagatccatgctgatttttattgcacaagaattaggtttgaactcttgagctggaacctcagcaaactagagtatatattgttcagtatttctttggaaacatttcattaatgtacttgtcttacagaaatttctgaactttagtnnnnnnnnnnnnnnnnnnnnnnnnnnnnnnnnnnnnnnnnnnnnnnnnnnnnnnnnnnnnnnnnnnnnnnnnnnnnnnnnnnnnnnnnnnnnnnnnnnnnnnnnnnnnnnnnnnnnnnnnnnnctttctcattcgacacaagatcccaagaaagaaatggaactagctactatgtgttcccagggaccacctgataaagtatgcatgcttgatttcctaccatataaaaaccccggggagaaaccgggcgcctatgaacctaaccaaaagaacccccgatgatttaactggttctatcaagcggatccataacgagctcggattcaattgggccccgcgcatgccactc

SEQ ID NO: 126981 - DNA, 1414 bp, Homo Sapiens
  misc_feature (54)..(87): n is a, c, g, or t
  misc_feature (303)..(315): n is a, c, g, or t
ccccaagttaatttttatgatttattttacaatgtttcccctcccctcagccgnnnnnnnnnnnnnnnnnnnnnnnnnnnnnnnnnnaaggcagaagagtgaaaatgcccaacctaaaacacaagatctacaaaagcacctggctacatggggccaggctgagcaactgtatgttgtctacaaagggcctcaacctggcctcacatggccacgtccagcaccaaagacaaatgtacagggaaggggagggtgtgaggtccaacactcacctatagaaacatgtttttagctgctttacttccnnnnnnnnnnnnnggcatagctctctttttcaattaaacagaaaactacataattacgttcaaacactcactgaagagcctgcctcatgggaagggcagggctgtcgtgggaagagtcagctgcactttggcaccatctcaggtgcctgtccaagccggatctgaatgggactggtcaagtgaggggtcagtcctgcagtctgcgctcacacctcttctccagatctgccatctcctttaggaccagggccacgctgtaccgcagctcctggaacttggctgtggggacctcaaagcggtatgctgacccatctgaaagcttcagctgcatcaggacgctcggctgcagggagcgagccagggcactggtggagattgctacatccacccgccaccgaaagtcagcaacatgcggcagccaggccccctgctgctgggccacagaatcaaggaggggccgctggctcccaaataccacgctggccaagtccccgaccaggtcttgggggatgcagagctcctggagctggtccctgaaggtgtcaggcttcaggctggtggggggcagacggagggcctgctggagcagtgtgtgcatgcctgccagcagggcacccagctgctcctccggcaggttggcgctgaccccaagacgctgcacagcctctcggcagtcctccccctgcaggctgctgaccacaaacttcagcaactttctgaacgtgctcctgtctaggtcccctagtagccgggccattgctgccacctctggaggaagctgggcccccaagaaactcactcggccactgtgactatcaccaggatgatgcaggtatggagttgcagtccccacagcagacattgctgctgcttcctctttgatcagccagcccaggaggtcggtcccagatgcagatgcctgaggctgaggagctcgctggctttcgtcggcgtccgggtgggcggcggggaaaccgcgagaccttgaggatcagcgcggagcggagccgagcgggcgtccctgtctcgtgtggacggtctgcgcctccagggttttgagagctgccccgtttcccctcctgtcgggtggcgtccggcgcgcgtgactcccc

SEQ ID NO: 126982 - DNA, 1237 bp, Homo Sapiens
  misc_feature (42)..(42): n is a, c, g, or t
ggatgggacttcagtgtgtgtgtagtctgaattcaggttgtntgctccaagtgctaaggggtgccctgatacaaaggaaagaagcagagctatgttcaccaagcccataaggggcatggagacaagcacaaaacaccaagtcccaaacgaaaataaaactttcatttgccaagggaacaccacagcagctcctgccctgtactgagctctccaaagactgggcaggcaaagtccctctggccccctctggaagtggaaagtgctcgccctggaggacagcaacagagccaaggtgaggtcctgctcaaaggtgggcagggggctgcgctgactcctttcggcccttgccagcgatgggccggcctcgctcctcccagatggtgaggccatcgcaagagcagatctgcttggggttctggaaaaggccagcggagcgtgcaatgatgccacaggccaacctctccccggagttccctgtgatcttggataagggatggcctccccggcccaggtcatcttctccctcatcaataatcaggctgcggccaatcacatcccacaccttcagctgctcatcctccattctgaagatggcgcggccgtcagcatcagcacggacattgcccaggtctccgcggtgccggtcagagtcctgggggcccccatgagatgctccatcagggttaaagtgattcccacagctgttgcagttgtttgtaaggtccccgtactgatggacgtggagtccatgcagcccaggctccaggccgtcaatagttccctcgatgaggcagcgctcaggggtcagctgtaggaagcgcaccacccctgcacggtgccaggcccccccaggatggccactgctgcccccagattctgcaactggccgctgcccatgcccttgagtaccgcctgccgccccgtgccttccaggagagcctgcacctcctggctgggtagagtggtgtgtaccaagaccatctggtcctccaagtgcacctccacatcctggacacctgccaccccttgcagggatttgcgcaccgcgtccacacagctctgacaggtcatctgcaccgcgaactccaacgtgcagagggtcccctggttccccgaatccgaagccattctggacccagtcaccaccccgagacgcagaactcctccggcgcaggagcaccaaccagcgcggcgtcgcggggactgagcctctaaagccacccttaaccctcgtgct

SEQ ID NO: 126983 - DNA, 900 bp, Homo Sapiens
ccgtgggtgccaaggctgctatttttctgatttccctgattccggacgcctttttcctgttttcccaaaagtacccatttcttccttgtgggtaccagtctcgtaggatctgagctcccccaaggactgggcaggcaaggtcctcttggccctgtccggtcagagtctggggggcccccctgaggatgttccatcagggtttaaagtgattcccacagttgttgcagttgtttgtaaggtccccgtactgatgggacgtggagtccatgcagcccaggctccaggccgtcaatagttccttcgctgaggcagcgctcaggggtcagctgtaggaagcgcaccaccccctgcacggtgccaggccccccccggatggccactgctgcccccagattctctgcaaggtattagacacttgggctggcttgccacctcacccagcacacctcttcagcagctcgggaagggcagggagtctcacataattttcacaccttcctcaaagccactccaacccagagcctgagaatcctatgattagatttgtaccagctctgagccacctccctccgagaggggccaaggccacagtggtcactcacgcaactggccgctgcccatgcccttgagtaccgcctgccgccccgtgccttccaggagagcctgcacctcctggctgggtagagtggtgtgtaccaagaccatctggtcctccaagtgcacctccacatcctggacacctgccaccccttgcagggatttgcgcaccgcgtccacacagctctgacaggtcatctgcaccgcgaactccaacgtgcagagggtcccctggttccccgaatccgaagccattctggacccagtcaccaccccgagacgcagaactcctccggcgcagga

SEQ ID NO: 126984 - DNA, 757 bp, Homo Sapiens
  misc_feature (516)..(543): n is a, c, g, or t
tttttttgaaaaatataaaattttaataaaggctacatctcttaattacaataattattgtaccaagtaattttccttaaatgaactctttataatgcataatttacagtataagtagaacaaaatgtcatgacaaaagtcattgagtacaagacttgtaataaaaaggcataaaatatatttatacataaacccctttcaaaaaacaagggaaagcttgagccctcaatatagggcgacacacggagcgggtgaccgtgcaggtacaggtactgtactgatttaaagtcaagcactagagatagtggattaatactcttttgccgtacactatatacagatgtatagtacaagtaacaatggcaaacagaatgtacagattaacttaacacaaaaacccgaacatcaaaatgaaggtgtgtggaggaaaggtgctgctgggtctccctacaactgttcatttctttgtggggcagggggtagttcctgaatggctgtggtccaatgactaatgtnnnnnnnnnnnnnnnnnnnnnnnnnnnnggaactgtcatttccacgaaagcacagcggcagtgattctagcaggcctcagggccctgggcctggggaggctacatgagggggagcctcagtcacaggatcaacctggggcccgaaggagcagggttccctgcctctccctctgcaacagatcatcccatccaacacaacccccaaaatgttgatgatgacgcaacatggaaaaccctcaaga

SEQ ID NO: 126985 - DNA, 1143 bp, Homo Sapiens
  misc_feature (176)..(186): n is a, c, g, or t
  misc_feature (510)..(522): n is a, c, g, or t
ttcactctgataaatttattaaaataagaacaagcatcagttgtacatagaaataatcatttgcactaagcatggtactagagcagaagagcagttttaaatgtattttttaagtcacaaaatatatcggttaaggcactataatcctgtctcatgttttcaataaatatgctggnnnnnnnnnnnaaaggcagtagtgagtaaccgattacatgagtataggcactatactattaaagacaaactgctgtggccattgtgtgtaacttattctcaaaagaacttttgttagttaagattagtgttttttaagaatgagaatatgaaaattgtcacagttttctctttctaatttaggtctcttccagagagacctatatattaaaaggtgctgtttcttcactttattccttggcaacaatgaattatgcataaagtaaaaacattgcctctcaggaagtaaagccatcagaagatgtctcagaacagcttgaaatctttggaatagcnnnnnnnnnnnnncaactgcaataaaatcagtgcagttcagaaaactcgacctttcagtatccgagaaggcagctttgtaagcactttctgttcgaggaactttgttaagcagctgaggggaatctgacccagctcctgtgttgtctggtgtagacagggcaccagactgggagtcaagtggcctgggtgcttcttcactgccaccagcacttcctaataatggcaaatttacattttgttacggtgctcacagcttacaaaacacatacatgtgcatcatcacagtttgttcacctgtaagatgaaagggttggattctttgttttctgtggtcttttccagttctagtgccttgctagtctgatagtgtgaattattttttattacagctggcgctgctgctgcatcagggccatcctttctgcaagacacaatgaccacagcaaagagcgggaaagataactttccacgacatcgccacattgtttgacgtcctttcatcaaatcactgtatgctattaaaagtcaccgtgtaactggagttatattgtctaataagagaagtcttaatggcctctgtgaataatgtaactccagttacactgtatgctattaaaagtcaccgtgtaactg

SEQ ID NO: 126986 - DNA, 2613 bp, Homo Sapiens
  misc_feature (506)..(548): n is a, c, g, or t
cctccccacccaaatcgtgtctccttttttccctcccctctcatacccaggttccccccttccctttccttttacccctggtcttttcccccattttaccaacttgccaagcccccatttcaaaattccccttgccatgttttccccgcggttcccaccgtaaattgatcccctaaccttttaccacataactaaaatttcaggaaaatctattgacccaccttctttaagagtagaaacaaaattttttgttgtcaattcgacagaagacgacacaatctgatatatttaacaactgataaatgacattggaagagtacagttgtcaagacatgctggaaaatatattcacttttcagcaagtaactagacacatggtcaaacaacccttaagaaatctgggacctgcctgctcaggtgcagtagaaaatacatagagctaattttattatgaaatgtataagaatattgcttttacctgctaagatttggtcttcagtttgacnnnnnnnnnnnnnnnnnnnnnnnnnnnnnnnnnnnnnnnnnnnaattatagacacaacttttacttcattataaaagattaaaatgcatcattgagaagcaatttaatacaaagcatctaatcataaaaatagaaaaggtaatcaaagagcacttcagaaagaaactctggagccaaaggcttagttcttctccagggacctgtaataatctgtcaggaccttccatgctttgggggccatgaagccatctgggggattctctccttcccgggcgagcttcctcattcgagttcctgagatgaagtcaaactcattgtgccttgctggatcatagaagtccatggcttttttggctttgttgtaggcagccactcggaatggaatgatttccacagaggtgaggccaggggccatgctcaagaccttgcccccatgagtgggttcatacagatccttcttggtttcaggatggggcattcctgcagggtccctccccacaatgtagaaattggcacccgcaatacatccgggacctgcagtgccactggacctctgtggggccagcatataacatgggagacggaaagatggcaacaatggttgacttgggatccaggaccccttcctcgagcacagccgcgtgctgcttcatccgccagtctagaggcacatcgtcatccttggtccagccgcccagagggtgtagtaggaggaccgggtgcttgtagcccctctctaggagcctgcggcgagtgtcctgcatcaacagggcatggccattgtggacaggattgcgcaactggaatgcaaacaccgcatcagcattcatttctttacatttctgtttgagctccagaggtgtcagacggtattggtccagcccatcattccatcttattttctccagcacctgaaggtctccaccaaccagccagtccccactttccatcaccattttgatatgggggtgttttgtacatgttgtcccccaaacacgggaacagcgttcctcttttctgtgttcatagaattcagcgtctcgtaagatagctaccctccgtccaccatgtgccaggacaaacttgctgcacccttccagccgtgtcttatcctctgcagagacgggcagtacaatggggatgctcatgttgatcacgccatcatctagcagggtgtcaaagtgcataacctgtaagtactccttctcccgcatgaaacctttgaggggagtggcccagccttcgctcaaaacctggacccactggagatccagcttagtaattgataatgaagggagagtttcagcctcagctcggacgtggtcaagtttgttttccggcacaaagagttcgtggatatctttgattatagtatagggtacaatgttctgctcttgcagaagttccactacctggtggacacagtcactcactgtggacaaattggttttaagcacacgctcaggagtttcaggtttctcataatcagaatcaatacctgtaaatcctttaatctccccagctctggcccttttatagaggccttttacgtctctgctttcacaaatatttagaggtgcatctacaaatatttcaaagaatggcagccctgctgattcatgtattttgcgggcattctcacgatcctttgcgaatggagaaataaagctggtaatgcagaccagaccagcatcagcaaacagcttagccacctcagcaatccggcggatattttcctctctgtccccaggagagaatccgagatttctgttaaggccatgacggacattgtccccatccagggagtaacaagggatggcatgggagacaaggtactcctccagggcaaaacttatcgttgtttttccagcaccagagagacctgttagccacacggtacatcctcggaacccaccccttgttccaaccacttgccctctcttattcctgctcacatggtgggcctgatagacgtacattggtggatttctgctggttctctatgtgtccattgcacgtctacctactagagagaggtcaacccattcagtaaccagtacaatcatctgagtcttgtcagggcagagcgcgtggtcgacgatatggcg

SEQ ID NO: 126987 - DNA, 1457 bp, Homo Sapiens
  misc_feature (1131)..(1153): n is a, c, g, or t
  misc_feature (1315)..(1377): n is a, c, g, or t
tagctagtacgagacctggtgttaattcggcacgaggctgtgaaccctcctttctttgtgctggtgtctgggaccaaaaagggggaatatgggagggcagagtggggaggggagtccatgggcctggggccccaagccggggcgtctgagctccccaggcatgaccaaacctcagtggaggggcctctgcttcaggccccgcctggctgacattctgagcccccctcggaggccccgccacagccaacctgcccagtctttcctctgggcttgacccgccagggagttctccaggcctagggccacgagagaggccctggcaccctggcgtgggtgcccgccaaacgccctgcgaccgctcagaagcacaaatgctgtccatggccgtgaggctgcctgccaggtgaatggacatagcgtgagaggcggtgaggccagggcttccagcctcgtgctgtctcgggactcctgaccgtggtgtgcgtgtgtgcccgtctgtgactttctactcaccaaggttgaagaaaggaaacggggaaaatcaaaaggggttcaaaccccacctcagtaggtggaggggagcgcctgccattggttgtatttttgttctgagttttcggtgccgtgttcctaactactccatcccatgacctcgccacacctactggggcatctggctggtgcctgctgccatggccagcccccactctcaccctgcacagggggtcttgcagcccccaggcccacagcctcgttgggaggacagggtggccctggggacaagagggaggagcccaggggcttacctcactgagagtgctccccagcaggcatccactaccccagggccccccacatgtcatggcaaggttggtagtgaatgggcctggttgggagcagcccctggcccattgcccacccacccatctcactatgcaattcgagttccaagcaacatttgctcctgccctggggccagctctgccccagccctgagaggggtggtgaggcagccccctggaccccagaaccccagacaagggggcaggcgggggaccagggcctctcctgtgggatctttgttttgtgtttaaccataatggttgtgtactgaaccacttcatatttgtnnnnnnnnnnnnnnnnnnnnnnnatctccttaagactcagcctcctggtttacccccccggcctgggcatctgacctcccccaccccagtgtgatttaacatccaggaactgaggcctgaatcattttgcatttccccctcctccagcctctgtagggccatggctgtatgtactgtcgctgtgnnnnnnnnnnnnnnnnnnnnnnnnnnnnnnnnnnnnnnnnnnnnnnnnnnnnnnnnnnnnnnnttggcaaatactaaaaatctcgtcaatgtaatttctgtggtttctattcagcttgggtttcatgttttaaaataaatttt

SEQ ID NO: 126988 - DNA, 142 bp, Homo Sapiens
ttagaactgggtttgggggctgatttttatttctttgggggctttttttcttggcaaatactaaaaatctcgtcaatgtaatttctgtggtttctattcagcttgggtttcatgttttaaaataaattttaaaaagcaaaaa

SEQ ID NO: 126989 - DNA, 647 bp, Homo Sapiens
caggtataaacattcattcaatccaataaagacattttagaaaaaagtcaacctatacaatttattttatttttcctataccttggctaaacaaaatatatttggtgatactgtaaaatactaagcattttcagtaaaactggcaatcaaatacagcttaaccttcttctgcgtgacaactgaggattttaattggaaaagtattatagtctataaacaggaatacccaaaacatatttaaaccactcgagcactttgatttttccatgttctttgcatctagattgaaacacatcacaggaaatttcaaagaccaacggctgaatatttttcatttcaacatttccagtggcatcctacaagagaactagcactcacaatgagtcatctgaattttctttaaatcgtaactcatttttaatttctaaacaggttttacctccttatcttcagaatctcctccttccaatagccagtacagtagctccattatgaattgcagactttgcagaccagccttgggatgaatttcagccaacatttggaggaaccccttagttcagaagtgaacttagctgacagcatccaaatgtattatggaagcatcacacttaacacctctcctccgccgcgcgggcgcgcgggcc

SEQ ID NO: 126990 - DNA, 607 bp, Homo Sapiens
  misc_feature (80)..(80): n is a, c, g, or t
gctcaggagtgaaactgccgtaggacgctggccctgcacgctgaagacaatcttcctccatggtaccggccaaccccagngagttccctgagaaacaggaaaaggtcgccagcttcgggccagatgttgactagagccgcaaggatttttgggaactgtagtctagagcaggaaggggtgaggcgctggggcaagtggaaggaggtcgcttaaatgacttcctgccccaagccgactcagtgcagaacgcacccaggaccccggactgtactaggcgttataacgctctctgagaatgctagactgactaaatcgtcatttttgccttcatccgtggataagccacatactgtatgactgcatttataggaaatatttaaaatagtcaaatctacggaaaaggagtaagttagagttttttaggactagcaggattagggggaactgtgagtgattggtaatagctaaagggttcatttttggggtaatgcaaagcttcttgaattagataatgatgtttgcacaactctgaatacactaaaagtgactgaatggtacaccataaacgagctaatgttatagtttgtaaattatatttgtgtgcatg

SEQ ID NO: 126991 - DNA, 1477 bp, Homo Sapiens
tgcctcaagagaaatttcaaatatccaaattaaaacacagtagcatttgaaccttgaccttaccatctctttaagtaaacgtggagttgatttctctactaaataacagaaacctcagtttttcactcccattgtaagtaacttttatttaagtaagtaaaatcaggtaggaaatcacctttgacttagcttccagtagtcattaccaccttttactgcacaattcacaagcatgttttcctggtgaattggactgaaaattacattttgacaactttttttccttttatccccaacttttgccagaaagcagaaaaatgctctatttttataaagaaagattaaattctccaatgatattttaaaaaatatcaacctacatgcactttagaatgtaaaataacaatgactattttaaactcgaagacccactattttgagtattttttatagactttaaatactgggtttttttcctccttcaatctcaggcttttctccatcttttaagcagcctctgtaactcccttttgtccataggtgttgcgtgcctctcatctgtggggaagtattatttaataaaatttatgttacaggataactttattttaatgggcatgggcttgtctatacacaaaggtatgtatattttcattataaaaaaccagtttaaaattttttcttattttaattgtttgaaatttttctagagccaaagaagctctttaaagaagttgtttcttccaaagaacaaagccaggttaatgacattcaattctaaatgatacattggaattgtgccttttctaccacactggattaaataaacttgtcaaaatatggttttgtcattttctgagacacttggtaatttgctgttctttctttcatgtgcccgttagtacatttggccaactgaccacctgtaacagggaggtctcatgtttgttagtagatacgcaggtaaggaaacttgaattcatcctctcctcggctcaggtctttgcttttcttttaatatatgcatataaaatagtaggcatttgattctgcaaaggctctagactacttgagatctatacattctgtccagatggataataccaggctttccttttcctcatctgtagtaagtttcaggtccttgacagaaatagctggactattccaaatttgcttcagtgcatccaaatgtgacaaagggaagcgaagtccatgaaactctgtttcctcctcatttcccatcatgtgtgtctctctactattctttaaggaatgatagatgtacaccatcttttcttgagtttcatcagattgatcttgatccggcagtactgtgaggacaatgtggtctttaaactgcagtctcactacactgtccagcctcggtaactttccacctggtgttgacagctctgccccatctcccgcagagtaaggggggagtctgtgcataataaaatccttcttcatgtct

SEQ ID NO: 126992 - DNA, 1149 bp, Homo Sapiens
  misc_feature (265)..(294): n is a, c, g, or t
gccacagatttaataattttttactttaacacttaatgtacattttcatgagcagtaattaagatatgttgaaattttaaatgtgaaagatttcaaagtttcagtatgttaacattactcttcaaatgttcttaatatatatataaacacttacaaattatagatacaactagttgtatatctacaatacatatatgaacaccattcttcttctctagccatatttatatgaggataaagtaataaatctctgtgctattcaagnnnnnnnnnnnnnnnnnnnnnnnnnnnnnnctttaaagaatagtttcaaaaataaagttcaaatattgcacaaaataatttaactgtaaatattactacatagtgtaaaacaattttaaaaaaatttttacactctacagtaaatcccactttctaattctataaaagaatttattggaagtccacattaaatgtttagatattaaatgcttacattcagtttgatgggaattcaattttcacaagttaactgagactttgtcttaaaagttcatctatttgagttttgtacatattttttacatcttcgagatctaatcgaagttcttctgcctcttctgctttttctccatacatctgcagaatagtgttgtacctttgatccaaatctcttagctgagttctaagtttgggtatctccttcaccttctcttcaagttcatcattttgatttgttaatttaactagttcttcagccattattgatcgagttttttctagattgccaatttctagctgtaaatgagtgatttccccttcccttagctttagctgagactgtaggttttcaattatgcttgatcctgctcccatccttacagcatcataaagattgcttccatttgctgatataggcattggtccaaatgagtgatcatgagactcatcctgagacagaaaagatgtctgtagtcctgccatatcaacaccacttattgaacttgagcgtgacatggtgggagtgctagaaacagaaaatggcttgcgttccttttcttttattgtttcttgagtaaaaatggctttcttcctttcttgttcaactttcattctttccagttctaactgactattcaacaatgtcttttctttcctcgtctcttc

SEQ ID NO: 126993 - DNA, 1158 bp, Homo Sapiens
  misc_feature (480)..(550): n is a, c, g, or t
  misc_feature (565)..(586): n is a, c, g, or t
acccgggtataaagtggagtttgagccacgcactcaactactcccggctggcgcagcagtaggttgttttatcacgcgcatcgagtatatttatcagcccacaggttgtttgtaggcaccgttggatatacgcctctgctggagaagggtgctatgagtacatggctcccgctcgatgagagcggttcgtataatagttgtccgccatagaaggcaattattgttgtggccacccaatagtgtggttggctcgcacccccgcctaagagtagtgaggggctgcctcccaaccacaaaaggtgacccccgagtaggcacgcaaggtgtgttccacccgtatcacagagcacgtgttgttgtaataaataggggggcgattagccgctactcggcttgttatataatgacagcgccatcccatattagggcccccccttgtgtacacaaaaaaacgggggttagcgcgccgacaaaagattnnnnnnnnnnnnnnnnnnnnnnnnnnnnnnnnnnnnnnnnnnnnnnnnnnnnnnnnnnnnnnnnnnnnnnnatgagtggttgttgnnnnnnnnnnnnnnnnnnnnnnattcagagttcagaggccttgcatttatttaacttaggaaaagaatcgagcaaaacagacacgaacacgattctgtctgaaaccatcactaaccggctatagattctgactcactcaaggaatattgtggatattttaagaaaattttcctggttttctgctttaccaaagtgtaagatatggctggggtgcccctctcagcagatgcagaataaattaatcccaaagcaaagcggagcgcagggcagcctcgcgccacctaacctgtgtctcagcttccagcttccaccctgaagtgcgtgtggtcgtggagccgcgttgcgctaaccaggaaagctggaggcagaacgaggttggcccacgacacgtacagacatatgaccgacataacagtaaacgcacacgtgtctcgcacgcatggcgcagaggtcacccagactcatcccgtgcctctgcacgagcaggggaagtgacttggtggtggagtcccttggtttctaggctgttccacgatagcaggtgtgcgttgatggagcgctgaaaagggcgactcagcatggtgactccacgta

SEQ ID NO: 126994 - DNA, 1569 bp, Homo Sapiens
ttttaaacaaggagtttagttttattttctctgtgcatttgcaaaatactcaggaccaacataaaaaagaaatacctcctgtggaaaaagttacattaaaaaggggaatggagtgggggtgctgaaagggattagtacctttgccccaaggagctacagcatctctgattggtccaaggaatagaaaagatattgggaaaatgtaacaggaggaaggaaaatgtgaatttactgagggagagggcctcgaagtgggcctcgagggggaactggtggccggggagtgggtctgggtggagggagaggcccccgctggtagccatagggtgggggtcgtggagggccagtgtatccatgggggggcatcagtggaggaggtccacgcataccatgcggaggcataggacctgggtgacccatgggagatccgaatggaggccctcgggggggcatgcccattggaggaggtccaggatgaggcattccaggtggtggtcggggcggtggctggcccccagagcctgggggtccagcgtggggatgtcctaagccatgagggccatggtgtgcaagctgcatctgagacatcccctggatggggcaatcccaacccggtgggaatgggtgaggatgtgagtgtccatgaccaggatgtcctgcccctggggttcctgccgatggggggccatgtcctgcagccccaggaggcataggtggtgggggcatggctgggggtatcccaggtgggagggctccaggaggtggcactgggggtgggaaggagccaggaggaggcatgcctggtggaggaagcccagaccccaatgatgataccacaggattgggagcagagggtggaggaggtgcatctgcaaacagctgatgagggcgatcagcctgggagagcgggttctgagctgccagaagtcgttcggctgctgagccatggcgctcacccttggagtccttcttgaaggcataagatacggtgataggacggttacagaggtactgcccattcatggcttcaattgctgcatccgaagcatcaaatgaagcaaaattaataaaggcataacctttggagttgcctgtgtcagggtcccgcataattttgggggtttgtaagatgaccccaaaggcgctgaaagtatcataaagcaacttctcatcaatctcagggtccaggttcccaatgaaaatgttggcccctacatccaggtttttgttgtgagctgatgctttgttcacccgtattggcttcccatagagtttgatcatgttcatgatcttaatggcatagtcagcatcttcctcactcaagaattccacaaagccatagccttggtgctggccagtgactctatcctttggcatgtgggtgttgactactggtccagcctggagaaacagttcccacagcagcggttcactaaccttctcatccaggccccccacgtacacagtggcatcctgattccgctcggagatcggcccggcagccatggcgaaagagatcccgccgtctcccagcagcgtgccgattctagcgcagcctccacctagcga

SEQ ID NO: 126995 - DNA, 1021 bp, Homo Sapiens
  misc_feature (902)..(910): n is a, c, g, or t
ggcctgggtggcgaattcggcacgaggcggaaccgctgctgggagacggcgggatctctttcgccatggctgccgggccgatctccgagcggaatcaggatgccactgtgtacgtggggggcctggatgagaaggttagtgaaccgctgctgtgggaactgtttctccaggctggaccagtagtcaacacccacatgccaaaggatagagtcactggccagcaccaaggctatggctttgtggaattcttgagtgaggaagatgctgactatgccattaagatcatgaacatgatcaaactctatgggaagccaatacgggtgaacaaagcatcagctcacaacaaaaacctggatgtaggggccaacattttcattgggaacctggaccctgagattgatgagaagttgctttatgatactttcagcgcctttggggtcatcttacaaacccccaaaattatgcgggaccctgacacaggcaactccaaaggttatgcctttattaattttgcttcatttgatgcttcggatgcagcaattgaagccatgaatgggcagtacctctgtaaccgtcctatcaccgtatcttatgccttcaagaaggactccaagggtgagcgccatggctcagcagccgaacgacttctggcagctcagaacccgctctcccaggctgatcgccctcatcagctgtttgcagatgcacctcctccaccctctgctcccaatcctgtggtatcatcatttggggtctggggcttcctccaccaggcatgcctcctcctggctccttcccacccccagtgccaccctcctggaagccctcccaccctggggataccccccagccatgccccccaccaaccttatggccttcctgggggcctccagacaattggnnnnnnnnnttgggcagggaaacccccagggggcagggaaatccctgggtcatgggaaacttccacattccctcacccaatttcccccaacggggggtgggaaatcctcctccttcctgg

SEQ ID NO: 126996 - DNA, 720 bp, Homo Sapiens
tttttccccaaattataggattttattagccttgaaacaggccctgtggctgtcgtcccgctgggcacacagcaggggtgtctactggaggaatgcccggaggaagtcgttgtaggagatttttgaagacagcgtcttatcgtaatactccagaatatggaagaactcttcctcagagaggttgatgctgtactgtctcaggaccgtcctgaaatctgcgacgcttagcagccctgttccagcctcatcatagcttttgaacgtgcgccgcattggcctccagcagtgcacaattttgggctgaatacgcagcagagcagagtaaaaagatggcgtctccgcgccggcttctttcatcttgtgtgcattctggatcttcatcctgtgcatcagtgagctttcctttgcttttagcaggaggacacagctctgaatgaagtcacagtatgcaaatttcccgttgctctttaagtcgtattttataatgagctgctgacactcctctttgcttatgtccaggttgaatttctccacaagagccaggaaatcggaggcgttgatgtccccctgtctggccacgtccttctccttgcattctttcaggagctggcgccagcagccctggattctcttccggagcctgctctctatgggatcacagttctgcaagggtggagtgccgggacacggtggtgctcgctggagtaaggggtggtctgc

SEQ ID NO: 126997 - DNA, 491 bp, Homo Sapiens
taaaccaggattcttatttgtgctgttatagaatatcagctctgaacgtgtggtaaagatttttgtgtttgaatataggagaaatcagtttgctgaaaagttagtcttaattatctattggccacgatgaaacagatttcaactgataaagagctggagaactccatgtactttggaatctcctccaagatagccagagtttaatacatcttcattctcaacactctccaaagaacttgacctaccttaatgggttccatatttttcttcttaaatgtgcatcaatcatgccttgcccccaacctttaaatatattcttagacctggtaaatgcactcagacttgcgtctttaggaatttttaactttctttcactacattggcacttaaattttttctttataaagctttttgaaggtcataaacaaagaccataattgatgatagacctaatacatttcctctgtgtgtgtgtgtaacattccaaatac

SEQ ID NO: 126998 - DNA, 596 bp, Homo Sapiens
  misc_feature (20)..(20): n is a, c, g, or t
  misc_feature (95)..(163): n is a, c, g, or t
  misc_feature (273)..(395): n is a, c, g, or t
tgagagttcttatacaaatnggcgaagtggtttttaatattgatttaatttttgttattaaaaacatttttagatggttagattcctttttagannnnnnnnnnnnnnnnnnnnnnnnnnnnnnnnnnnnnnnnnnnnnnnnnnnnnnnnnnnnnnnnnnnnntataccctaatgcacatatatatgtatccttcgcccttttcaacacctcccccaaccatggtagtacctttgttaaaatgaggaacctacattgagacatcatagttgtnnnnnnnnnnnnnnnnnnnnnnnnnnnnnnnnnnnnnnnnnnnnnnnnnnnnnnnnnnnnnnnnnnnnnnnnnnnnnnnnnnnnnnnnnnnnnnnnnnnnnnnnnnnnnnnnnnnnnnnnnnnatccctgctcttcctgtttattacatatcatccccttaaccctgcaaaccatctccatcatttcgcatgttacatagttgcagttatatagtaagtagccttttcagactgccttcttttacttagtaatatgcttttaagtttcctcatcttttgaggacaagatagcccatttctttttagtgctgaattatgttctat

SEQ ID NO: 126999 - DNA, 1132 bp, Homo Sapiens
  misc_feature (1024)..(1058): n is a, c, g, or t
ccagctaaatatgacagtcttggatttatttgtaagtgtttaaaatgtccaatattcagaagttgtcaggtgttcttaccacctccccactccctcaaccagtccctgcttccagggtccaggagaagcagtgttcaggcagagtagtctcttgccagagcagaacaaggagtcctggtggccaagtggcaagtatgcaggctgggctggtccctggtgggacttctcctgggcttttcctcccatcatcttccttcacgtgtctctcagccctggcagagtttggagctgataccctgggtcatggccacagtccagttcactgggtggatgtgtccctggcttctgtccatgccaggctgcagcccagagggcgctggctgctagaatcttgatgagaaagatgcagtccaggaggagaaggatggaagtgtgtggtaagggggatttctccttccaagaggctcctggagatgctgtgctccacatgggcatcctcgaagctctcagactccccggggaaccagagatctccagcatcccggtgatccagggggtctgccagcacctccaccaggaccttcctgagggtgtcagcctcactgccatggaggctctggcactggtagagacccgcatcatggggttgtagattccgcagcgtaatggtgagagtgccacccagggtatcgtctgtgatggctgtgctcccattccacctcctcaggaaggacagcagccacaagttgtgcgtgctgaccacacgctggcatgggcccttctctcccagctggcggcaccaggccttgcgcctcccccagtgcttcatggagtcataggggcaagacacctgcagggactggcccgccacgccctggaacactgtggtgttgtgggctccggacagctctgtgacaaagagtaagatgagcagccggagaggctccatgccacccttccccagccaagggcccccggccgtaatggccgaattcccgggcatatgtccggtaccgtcgactgnnnnnnnnnnnnnnnnnnnnnnnnnnnnnnnnnnncggccgcttcctcgctcactactcgctgcgctcgtcgttcgaagagcggcagcgccaagagtatacaggttttt

SEQ ID NO: 127000 - DNA, 662 bp, Homo Sapiens
ttatgacataagaaaaataatcagtttaataattacaacagtgtagcatcaacattgtagtagtcaacactaggacattgtctgtgacatttaaattaggagtttctccacacttgtcaacaggcgccctgggtgtcccagagaagtgaagaaatgattggcattaaggagtccacacaaccagggcaggcattcaaggtcccagacgcccagcgcatgtggacaagcacagacgccactgagtgtgaaggaacgagcttctgatgctacattccaacatcgctgaaaactgaaagtgcttcacatctacaggataagaaatggcttcatctcctcatccatacaaggtgagagcaaaggagtaaccctcgggcaaatcgtggcccctttaaacgtttatatcaagttcccacccccttgggaggtcacacggtgaaacagacacagttatatacaacagggcaggtttttaaaaagagttgctctcagacgcatttttcctgctccctaaaaagccgaggaagatactggatccacagaaagaaaaggcaatgccgtaacatgaggccctcatggccgcaccgtccaggggaagggctgtttaaaacacaagtattcttggtgaaatacttcgattctgagcattaaggcaggtctgcagg

SEQ ID NO: 127001 - DNA, 717 bp, Homo Sapiens
  misc_feature (686)..(686): n is a, c, g, or t
ttttactatatacacagcatttttattaaatatactctgtgagaaaaagaacaccctaaagtgccagatttcatgtaaatccaataacttagtaaatacaatggtgaaaaaaaatcagagggaaacataatttaaataatcttataaaagagcaagaacatatcttaatcttaagaaaacaatcatcaaaatataaaagggaaagaaatctcttttgtagaagaatatatttcaaattccacctgttgatcatttcatttaaaaaattctattctaaacacatgggcagtctctcttaccaatatatatatttaaatcaatggtagaaagggaatttagactactcattcacactgagataaagtgacatttttgttgcacaacagtattgctcactggcactaacagtggaagatggagaaagtagatttctggattcaattgttagcagcagaaatggactaatgctaaaaatttagaaaaaaatagtccaagctgtagcgatttccaagtaatacaaacattaaccaaacattgccaatttgtaacgggctgtgaaaaacatatgaaaatactctacattgaatactagctttatgttactttctattaaagatattcagtgggcatattctaaattatatagggcttctatagagacctaaactagcaagtataatatgaangctacaggacagtgtcagcatatcttgggat

SEQ ID NO: 127002 - DNA, 1102 bp, Homo Sapiens
agtactgactgaaaagactagcaacaactcctgaaaatcgtaattgtagtaaggttactacacgtaagaagtgaaccccaaatcaagacttccatttattttcctttaggagccatggagcatattggcaatttggttctgactcctaaaatcattttactatacctttacactgcctacattggagactgcaagcagtggaaaagaatagatactccagatctcgtcgataaacccaggctcctcctaaaccagccagattcagagagaaaaacgagctggcctgccttattgtattacttgccatcaaggttcaatgtggttctattacccagtaaagtcattgaccaaacaaggtattttcacaaagctaaccttttttaaaagcatgtaaaaattgtacatttgtacatatacgcattacaattttacatccaaagatcaaatagttaacagttcatttagggctttttgtattgtttgattttccagattctgtcactcccttggctttgacctaacctgacatcattctgtcacattatcttctaaatcaagtaaacgttcatttgtctcagtaagcacaatctatctgggtgacaccagagaggtttctgaagggtctggtgtacgctgaggcagtgaaataggtctgttggcacaggtaagaaggaagtggcatgataaacatcacaaccccagggaacagccttccagagtggcacaagcactcccaccgagatggtccagtgcccacccgttaaagagtcaaaacccaaagttactgagtgtcccacaaagcaagtcacactagctctcaaaggaagtgagctgtttcaggactcaatgaagcagggtcactttgaacactggtggtttgacatctgtgaaagaagtcatttgaactcttataaagagaattaaggggtcagcagcttccctggaaaatgcaggaaaaccaataagagaggggacagttttcatcttttcataaagttcttctccagagctaccgaagttctctgtaaagagtagatattccgcttcacccgatcctccagggaggaagtagatgcactctccagcttcatgcggtggatga

SEQ ID NO: 127003 - DNA, 1623 bp, Homo Sapiens
  misc_feature (56)..(128): n is a, c, g, or t
  misc_feature (832)..(832): n is a, c, g, or t
caatccccctgggttttcagcattccatgtttccaggaagggaagggtttcttagnnnnnnnnnnnnnnnnnnnnnnnnnnnnnnnnnnnnnnnnnnnnnnnnnnnnnnnnnnnnnnnnnnnnnnnnngctggctccaaggttcacggggtttattagggagtcgggagggagaaaacccaggagtccccaggccatccacattgctccccggcatgtgacgatccagcctggctttctctggtcctttctggacagaggctggccaagcaggcagcagcctcaaggggagtgggtaggagctgggggccttctggcagccctactcagaggatgatctggttggtgaagcttcggctcagctccttgtgtggcagaacaatcgagttcaggatgagcacctcggcagggatccggactcggcagcccaggatggtgatagcaggcagcagcttcccgtccttgaagaggctctcactgtccatgcgggctcggggatcgttggggttagggtcactgggggtaccctccacgcgggcccagcgtcccacggtgctcccccagcccacgatgctatgcagaacacacgtgtgctcctgcaaagtggctccatggaggacgatgctctcccggagccgcacaccctcacccacggtcacccccttcccgatggagacgttggggcccagcacagccgagggggccaccttggcggtcgggtggatgtacacattccctccggatccatgggccccctggggtgtgcttggccagccgttctggggtgagtgtcctggtatcggctcaggtagaggcgggaaggcgtagagggnctgaacctgcggacttgatctgactccagataccatcagtgagatgcacgtatatctggccctgccctgccagggctgaaaacacatcctgctctaggcggatggtacctgcccctggccacaagcctggtgagtcctccaattgcccatcctgctgattacgctggaagacatcccgaagaggcttcaaggcttcaggagaaaagaggtagatgccgcagttgatgatgtcactgataaatgtgctgggtttctccacatagtgcaatacctcgtgtgtctgtggattctcaacgatgcagccgtagttgagggattgcgtcctgttagcggtagtgccaaggagtaagaaagggtgacgctggcgtcggtgggcttccaacatagcactcaaggggaagtcggagcagacatcagcattgagcacgaagaatgcctcggggctcccagccaggatctggtctcgaaaatggtaaagaccaccccctgtgcctaggggggcaaattcctgcaggtacctgactggaaggttaaactcctgctgggcggcttctaggaactgggtgaggggctcatcaggttggtagaagccaatgagcagaatctcctgcattccagggacctgggcacaggcttcaatatggtgttggatcatagggacccctgccacaggaaacaatggtttgggcacctcaaaagacaaaggtctgaagcgagttcccttttgagggccactagctcccttcactccagctctgccgccctcgtgccgaattcgccacccaggcccc

SEQ ID NO: 127004 - DNA, 945 bp, Homo Sapiens
ttctgggtgagtgtcctggtaatcggctcaggtagagcgggaaggcttagagggctgaacctgcggacttgatctgactccagataccatcagtgagatgcacgtatatctggccctgccctgccagggctgaaaacacatcctgctctaggcggatggtacctgccctggccacaagcctggtgagtcctccaaattgcccatcctgctgattacgctggaagacatcccgaagaggcttcaaggcttcaggagaaaagaggtagatgccgcagttgatgatgtcactgataaatgtgctgggtttctccacatagtgcaatacctcgtgtgtctgtggattctcaacgatgcagccgtagttgagggattgcgtcctgttagccgtagtgccaaggagtaagaaagggtgacgctggcgtcggtgggcttccaacatagcactcaaggggaagtcggagcagacatcagcattgagcacgaagaatgcctcggggctcccagccaggatctggtctcgaaaatggtaaagaccaccccctgtgcctaggggggcaaattcctgcaggtacctgactggaaggttaaactcctgctgggcggcttctaggaactgggtgaggggctcatcaggttggtagaagccaatgagcagaatctcctgcattccagggacctgggcacaggcttcaatatggtgttggatcatagggacccctgccacaggaaacaatggtttgggcacctcaaaagacaaaggtctgaagcgagttcccttttgagggcctccaatcaggatcaccgctttgagcataatggtgactgctacctaaacactagctcccttcactccagctctgcgacgcgtggcgacgcgtgggtcgacgatatcccgggaatatccgaccggaccagcctgctttttgtaccactgttctatattcc

SEQ ID NO: 127005 - DNA, 819 bp, Homo Sapiens
gattctcaacgaggcagccgtagttgagggattgcgtcctgttagccgtagtgccaaggagtaagaaagggtgacgctggcgtcggtgggcttccaacatagcactcaaggggaagtcggagcagacatcagcattgagcacgaagaatgcctcggggctcccagccaggatctggtctcgaaaatggtaaagaccaccccttgtgcctaggggggcaaatttcctgcaggtacgtgtcccccagggacccgagaggcagctcagtggatcttaggaaacagataccatgagccagggcacctgaccgccaccgcttgctcccaggactactcctgcccaaggcccacagagaaactctatatactcagagattcattgatgtccaaacaagaatccttctagtaggcgaggatgaactccagcaaatgctgactcaacccacttccaagaactcagaggcctagggcatccccacccccccatatacgagtgtgtgcacaaacacctgactggaaggttaaactcctgctgggcggcttctaggaactgggtgaggggctcatcaggttggtagaagccaatgagcagaatctcctgcattccagggacctgggcacaggcttcaatatggtgttggatcatagggacccctgccacaggaaacaatggtttgggcacctcaaaagacaaaggtctgaagcgagttcccttttgagggcctccaatcaggatcaccgctttgagcataatggtgactgctacctaaacactagctcccttcactccagctctgatcccgggaattccggaccggtcca

SEQ ID NO: 127006 - DNA, 845 bp, Homo Sapiens
  misc_feature (129)..(129): n is a, c, g, or t
  misc_feature (133)..(133): n is a, c, g, or t
tctttaagaaaaccagtttcatgggcccatgttcacgtttacccattctggggcccccgggcgccccaagggaaatgggtttagaaaggctttcttcaagggcccggaaggcggcccggccaaggaaanaatnggtggcgatggggggttgtggtttcgagggttaataaacagctttatttgccttgtacagcatcaattttcttacattctcagttaattggccattaaagtgctggaaattttcttaatcatgataacatttgttaaaaagaaatcagaactaatatcaggaacatggcggcatgaaggaaacagttcccttacaaaacacagaaaatggaagcccctcatgttgagggggtgggttggacaatttgcaaacagattctaatttcctctcaccgtcagcaccaaactggctgggaccaccacccctgggtgaaagaaacaacactaaagaaccctaaaaacacccacacaccctgactaccaccacctctgggccatctgtgggcgtttgctgtttgaacagatccagtctcaggaaagaggaagacctgacctccgtctgcaacccatcaccccacccacccttactaacaaaagcccccaaagtcattacaatgaaaaagtgggtttccattaccccaaaactaacaatgttcagtaaaaatgaggataataaacacaaaagcttgcttagtaaacaggagctctcagcagtcaatgcaaaaaaatatatatatatgaaatcttaaggcaaatactgttgactttgcacatgggctggacgaacttggaactctttacctatctgtatagttccaggagcctacaggcgg

SEQ ID NO: 127007 - DNA, 578 bp, Homo Sapiens
tttattgcattttaacttctttaataattcactcaaaactgtaacacgagaggaatccactgtttagttaacatttacacacaattataaagaataaaagactgaatacatttatgaacaaactgcagtatgtctttaggttcataggctgctcaacacatttaaagcgtatagcaaatgaagtcacagaactatagggctacaagaaaatcccacaagtttatagcttaactggaatcagatttatcttgatacagaataatctataaactcatttaatggtcattttgtctcatctaacaaaccacacagatgtcaaccaccgggccttgcaaatgcagagtggccatttacatttaaaatgaagtattatagacaaccagaataaaatcaattcccgtgtttactattttccattttcaatatgagcatttgaaatgttaatatgagatacaatttcactatttaaactcacattacatatactgaaactaccaatgagtacagcaagaatatagacatactgcagcctttgactttaacatcaacacactggttaacctcgtgccgaattcttg

SEQ ID NO: 127008 - DNA, 612 bp, Homo Sapiens
ggtgtaagaactgagctgtcactgcaatcttcctctgccagtcagccaggaaggtcccacagccggcaccgctggccaccggcgcggctcccggcatgggcgcctacttacactcgtccctggccttcatgcgggcgatgaaggagtagctcttgttcctgcggtagttctcataggggtcatccagagccacgcccacgcctttatactggtcccccttgtcccggccgtccccgcccttgatggggtcctggatcccttgctccttcgcaccgaggccgcctgagccgctccagcccatcttcaccagcatctgatggcctttgttctcttctccgagccttgagtcagggatgggaggcgccgaattagaacccagaccagcagaggaaggcggggtggggctcctggaccgtgaccggcgtcttcttcctggggagtacgacttggaccgggaccgcgactgggaccgggagcggcttctggaggagcgcgacctgctccgacttctagatctggagcgggagtaggaacgggagcaggagcgcgacctgaccttgagtacgagcctgcctcgtgccgaattcaacacccatgcctcgcacctagccg

SEQ ID NO: 127009 - DNA, 960 bp, Homo Sapiens
gacgcgacgggcacagactccgaggcagcgctcaacctgaagtgtcttaggctggtttcctgttagaatcttgtttcccagataacagcaaatggctacattccaggaagggaatatcaacttatacaactaaaataactgaactaagggccagtacgccttcgaagaattaggtttcagaatctcactgggcctcctctcaggtcaggtattcttctttctagacctaaaccaaggagagtaaaaatgaaaaccctgcttcacttcgcaagtcaagtcaaagttttgtgtttctgtttttcaatccgcggcagtcatggcactgggcttcggctttgtccctacacagccgaggggaagccaggtcagggccggtgggtgcggggagctggaggaaggagctggggtgccggctctggctcaggccaacccttcctgcacatgctcctcctggagcctaggaggaggcttcaatctgacttagggcagatgcacatccatcccttcgtggctgaagaatttactcgggcggagggtcttgtgttttttgcttcgctataaaggaaaacgagcctggggccctggtggctgcagcgcctcctggtgtggtttgtgggtggcacccgtgccctccacgccatggagcacggcgttcccactgggcatgcgctggtcttccttctcttcctgtggctctccacaagtggagacggtgtaagaactgagctgtcactgcaatcttcctctgccagtcagccaggaaggtcccacagccggcaccgctggccaccggcgcggctcccggcatgggcgcctacttacactcgtccctggccttcatgcgggcgatgaaggagtagctcttgttcctgcggtagttctcataggggtcatccagagccacgcccacctcgtgccgaattcaacacccagcctcgtacctagccgtatgtttgtggt

SEQ ID NO: 127010 - DNA, 1358 bp, Homo Sapiens
aaggtctttaaaaaaaggctttatttgaaggcaaaacaatgaaatccacaagaaattactaacagcacgtgtttacgttttatcctgaatcatacattttaacaattcacagctacaggaaatctagaacaaaatcaaatattcatcacgttgggttgaaaagttggaagattttgcatcttattgaaaagaatttttcaaaaatgtttctgtacaaatgaatggaattgcaccaggctgcccatggacaccaggtgtggccgattcccaacggtcacccaccagcttctggcaggagcagctcccctcctggcctcccctcccttcgggggtgtgaaatgaaatgatggagtggaaggcgctggctggggtcgggctccatgctctggatgggactgggccgtcgcacacgccagccggtgcagggttcttccaagtgcaaaactcaagcaggggacgcgacgggcacagactccgaggcagcgctcaacctgaagtgtcttaggctggtttcctgttagaatcttgtttcccagataacagcaaatggctacattccagaaaaaaaatatcaacttatacaactaaaataactgaactaagggccagtacgccttcgaagaattaggtttcagaatctcactgggcctcctctcaggtcagtattcttctttctagacctaaaccaaggagagtaaaaatgaaaaccctgcttcacttcgcaagtcaagtcaaagttttgtgtttctgtttttcaatccgcgggcagtcatggcactgggcttcggctttgtccctacacagccgaggggaagccaggtcagggccggtgggtgcggggagctggaggaaggagctggggtgccggctctggctcaggccacccttcctgcacatgctcctcctggagcctaggaggaggcttcatctgacttagggcagatgcacatccatcccttcgtggctgaagaatttactcgggcggagggtcttgtgttttttgcttcgctataaaggaaaacgagcctggggccctggtggctgcagcgcctcctggtgtggtttgtgggtggcacccgtgccctccacgccatggagcacggcgttcccactgggcatgcgctggtcttccttctcttcctgtggctctccacaagtggagacggtgtaagaactgagctgtcactgcaatcttcctctgccagtcagccaggaaggtcccacagccggcaccgctggccaccggcgcggctcccggcatgggcgcctacttacactcgtcctggccttcatgcgggcgatgaaggagtagctccctcgtgccgaattcaccacccagcctcgtacctagccgtata

SEQ ID NO: 127011 - DNA, 1238 bp, Homo Sapiens
ggtgaacagtccgtggagactcagcagtcctgtccagccgtggccgatccgcttcagctgttggccctgcctctcctagcaggagggccagcatttcccaaagggattctttagagcactgctcaggcccagagagtctcctgttcctttgtccatacagcccttgcagagcccaccgaacagccgaagaatgtcatttgtcccgctcaaggatccggaagattgcgaagattctcggagcacacgctttactccaggttccttcatgaagcccataccccccatgatttggatgcattcatctgtcacgttccaggctgcctccgagccaaagattttgctgatggcggcctctatctggaagtccgtggctccctggtccatgttagcactcaccatgtaagccatggactcagttacatactgcagcataaccatccgtgccagcttctcctggatcagcccaaagttgtgaattttctccccaaactgggtacgattagtggcatgatctacctggaagagggtccacacatcccgctgtggttcagtgtggttctgcagtctccctaggagaggggctgggcttgcgccagagggatgggttttgcatacaaccagagttcagtctacgctggatggagacctaagctagcaagtcgggctgctggtaggggaggagtttctagtgtagggagtgcctgcaagtgatcagggacacatggcaagggggacagtgagacttctgtttgggttacctagggactcgggcagggtactcaccgccttagcaatgatgcctctcatggtacctgccagggccgcagccatgccaaaccttccattgttgaggatgtgcatggcaaccttgaagccactcccaacctcacccagcacgttctccgatggcacccgtactccatcaaagaacacctctgactgtgtttgaagccttgatgcccatcttcttctcagggggcccatgggtaatgcccccgaagcccctctccaccacaaaagctgtgatcttctccttcacggctcctgtggctggatctgtaactggtgtctcggcaaagaccgtgaagatgtctgctaggcccccattactgtggaagaatgggatattcagggcgtggaggacggggagcagtggggcctggaattgggcggaggagaaggggagaaatgggaggcaggttgcctgatccaaagcttgcctccattgagggtatagt

SEQ ID NO: 127012 - DNA, 2278 bp, Homo Sapiens
tttttactggctagaaatttttattatttgcgaggcagtaagtgctcttgagagcaggcacagtgctgggaacactaggccccttcgggacaaaccagggccttaaggaaaggggcttcggctttggcttgagggaaggcacataactgggacaggccctggccgggagtattcagaagccaagtgggttgctggtgaccacaccaccccgctccaccaaggccttggagatgcttttgaagttgcggtagagctcttgctgccaggggtcagactgcagggcggccatgccctctcggatccgagctgcagcctcgatacaccaggtgtcacagagcattttctcatgctgggccgtggggtggccctcactcagggatcttgaggccctcgagagaaccaccaccatggcatagaggtcgatggccccgtctgccagccgctgcagcagaaactgttcattgacaatccccttcttgtgttttatcagcttggcctccaccacagtggcaaactgctccagagcccgtactgccagctcgccactccgactcaactccgggtggacaagtccgctgagactcaggccgctgcccagccctgcccgccgcctcagctgtttgcctgcctctcctagcaggaggccagcattcccaaagggattctttagagcactgccaagcccagagagctcctttcctttgtccatacagccctgcagagccacaaacagccgaagaatgtcatttgtcccctcaaagatccggaagatgcgaagatctcggagcacacgctctactccaggttccttcatgaagcccataccccccatgatttggatgcattcatctgtcaccttccaggctgcctccgagccaaagattttgctgatggcggcctctatctggaagtccgtggctccctggtccatgttagcactcaccatgtaagccatggactcagttacatactgcagcataaccatccgtgccagcttctcctggatcagcccaaagttgtgaattttctccccaaactgggtacgattagtggcatgatctaccgccttagcaatgatgcctctcatggtacctgccagggccgcagccatgccaaaccttccattgttgaggatgtgcatggcaaccttgaagccactcccaacctcacccagcacgttctccgatggcacccgtactccatcaaagaacacctctgctgtgtttgaagccttgatgcccatcttcttctcagggggcccatgggtaatgcccccgaagcccctctccaccacaaaagctgtgatcttctccttcacggctcctgtggctggatctgtaactggtgtcttggcaaagaccgtgaagatgtctgctaggcccccattactgatccaaagcttgcttccattgagggtatagtattttccacaggggctgggcacagcagaggttcggatggaggctgcatctgacccgcttgagggctcggttagacagaaagcggccacagtctccccagatgccagcttggggaggtatttttctttctgggcctttgtgccaaagagcaggatgcctttgaaaccgatgctctgatgggcccccagggtaatgcccacgccaaggtcatgcatgcccacgatctccaccaaacgggcgtactgggtgttgcaaaggcccacaccacccagctcactgggcacttgcagaccaaaggcccccagctccttgaggccctgccaagtggtctcctccaccatctccagagcgtcattcttggcgggatcgttcacttcctcgaagaaacgggacacaggctccaccagctctttaagaaactgtgtctgctcttcgttgagcacggacgggtatgggaacacctgatctgtggtgagctggcctttgaacattcccacagcaaaggacttagattccgccttggccggttttttcctggtcagagcgtcagaggggtgggaatctgacttgtccagagccagctgagcggcacccccggcatagggccgccgggcagggccgggccggggctgccccaggagcgccgtgagccgcgagcttccgcccccgagcctcagcagctgccgccccaagctcgcggccatccgagccgcctgcatctccgaatctctccgggcgccgctggctcgagctctgacccagctctggcgtcctgcacgcccgcgtcctgcacgcccacgtcctggcgcccctcgtgccgaacttccacaccccaggcctcgctacctagccgtata

SEQ ID NO: 127013 - DNA, 673 bp, Homo Sapiens
  misc_feature (612)..(625): n is a, c, g, or t
ttttttgactttgcaggatgtgctttattttaagtcagccctgaacccaaactacacaggatcaatttttgacatattctagtccattcaatgattcttctcagaaactgtatcttaatatggaatgaaaactacatttcaatcataaatttttcatgctacattgttatttaatgaagaggttgtattaccaataataataatttaagaaaaggccatttttatttccccaagctcaatatacatatttctttcataattatgaacttaaaaaacccgtctcagatgtaaaaatgtgaattggaatatgtaaactctttgatatacctgaaaaacaggaaggaaaatgtcacatactgggaaaaccattgccttaaatcatggaaatgggaaaaagcacgttaagggaaggggaaggcagaagagcggtcctgacctcagttattaaagagttacaaagtattctaggtcccactgggttggtctttttactcttctgcctcatgtctgtttgcacaggagaccgcagccctccagaatggttcccctcattgaagctggtcactggtggaccataacaaagcaggtgtacacatcatttgttttgctccnnnnnnnnnnnnnncctgagaatcactggtgtttaatggaaaggtatcctattagtccttgg

SEQ ID NO: 127014 - DNA, 1131 bp, Homo Sapiens
  misc_feature (1010)..(1044): n is a, c, g, or t
  misc_feature (1048)..(1089): n is a, c, g, or t
ccggtgtgggaaatgttattgcccaataaaatttccccaaggttgccccaccttccaaaaaaagataggttttttcttcataaatgaatttcccacaaaccttcccccaatcgccaagttttataaggtggaagtaaaaaatcactttttaccgatctcaacttgtttttcaacatttagttccatcatcttcaaaaaatagctgccctgcctaattcattagctatatgatctaaccaagcagcaacaagatggccaggccatggcaatcctcttcccatttcccctagccactcagggctcaacagcagggtgaggctcaggtggaggtagggggtggggagcacaagggctacattcccccagtacaacatggcatctgaagcttgatgggagagcagaactggtgagacttgagggaagggtccagggcctgtattcagtcagaatcactgctggaagaggaggaggaagaggaggaatgcttgccatgcttgtggtacttgtggtgcttttggtgcttgtgcatctttttatgagctttcttcattttcttctgcatcttcttgtctactatcactgctggtccaaccatgccaggagccaagggattcacaggagggattccaggggcaggcggtgggtatggaggagggtagggacccaacggttggcatcctggataccctggctgtggcacaggatgagggggcccacctggggggaaagctggattgccatggggagctcctgggggaggaggacaggggcctgggggaaagggtggattaataggtggtgggtgggcaggattggaacctccagggcacccaatattggggggatatggatttggccctggctgcccggcattgggattccacatgtttaggtgtgtcctccagcctttccaccgccgcctgggcttgctgcgttctccttcgcagtctcgtgccgtccccggccgtaatggccgaattcccgggcatatgtccggtaccgtcgactgnnnnnnnnnnnnnnnnnnnnnnnnnnnnnnnnnnncggnnnnnnnnnnnnnnnnnnnnnnnnnnnnnnnnnnnnnnnnnnaaagccagcgatgcgccatataggtagatagtctttctttct

SEQ ID NO: 127015 - DNA, 1153 bp, Homo Sapiens
actcgcagctcgtacccgatatgtattttttatttccaggagaaataactttatttgaataggacccaagacagcatattgggctaaggaggagaggtaaggttccaaaaccgcagtcaaagctcatcaaccaaatggactctacttcccagcaaccttgcagttagtgcaaccaacaaaaggcctgctggggaatgtatttgccactaaattccccaagtatgccaacattacaaaaaagataggtttttcatcataattgaatttccacaaacctccccaatcacaagtattataagtggaagtaaaaaatcacattttacagatctcaaacttgtcttcaacatttagttcatcatcttcaaaaaatagctcccctgcctaattcattagctatatgatctaaccaagcagcaacaagatggccaggccatggcaatcctcttcccatttcccctagccactcagggctcaacagcagggtgaggctcaggtggaggtagggggtggggagcacaagggctacattcccccagtacaacatggcatctgaagcttgatgggagagcagaactggtgagacttgagggaagggtccagggcctgtattcagtcagaatcactgctggaagaggaggaggaagaggaggaatgcttgccatgcttgtggtacttgtggtgcttttggtgcttgtgcatctttttatgagctttcttcattttcttctgcatcttcttgtctactatcactgctggtccaaccatgccaggagccaagggattcacaggagggattccaggggcaggcggtgggtatggaggagggtagggacccaacggttggcatcctggataccctggctgtggcacaggatgagggggcccacctggggggaaagctggattgccatggggagctcctgggggaggaggacaggggcctgggggaaagggtggattaataggtggtgggtgggcaggattggaacctcccagggcaccccaatattggggggatatggatttggccctggctgcccggcattgggattccacatgtttaggtgtgtcctccagccccatcacctttccaccgccgcctgggcttgctgcgcggacgcgtgggtcgacgatatcccgagaattccggacc

SEQ ID NO: 127016 - DNA, 807 bp, Homo Sapiens
gttttcttcccccattttggttcactcctcttccaaaaaaatagcttccccttccctaattcccttagctaatagggtcttacccaagccagccaccaggatgggccagggccatgggccatcttttttcgccatttcccttagccccttcagggctcaacagccgggtgaggctcaggtggaggtagggggtggggagcacaagggctacattcccccagtacaacatggcatctgaagcttgatgggagagcagaactggtgagacttgagggaggggtccagggcctgtattcagtcagaatcactgctggaagaggaggaggaagaggaggaatgcttgccatgcttgtggtacttgtggtgcttttggtgcttgtgcatctttttatgagctttcttcattttcttctgcatcttcttgtctactatcactgctggtccaaccatgccaggagccaagggattcacaggagggattccaggggcaggcggtgggtatggaggagggtagggacccaacggttggcatcctggataccctggctgtggcacaggatgagggggcccacctggggggaaagctggattgccatggggagctcctgggggaggaggacaggggcctgggggaaagggtggattaataggtggtgggtgggcaggattggaacctccagggcacccaatattggggggatatggatttggccctggctgcccggcattgggattccacatgtttaggtgtgtcctccagcctttccaccgccgcctgggcttgctgcgttctccttcgcagtcccc

SEQ ID NO: 127017 - DNA, 820 bp, Homo Sapiens
  misc_feature (90)..(90): n is a, c, g, or t
ttcaaaacttgtttttcaccatttaggtccatcattttccaaaaaataggctcccccctgcctaaattcattagcttataagattttaanccaagcaggcaccaaagatggccaggcccatggcaattcttcttcccatttcccctaagcccctcaggggttcaacagcagggtgaggctccaggtgcaggtaggggggtggggagcacaagggctacattcccccagtccaacatggcatctgaagcttgatgggagagcagaactggtgagacttgaggggaagggtccaggggcctgtattcagtcagaatcactgctggaagaggaggaggaagaggaggaatgcttgccatgcttgtggtacttgtggtgctttcggtgcttgtgcatctttttatgagctttcttcattttcttctgcatcttcttgtctactatcactgctggtccaaccatgccaggagccaagggattcacaggagggattccaggggcaggcggtgggtatggaggagggtagggacccaacggttggcatcctggataccctggctgtggcacaggatgagggggcccacctggggggaaagctggattgccatggggagctcctgggggaggaggacaggggcctgggggaaagggtggattaataggtggtgggtgggcaggattggaacctccagggcacccaatattggggggatatggatttggccctggctgcccggcattgggattccacatgtttaggtgtgtcctccagccccatcacctttccaccgccgcctgggcttgctgcgttctccttcgcccc

SEQ ID NO: 127018 - DNA, 797 bp, Homo Sapiens
  misc_feature (19)..(19): n is a, c, g, or t
ataggctcccccctggccnttaatttcattaaggttattaggttctaaccccaaggcaggcaacaaagatggggccagggcccatgggcaatccctctttccccattttccccctagcccacttcaggggctcaaccagccaggggtgaggtttcaggtggaggtaggggggtggggagcacaaggggctacatttcccccagtacaacatggcatctgaagcttgatgggagagcagaactggtgagacttgaggggaagggtccagggcctgtattcagtcagaatcactgctggaagaggaggaggaagaggaggaatgcttgccatgcttgtggtacttgtggtgcttttggtgcttgtgcatctttttatgagctttcttcattttcttctgcatcttcttgtctactatcactgctggtccaaccatgccaggagccaagggattcacaggagggattccaggggcaggcggtgggtatggaggagggtagggacccaacggttggcatcctggataccctggctgtggcacaggatgagggggcccacctggggggaaagctggattgccatggggagctcctgggggaggaggacaggggcctgggggaaagggtggattaataggtggtgggtgggcaggattggaacctccagggcacccaatattggggggatatggatttggccctggctgcccggcattgggattccacatgtttaggtgtgtcctccagcctttccaccgccgcctgggcttgctgcgttctccttcgcagtctcggctctcc

SEQ ID NO: 127019 - DNA, 858 bp, Homo Sapiens
ttcccccctttttttacccgagtttctcccaaaccgttgtttttgccccccattttagtgtgcgatccattttcacaaaaaaaatgcgctgcccctggcttaatttccattaggctaatatggttctaaacccaaggccgccaaacaaagatgggccagggccacgggcaatccctttttccccatttccccctaacccattcaggggctcaacagcagggtgaggctcaggtgcaggtaggggggtggggagcacaagggctacattccccccagtacaacatggcatctgaagcttgatgggagagcaggacttgtgagacttgagggaagggtccagggcctgtattcagtcagaatccctgctggaagaggaggaggaagaggaggaatgcttgccatgcttgtggtacttgtggtgcttttggtgcttgtgcatctttttatgagctttcttcattttcttctgcatcttcttgtctactatcactgctggtccaaccatgccaggagccaagggattcacaggagggattccaggggcaggcggtgggtatggaggagggtagggacccaacggttggcatcctggataccctggctgtggcacaggatgagggggcccacctggggggaaagctggattgccatggggagctcctgggggaggaggacaggggcctgggggaaagggtggattaataggtggtgggtgggcaggattggaacctccagggcacccaatattggggggatatggatttggccctggctgcccggcattgggattccacatgtttaggtgtgtcctccagcctttccaccgccgcctgggcttgctgcgttctccttcgcccc

SEQ ID NO: 127020 - DNA, 742 bp, Homo Sapiens
aaggtcacagctcctgtcaccctgtcaggcagccctttccatgcccctgttcaggcctggggaggtaaaggctcaggctgttagtagccgcagagagccacactcaccttgtcaggagactcttctcaaactgtccttatgtgagtgcactgccatttcttgcagggaccctgactgacacaggggctactactgacactttacagggatggttctcccccgtgcagggccgctgtgcccactgcaggacatgcagcatccttcgccccactccactcactaaaggccagcgcaccccaggccccatagtattgctggttatggatttattgactttatgttccaaattcagctttttcagttggctgttttttgaaaggggataagctttgtcagtagagggcaccaaacaggcattataggaggaaaggcgcctccttcgtggttcttgttggttgtgcttctgcctctggacgccgcagtgcatgtggcttccccagcacccagctcctgaagcaccaggcggtcagcagctgcccttggcaccctccagccctcagaagttgcgtaggagacacagcgcctccactgaggcacctctctgggaataacgttccccagcaccccaaatggatttccagtcaattcagaagcattttaccagtgaagccctcattattccagttcactgttaaagccagtaattctctatattaactttcctgttctgcttagctccgga

SEQ ID NO: 127021 - DNA, 571 bp, Homo Sapiens
ggcggagttaacgaaaggatataggagaagggctcgtcgtggttctgttggtgtgcttctgctctggacgccgcagtgcatgtggcttccccagcacccagctcctgaagcaccaggcggtcagcagctgcccttggcaccctctcggccctcagaagttgcgtacggagacacatgcgcctccactgtaggcacctcgtctagggaattaacgttccccatgcaccccagaatggatttccacgtcagttcacgaagcatttgaccagatgaagccctcattattccagttcactgttaaagccagtaaattctctatattaaactttccctgttcggtttatactccggagtatacaaccgaacaggggtggccaagctgctgtgggccgccgccgtgcagaaccgctggaactcacgcttggggcgacggctacagttggattttgcccctgcaggcaggttcggtgtcgatactggcgttgatagcgctgctgccgtttgacgtggcgaatatgggcttgtttctcggcctgatcgccgtgttgtcgtagttcgcagccacccagga

SEQ ID NO: 127022 - DNA, 484 bp, Homo Sapiens
  misc_feature (169)..(187): n is a, c, g, or t
tgccatgagccaagcatgttttggagccaggatgtggcagtagacagggcagagagtagcatctctgctgcatggtgggtagagcccttgttggtccctgactggcttccagggttaggaagacacatgtgactcgtctccaccagagacggcaaagtgatgcctggtnnnnnnnnnnnnnnnnnnncttcctggcgtctgtctgctcagcctaaagggggcagagggttgggagatgtgaccgaataaacagggttctgattgacgtgagtcactgtgtttcccctgtcaagacgccctgcatgccaatggaggcctgtgtcgccgagagtcgcagggctctgtgtcctctgcggggagcctggacctgtcggaggcctgcaggactttggcacccgagaaggacaaggccaccaagcactgctgcattcatctcccggatgggacatcctgcgtggtggctgtcaaggcgggcttctccatc

SEQ ID NO: 127023 - DNA, 524 bp, Homo Sapiens
cagagtccggacaggatgtctttgatggagaagcccgccttgacagccaccacgcaggatgtcccatccgggagatgaatgcagcagtgcttggtggccttgtccttctcgggtgccaaagtcctgcaggcctccgacaggtccaggctccccgcagaggacacagagccctgcgactctcggcgacacaggcctccattggcatgcagggcgtcgtctgcgtggtccccgtgctccctctttttctgggacctcccggtgctcctggtccgcgaccacgagaaaaacgcgcctttccgcttcttctcgctgtcctcatcccccagctcttcattcagggatcggccggattttgattttccacttaacttttttggcgtggacacactggagtggtctgaaccgaggctgtgcttggaagcctggctgctggggacctgcttcgagtccgggagtgcactcccctccacttccgccagatggcatttctggtacagcggggacttccagaagcgagtgtagcc

SEQ ID NO: 127024 - DNA, 558 bp, Homo Sapiens
gacgtttccattggaacgatgtgcatggggagctgtgtatagagaggacagggtgctggaacccagagccctgggagggagtggtcctcacagggcagcttcagtgggccccgcaggacagccctgcttctgggtggagaagcccagatgtgccttctgagcacgatggcccttgaggcccagagctgagagaatgatgaccgctctctcgtgttaattcacaaaacccagcacctcaggcagtgtggactgagcctgagatgtgtgcacctggggagctgcaggtgggaccgtggcagggcgccagcctccccagcacgtgcggcctgggccagctgggctgctctgggaggtgccccgcacccctgtgacgctggttccctcacggctgcttgtctcgctgctccccagtcggaggcctgcaggactttggcacccgagaaggacaaggccaccaagcactgctgcattcatctcccggatgggacatcctgcgtggtggctgtcaaggcgggcttctccatcaaagacatcctgtccggactctgtgagcggcat

SEQ ID NO: 127025 - DNA, 511 bp, Homo Sapiens
ttcttctctctttgaaagccggggatccctagcattttttccattttctccttttattttaatagaattagacttgcctagtgttctttcctctcccgtagccgagtggtttctggagctggaatttacagctgtgttctgtttcactggcacacctttctgtttatctgcggatgcctttcctctggaaggatccttctcctccaagacaacccgctgtccgtccagactcgatataggggcgccaaggtccaggggctccttctctccactcagcctcaccagcaggccactgaggtccaggccgtatctggccaccacgggccgcagcacctccgtgacgggcttggtgggcttggccttgagtcccactgaccggttaatcggaacaagatccagccgaaacaaggtgcgcttttctaggcgcaggtcccttgactccaagatgctactgtcttggtgcagcaccagaggcttgtccccgcccaccaggaagaggtccgcggccgca

SEQ ID NO: 127026 - DNA, 1027 bp, Homo Sapiens
  misc_feature (881)..(882): n is a, c, g, or t
  misc_feature (891)..(891): n is a, c, g, or t
  misc_feature (904)..(905): n is a, c, g, or t
  misc_feature (907)..(966): n is a, c, g, or t
  misc_feature (999)..(999): n is a, c, g, or t
agaaggacaaccttgagctgcttgaggtttatttataaagtacaaggtacacttactgggcctggcctttttaatttttactcttttgccttcctttccacccagccaagatttttgcttgctctcacctgggagttgagccgatttcacaaatctgctcttggctgtcatgagccaaataccagcacaaccttccctggacctgagggtggcttcatcttagaaggcccacaaggatcctgctgaagcaaatgactctgctccagtcagctcaggcctctatggagcaaagaaactggtgtccttcttggagcgctgccttcatctccttgaactgagccaactggcaggcctcctccagccccagccagcggtaggcttggtgctcatgggagaggcggatctccacgtcatagtccttcacctccgccagccagtaaatgactgttttaggcttgttcctggccacataattgagttcccttttgaacccctcaataatggtcagctggcctgcttctatgcctgcttcctcttgggtctccctcagggctgtttccaagtcatcctctcctggttccacatggcctttgggaggagtccagtgatgaatgccatctgatgcctgcagcagtaaaaactcaattgcattgttgtccactttgggaatgaggcatcttcggaagatgatcaagccacatgctctcaaggccatggtcttatcctaaggactttgtgtataactgcaggaccctggcaactaccctcagtcaatgtggcctctatcccaactcctccagggctgcctgtaaaacagggctggcatgtgtttgttgtgacactggagatcctcagaaagcaaacgcaccgaagcacctcgnntgcgattcntgggctcgagggnncnnnnnnnnnnnnnnnnnnnnnnnnnnnnnnnnnnnnnnnnnnnnnnnnnnnnnnnnnnnngtatcgctcacattccacacacatacgagcggnagcataagtgtaagctggggtgctatga

SEQ ID NO: 127027 - DNA, 1778 bp, Homo Sapiens
ttttttttgaattgctgaatttttaatctgtaacacaaaggttgccaaacattcccccaaaggagcagctctcagtggggtggcggtggatgcgaaacagctgaagacgcggggcagttggcctggcttccgttgcacgggctggcttgccgcgggagcggtggtgggtggggaggggtggggggactcgaggcaaccccccagagcggcctctgagcgcctaggaggaacctgaaggcgggaagggggaagatcgtcaggtcaaaggcgggagtctcagggcttatggggtggggaaggagggtctgggtggaaaggtacctcagggagcctaggaggctgtcagcgtgagcggggtgtttcggtacaaatggaggccttcagacctactgagtggggggctccgagggttggggcggtcctcaggatggaaggatggtgggtctcggtatagggagacctcttggtggagagggctgcggggagacttcagcagaggcgaaggtgagacctcagagtggaaggtgtctgttggagcagaggagaagctcaaaggcagaggggggcctcgggggtccctggccgccgccgggtgggggccgcgctcagggcggctttgcacttgttctcgcgccgccgtttcttgcgctctgagtgctcccgcgcctggcgctcccagagcccgggcccgcacacgcccaccacgcagcaggccagccgccggcccgcgttcccgttctccacgctggcctggttgccgccgcggcccaggtcgtcctcgccagcgtggacgaccacggcccggcccacgatggagtgcgggcccgcgagcgaggcggccaggccggcgcggtacctccagaggctgccgtcgcggaccgcgaagttgccgaagtcgcccgggtgctgcgggtgcggcacggccagcgggttgtagtggggcccggtggactcgcagccctggctcaggtccccgaactggtgcacgtggatggcgcggctggagctgttcggctcggtcgggaagccctccagggcgaagaaggcgtcgagcttggcgcggggcgcaagctgccggaagaggacgacgccggtcacccggggctgcgcggcgtccaacgtggccgacggctgcacctggcaggcggcgtggagcgcgccgtcgtcgtcccgccgctgcatgacctcctgccagatctccgtgaccttggcgtacatgtctcggatccactccgccgagtcagagttgggctccgccgagtcctcgcccgtccaggcgtccgaggcaccggctgccaggagcaggcaggaacacagtagcgccagcatggctggagtcgggcacctttccagctcctccaagagagctttctctcctgaaaagagagctgcacccagccagcccaggaacgcaggctgtccctcgtggaggtgccgtgctttaaagaggccttagtgcccgggatgggcacagtgttttgaagggaggtgggagctcttgctctcctggtcactgcagaatgacagagaaggtgaagctccatgcatgtgtgcgcgggtgtatgtgcgctcagggtctctgtttaagtatcagctaaagatgtgcttcctccgtgtctgtcatacactgagaccaacaggctacagtgtccctgattcttggaaaagcctggagaagctggggagatgcggttcacaatgcctcggtataggaggctgtgttgagctgacattcaaatggattctttaataataatgaaactggcgagtaaaaaaaa

SEQ ID NO: 127028 - DNA, 765 bp, Homo Sapiens
  misc_feature (661)..(713): n is a, c, g, or t
gattttatcttgtgtttattgggaaatggtggtgcccatctctgggccagtccagacagcttccccctaggaagtgagccaagttcccacggcgtgtcagagttaaaaacaaggacaagagacagcgtgagagacataagagagggggcacagagaaagacagaaaagcagagagagggacacacaggtcccctgcttcctcttctgtttgttcattaatcaggctgatgtcaggtggcacaaggggcattggacatcatttcatggctcaagatcattgtccctaagtctgttttcccaggctgtccccttaagagctgggctgccgcggccacaccctgcagtccatgtcaccctccagccattgctctcctgtgggtgtgcccggcagagcctccagttctgtgcctgccccctggaatgcccctaaagccctcccagccccttacccagccttcaaggccacacctgtgcccctccttcatgcagcccccagatgggatcaggaggcagggtgtgcctctctgtcccttaggggctccctggtcatctctgtgcatgtctagatgccactgagatggactggccttgatggccgggactctatgtcttagcatccagcatggctagctgaagtcagtggctgcagagtttgggaatnnnnnnnnnnnnnnnnnnnnnnnnnnnnnnnnnnnnnnnnnnnnnnnnnnnnncccgagggaggcccagacctggacaggagcttttggtgcctcttgtccctcc

SEQ ID NO: 127029 - DNA, 989 bp, Homo Sapiens
cagtaatagactcgtttatttctcagaatttagtttgctgcttgatattacctgcaaatgtgaggcaatcacacaatgtccttgaggctctaatcccagacttgtctgagcaccgtccacaggcagctcggcccatcagaggtctgaaacaaacctcctaacttgggccaggtattttggtttcaaatagtcacccagctcatccttagtgacccacacatgatggcccttattcccagcctgggaaaagtctccagttaatagcagtgctttgaagaagaacaccttggctccgaggttactctctgtccgcattgcctgggggaacttgaatgtgtagtgcccacagggtgcatttcctaggaacttggcttccatgttgttttctgagagtgtggccagggttcgttcagctgttcctcgaagggtctccccaggctgccactctgcctggggcagtatccaaacatcctggtctccaaacttctctctgactaacaggacaaggttcctgtctagcttcctgttcagggatgttcggtcattcttttcatcagcttctgttatgcgagctccaagtttgaactgtagaaatttctgctcccacatatcttccaaatcttgcgccagcaatatatcctgttcatcttcttcatcatgaaggtcagctttcttctttgccagtcgctggttttcatccagagcacgaagctcgtggtctgaatacaggcttctctctatctcaatctgctgcagtagagacgccatctcttcctgcaatggggtcaacggcttggagactacaggtggccgctgcaggcacaacgcgcccaacaagcgccatggggatccgttgcttgagggtgcggctgcaagagccaggctgcgagagcttagactgccggcccagagcctctcgaaccgccgccaaccccccgccacccctaacagcgtccgccttacgggcgccgccatctttcgttctcccc

SEQ ID NO: 127030 - DNA, 1297 bp, Homo Sapiens
  misc_feature (192)..(212): n is a, c, g, or t
  misc_feature (221)..(283): n is a, c, g, or t
acagtcagttttcaatatccagtttattatgttatactagattttggagctttttgcctccacactacacagcacaattataggtattcagtctctctgaaaatctcctttcccttagggtctctccaataaccaattcttcctccacgggtgagagttaattggtgctattgctcctagggataactacannnnnnnnnnnnnnnnnnnnngagatggtnnnnnnnnnnnnnnnnnnnnnnnnnnnnnnnnnnnnnnnnnnnnnnnnnnnnnnnnnnnnnnnaaatacaaggcagggctccaatggagactgtcgaaggaatacttcatagtactgcgccacttgactgtgtttctcagggatgtttttcagatgattagactgcacacagacaacgttcccatctctccaagttcccaggtagaaccccacagtctttggattgccatctggacctcggttcacagagaaggtggacttatttcggtaaccattgatgacaggagagggtataataggatggagaagacaagagagcctctcagatttgggtacagccgttgtcacactgactccattgagcatttggatgtaagactctagtctttgtaaaattttcttctgagctgcaaatttcaccttgagctgttcttcatagctcaacctccagagtggtgtcacaacatcagccagcctttcctgccaggaaccatctagtggtccaagatggcttggtttcttctgacttttttgtcctttctgacatttcgtggctatcacacgggtgaaatctcccttacatactgtgcccagaaagagctgtgaccatcctggtggatttctggcataccagggaagcagtcctggtttggagaagagacccaccatggagatgaagtatctgaggctgtgcagtgggactcttctcttaaggcctgacatccaaagaacacactgaaatccaccttccttcgtaaccaataaatcctcttacaaacctgaggcggcaaactaaaaggccagcggatggcctggtttgctgcggcggggaaacagtcacttcctggtgcgcaaggcgcctctactcccgccgcacgcgcagccaacccttggcaagcgcggcgggacacggggctcctcccagcgtcggcgaggcagcaggctccggcacctcgactcctctcggggagtacccctccctactttgctgggggaaccttctatggagaccttccttaaaagcactcatagccctgacacccgccgccttccttctctaagttctcctctcctccc

SEQ ID NO: 127031 - DNA, 1881 bp, Homo Sapiens
  misc_feature (222)..(248): n is a, c, g, or t
  misc_feature (250)..(250): n is a, c, g, or t
tcgcagcaagtgctgtgtttattttccaaacaattttattgaaatgtgccaagagtacatgggcagcacaaatgtatgaacaggaaaattaaaaatcacatgtacaataattttttaaaagtgaaggttaatcttgggagataacagttcccctctccctccccctgcagatttccagcgtttccattaaggttaagtaagcctctacaaacctagcatttnnnnnnnnnnnnnnnnnnnnnnnnnnnangggaatacaagatcttttgcaaataacaaaaacaaaaaatggcataaaggaaagagaaatgtcttcctgctcagatgggactcttcctaggcacctaattaggaggcgtgctgagcagtggagaaacacaacttcagagtgtaagggtatggaccatttgggtttttcatctggtaatggttcaggaagcccagagtctccagggcatcgctcttggattcccactccagcagtccagaggagctgcgctcacttttgcctgagaatactttcacagaagatggccgcttcactcccagctcatcgcagatctcaaagaagttctcctcggtcacctccagcggggcgttgaagaagtgcagcacgttgctggggtgctggatgcggttcttggctgcctgctctggggtggagaaccgattgttccgggattcactgaagtctttgtaactgcaagacccgtcttccaacccgtatgactgaccaggcatgatggctggctgcttggagacacagacattcagcttctgcccaaacatgaagttgttgttgaggtgggtaatggcccggtctacagcgtagccatcagccatctccaccatggcggcccccggcttgcttttcatgaatttcaccttctccacattgccatataagcagaagacattgaagactcggtcacagttcatcttagattgatccaagccatagaccatgagcacagggctgtcggcgtgagggccatactcaggtggggggggcccgtagccctcatcctggtactgggtgtcgtagcgacttgggcccccgacggtgaccccccactagggggaggccatccttctcccttcgtagtgaggtggggggggcccgtagccctcatcatggtaatggctgtggtacccaccgtgggccctccatattctgcggggtgatctcccaggagagggggctgcctctggcgtttgttggggttgctgccagggtcaccttgtccactgagattggggtttgtgtagtcccaagtatcctgatcattcttgaacacattcaagcgtgtaggctttgcgtattcgatcttcagagtgcaacagccagaatagatatcagccccattgagagaggccttggcccgctgggcactttgaactgagtcaaattccaccatcgcctgaactccattcttcctgaaaatgacaattctctggacagggccacaaggattacagatagtgtaaagaacatccgtggtgatcgaataaatggggttcaggatggtaaagagaagcacactgttcacgctccgggagtcatccgagtccccagggcgggagatcttctggctggtagagtagttgacaaaagctgggtgaccagcaatgtatatttggttgtcggctgcgtagttcactgcgttgcaagcccccaacacatcttcaaactccaccagtgcttgtctctttttaggcattaccaccacatagctgatgggtccaaactcctgcaaggcctccacaaggtctgcttccaccacaccgtcaatcaggcccctgatgtggacaactggggaggcaggggttttgtgcgggtccctcgtgccgagttctccacccaggcctcgctcctagccg

SEQ ID NO: 127032 - DNA, 889 bp, Homo Sapiens
ccaagttcaagaacatcccttttaatcacaaaccactcatccacaaatgtggctatggggtaagcagtctaggctgggaccctttccagaggtaagtcaaggtcacgtccctgcccccttcctagggtggcggtggcctccagccaggggggcttccaggttaataccagagcctcggctactctggactcctgtgagctcttcttggctggaagaaggggggcattgtgggcctgctctgtcccaaggctccagaagctgcccctacccaggcctgcctggcctcaccctgcagcctgggtgcacccgcgggcagcctgggccccgcctacacaatgccctcagtgcgcttgctctgccagaccaccagtgccgtcaccagcagggtcaccgtgatggggaccacgatgaaggggtagaggatgctgccgggcgggtcccgcacggccctgcctgagatggggcagctcctgaagtagcggccatgcactgccaggaagaacctgtccacctctgcattgggccagaagcagcccagcttctccgccatgtgccaggtgcagtcggccagctccctgtagctcctgatggtcctgccccagtcacaccacagcgtctccccgacggcctccatgtctacctggaactgggtgaggcagagctcccggaggagggcaccgtagttagcctcctggcaggcagtggtcatgaagaggtgatgggccaggagcagccagaggccgcgccgcgggaggcggcacagggcccgggccatggtgcacagcggtgccgagtcgagtccgctcgccacgcgccccgctgaggactgagcccgccgcggcgcgggcccggaggagacgcgccgggggcgggagcgggcgcgggagcg

SEQ ID NO: 127033 - DNA, 505 bp, Homo Sapiens
  misc_feature (365)..(366): n is a, c, g, or t
  misc_feature (407)..(407): n is a, c, g, or t
  misc_feature (414)..(414): n is a, c, g, or t
  misc_feature (425)..(425): n is a, c, g, or t
  misc_feature (440)..(440): n is a, c, g, or t
  misc_feature (449)..(449): n is a, c, g, or t
  misc_feature (476)..(476): n is a, c, g, or t
  misc_feature (486)..(486): n is a, c, g, or t
caagaacatcccttttaatcacaaaccactcatccacaaatgtggctatggggtaagcagtctaggctgggaccctttccagaggtaagtcaaggtcacgtccctgcccccttcctagggtggcggtggcctccagccaggggggcttccaggttaataccagagcctcggctactctggactcctgtgagctcttcttggctggaagaaggggggcattgtgggcctgctctgtcccaaggctccagaagctgcccctacccaggcctgcctggcctcaccctgcagcctgggtgcacccgcgggcagcctgggccccgctacacaatgccctcagtgcgcttgtctgcagaccacagtgccgnnacagcaggtcacgtgatgggacacgatgaagggtagagatntgcggcnggtcgacgccntgcttagatgggcantctgaatanggcatcatgcaagaaaactgtcacttnattgccaganagcaactttcgcaattcag

SEQ ID NO: 127034 - DNA, 1314 bp, Homo Sapiens
  misc_feature (47)..(47): n is a, c, g, or t
tgtgtgttctttggcattttatttcaaaattgcagcaaagacagagnaaaaaaaatcaacggcagcaccaggggtctggcctgagaacggagagatccggaatcggggccaaggtgtatccttgaccgcacgacaaggagtaatgggcggacctgaacccgcgacgaggggctgggggccaagatgcctgggtcggcccttacggctttgggagtgtcgcaaccacatgggggcgccagagacccagacgccgcccgctggccttttatttcgtattgcacttcaggtgagtcattggtagggaggcgagtgctggcgtgacgagatgctacgggtcggtggatctggagcacagcctgcagcttcacaccgggaacatccactcgtgggctctgattccgtactggatctccttcagctccttctggaagcggaggatcagctcaggcccattttccatggtgggaatgtggaggttcctgtctttgtacaggattcggtgcactgggcagacctggcaagcggtgcccgagccaaagacttcccgcacgcggccctcctccagggcccgcagcaactgcttcatggtgatcgtgcgctccaccacccggaactcaccccaggtctgagccatgtccagtagactctgtctgaccactccaggcaggataacaccattcagcgggggcgtcaccagctccagcaccccatcttcgtgggtccagtagacaaagatgttcatggttcccacctcggtgagctggtggtcgggcccatacagccagaggacctgttcacagccccgcttgagtgcctcctgttgcactaacacggtgggcccataattcccacctaacttgtagttgccgaccccgcccacccaggcccggatgaaggctgggtcggccaggagggagaccggggtcacggagcctccagggaagtaggcacccactgggcagagaatgacgaacaggagcgcgcgcgtgggctggctgacacccagcgagggctcgttcccaatgagcacaggccgcacatagaggctggtgccggcggcatcggggacccagtccttgtccacttcgatgagccggcggatgcactccagcaactccagcttgtcgaaactcggcaggcacaggcgcatggctgagcgcagcatccggtccatgttgagccaggggcggaagaggcgcacctgctggtctttgcctttgaacgccttcatgccctcaaacagctgccccagagcggctgcggccatgatccgtgcctcgtgccgattcacaacccagcctcgtacctagccta

SEQ ID NO: 127035 - DNA, 1337 bp, Homo Sapiens
tcttcgtatgtgagcctttgtgaattctcggtgtcgtgttggacacgcgttgtcgcgggaactccccgtgggttgggatccgagtggtcttctctcctcttcgtgacgcgaggtttctgtgcgcccatttccagtggtggaaattgggagtttcctttcctggatcccagatttggtgcaatgggcacgacctggcacaagcggtgtgcccggacctaagacttccgcaagcggcacttcctccagggccccgcagcaactggctttcatggtgattcgtgcgttccaccaccggaactcacccccaggtctgagccatgtccagtagactctgtctgaccactcccaggcaggataacaccattcagcggggcgtcaccagctccagcaccccatcttcgtgggtcccagtagacaaagatgttcatggggttccccacctcggtgagctggtggtcgggcccatacagccagaggacctgttcacagccccgcttgagtgcctcctgttgcactaacacggtgggcccataattcccacctaacttgtagttgccgaccccgcccacccaggcccggatgaaggctgggtcggccaggagggagaccggggtcacggagcctccagggaagtaggcacccactgggcagagaatgacgaacaggagcgcgcgcgtgggctggctgacacccagcgagggctcgttcccaatgagcacaggccgcacatagaggctggtgccggcggcatcggggacccagtccttgtccacttcgatgagccggcggatgcactccagcaactccagcttgtcgaaactcggcaggcacaggcgcatggctgagcgcagcatccggtccatgttgagccaggggcggaagaggcgcacctgctggtctttgcctttgaacgccttcatgccctcaaacagctgcagggagtagtggaggctggaggaggctgggtgcagcgtgaggttctggaagggctggattcggggctggccccagcccttgtcattccattccaccatcagcatgtggtcggtaaatgtcttcccaaacaccaggggctcgccggggccaggcttcttatgaggcttctgtgtcatttccagctgcaggtctgcagccttgaaactggaggaggcatatcttctgggaccacacagaagccaagggacagagagaagctttcgtgcccagatctgccccagagcggctgcggccatgatccgtgcggccctcgtgccgaattcgccacccagcctcgctaccttagaaccgttatagttctgcctcgtttataacctgtgtttgacactgtagtcctagtc

SEQ ID NO: 127036 - DNA, 655 bp, Homo Sapiens
  misc_feature (446)..(504): n is a, c, g, or t
ggcattgcacccgtatgtcctaagctcgcttggcccaggactggcgggacgctgggggagggtttgaatggtgctgctggggacctggaggggccccaaggttggaggtgtgtagtcctggtgtcccaggattgtgagtggggtccaggtgacctgctggtgccatctggcttgggaggcaggcggtagacttctctgaagtcaggaggctgctgggaatgtcagactggtaggagatggggggtggtcccggggtgaactcagcaagggttggggtgctgggcgtggtgggtgggaaggactcagggaaagttccaggccccaggaagctggaacccacaaacaacagcgggttttgcagaagtcgctatttggaaaagggcatttcttctcattgctgccaagggaattggccttgggacattccctggccagggtagtcgctnnnnnnnnnnnnnnnnnnnnnnnnnnnnnnnnnnnnnnnnnnnnnnnnnnnnnnnnnnnggcgatcatctccatcacgctgggcatgagcacgtgggcggggctcacggtgcggcacgcttcagtgctggcccatccggctcctccttgatgtgcatgtcaggcttcacgggcactggcttccagctgcacgtggggtcgatggtgatct

SEQ ID NO: 127037 - DNA, 1085 bp, Homo Sapiens
tcgtggggcttttcggcgttctgcgtcccaccctgtgtctgttgccgcagttgcccagtgtgtgtgccactgccctcctggtagcattcgtcgtctttgcaacacgtgcaagtgcccaggtggggcactacaacggtccgggacccagtcattggtcctccgcaggcatgggcgcctgggcctgtcacttaggcccgtgcccgagtgggaacttgtgccagctctttcgcggccactcaggcacagcgctgtgcgttgctgctcgctgccgccgtttcctgcactgtcggttccctcagtccagagagggccggaaagagctctcctgctgcggctggaagccctcagatgggccccagactggaggaaatggtgacccggacccccaccaagctggacaggcagatggtaggcaggacacacctctgcaatctctgggaagtgacaagcagaggcctcccagggacaagagctgagaaggatgagcccctggctgggctggggctgccaaacaactgtctcagtgccccagggcaagcccagataaggtgacatagtggcaaatgtctctcctgggcaagcctgggatgcttcacaaaacagctcttcagctgaagccaacttggaaaattccagggaaaaggaaatttactatggggcgggaatagccgagccttggcttgaaacatccagagctcaacctggggccccgaaagccacttgaaggtcgacctggcccccaggtcctgcacaagctttgcaggcacagcccaagctttaggcaggtcgctggcttacgaggagaaaatagtccctgggagcacaaaggagggactcggccaggcccaccaagagggagtcctttaatagagatcggcacagacaggagacacaacagcccaggcgccctgctcgcacaggctggggtcctgagccaacagatgcagtggcttcctcctcccccacctgggtgtgggcccatggggtggagacagagaggtggctttaaaaaccacagctgtactaatcctcgtgccgaattcgccacccaggcctcgctaccttaggaccgttatagttactgg

SEQ ID NO: 127038 - DNA, 707 bp, Homo Sapiens
gggtatgaattccacacatatttgcttctgagctttataaaaatggcatcatactgtatgaactgtcttgctttttcatcccacgttgtttctgagaggtgtttgtgatggagcacagggccacggtgcccatgcattcctcaatcatttctccagtcttctgaggatgggcttctgggttgtttgcagccttttgcttgtcccagtctcctagtttctccactgcacccgggagcatcacgtttgcaacaggcagggcaggtggtgcatcagatgtccaggacacagtcatttgacacccaagaaaggagggcctggggcctgcatcaggccatggctgagtgggactttgccaggctgtctccgcacccagcgacaggactgtgcgtgctgctgcttcttttgtttcctccacttctgttccctcatccagagagggcggaagagctggaaacagaggctttgtcagggaataaggaagcccacctgtgtggtcccaaatgtcgcaggggcaacgctcacaccagatacctccctcctcctcctccctgcagcctctgggctcccacagacagatgccctcctctagtgcctccaggggcaggccttggccgccagcctgaggatgcccagcgctcccctcctccctcgtgccgaattcgccacccaggcctcgctaccttaagaccgttgagtagttactgccg

SEQ ID NO: 127039 - DNA, 1986 bp, Homo Sapiens
  misc_feature (205)..(268): n is a, c, g, or t
  misc_feature (1152)..(1152): n is a, c, g, or t
  misc_feature (1204)..(1204): n is a, c, g, or t
  misc_feature (1757)..(1757): n is a, c, g, or t
  misc_feature (1890)..(1922): n is a, c, g, or t
ttctcatacggtcctaagtagcgaggcctgggtggcgatttcggacacgagggaggagatcaccatcgaccccacgtgcagctggaagccagtgcccgtgaagcctgacatgcacatcaaggaggagccggatgggccagcactgaagcgctgccgcaccgtgagccccgcccacgtgctcatgcccagcgtgatggagatgatnnnnnnnnnnnnnnnnnnnnnnnnnnnnnnnnnnnnnnnnnnnnnnnnnnnnnnnnnnnnnnnnagcgactaccctggccagggttccagcttcctggggcctggaactttccctgagtccttcccacccaccacgcccagcaccccaacccttgctgagttcaccccgggaccaccccccatctcctaccagtctgacattcccagcagcctcctgacttcagagaagtctaccgcctgcctcccaagccagatggcaccagcaggtcacctggaccccactcacaatcctgggacaccaggactacacacctccaaccttggggcccctccaggtccccagctgcaccattcaaaccctcccccagcgtcccggcagtccttgggccaagcgagcttaggacctacgggtgaactggccttcagtcctgccacaggcgtgatggggccccccagcatgtttggagccggggaggccccagaaccagctctggacctgctcccggaactgaccaaccctgatgagctactgtcctactttgggcccacccgacctccctacgaacaacaatgacgacctgctttctctgttgtgagaacaactgatcctgtgtttaccccaagcccggcggggacacgctcacagatgtcaccacagcgctgcccttcatgcccagccccatgggacacccggtggtctttcccaaacctcccccaaaacacacctggagccagagccttctgccgccagccctggccctgaattggaagcagccctgtgctcgatgggaggggctcccaggccggcagcccttgccacctccctctgccaagcctgctgctgcagaacggtttttgctgaggtgcccctgcccagccctgtccagccttgtccacacacacatctcacgcccctggtctcacagcctcacaccttgtccttccacnccctgcctgcccccacccagcctgcttcttgtccagcattgatccttctgtnttcaacaactcctccactgggcagagctgggcatctggcagggctggctctgtcccctgggcctttggctccagtggcccctgtgcccagcagtccagctcttggaacctcgctgaatggcagcctcttgggggcctggagctctggcagcccagccgtgtgtggtgtcaggttcctctccccaccccagcttcaagcagaggcctcggggtgggggagctacaaagcacaacaatgtacatagtgtagaaacactaacagctgggagaggggagccagctgtccagccagcatgttcctgttgtacagcccggtctccctgcgcgctctgctccttcccatgtgcagacagatcagggaggaacctccaatgggtgggggacagtgagcttcggcctggccaaggtgggtgggtgggctctcagattcagctctgtgtaaagattctctagcgggctgcgctcccaagttcccctgctctgtgaaagtgaagaattagtacagctgtgttttttaaagccacctctctgtctccaccccatgggcccacacnccaggtgggggaggaggaagccactgcatctgttggctcagggccccagcctgtgcgagcagggcgcctgggctgttgtgtctcctgtctgtgccgatctctattaaaggactccctcttggtgggcctggcnnnnnnnnnnnnnnnnnnnnnnnnnnnnnnnnngaccgcgtatgcggccgcaagcttattccctttagtgagggtaattttagcttggcactgcccg

SEQ ID NO: 127040 - DNA, 427 bp, Homo Sapiens
ccacccttccttccccgtttggattaaggggctcctggctggaacacctcacaggactggccccatctggggcccccctctgggacccacctcacacgcgtggtgcgtattgtttgtggctgctcccattcctataacctccgagaccttcactcctaggaatgtcccaaggccaattcccttggcagcaatgagaagaaatgcccttttccaaatagcgacttctgcaaaacccgctgttgtttgtgggtgagcactgcaagtcccacccatgccacagccagcctccctcctggctcctctgccagcggtggccttccccagccctcacccaggccccgactctcctctcacaggttccagcttcctggggcctggaactttccctgagtccttcccacgcataaatggggtaccgagctgatta

SEQ ID NO: 127041 - DNA, 1266 bp, Homo Sapiens
caaaggtacttaagaacaagttcaggtcgaagaagtactttgccaaacaccctcgacttggttacctgcctgtccagacagttcttgaaggtgacaacttagagaccccctcacaatctcctcaactgtttcatgatgacacccattcaagaatagaacaatatgccacacgactggcccagatggaaaggactaatgggtcttttctcactgatagcagctccaccacaggaagtgtggaagacgagcacgccctcatccagcagtattgccaaacactcggaggagagtccccagtgagccagccgcagagcccagctcagatcctgaagtcagtagagagggaagaacgtggagaactggagaggatcattgctgacctggaggaagaacaaagaaatctacaggtggagtatgagcagctgaaggaccagcacctccgaagggggctccctgtcggttcaccgccagagtcgattatatctccccatcacacgtctgaggattcagaacttatagcagaagcaaaactcctcaggcagcacaaaggtcggctggaggttaggatgcagattttagaagatcacaataaacagctggagtttcagctccaccgcctccgacagttgttggagcagcctgaatttgattcccgaatcaatggtgtttccccatgggcttttcctcagcattttgcactgagctactcgcttgatccagatgcctccgggccacagttccacccggcagcgggagaggacctgttggccccaccgcacgacaccagcacggatttcacggaggtcatggagcagattcacagcacgtttccatcttgctgcccaaatgttcccagcaggccacaggcaatgtgaagtattcatccggccaaccaatgtttcctgacgtacagtgttgcccttttcagcaaatgccaattccaagttccattaaatcagaagctccatggctccttggcccacgatgttgagtgctgactgtgtgttctactgaaagagtaaaacactgactatccaaagagaaatggatattttgtttttataataaccatatattattgttttcttcttccctttctatgcaagtgtaaattaatgaacagagaggtatttggaaatggtaatacatttgtcacgggtttgtataatgtatacagcattgggaaagtgggtgggggctttctaatatgataccgtctttttaataactatgacaaagcttacataaggattaggaggccccttt

SEQ ID NO: 127042 - DNA, 1872 bp, Homo Sapiens
  misc_feature (76)..(85): n is a, c, g, or t
  misc_feature (769)..(769): n is a, c, g, or t
  misc_feature (1085)..(1085): n is a, c, g, or t
  misc_feature (1155)..(1155): n is a, c, g, or t
agaaagcccttttgcaaaccatacaagatataatagagatctcaccaaagacgacatcctagagatggagaggagnnnnnnnnnncttaagtcccataaagaaggcagaaacatgtttttggttgatcaagatgagtttgggccaaatataaggaggctgcttcactggagggaatcacaaagccatctggggcaggaatgttgatggtgaagtgacttccctgctaaagctcgcttgctgggatccggatgcctctgcagagacaaaggtggttcagagttcatggggaaaagaggcagggtttgtggctgagaagcggtgccaatggggagagtggcagtgtccagagaaagccatcaatagtcagtggatccttgtgatccaatattcagtggacagagggttagaggggctgtgttttttcctccatcattgaaaccaggactgaagaagggccgcagaggtcctgtaaaggcacattcagagaaggagtagatgagggagccatggtcagtgatgttgtagaaggagaccatgccagcctcatagtccaggaaaatcccaacttggcatggaggcacctgaaggtggaggggagtctgggggtaggtgccagcctcatatttttgtttgttccacaaccaaattgtccagaagccactcttgggactaagcacaaagtgccccttcctgcgcacagagtctctgcagacacccaggtcccaggcctcctttcctgtcacatctacttcccagtaatgttttccnagagtggaagtgttgggcacccaggaccataggataactatcaaatctctcttcatttcacaggtatgctctgctgggtgtctccaagcgtcacttgtctccgatcttctgaaagtatcagccacggattggctgtgtctggatccagagtgatgtggactgcacatgtcctcagcatcttcttcagccctgggcacatggcacacactcctgagttctggagaggtaatatccaggtccttcaggttccaggactcactcctttccaggacaattatcacctcctgcagcagttccagtgctgagctgtggcacnttcgatctagctctgagatgagctcctgtagggcctggctctgctgggccagcttggcctctttctcccncaggattctcagctgctccctctcatccttctccagctcctgcagctgcctctgttcttcttcaaccaggaagtttttttgctgcacaaactctgcgtgaatcctagatttctgtgtttccactgttttcttccagtctgctctctttattgcaatttccacttccaacttctcagccaactcctgctttcttctcagttcccctaatgccacctggagcttctcctggtactcttgtgcagcctcctcaagagggaccatggcgtggtcacggtgtttccgagactgggcacatacccagcaaagggccttcccatctttctcacagaacaggtgaagtctctctccatgcactgcacaccgttccccctgtgtgccctctctggcctcctggctgatttctttaaggttgttcaccatgttggctagctgtcgattgggccggagattcttgagcagaaagcgctgccggcacacaggacagacgctgcccccacctttcccaacctgagagatgcattcctggcagaagctgtggccacactcgatgctcacaggctccacgaaggggtccaggcagatagggcatgtgacctcctcccacatcattgtcaagcgtgctgctgaagccattgtcaagtgtgccgttaaacagcagtgtggagacctttagggggtttggctttacaatcccgtatctccggggcgtaccgcctg

SEQ ID NO: 127043 - DNA, 2538 bp, Homo Sapiens
  misc_feature (1416)..(1416): n is a, c, g, or t
tttctcattttagaatgttctttattctgacagttgttggacaaatataaggcatgttcacaagtatctgaagttatgtacaaaacacactcattcaacggatgttcctcttctccttttgtacttgctgctgcaaactgatcctcatgcacgttaacacccatagcgctcaattcttatggatatgcagacagtgttttggggaccaccgtggagaatctgtttcaaactaaggcgtgagcttctaagaactaagtcactaagacatcagaactcacagtgaacaaaggcagaggaaggtgaccaaatcagctcataaactcatgactctaagtttccagtggaacaaagaacacattgaaaaacattttttgatccttcatgttggagagaaatggaatgtgaccagaattcatggttctatatttaccactgtctaaaagtcacaaaacaatatctaattttttcatggtttctaatgcagttacagttttgttcttaggtcacagtacaagactgcatgcatactttacacaaatatcaaacacagaacgattgtaacacagatacctcagggttgtctaaagacacagcttctctttttgtggtggggtggggaaggagaatggtggtggccatttccacacacagcctgttgtgtgctcagcacggctggatgcggatcccaagcactcgctgactgactcacagaagaggacagaagctgctaaggaaggcagcggagttcaaagagcaggctccaaccgggggctgggatgacggacacacagcctcgattccagggggaaaaagtcttagtcgatactaattaaaaagtgttaatgatttttgaaaatcagattacatctataaaagatgaaaagcaaacacttaaaacaatctaacgggggaacataaaataataaaaaatcaaatgcagatgggatttcacaaagaggagatttgaatcttttggtctaaatcagccaatattttaacattaactataaattattaaaatatagtttgcttatgcccatccttaaaatgcagaatctttgaggaaaaatataggcatatcaggaatacagactcttgtaaaaaatttaaaaagtcagtatcatctctcttgtggagctaccagaacaggtttttcaaacagaaaaggggaacaacgtggggaacaacgtggggcgcttggctatgttaagaattcttatcactagaatactgcttcgagacgttcatagtactttccaaaagaagccacccacctcaaagaggccctgcgcagcccccagtgacccatgagtgtggtagccgtcattttattagccactgttggccatcatcaaagtattcactcagagtggggaaattacttaatatcagcgatattaacgatttccatgtatntagctttgtgacacacaatgcacaagggtcttcaaatgtttgttttttacaccagtggtagaaaattgtcattcttcggattcaacacactggtggatgacactttagtgaagtgtgactacctagaagagcaggaaggcagctcctgattctgactgggccagcctcttccagaaggtgactcttctgtcaggagatcacgaccctggcaggccgggcaagcgctctgccctttaagccactgcttaaagcaccctttgtgatacttgtgcccacatttgagcacacgcacgttttttgatttgaacacctcgtggcatatttcacaggaacttgcacccagtgcaatcctcacagggacatcttctgctttctgcccccttggttttgggtgatggttcaacaaccaccgagggtgagccctgggaggacctggtcacgggggtggcagaagctgggctcataagtcctcttgtcctttcctgggtttggctttttcgtttttctgttcatctagaatggtgttctgtcactctttggacaatgttcatcgaatactcaatcctgagagtgagttcttgtttttgcttcgcactttgtttaataaaaccagcaagctcagtgctgttgtaacatgggaataccactgacaggtgctcaataatactattgaacggcttttttggagactggcttgaacgcgcagcacgtcctggaggaacaggctgcttccgatcagccacagggcttcgttctgacagagctgcctggccagcccgttttggccctgtcagctgagtggcttcaggctgaccagggggtggcccctggcaacagcgcagaaggagcctccgctggggaatcaccagcagagaacacactaggatccctgtgaagtgctgcgtggtttccagtcacgtcgcttgcagaagtcacaagcccttggccatcgtcgcctgaagactcagggagtaactcgggatgaaccgtgttacaggcaggaaatgaaagctcagaaatctgcactttagaaagttcactgagccgagaaccatttttaattcctcgtgccgaattcgccacccaggcctcgctaccttagaaccgttatgagtgactgcc

SEQ ID NO: 127044 - DNA, 913 bp, Homo Sapiens
tgttcatctagaatgtgttctgtcactctttggacaatttcatcaatactcaatcctgagagtgagttcttgtttttgcttcgcacttttttaataaaaccagcaagctcagtgctgttgtaacatgggaataccactgacaggtgctcaataatactattgaacggcttttttggagactggcttgaacgcgcagcacgtcctggaggaacaggctgcttccgatcagccacagggcttcgttctgacagagctgcctggccagcccgttttggccctgtcagctgagtggcttcaggctgaccagggggtggccctggcaacagcgcagaaggagcctcccctggggaatcaccagcagagaacacactaggatccctgtgaagtgctgcgtggtttccagtcacgtcgcttgcagaagtcacaagcccttggccatcgtggcctgaagactcagggagtaactcgggatgaaccgtgttacaggcaggaaatgaaagctcagaaatctgcactttagaaagttcactgagccgagaaccatttttaattgccttaatttgttcttcaaactgagattttgctttctcaatttcttttgtaacattagaaagaaacaattcccatgaacgtatatcagactccatgtcaggatatgctgcaggatcacggctaatcagccccagcttcttcagaaaggcttctgcttgtgactccatgatctgtagcttatacacttcactctccttccagttttcaagtacggatacctctgcagccacagctctctgatgactctcttcataatcctctttccctttctttatatactcttctattttcattttctcatttgtaagtgtgttgctgatttccctcgtgccgaattcgccacccagcctcgtacctagcc

SEQ ID NO: 127045 - DNA, 689 bp, Homo Sapiens
tcatcttgctatctttatttctttatttgcactgggaaataacatctttgtctactatttctagcatctgagatccaggtcagttgtgattaatttttctctgtattatgcaatgtattttcctgcttttcatgcctctctactggatgctagacattgtacattttaccttcttgggcactgaatatttttgtagtcccagaggtacttttgagctttgtcctaggatgcagtgtgatcctttcaggtcctgctgtatagctgtgtcaggtggcagtgcccatctagggtttctcacttgtgttttctacccagtgccccataaatcatgaggttttccagctagggtggtgggaacaggccctaccctaggtcctgtgtcagcaccactgttccttctaatcttctcacatggctctttctctggcctgaggtggttccttacacacatgcgctgatcagtagggctgtgctgcctagttgagggagctccctctggcccccgacttagatctgtgtgtctctctccagtactgtgaccgcgagttccggccaccttagtctccctggatccctggcattgttttcctactgcagggaggctggcaggctccacctgggttccccccgcatgcacactgcagctgggaacctcctcggagcatgagctggacaatcacagggctccc

SEQ ID NO: 127046 - DNA, 555 bp, Homo Sapiens
gtgggagtggcagggtcccccaaagcacgcttggagttgccattttggtccgagtcccaggcgcctgctggagagcctctctgaagtcctttagagtagacaacagtgggcagaggagctgcatctagatggctgtgagaggcaggaggggttcctgggggctcagcgggctctgagctgcacacctgcagggccccaggcaggacctccctagtagtagcatccacagctacagggcaagtgaagcaggagggggcagagctgaccttacttgtctgaagggctcgaagccagcacctccgggcatggccccggtcagctgtggtctctgcccctcctcggagggccagctgctcattgtcccggaccacagaggctgctgtcagccgatggagtgcttggtcccaagcagcttctcttacaggaggtgagggaggctgtgagccatctccaggtccccacagtgtctccagcccaacacccaccctcgtgccagattaacacgcaggcctcggacctacgctgtcttgtaggtgtgagtgtgggtctattgcg

SEQ ID NO: 127047 - DNA, 842 bp, Homo Sapiens
  misc_feature (44)..(77): n is a, c, g, or t
aaactagctagtacgaggctgggtgttgaatcggccgaggctcnnnnnnnnnnnnnnnnnnnnnnnnnnnnnnnnnntcatgaagagagagaacatttccaagttttattagtgcagaagcaggtggaggaaaatgtgccagctaatgcttcctctgggtgttgtccagagtgctgaatttctgggcagccagggggctcttgctctgctatgggttgaagattcagcctgatcacttcttgtcaaagttggggagtctgagctggttctgggcctagcaaggcaatctactctgttaaagtcgatagagggagaagctggggagaacactgcaattttttctatgagccctctgtagagggtgggtggtgggggctccacagactgctccttggttccacaggccatgcccggaggtgctggcttcgagcccttcagacaagtaaggtcagctctgccccctcctgcttcacttgccctgtagctgtggatgctactactagggaggtcctgcctggggccctgcaggtgtgcagctcagagcccgctgagcccccaggaacccctcctgcctctcacagccatctagatgcagctcctctgcccactgttgtctactctaaaggacttcagagaggctctccagcaggcgcctgggactcggaccaaaatggcaactccaagcgtgctttgggggaccctgccactcccacggaaggtcctcgccgccacctccccgtctccctgtcggctcagcatgggccgccgtcacaaactctgttagcctgaccgggcaggccacaacagtgaaggcagcgacttgaatactgcccttggtgggc

SEQ ID NO: 127048 - DNA, 953 bp, Homo Sapiens
ttttggtttcatttttttcctttaatttggatgtacaatgtttgcagcagttaaaaaattaaatatacatctctcgtcagtccttccctttgctctcagaagcattcaggtctgggtggggctccgggactcgcccatcacagccctgctggctccaggggagctcaagctcagctgacagtccctctgaccacggtgcaaagcagtgagacctggacaaggaggccccacttgggtcagagcccaccctccgtaggcaggtccacgttggccacgatcctccaaggctggcagttaccacccagattgcagcgggagactctgctcttagaaacaactgaggggaaggcgttcctttgactgcaccagagcgtgacaggcacatgggggaagagcggcccctgaaccttccaggttgccttcagttgtcatgcggcattctgagcagctccctccttcccaggaggcccaggcccggcaagcgagtgtcctcgtctgagccatcctgagctctccaaggtccctcagcagctctcaagatcttccttcttctcactcctacacgtgacccctctggaggacagctccaagtctaccctggccagcagctgtggtcccgggtcctccccacagagggaggaagcgggggagggacaaagcccgatgaggatgtctgctgggaaggatgctcacaggtagcaagagaagcctgactccacccaccagacacacagaactaacctcactccaccccgcaacgggaggaagttccacctgccaggcggccacacaccgagttattgctgtctactatccgtcccgagctccacgtggggctcatctcagctccaagaggaggagctgttcattggctccgagggctctgaaatgaccccctccatgaagatgggggcgaggggtgtcctttagggcacagggccttctcagacgct

SEQ ID NO: 127049 - DNA, 1248 bp, Homo Sapiens
cgtgccaggcccgaagccgaggcggggccgggatgcggcgctgaggcccagcatggcctggccctgggccccaccttccctgctgcacctggctcgtctgggcgaaccggcatcgcgaactggaggccgcactgcacagccaccagcacgacattgaacaggaggacccccgcgggcggaccccactggagctggccgtgtctctgggaaacctggagtctgtgagagtgctccttcgacacaatgccaacgtgggcaaagagaaccgccagggctgggcagcctgtgtgcccgcagtcctgcaggaggcagtcagcactggagaccccgagatggtgcagctggtgctccagtatcgggactaccagagggccacgcagaggctggcgggcattccggaactgctcaacaaacttcgccaggcccccgatttctacgttgagatgaagtgggagttcaccagctgggtgccccttgtgtctaagatgtgcccaagcgatgtgtaccgcgtgtggaagcggggttgagagcctgcgagtagacaccagtctcctgggcttcgaggcacatgacctggcagcggggccggaggagcttcatcttcaagggccaggaggcaggagccctggtgatggaagtggaccatgaccggcaggtggtgcatgtggagacactggggctcactctgcaggagcccgaaacactgctggccgccatgcggcccagcgaggagcatgtggccagtcgcctcacctctcctatcgtctccacccacctggacactcgtaatgtggcctttgagaggtcggtcgggtcctggcacaccgtggggtgggatggggacggatagcaagagccaccattaatgagggcagggcgatccttgaagatcctggttcaggcctctgggctcactcacaaggggctgctcaggggcaggtgggttgctgcagcccgtgtctcactcagactgccggggtggttgggctcctgtggccacctttgtggggaggggtcaggtcaagatgtccccagtttcttgacttctgacctcatatgttttcccattaagacaaagatttaggctgtggttcacggcagctctttgcaccaatgttggcttgtcattggtgcggctgtgttgggggcagaatcctttgtgggtagcctaggaacctgacccttccagcaagagtttctctgacaacacatgccccctcttgccttaacagtcagtggaaacactta

SEQ ID NO: 127050 - DNA, 1037 bp, Homo Sapiens
  misc_feature (959)..(959): n is a, c, g, or t
  misc_feature (962)..(962): n is a, c, g, or t
ggggcacagcaaatctccatatctggtagagttaatgatcataactcttaagatcttacattttgcttttatttttaaaaagtaaacttctaaaaatcttatacactggtatgtgtacccatgagtagagctatattatgctttcttgtctaattacagggataaatgaaatatgattgctaatagtacatgtatttccattcaagtatatatcctaacataacccaatataaccatttaatatattctctaatacaatattattaattttaaagtaaaatggttctgatcattactggcctcctctaagagtacatgacaagtacttaagtagtgggtagaactgaaagtgaaattccttaatgtctacaattcctggagccctctgcatgcaagtcttcaaaattatggtgacttaagtcccaccccacctgttttcccagcagtcctgcaacaggagcacttattcctatttcatagtgtggtctggtggagcagagcagtgtggtccccaggaagggatgagctgctttggctttccagagcactcactggctacatgaccttgggtattccacctcgttttaaaaatggggcagataatcctcaggagattgcaagaagaatcagaaaagctgtgcagagcagctttgtattataaacactaggacgctacctacatgctgcaggtcctaaactagtgcagtgccaagcagcacactgggcctgtggccactgatgttcacaagggctcatggtcaatggagcttctgcatctgagcgagccagtacagatatcattcaggagctcaggaaactggatttgctctctagagggcagctcaaagggccatcactcacaatcacccacggcattctggctcgggtcacagctcagcacggagtctgcaggtttgcatctgtggggggagtgcctacacatgactgccatgctccanaangaagagacttggatagagatcccaagtctctgacctcttcttctggatgaaccagtatgtcacggatctgtgttt

SEQ ID NO: 127051 - DNA, 608 bp, Homo Sapiens
  misc_feature (71)..(119): n is a, c, g, or t
cacgtagcacgtctcatttcaagtggtaccttccaaggtgccacagtctcccgcccttttcagttgtctannnnnnnnnnnnnnnnnnnnnnnnnnnnnnnnnnnnnnnnnnnnnnnnnatcattgtcctcatccctgctcttgtcttgctcttccgagtctgtttttttgtctttgtccttcttcttttgctctgaggcctccttcttgcctttctgctcccgcctatatgcttccagagcttctttcaatggggtaacgaaccgctggaactccatctcttccatggctgagagcacatcactggcattcagcgtcttccgctttcctttcattgcaaagttgttagcacaggatgtggcgtacagcacgaagacgctggcggcgcgggagatggcgctccgggcctccttggagatgttgacaccgtccgggagcgcctccttgatgatcctggtgatcacggcattgggcaggtttaggtcctcgggcctctccgccattgccgccgctggggcttaaactccccttcgcctccgcttcagggagctactgcgtccggacttcccgcgtcgctacggtctgaccctgcgaggtttccgttcccc

SEQ ID NO: 127052 - DNA, 1397 bp, Homo Sapiens
  misc_feature (30)..(31): n is a, c, g, or t
  misc_feature (59)..(59): n is a, c, g, or t
  misc_feature (226)..(270): n is a, c, g, or t
  misc_feature (1280)..(1314): n is a, c, g, or t
  misc_feature (1373)..(1373): n is a, c, g, or t
  misc_feature (1375)..(1375): n is a, c, g, or t
tattatttttaggaagccagttaaagaggnnatggttttagggaagagttagatttccntgagcccccatccagatttcccctttaagtttttttgcgaaggggctttcacaaaaatattttttagaagacatgagacaaaattagccaggcttggtggcacgcatctgtagtcccagatactcaggaggctcaggcgggaggatcacctgagcccaggatttcannnnnnnnnnnnnnnnnnnnnnnnnnnnnnnnnnnnnnnnnnnnncacagagtgagagactccatctcttaaaaacaaaacgtgagattagaactaaggaatcaagagatcagaggaactcacactttggagtattaagcaggttatcaaagcttacagactgacagaagtgagaaaaggaggcagatgagaaagtgggatggggagcagaggagaggcaggagagagaaaggaagcaggaggcacagagggagaaagctgtgcctagagataatcaagtttggcactcggtcatgcattgaagaatgaaaagcccatagtcacaagtctgggagatggactaccagaagaggcagcctgggtttttacaacgttaccgggaggtgatgacagatcctcaagctgtacagtagcacgagagtaaggtacatctcgacactatgccatctgctcttttgtaaaagacactggcaccatgtttgactaataccattccacactgctgatttaagaatatctgtgatcagattactcgccacaccacgcagcgccgatcatctactaggccaatatacgaaaggttcttggcaccaagtcggcgtctatcgataacaacaaaagttcgacgttaatcgcttctgtcaagtgcaagacgagcagaacagatctttgttattctcccacagcattctaagtaagtattctctaaagccttacctcattctgaagcagtcttaagtaaagctactcattagtcaaagactgtgcaaatcaaacataggctgaccataagcaaacgcctccagtttttacctgagaccttgtgctcgcctctgtgatctggaacacagcaggcagcatggaagttattattacttaatttgaggggaactagtggaagactgacatgatcaaaaaccatctaaccatacatattaagtaaacaaaagcgagcaactgactaatttagtcgttcagaatccctcttgtcaaaggccataacccccggccgtaatggccgaattcccgggcatatgtccggtaccgtcgactgnnnnnnnnnnnnnnnnnnnnnnnnnnnnnnnnnnncggccgcttcctcgctaactaacttcgctgcgctcggtcgttcggctgcaacagcgatngncccatatgaggtatatagtcct

SEQ ID NO: 127053 - DNA, 1111 bp, Homo Sapiens
  misc_feature (533)..(580): n is a, c, g, or t
gtgtgggtgtccctggaggtgttccgcgctacaaaggggcggatcaaattatttcgagagcgtttttcccccccgaggtttcagctttctggcgtgtaaagactctttcaactgcatcaaacagctgccataccagcccttgttggaccgccctctggatcggaacccagcggcagcaggaagtattatactaattgggactaggaagctccggatcaaagccagcggaaccatacatttaagtaacaaagcgagcaaactgactaatttatcgttcagaatccctcgtgtcaaaagccataacttcagattgattgaagcaaaacaggattctgctactcagatgctctgagtttggtaagtgctggttttgacggtatttctagtcagtttttattctgatctttttcaggcacttttgcctgagactactctgcccagcatggaaaagcttcacagaaacacgtagcacgtctcatttcaagtggtaccttccaaggtgccacagtctcccgcccttttcagttgtctannnnnnnnnnnnnnnnnnnnnnnnnnnnnnnnnnnnnnnnnnnnnnnncatcattgtcctcatccctgctcttgtcttgctcttccgagtctgtttttttgtctttgtccttcttcttttgctctgaggcctccttcttgcctttctgctcccgcctatatgcttccagagcttctttcaatggggtaacgaaccgctggaactccatctcttccatggctgagagcacatcactggcattcagcgtcttccgctttcctttcattgcaaagttgttagcacaggatgtggcgtacagcacgaagacgctggcggcgcgggagatggcgctccgggcctccttggagatgttgacaccgtccgggagctgcgaggagaccgggggtgagcaaagctgccgttccagcacctgcttccctcctgcccgttcgtccgccccccccgagctgctcaccgcctccttgatgatcctggtgatcacggcattgggcaggtttaggtcctcgggcctctccgccattgccgccgctggggcttaaactccccttcgcctcagcttcagggagctactgcgtcccc

SEQ ID NO: 127054 - DNA, 760 bp, Homo Sapiens
  misc_feature (135)..(232): n is a, c, g, or t
  misc_feature (549)..(710): n is a, c, g, or t
gggggggaatcccagccctttctctttcccgggttttcttgggaacaactttggcccaggtccctttccttttggggccccgcccccaacgaaaggttttaaaaaatttttggggggcgaggccgccccaccaannnnnnnnnnnnnnnnnnnnnnnnnnnnnnnnnnnnnnnnnnnnnnnnnnnnnnnnnnnnnnnnnnnnnnnnnnnnnnnnnnnnnnnnnnnnnnnnnnaacaagacttttatttgtacaaagcattacaatcttctcagcattcttcactcacaaacttttcactgtatttaacaagttaacagtgtcaaactacacgtcactacctgtcaaaccccaagcactcaacttagaaacaaaaagcgcttggagcactgaatggaaacagaaaaaggctaagaaaggccaacagagatattttagaagcagttaaagaggatggtttagggagagttagattcctgagcaccatcagatttcccttaaggttttttgtgaaggggcttcacaaaataatttttagaagacatgagacnnnnnnnnnnnnnnnnnnnnnnnnnnnnnnnnnnnnnnnnnnnnnnnnnnnnnnnnnnnnnnnnnnnnnnnnnnnnnnnnnnnnnnnnnnnnnnnnnnnnnnnnnnnnnnnnnnnnnnnnnnnnnnnnnnnnnnnnnnnnnnnnnnnnnnnnnnnnnnnnnncaaaacgtgagattagaactaaggaatcaagagatcagaggaactcacac

SEQ ID NO: 127055 - DNA, 775 bp, Homo Sapiens
  misc_feature (167)..(211): n is a, c, g, or t
  misc_feature (370)..(422): n is a, c, g, or t
tcctggagcaccatcagattttccctttaaggttttttgtgaaggggcttcacaaaataatttttggaagacatgagccaaaattagccaggcttggtggcacgcatctgtagtcccagatactcaggaggctcaggcgggaggatcacctgagcccaggatttcannnnnnnnnnnnnnnnnnnnnnnnnnnnnnnnnnnnnnnnnnnnncacagagtgagagactccatctcttaaaaacaaaacgtgagattagaactaaggaatcaagagatcagaggaactcacactttggagtattaagcaggttatcaaagcttacagactgacagaagtgagaaaaggaggcagatgagaaagtgggatggnnnnnnnnnnnnnnnnnnnnnnnnnnnnnnnnnnnnnnnnnnnnnnnnnnnnnagctgtgcctagagaaaatcaagtttggcactcgtcatgaattgaagaatgaaaagccatagtcacaagtctgggagatggactacaagaagaggaagcctggggttttacaccttccgggaggtgatgacaaatcctaaagctgtacagtagcagagagtaaggtacatctgacactatgccatctgtttttgtaaaagacactggcaccatgtttgactaataccattccacactgctgatttaagaatatctgtgatcagattactaccacaccagcaggccgatcatctacaggcaatatagaaaggttttgggccaagtgggtctatgaaaaacaaaattcagttacc

SEQ ID NO: 127056 - DNA, 2037 bp, Homo Sapiens
  misc_feature (267)..(428): n is a, c, g, or t
  misc_feature (1542)..(1588): n is a, c, g, or t
tccacaaacccccggggtttataacaagttaacagtgtcaaactacacgtcactacctgtcaaaccccaagcactcaacttagaaacaaaaagcgcttggagcactgagatggaaacagaaaaaggctaagaaaggccaacagagatattttagaagcagttaaagaggatggtttagggagagttagattcctgagcaccatcagatttcccttaaggttttttgtgaaggggcttcacaaaataatttttagaagacatgagacnnnnnnnnnnnnnnnnnnnnnnnnnnnnnnnnnnnnnnnnnnnnnnnnnnnnnnnnnnnnnnnnnnnnnnnnnnnnnnnnnnnnnnnnnnnnnnnnnnnnnnnnnnnnnnnnnnnnnnnnnnnnnnnnnnnnnnnnnnnnnnnnnnnnnnnnnnnnnnnnnncaaaacgtgagattagaactaaggaatcaagagatcagaggaactcacactttggagtatcacagcaggttatcaaagcttacagactgacagaagtgagaaaaggaggcagactgagaaagtgggatggggagcacgaggagaggcaggagagagaaaggaagcacggaggcacagagggagaaagctgtgcctagagaaaatcaagtttggcactggtcatgaattgaggaatgagaaagccctagttcccaagtctgggagatggattacaagaagaggaagcctgggggttttacaccttcggggaggtgatgacaacatcctaaagctgtacagtagcagagagttaggtacattctgacactatgccatctgtttttgttaaagacactggcaccatgtttgactaataccattccacactgctgatttaagaatatctgtgatcagattactaccacaccagcaggccgatcatctacaggcaatatagaaaggttttggccaagtgggtctatgaaaaacaaaattcagttaatgcttctgtcaagtgaagagagagaacggattttgttattctcccacagcattttagtagtttcctaaagcttactcattctgagcagtcttagtaagctactattgtcaaagactgtgcaatcaaacataggctgaccataagcaaagccccagtttttcctgagccttggctgcctctgtgatctggaacacagcaggcagcatggaagttattattacttatttgggggactagggaagactgcagatcaaaaaccatctaaccatacatttaagtaaacaaaagcgagcaaactgactaatttagtcgttcagaatccctcttgtcaaaaggccataaccttcagattgatgaagcaaaacaggattctgctactcagatgctctgagtttggtaagtgctggttttgacggtatttctagtcagtttttattctgatcttttcaggcacttttgcctgagactactctgcccagcatggaaaagcttcacagaaacacgtagcacgtctcatttcaagtggtaccttccaaggtgccacagtctcccgcccttttcagttgtctactnnnnnnnnnnnnnnnnnnnnnnnnnnnnnnnnnnnnnnnnnnnnnnnatcattgtcctcatccctgctcttgtcttgctcttccgagtctgtttttttgtctttgtccttcttcttttgctctgaggcctccttcttgcctttctgctcccgcctatatgcttccagagcttctttcaatggggtaacgaaccgctggaactccatctcttccatggctgagagcacatcactggcattcagcgtcttccgctttcctttcattgcaaagttgttagcacaggatgtggcgtacagcacgaagacgctggcggcgcgggagatggcgctccgggcctccttggagatgttgacaccgtccgggagcgcctccttgatgatcctggtgatcacggcattgggcaggtttaggtcctcgggcctctccgccattgccgccgctggggcttaaactccccttcgcctccgcttcagggagctactgcgtccggacttcc

SEQ ID NO: 127057 - DNA, 798 bp, Homo Sapiens
  misc_feature (268)..(276): n is a, c, g, or t
  misc_feature (611)..(637): n is a, c, g, or t
tttaaaaaaaactatatttttgttaattataaaactgtaaagagctataaaagctattcccatttggttagtcaaaagggttttattgctaaatgtttggtgtaaagttgagacccttttccattttggtgacagatttctttggggaaaaaaggcagctttctgttttataaatgcagacttctgtttattgaatgaagcatatctcagtgtttatctgtcaggttttgaaacatttcatatatgtccaaatacttggcaggatttnnnnnnnnntagtgaatttggtgtaaagttgctattttatggaaatgcctctaactttacattttcattccatctgtagatttttctatctttataaaatattggagttattttttaaggaaaaatagaaaagtagcttgtgaatagctcaaactaagcttacaaatcgcatgtaaaaaagcaaaaaagttatttgtgtctgtttatattgcttccttttttgtagcctttgtacctgtacagggtgacagtaagggccaagcaggagaggcgtaatccttgtataaaataggatccagcgacactcttgtatttatctgttctctttttagtcagtcacttcnnnnnnnnnnnnnnnnnnnnnnnnnnngctgtacattttaacataaaataaattatgatgagccatttttagcctcttgtgtcctgtcatattatgattgatagagaatgaccaatggaactgtatcatgtgtcacgcctcagaacacatacacattttgggaaaataaattatttagtgtaaattgg

SEQ ID NO: 127058 - DNA, 460 bp, Homo Sapiens
  misc_feature (379)..(405): n is a, c, g, or t
tttgaaaaaaacattttcactttattttaaagacaatgattggcatacagaaggtatgcactcgcataaaataaactttcatgaaaagcattaaaatccattataaattaatttattaaataggtatttggtatatgtgatggttttattagatattactcttatttattggcaacccctcccccaaagtcaaaacaaatcagaaaatcccataactccaatttacactaaataatttattttcccaaaatgtgtatgtgttctgaggcgtgacacatgatacagttccattggtcattctctatcaatcataatatgacaggacacaagaggctaaaaatggctcatcataatttattttatgttaaaatgtacagcnnnnnnnnnnnnnnnnnnnnnnnnnnngaagtgactgactaaaaagagaacagataaatacaagagtgtcgctggatcctat

SEQ ID NO: 127059 - DNA, 480 bp, Homo Sapiens
  misc_feature (43)..(64): n is a, c, g, or t
taacagtcaataaatacatgtttattgattaaactgaattatnnnnnnnnnnnnnnnnnnnnnntttccttctactactaagccatgcaggcagagtccacaaagacaacttcctggccaaaacccagctgatccactgttggtataatcttaaaaaaaattacccatcaagaaagtcaatcgtgtgcagaagacaggaaccccagctctgctaaggctgtggctgctgcagagactaccaaagagtaggattaggttgtagatagacgtgaccaaccatagttcttgaactttctcaaaggcaaaggctgacttcaaagtccattgtctgtcaataaaatggcatcaggcaaaaagctggggaagagaagcccagatggatccttggttgttttcagatgtcaaaggttcacaaagctggccaagctgtttctggaagggacttttccagttcactatattatagtgtgctgggggatg

SEQ ID NO: 127060 - DNA, 1006 bp, Homo Sapiens
  misc_feature (810)..(810): n is a, c, g, or t
  misc_feature (823)..(823): n is a, c, g, or t
  misc_feature (826)..(826): n is a, c, g, or t
  misc_feature (845)..(845): n is a, c, g, or t
  misc_feature (925)..(925): n is a, c, g, or t
  misc_feature (954)..(954): n is a, c, g, or t
ggctttggctatagagcatttattgcaaacaaaattgaggtaaaagaagctgacccagaacccacgcccgtccaggctggggaagtctctactcgccccacaccaggccccgagcaccgcgggcccgaagcagcccccagaggacagacgggccctgcgcactgaggtagctgcatcctaagcccccatgagtacaactgcccagggctgcccaattcccagaggggaggaggagagagaggcaggcagggggagccccggcttcaggtggggcacaccccacaccctcaacaaacctcccagcctctcgggctgggcacttcctgcctggccacccagccagccatggggcagcggggtggccaccagaggcgggcgtgctggggtgcgaggtcactgctgctccaggcagtcctcggtcaccccctgggcagccagctcagccagcacgttctgcaggtagttggggtcgggatagccgtggcccgtaatgttgcggtccatctctgtcttgtggtggatctcgttccataccacggtgtccgtctcacccgtggtgctggacgtgcccactgtgaagatgagccgcctcttccaggccaccttcaggagctctaggaccttgcggccctgggcgttgtctggaaggtagcactggcggggaaaccctctggcagtgaacggctttccgggattggggtgctcagggccctggatacatggggaatgctgtaaactatgaggatggtccgcagtctcgtggcggggagcgacatctgggacgtatactcatctttcctgggctggtcncgtctctctcaanatngtttgcaggaggactcgtngcgatctggctcgaggcaatccctaatggtctataatcgtacagtcaagtgttctggtgaatgtatcgtcacatcaccanatagagcggacaaatgtagctgggtgctngatggcactcaatatggtggccatgcgctcatcggactgctgcatgatatga

SEQ ID NO: 127061 - DNA, 2543 bp, Homo Sapiens
  misc_feature (125)..(125): n is a, c, g, or t
  misc_feature (159)..(159): n is a, c, g, or t
  misc_feature (483)..(499): n is a, c, g, or t
  misc_feature (550)..(558): n is a, c, g, or t
  misc_feature (582)..(590): n is a, c, g, or t
  misc_feature (2171)..(2181): n is a, c, g, or t
  misc_feature (2494)..(2494): n is a, c, g, or t
gaagattatgatttccactctgagtatgggacgccccggggcgcacagatcgtgtagtgttctgggcgcgcgcggtgggggggagagatctgccggcggggagctcgcgtttctctaacgatganctggcggtaggagtggcctcacccgtgtcctgcncgtgagatggtgttcgatatctccttcacgccgcctctcgtctacatctaaataatagcatgagaggcgaggtgtacatattagatgatagagtcgagcgccgcgcccagcactcccgcccggaggtggactaagaggtagatgaaggccgcgcgcggagagccccacctacgggggaggtgcgcggcgacgcaagatgtaggtttggtccttcccccggcggcattattttctcttttgcgacggcagggctactaccgaccccttctctgtcagccccaaccgcggtctctttttcttgtgggaacagaaccactttgttgnnnnnnnnnnnnnnnnntcgccctcatggtgggggcgcgtggcccaccaaaaagagaaggggtcttgnnnnnnnnntttcctatgaggcgcaagcgaggnnnnnnnnnacacaacccattcttccttttccgttggatttactggtgtgtatcccatgcagagcgaggtataccgtcaattctatggagacggagggcccgacggattcgtacagtcacacgccggtgggaagcgcaccgttggttgcgacggtgcggatgcggcatgatgcgtgctcggtatgtttttgtcactgcaaattgtttattaaaacacaaagcaatggacagtgaaaaacatcctgattttgtactttttggtgggagtggggtgggacatggaaggggtagggtcagatggagacagcccagaaggaaagccagctctatccacccctacagcttccccggccaaccaggttcaaagcccatcagttatatctcactgtgccgctgtcaatgcatgttgtggctgctggcaaagagttggtttggcctccacagagagaggatgggaaactagggtagaagctacaagggctaagaacttgatgctttttctccagtacttggtacagaatagagcagccaggcccaatgtggaagggtgggcttggtttcctgacaagccaggttagaccaataatggttgaagaggctgccctgggctcagaatgggcagctggtccttgcctgggagaactttgtggaaggaaaaggtaagattccttaagtccaaggagagaaccaatccagggtcaaatttcttttcattccctggatcacaacacaccagggaagagaggagtcaagaatgtctctccctgccagtgctcccctcctacctcgcaactcggctctcccttcccgacagttgtcctttgaaaggacggaaagcgcacttcagtttgttgttgtttttcctcatactgaaataaagcactgaagctcaaaatagaggtgagaatggagttctgctttccccagtgctatgtgcccccatctcacaagactgcctggatgcaagaggtgccaaggccctctctgccaactcaaacaggcactactgtttccttggctgccagcacaatcctggctccttgtgtttatactcctgggggaacctgtcccaagagatccatcctgctcttttcctgccaacccagctagtccccaaatcacctgctcttatcaagataatctggccccccatagcaggctagacaaaaggcagctggaaaggacaggccagactggaagcaagccacacagatgcaaagaagaaacctgccctcgctaggcagctgatctactggtaccaatctagtctcataacaaaatgaggaaatctagccctcttgccccagagagatttaaatacagagagtcttagtttggactgaaagagaaaaattgctctgatctttctaaagcttgaacattaaggcttctttgcaattttcttagagctctttgatcgttaattatatctttccatcgaagagaagcagatttcttctgagatttctgaacagttcctgggtgtttccggttctgcttcagtgtactatcactttgccttgcctcagtctctccttcctccggggccacagaaggagaaagcccaaagcatacccatcctgccctttnnnnnnnnnnngaaagaaagattcgtctctcactttggaaagctcacctactctcctaggtccttctggaggggcatggaggacaatattccatgttgccatttgatgccactaaggatccccaaggcaagaagacacttgaattatgccagagtaggccagcaaaggggagggaagggacagggaagcagccccatggcagggactataggacccctgcccaaacctgaatctagagggaatgccccaccctggctcagagcaggagaggaaaaggcactgtgctgaccggggtgggtccttccccaacccctagggaggcgnacgcgtgggtcgacgatatcccgggaaatccggagcggtaccagcctgc

SEQ ID NO: 127062 - DNA, 1375 bp, Homo Sapiens
  misc_feature (140)..(140): n is a, c, g, or t
cttctcttcctctttttttggaaacttcatggttcaagtggggagagaggaggaggaacatggagctaggtctccaggcctctccagagaagtcctcaccctcgaagcaccctcttgggggacagcagagccaggacagnccccccccacgcccagcctccgtctgaggaagatggcagagtcacagtggtgcgagggccagaagggttggagggggcaggggccgggcggggtcacaggaagtagtcggccacgggcttcttggaggggatgccccgtgtctcttggggagcagcctcaaagatgatgaaatctttctggagatgctcgtccagctccaagatggctgccacattcccacagcggtagcagtagttgggtgccgaccacacagtgagcaccgtctcattgaagtgccacttgtaaccttccatcaccagttggtgggcacggcagatcatgtcaatgtcattggctgcgttgaactgggccaccacgtcactgccaaataggtagccggctcctcgggggctcacgccccagcctgtggtgtcttctgggtcagaccagaggaggtcacacatgggcccatcatgaggcacctcttgctttcggtcgattgtccgaatctgatccagggtctggatggagggggagaggcccccgtgcacgcagaagatcttgccatcgatgatggctgacaggctgaggtagtcaaagatctcagtgcagtagcgccacacagtcaccgagccgtacttgcgcaggcactcatcgtagaagccatagacctgcgtgatctggcgactctcatggttgccccggatcagtgtgatgcgatcaggatagcgaaccttaagtgccagcagcaggaggaacgtttcgacgctatagaagccacggtccacaaagtcccccatgaagaggtagttggtctcagggacgtcgccacctactctgaacagctctttgaggtcatagaattgtccatggatgtcgccgcacactgtgactggcgagtccaccctctgcacgttgctctcctctaccaagatctctctggccttagcgcacagggccttgacttcgctctccttgatgagctcgcagcgacgcagctgctcgatctgccggtccaggtcgctgatctccgccatggcccacccccggcgcgggtcagagtcggggccgccgccccctccgcaccgcacaggggtctccgccgctgcgactccggttccggctctccggctccctgcctccctctttcactccgctttcgaccgccgccgccgccgccgacgcgtggtcgacgatatcccggaaaccgaccggaccagcctgctttttttaccactggttatagttcacatgg

SEQ ID NO: 127063 - DNA, 473 bp, Homo Sapiens
  misc_feature (30)..(30): n is a, c, g, or t
cttctttgctcactttactatgggtgtatnttaatcttgtataaaaatatgcatgaatgagccatgcacatgtatacgttatgtatttgacaagtggtggtgaaacaaaatcaaaacagatttgatttgtgtttttgaaatgtcagtacattttgtgccactaacactgtgatgtataaaagagctgttcagagtaggtggcgacgtccctgcgaccgactgcctcttcatggtggactttgtggaccgtggcttctatagcgtcgaaacgttcctcctgctgctggcacttaaggtggcagtctgcggcttctgcacccgctctgtgggcgacctcgggcgtggcctgtcttagtgcgctccgccctcatctcctatcgtgaccagccccaccttggagctgtgtcactggtgatggaccgattctgcttttgtgggtggtcagagacttaatgatggttacgggctcccgg

SEQ ID NO: 127064 - DNA, 1142 bp, Homo Sapiens
  misc_feature (1032)..(1032): n is a, c, g, or t
taaatcatagtaaacacacacatttctggagatgttctctgcctatctttgggactatgcaattgcactcaacaattcatttctacaactttagcttaaattatgccataagttaacttgacgaacaatattgaaactctcaaagcataaataatgaccactaatatggtaaagctgtacttcaggagattggcgacaaggatttgggtgccttcaaacttctggtctttaaaacagaaaacatgccctaaactttttgtaagacatttctaaaatggatttatccagcaaaaatactgaaatgacattatggcaacacattaaatatatttgttacagaatttttgcaaacaaaatatacaccgtgaaaacatactagtttttattgcattttagggattatagattattgaaaattatttaggacacggaaaatatctaaaacatgaaacctttcttaacaaaagcatcatagtctattttggtgtgactgttcattacctacagaccccaaatagttcttcctcttttgaaggttacacttgtaaatctacactcttggttcaatttatcactgtccaaataaggtggagaagctgttcaaactgatccacagaatgcagtatgcctggaagaggcaaaacaagtattttcaagacataacaggccattacatcttaatatgctgccccaaattcaaatatattgtagacaataacaaatacagatgaagacattttgtgtaaagctcaaacctttagcatctaacaagtgcactctagttccagcatctatgaaaagatgacatcctccattaacaaatacaacatgagtaagtgctcctcctctcccgcttccataaagctctctggacctgtgattacataatgcagatcgtaggaaaagctgcttcctcagtctcattagtccaaccagctccagctcaccttcactggaaattgtcatgatgcacattaccaacacagtgttcaggaaaaatgagtaaacataccttttattcacactttacanaaaaaaaccaataacaaaaccccataaaaagttatgcactggttctacatcaataccagctttccaatgtactgattataaactggatgtgtttggtgtcagcacaactt

SEQ ID NO: 127065 - DNA, 1419 bp, Homo Sapiens
ttttttttctcagcattaccaaacttatttattaagaggttctgaggaaattgttcagagtaccgccacagaccccgttttcttctcttagctctctggcatacaggccaatgacttcataccagccagcctataccacggatggcacaatctccatgccggtatcttagcacaactggtcttcagcactggggcctatagttcagacagctgctcagcggaagagggtttgcactgcaggcccctctcttgacagaagtggaggtgaggcttgtctctgcttcaaggactctttctgccaacttccaacagcaagctgtgcgttcggtcataagcccccagaaagatgaaacctcccagactgatggctgccattcgagggaagacacctgcaaataatcctgccagcccctgtgaccgccagaccccatgcaggacagagagcacattcccatcagcagtgctggagccagcctttgccagcgtaattcttgtctttgccacgtctagaggggtggtgactgcagcggcaaatccacctgcaaaagctccacagactgctgactgccaagaatccaccacatgatcctgcctccaggaccagagggcttttaaggactcccataagggaaactggaccaaagaaaaaggaatctctcttaaaactgtgcttttatagcctcgatacaacccttggataccctcttcatataagatgttagagaaaatctgaaatgttcttgtagaagcagatacctgtgccctctgcttaaccacttcagatggaactcgaatcaggcaggcaaccacttctccagcagaggcagccaacatatgtttcataggtgtcaaatatgaagatgaatcagcatgcaaaaaccacttcacatattcataggtgataaaaaatgcagcagcattaggaaaggatccaatagcagcagaaggaacgccagcatatattccatgaaaaccaccagccttactaaatccttggggactctgcagcctggttttaatggtatccagaggaaataatatcaagtcaacagaaacacctgctaccccaccagccaccagcgctgccacgaaccccggccggtccatggtcgctcagacctcgtcaaggctacaatccaagccggagcagaagcggatcacgtcctcgcgcgctgggcgccgccatgtttgaggcgggtctgtcttgacttccgggaccacgtgacgtagaaccacaacaactgcacgtgcaacgcgagacacctgggcctaggggagggccagagaggagggcggggcctcggggagtgtggtggagctaagtctcggcaaatcccttacctcggtttcctgcagcagcgttgtgtgcagctagacggaggaactttcgcgagcaaaagatccgtggccgagatccag

SEQ ID NO: 127066 - DNA, 1373 bp, Homo Sapiens
tttttcgtatcaggttgctgtttaattttggagggggtggggaaatagttctggtgccttaacgcatggctggaatttatagaggctacaaccacatttgttcacaggagtttttggtgcggggtgggaaggatggaaggccttggatttatattgcacttcatagacccctaggctgctgtgcggtgggactccacatgcgccggaaggagcttcaggtgagcactgctcatgtgtggatgcccctgcaacaggcttccctgtctgtagagccaggggtgcaagtgccatccacacttgcagtgaatggcttttccttttaggtttaagtcctgtctgtctgtaaggcgtagaatctgtccgtcgtgccctcctgcacgaagccagctgggcccccctagtcacttgagttgcagctggtttcttctcacaccccacaagggggggctggacacatctcagccagcctataccacggatggcacaatctccatgccggtatcttagcacaactggtcttcagcactggggcctatagttcagacagctgctcagcggaagagggtttgcactgcaggcccctctcttgacagaagtggaggtgaggcttgtctctgcttcaaggactctttctgccaacttccaacagcaagctgtgcgttcggtcataagcccccagaaagatgaaacctcccagactgatggctgccattcgagggaagacacctgcaaataatcctgccagcccctgtgaccgccagaccccatgcaggacagagagcacattcccatcagcagtgctggagccagcctttgccagcgtaattcttgtctttgccacgtctagaggggtggtgactgcagcggcaaatccacctgcaaaagctccacagactgctgactgccaagaatccaccacatgatcctgcctccaggaccagagggcttttaaggactcccataagggaaactggaccaaagaaaaaggaatctctcttaaaactgtgcttttatagcctcgatacaacccttggataccctcttcatataagatgttagagaaaatctgaaatgttcttgtagaagcagatacctgtgccctctgcttaaccacttcagatggaactcgaatcaggcaggcaaccacttctccagcagaggcagccaacatatgtttcataggtgtcaaatatgaagatgaatcagcatgcaaaaaccacttcacatattcataggtgataaaaaatgcagcagcaccagcgctgccacgaaccccggccggtccatggtcgctcagacctcgtcaaggctacaatccaagccggagcagaagcggatcacgtcctcaacgcgctggcgccgcctcgtgccat

SEQ ID NO: 127067 - DNA, 767 bp, Homo Sapiens
  misc_feature (698)..(699): n is a, c, g, or t
  misc_feature (714)..(714): n is a, c, g, or t
ttttcttgtacacagtgtgaactctgacttaaaatgtaaataagtctatttaacagctctttattaacaggtattcacaggtattggcatctcaaatcgcttttggaacagttttgttaaaactaatgaaatagtgcctgtctctttcaccatctatcttgaatatcaatgagacaatccgaagcacttccctgacctcacctagtctctgggctgtgggaggagtaaggaagagctgtccgtttggatttgggctgagagggacagctattcttttgccggtgcacgttaactcagctcctttgggtctgtgttacagggatcatgtaccgcaagtcctgtgcatcatcagcggcctgtctcatcgcctctgccgggtaccagtccttctgctccccagggaaactgaactcagtttgcatcagctgctgcaacacccctctttgtaacgggccaaggcccaagaaaaggggaagttctgcctcggccctcaggccagggctccgcaccaccatcctgttcctcaaattagccctcttctcggcacactgctgaagctgaaggagatgccaccccctcctgcattgttcttccagccctcgcccccaaccccccacctccctgagtgagtttcttctgggtgtccttttattctgggtagggagcgggagtccgtgttctcttttgttcctgtgcannatatgaaagagctcnggtaagcattctgaataaattcagcttgactgaatttttcagtatgctcgtgc

SEQ ID NO: 127068 - DNA, 1834 bp, Homo Sapiens
gggctctgtcggccgcggaagcctggagtgggcggtacgcagacgcgcgcggtgagacccgctgtctgctcagcggactctgcccgcccccacctccccctgcgtcgggccgacatgaaggactcgctggtgctgctgggccgtgtcccggcgcacccggactcccgctgctggttcctggcctggaaccccgcggggaccctgctggcctcgtgcggcggcgaccggagaatccgcatctggggcacggagggtgacagctggatctgcaagtctgtcctttctgaaggccaccagcgcaccgtgcggaaggtagcctggtccccctgcggtaattacctggcctctgccagctttgatgctaccacttgcatttggaagaagaaccaggatgactttgagtgtgtaaccactctcgagggccatgaaaatgaggtcaagtcagtggcttgggccccatctggcaacctcctggccacttgcagccgagataagagcgtttgggtctgggaagttgatgaagaggatgagtatgaatgtgtcagtgttctccactcccacacacaggatgtcaagcatgtggtttggcacccaagtcaggagctcttagcttctgccagctatgatgacacagtgaagctgtaccggggaggaagaggatgactgggtatgctgtgccacccttgagggccatgaatccactgtgtggagcttggcctttgacccgagtggccagcgcctggcgtcttgtagtgatgaccgtactgtgcgtatctggcgtcagtatctaccaggcaatgaacaaggggtggcatgcagcggctctgaccccagttggaaatgtatctgtactttgtccggcttccactcaaggaccatttatgacattgcttggtgtcagctgacaggggctctggccacagcttgtggggatgacgcgatccgcgtgtttcaggaggatcccaactcggatccacagcagcccaccttctccctgacagcccacttgcatcaggcccattcccaggatgtcaactgtgtggcctggaaccccaaggagccagggctactggcctcctgcagtgatgatggggaggtggccttctggaagtatcagcggcctgaaggcctctgagctacctcgactttggacagagtaatgactccccagaaaacgtcatataagactttaccagcccctgagaggaccaggaggagcatccttgaccttcatttaacttggctcacttctcttcagacttgggtagaagtgcagagccacagaattgctttccttccccgcctttgacatgaggccttcagtaaagagctacagaacatgagtacattgttataccacagatttttcttgcattagggcacagtgttaaattttttggaggtaaatatactatttataatcactatatatagtaggagggggtatgtgtctcaggcttttctgaagttgcaagacttaaagaaataatccatctgcatcccaagtcctattttataaggatattcataaaaattccatggtgaatccttgtctgaaataggtcctcccttcccagtttctgtgtaagtctttgcatttaagacatccaatcaataatgaaggaaatttttttctgaatgtaggtttgagtgaggggcacctctgctttcccttagcaaccctcatatacctccctgcaccgttacgctgtgatggcaactggggatagaaaaaaaatggggaaagacaggaatcctaaaagggagagttattactggccacaagccctgtattctcaacagggatgcaaattggttcttcagtaaggataaa

SEQ ID NO: 127069 - DNA, 1047 bp, Homo Sapiens
  misc_feature (836)..(836): n is a, c, g, or t
  misc_feature (843)..(843): n is a, c, g, or t
  misc_feature (880)..(880): n is a, c, g, or t
  misc_feature (893)..(893): n is a, c, g, or t
tttttatttttagaaaaacagagcaaagtttattgaaatttcaagctacatttggaaaatcaaaatccaaatcctggaaccatacatcaggataaggtgtcaaaaagtggaaagtgttcactctcacaaaacccgctacagacaagctttctgggcacacctcccaggctccattggatcaaagccatccccttgttcatccctcatccacagtaggacaccatccttctgttcacttgaaagttttccacaataattacaaaacaaaacaaaaaacgttttcaaatgacactgtgaagcccaaactgatcttctctcaaccccattctatgtagtcagcaccagtgaatggtgggtttggcattcaaaacaggacttcacgtttcagtggacagctggggaaagggttgcagcagcaaggcatccgtggccgcattcagaggctggcccccctccttgcctttactctcgagtcttacttaacctaaaagacaaactgggtcaacttggtaaatgaacacagtcaaagacttagccataagaggtaagggaccagtcaatactcccaaggctggttaggcccttcaacatgtaggtggatgtgtatatgtatacatcgctacactaagatacagatctagccctatgggtatatatacgcatttatggctatatagaaaaactatgccaatactaaccaaacagaactttgtaagcggtcatcccaaagctgtaatcccacactgggctgtgcacaaagccatgcattataccatattaaccaacagaaggtgacttggtcatctctccatcctgtgtccctgccttcacaacanagagaanaaagaggttcctctgcttaacacagtggttcttatangacatccttgcangtagctgttaaatttcagggatgccctgcgatctttgcctaggcaattcccaagagtcgataattctatcatgcaacgtcccggtggattgttccgccaatcccaaaatagaccggacaaatgttacgtgggctataatgataccatcattctg

SEQ ID NO: 127070 - DNA, 639 bp, Homo Sapiens
tgcggccgctgcgccgtgaaaaccagctgctgcagccgcagaggcagccggaggcagaggggcggcgggcaggaccagacagggctgggcagggggctggccgagcgccgtgcgccgcttgggagaaggccggaagcttaccagccgagaaggaattcctagctagcttcagagccgggtaggtttgcctgggaccttgtaggccggctgtgggggactccccgggtcgcacagccccattgtttgcatattgcccgagcaggccacggtggcctgcgcgccccaggactcgcaagcagctccgatcggttggaactcggggcggcggcagcagcgctgagccggcctggatgaggagatgcagcttcctgcaggggccaaggaaggatctggggacaaactgtccggaactctgggccagggaggcgagaaggagagagagaggaagagccgaggcagatggaggactttggccacaactgccatgtactcaagagtagaaccgagtgggtaatgggtcgctttgctttttgtcttggcagtgcctccggagccagcgtggtggccatagacaacaagatcgaacaggccatggatctggtgaagaatcatctgatgtatgctgtgagaagagaggtg

SEQ ID NO: 127071 - DNA, 847 bp, Homo Sapiens
ctgcgattgttcctcaaagcaactggtctatggtaatgaacccatcgcaacttccctaagagtaaggcccgcaaactcccagtctgggttagcctcaacatgtagtggaagctatataatgtatacatccgacactaagatacagagtctaccctaatggtaatatataccgcatttaatgggctatatagtaaaagctatgccaatactaaccctacagaaactttgtaagcggtcatcccaagctgtaatcccacactgggctgtgcacaaaccatgcattataccatattaaccaacagaaggctgacttggctcaatctctcccatctgtgtcccctgccttcacgaaacagaggagaagagagaggttgcctctgcttaaaacacaagtggcttcttcataggaacagtcgttgtcaggtgaagctgttgaagatgtccatggagatgagaaacagaccccttaaactttctggagcaaactggtgtcacacctcaaacttacccttctcctttgccagttgcagctaagttgcccagggcctgggagcccccagggcgcagtagcattagaggctcactggcttggtgttactaggccccatgcaactcagcctccagagacctgctcttgtcaggggtctgtcgctggagtggacccaggtggccatgtccattaggacatctcttggcaccagctgtgctaggtgtaaagttctcctcgtgagatgatgcttggggagccaaaaacaaactggaaagaactaggtaaaacaagtttagtggctctgccccccggccgtaatggccgaattcccgggcatatgtccggtaccgtcgactg

SEQ ID NO: 127072 - DNA, 1344 bp, Homo Sapiens
  misc_feature (967)..(1024): n is a, c, g, or t
  misc_feature (1230)..(1264): n is a, c, g, or t
ataggcaagagaaggctgacttggtcaatctctcccatctgtgtcccttgccttcacgtaacagaggagaagagagaggttgcctctgcttaaaacacaagtggcttcttcataggaacagtcgttgtcaggtgaagctgttgaagatgtccatggagatgagaaacagaccccttaaactttctggagcaaactggtgtcacacctcaaactacccttctcctttgccagttgcagctaagttgcccaggccctgggagcccccagggcgcagtagcattagaggctcactggcttggtgttactaggccccatgcaactcagcctccagagacctgctcttgtcaggggtctgtcgctggagtggacccaggtggccatgtccttaggacatctcttggcaccagctgtgctaggtgtaaagttctcctcgtgagatgatgcttggggagccaaaaacaaactggaaagaactaggtaaaacaagtttagtggctctgcccaccctgaggacagagccacttacaccgcagaaccaccaggggcctcgggcacttgtggggattcgggagctggctcttcagggctcagacaggactggaacttctccagctgctctgggcttgccagggtcttcaacagggtgttctcacgctctagctgggagttcttctccaccagctctcggatctgctccttcaggatctccacctcctctctcacagcatacatcagatgattcttcaccagatccatggcctgttcgatcttgttgtctatggccaccacgctggctccggaggcactgttgtccagcttaacggaaaccacatcccctccaagcagagaagagaagaaggagatggagaaattgtgcagctggtagaccgccacctccatgggggtctgatacatttcggtgttcatggctcgggctgctaggaagctctggccgggtttcgtgcgnnnnnnnnnnnnnnnnnnnnnnnnnnnnnnnnnnnnnnnnnnnnnnnnnnnnnnnnnncgctggagtccggccctgaggctaggagcggggcgaaggctgcagaacgaacccatagccaagcaggcgctccagctggagttgaagggaagtgactcgaggggtgtcacctcgtatgtcacaaactccacggccgccagtccaacccagactcccccggccgtaatggccgaattcccgggcatatgtccggtaccgtcgactgnnnnnnnnnnnnnnnnnnnnnnnnnnnnnnnnnnncgccgcttcctcgctcactagactccgctgcgctcgtcgttcggctcacaagcggacccctaagtgatcggatacacttt

SEQ ID NO: 127073 - DNA, 1156 bp, Homo Sapiens
  misc_feature (279)..(287): n is a, c, g, or t
ttttttttaacaaggaggtatcactgagcttattttagctgcaaagtggcatcatattattccatttaatgaaattcacctcaagccctttttgacatattaaatatatgggatatatttaaggcaagagaagtaaggcaatccaaatgagtgcccttttccaatctcagcactgtcttggtggaattggtgacactattcagataaccaactggagaccgacaggatttgccatgcatttgcatcttgctagagtttggtttttatgaaagggcctannnnnnnnnaagttgacatattttgagtggaaacactcaccctaccaaatatacttaagttgcaactctaaaagcataaggacattttcaaattttctcttcttcaactgagaaaatgaatgtgccaggtgacatattatatacttgtacttgcatacacatagaaatatatcactgtgcaaattcgtccttgactttataactgaatttcacctcaaattatacattaatttgcagaacaaaatattaggaatgggcacaaatctgtggttcctgattttggtcattttcaatttctgtaggcctgtaaagaacatacaaaatttgcatttacgacactttttgcaggtgggtgtaattgcaaagtatgggaaagaaaacaggaagctgatcacgcgtccatcagcacttggttttggcccagggccacaagaacaggactgttgccctttacacttgtcaggggtggcaagtcccctgacagggcaggcaacccaatcaaaggggaccaccttcagaaacccccacagagttgttggcaaccaaggtccagacagtgttccatccacggacaaaggatggcaaattagaacaggaaggaatcgttagaaaggctccaaagcatttgcttggtttaaccatcttgggttccaaatataagaaatctttggcacgagatcttgtctcaaaggggtatctgacgaaatcagggtattaataccccttttacacacatcggtaaaaatttgggataaaaaacagggtcccccagaatttatggggagtactacccctgaacaaaaggcaccgacttaaaaaacattggcaatagtgttaaacagttgaaaaaccccaagacctttaaaagatgtgattgt

SEQ ID NO: 127074 - DNA, 1025 bp, Homo Sapiens
caaagagagaggcaattttattcttccaaaaaaatgcaccaagagagggtgagcacaggagcacccctggccacatcccccatcctaagcagggtctgagatgaggccaggcctgacgtgggcttgggagaagctgacggagctccctgtggccttggggagggaaccaggcagacctggaagtggaactttgttgttagcaccaggagccgcccacagctgggctcggcaacagggcagcacatggccctgttgcctccacctgagagtctggggaggggctggtggcagaaggctccctgcaggaggtcacctgaatgactctcagattcacagaccccctctgcccccacaacccctgtaaacatgagaatgggctcgtgacaccctcaacacctcaggacaagatgagggtccgagatgtgtggctgggcttcaggcggcccaggagctgccgggctttctcctgcatgaaaagctggtccctggtccccccgcaggccaccgtcttccaggcactggacataggggcaggtgtcgtgaagtggcttcggggcttctgggccactgctgccttctcgggcttggcctgcaagaagccctggttgagcaagctgttgtcttctttgatacctgacagggtgaggctggaagagtttgaaggggcagttgtcggcaaggatagagacttgggcagtgtggacatcatcagcttcacatcctcatccacaatgtcaagagccagagacttccggactttcttgatggggctccgccgcagcccaggcttcctcttctgcttctcgggcctgatgtcgtcctcgatgatgagttcgatgccagcctcagaacgcagcacctccttcaagtcctcctccaggtgcggggtctgtggctgtgggtaggcacggggcagcccacgtgaggcaccacactcgggctgtgtgtgtgtgggactgtgggaccaacccagctgcaactgggctgtcctgggtaaggcaggaaggaggcctgacgccaggatg

SEQ ID NO: 127075 - DNA, 1525 bp, Homo Sapiens
  misc_feature (154)..(154): n is a, c, g, or t
  misc_feature (386)..(386): n is a, c, g, or t
cccctataagcagggttcggaaaagaagcccaggccttgacggtgggcttgggaggaagctgacgggagcttcccggggggccttgggggagggaaaccaaggcaggccctggaaggtggaactttgttggttaggcaccaggaagccgccccncaagtggggctcgggcaacagggccaggcacatggccctgttgcctcccactgaagagtctggggagggggctggtggcagaaaggctccctgcaggaggtcacctggaatgactctcagattcacagacccccttttcgcccccacaaccccctgtaaacatgagaatgggctcgtgacaccctcaacacttcaggacaagatgagggtccgagatgtgtggctgggttcnaggcggcccaggagctgccgggctttctcctgcatgaaaagctggtccctggtccccccgcaggccaccgtcttccaggcactggacataggggcaggtgtcgtgaagtggcttcggggcttctgggccactgctgccttctcgggcttggcctgcaagaagccctggttgagcaagctgttgtcttctttgatacctgacagggtgaggcaaggatagagacttgggcagtgtggacatcatcagcttcacatcctcatccacaatgtcaagagccagagacttccggactttcttgatggggctccgccgcagcccaggcttcctcttctgcttctcgggcctgatgtcgtcctcgatgatgagttcgatgccagcctcagaacgcagcacctccttcaagtcctcctccaggtgcggggtctttggcaggggtttcaggggtccgtacttctccagggcgttcttgaacggggttggcgtgtggggagtgttgtccatggagtacttctgatctggggttacaaacgcagcatgtttctggtgcaggggtgtcttgtcccggtgcagtggtgtggtgaccaccaccttctggctgcacactggggtggatgtcagcgaggggctctccagctccaatgtgtcctgtttgttccagaagttcagaaactgggagggcgagaagggcagggtcttaacaggtgtgctcttgggcgtgaggctgttacaggaatccaggaaggacagactggtgctattctcagtgacaggggacagagccacacgcctcttcctctgccgcttgagcacagagggcggtgtgccaatgccagagcccccgacttcagtgctgggggagatggggatcagctcgccccggctgctccggctcaggtctgagatggtgtggccatccaggcggtactcggtcacactgggcaccagggcggaaggctggcggggtggcaggacttgctgctgatgtgatgcttggtgtgacctgagtaaatttgacctccctgaggaaccatctgcagaggacagtatcaacaacagcctagtgcagctggttcctgagtaaatttgacctccgtgaggaaccctcgtgccgattcccacccagcctctacctagccgtt

SEQ ID NO: 127076 - DNA, 2616 bp, Homo Sapiens
  misc_feature (431)..(431): n is a, c, g, or t
gctgggggggagagaaagctggaaccgggaagcttcccctctgtgggcccttggggggaggggatcccaggcccaagaccctgggaaggggggaacttttgtttgttagccaccaaggagcccgcccccacagcgtggggctggggcaaacaggggcaggcacatgggcccctgtggcctcccacccgaagagtttggggagggggctggtggcagaaggctccctgcaggaggtcacctgaatgactctcagattcacagacccccttttgccccccacaacccctgtaaacatgagaatgggctcgtgacaccctcaacaccttcaggacaagatgagggtccgagatgtgtggctgggcttcaggcggcccaggagctgccgggctttctcctgcatgaaaagctggtccctggtccccccgcaggcncaccgtcttccaggcactggacataggggcaggtgtcgtgaagtggcttcggggcttctgggccactgctgccttctcgggcttggcctgcaagaagccctggttgagcaagctgttgtcttctttgatacctgacagggtgaggctggaagagtttgaaggggcagttgtcggcaaggatagagacttgggcagtgtggacatcatcagcttcacatcctcatccacaatgtcaagagccagagacttccggactttcttgatggggctccgccgcagcccaggcttcctcttctgcttctcgggcctgatgtcgtcctcgatgatgagttcgatgccagcctcagaacgcagcacctccttcaagtcctcctccaggtgcggggtctgtggcaggggcttcaggggtccgtacttctccagggcgttcttgaacggggttggcgtgtggggagtgttgtccatggagtacttctgatctggggttacaaacgcagcatgtttctggtgcaggggtgtcttgtcccggtgcagtggtgtggtgaccaccaccttctggctgcacactggggtggatgtcagcgaggggctctccagctccaatgtgtcctgtttgttccagaagttcagaaactgggagggcgagaagggcagggtcttaacaggtgtgctcttgggcgtgaggctgttacaggaatccaggaaggacagactggtgctattctcagtgacaggggacagagccacacgcctcttcctctgccgcttgagcacagagggcggtgtgccaatgccagagcccccgacttcagtgctgggggagatggggatcagctcgccccggctgctccggctcaggtctgagatggtgtggccatccaggcggtactcggtcacactgggcaccagggcggaaggctggcggggtggcaggacttgctgctgatgtgacgcttgcagctgcactaggctgttgttgatactgtcctctgcagatggttcctcagggaggtcaaatttactcaggtcacaccaagcatcagggtccgactcgatcaagtccagggcttcagagaggctagaacccacagcggggatgaggaggttagctgcctccaccacccacttgtaaggcaggctcgtttctggtggggagccttcctggtcctcacgcttcgggaattcctccaagggctctggtgttcgcactgcgtccagatctgtaccgatgggctcctgttccttcgatgtggtggctgctgcaagttcctcctcactgttttcctcctcctttatggtaggagggacggagggccagttggtcagaagacttccctggccttccgtgggctgggcactctggaggccgtccttgtcctcgagctccagcagcaagtacactgggggcttgcagtctttggactcgctcaagaagcctcctgtgtccaccttccttttgatggtagagttccagtgattcttcacagcattgtctgtcctccctggcaacatcttggcgatctcggcccagcggttgcccagcaccttgtgggcctcgcagatgatgcggtcctcctcctcggtccagcaagacttcttcacctcagggttgaggtggttgtgccagcgttcacggcactgcttccccagccggcccttcaggtgcttggcaatcagtgtccactgctttgtgccatacttcttaaccagctcgatgactttttggtcttcctctttggtccatggccccttgacaaggtctggattcaaaactctcagccacctgtactggcattgctggtcagtgcggttagggaagtggctggccaggaacttccagtcctgctgtccaaactgcctcaccagggccctcagctgctcgtcctcctcatgggtccatttgaccttgcacttgctatccctctgctccggcacatctgaatctgtgtcctggtagtgcagctcatccagatcctcgcagcgcgtccgccgagacatccccccggcccggaccgcgccgcgctcgcccgcccgccggcagagcccggagcgggagccgggccggggtcaggacccgggctgctccggccgctccgggccccgggccgcgctcgaaggcgtcagcgtgtcagcaggtcccgcgctcctcctcgtgccgattcaacacccagcctcgtacctagcc

SEQ ID NO: 127077 - DNA, 810 bp, Homo Sapiens
agatgtcaggacaccctcactcccgacaaagatgcctttattgggcgacagacgcggggtggggcgctagcgggggtgcacggcgggccggtaggccgccaggatctcggcgctgtgcggacacgtgtatttgaactctttctcctgcatcgcgctgtccaggtagcggcgtacgccgcgcagctccgcggggatgggcgcctggcggaagtgcgcgcacaccgtgtcgacgatgtgcagcttgggcaggaggctgcagtcggccagcgtgagcctgtcgccgtccaggaagcggcggcgggactcgcgcagctgcggctcccccgccagctcgtgctccaggggcgcgcgcaggtagctgtccagcctggcgagggcgcgcagcagctgctggtacagggcttcgtcctgcgcgggcaccgggttcttgatgaacgcggagaacttgtggaaaacgtcgttgccggcggtgttggactccctgtaacgaggcgccaggctggggaagtcgggcggccccagcgtctcctccagaaagtcctcgatctgcagcgtgtctgtcttggcgtcgctgtcatagagcaggatgggcagctgcgagccgggggcgaagtccttcagcacgtccggggacctgcgcgtgtccaccgtggtgagggtgaaaggtacgcccttgaggagcaggaccatgaagagccgctggcaggaggggcagtgacccacgctctcccgtctcactcgctgacaacagctgagctgttccgcatccgtatcggccgacagctgcttttttatacccccaagcgtggg

SEQ ID NO: 127078 - DNA, 1047 bp, Homo Sapiens
ttttggatgtttaaagataatgctttttaatatttcaaatatttttttaaatctcatcaaaaatgttatcaccttaacagtactttgcacatgtggaatttcatacctaaatttgatactattttggtttatttatggctacttacaagagtcacagtaataatgtccactcatcagagtctttctttggtagagcctaatgggaccagacagatgaactgttatgcaaatgagatggataaagcaaattcatgatagtatgaattataagggtttttgtttaatggaaatacaacttaaaaaggatttccatatttatccccatcattattttggaagcttaataccctgttcaggggttgaagagtttgaatagctcacacaatcctgtaaaaatgacaactggctgccctttaataaataaagtcattgtaaagaattacatttacagagtgaaaagtgaatacatagcatttcaaattcaattttggaagtactaataagtactgacccataacaatatacactagctatctttttaactgtccatcattagcaccaatgaagattcaataaaattacctttattcacacatctcaaaacaattctgcaaattcttagtgaagtttaactatagtcacagaccttaaatattcacattgttttctatgtctactgaaaataagttcactacttttctggatattctttacaaaatcttattaaaattcctggtattatcacccccaattatacagtagcacaaccaccttatgtagtttttacatgatagctctgtagaggtttcacatctaaattaccaagaaagcccttccctccctcatcttgcactcagcttaattctatactagtccttggattatgtaccactgtaaaagtataactgtatcaaaattaccatgtttatggatacaatattatgccatacagagcaacaaagttacatataatgacaaagattactgaagttatgcaagaccagaacaaatgttaggacatgctacctaggcacagtccctacaaag

SEQ ID NO: 127079 - DNA, 556 bp, Homo Sapiens
gaagaggcatctgtaaataggaggacttttatttaattttttgctgacatactatgaggcaaaacaaaattgacaccatacaaaataactttataaaatatcattcacatcatattttatcagatttacagcattctgtgcatgttaggggttatgtaaggaggtgaaaaaacactatgccaaacttttagtattagtttatatacacacagtaagaaacaaaacaagtaactgttaggttttccatgaatttattgcaaaaatagtgcaaactacttcacctagtaagctgtaaaaacaaactagaaaggacccagctaagcttaaacacgacaatagatgctcagtttctcagcatttagctttcttcaccagttttatcttgacaatcaagaccactccccatctgttcagtttcgggtgagtgctgaggaatagagaaatgtgaagacgggctctctggagagaccagaggctcgggctgcctgatttcagcaacacatttaggatcatgctacttcctcaatcgcaatttttctgaggtctgtgttggggg

SEQ ID NO: 127080 - DNA, 1113 bp, Homo Sapiens
  misc_feature (1012)..(1020): n is a, c, g, or t
tgtgaacatgaaactaatgatccagaagacttgcatagccatgtggtaaatgagcatgcatgtaaattaatagagttaagtgataagtataacaatggtgaacatggacagtatagcctcttaagcaaaattacctttgacaaatgtaaaaacttctttgtatgtcaagtatgtggttttcggagtagacttcacacaaatgttaacaggcatgttgctattgaacatacaaaaatttttcctcatgtttgtgatgactgtgggaaaggcttttcaagtatgctagaatattgcaagcatttaaattcacatttatctgaagggatttatttatgtcaatattgtgaatattcaacaggacaaattgaagatcttaaaattcatctagatttcaagcattcagctgacttgcctcataaatgtagtgactgcttgatgaggtttggaaatgaaagggaattaataagtcaccttccagtccatgagacaacttgattattctctttaacttacagaatgttagtttaaaataataaattcatcctttttttggagatgattaaatggatgattgtaaacacaacttatgaaatctgcctttaacaagtaacttttttaaattataaaattttattggcattgctccattttctgtatataaatatatctttaatgtggtattttcaattgcgtgatagtttgtagtttcaaccactcttggtgactgtcatcctgtttcttccatattctctgatttcatgaattgaaaagaaacaaatgtattgaagaagtgagctacagttttccttccttaaccatgggtgctagtaactttttaaaactcaagacaagattagttttttatgtgtgaagtcattaaattattacacgaccagaactaaaatgcaatatacagttaagtccacggatactcccattaatgagaaataacactaggaagccactattacaggaagaaaagatttggttttcatggcagtctgtttttttnnnnnnnnntttttgagccactatctattgttgaatattttaagatgggatgagggaggaactaataagggcttacacaataaaaaataactatatcataaa

SEQ ID NO: 127081 - DNA, 1292 bp, Homo Sapiens
  misc_feature (681)..(681): n is a, c, g, or t
  misc_feature (1280)..(1280): n is a, c, g, or t
ttttttttggtccagagaagtttaatgatgactgaagctttgaccacattgaggaaactcaaggtttctaaaatagattctttgataactagttaggcctgagtgtccaaagaacttttgatattactgctatattagtagagtttatttgcggtatgaattctttgatgtctaataagagctgaacttactcggaaaggccttccacactcatcacattcatagggtttttcacctgtgtggattctctgatgctgaataagacctgtgcgcccactgaagtctttcccacattctttacatttatagggttttactcccgtgtgtactctatgatgtccaatgagatgtgagcgctgaatgaaggcttttccacactcatcacatttatagggcttctctcccgtgtgagttctcctgtgtttactaaggtctgagctatgactgaaacttttcccacattcatcacatttatatcgtcttctttccctctgttgccattctgatctgccctcattttcaataatatctttggacttaggatgctgaggagtatctttgttcagtctgtcatttatctccccaaggaattccttgtctttgggcatatcttccttctggaacaactcttcattcttagtcctagttttatcaccattcctttgtggtttcccagcttcntgctccagctgggtctttttgggatggagctggacagtcagtgattcatatggccttcccaagggggccaacttgtccatgagtatgtcccgtctttctgaattgcctgggacctgctttccaggttcatcaagctctctctccagatcctccagtaccgtcactgcctcctctccagtctctggatggtgtgcacgcacccatgcttgcaggtctttaggaagaatgctcaggaactgttctagcaccagcaggtctaaaatctgctccttggtgtggcattctggcctcagccactgacggcagagctcccacagctgggtaagagcttcacggggtccaggtgcatcctgatagcagagcttcctgaagtgttgtctatagagttccctcctgtgaggactgcacttttgtgagctggaatcctgtccccagtaatggtcctctgccttaattatcagaagtcctttttggtcctcaggttccagggctgtggtcattctgggctttgccaggagatttatcctctatcttacgcgcagggaggaacaggtgcaacagctagcgtcctttggacatcccggagaattccggaccgnagtaccaagccg

SEQ ID NO: 127082 - DNA, 656 bp, Homo Sapiens
cctatttttgttaaatttatttaagaccacctccttacaacttccagagagaaaatacaaaacaagaaacagacttggtttcaaatgcataaccaggtgctggagtttaaagcattactgataacattgttacagaagaatggcagcttactccagggcacttcagtattcctgaggaataaacatgatttctcttgtcctcccgctgggatgttctcaggtgaagtcactgctcctgctcctgtaaagcaaggacattcagcttaaaactgtgcagacggcattctgacaaccctctctaattgctgtatcaggtcagacccaaagggccagaagccaaaaccttatcacactgtttacgttaaaactgtctcacaacaggactatgtacaccctacctaggttcctaagagtgccatccagccccaatcttccagggagaagagtgggaaacgagtggaacagggccaaaccatcatgacctggataacaattcctaaaacctgtcgaaggcgtctcaggggagtggggagagcatggttctcatcagcctacgaactacatggccttgccaagtttctcaaaccccggtaagagtctgctttctcatcagctgaatgaggatagtacatctctcacaaatcaactggcaggtc

SEQ ID NO: 127083 - DNA, 1092 bp, Homo Sapiens
  misc_feature (108)..(811): n is a, c, g, or t
  misc_feature (985)..(985): n is a, c, g, or t
  misc_feature (1032)..(1049): n is a, c, g, or t
ccgccaactactcgttgctatctgttacagtgctgtgcagtgcgatagtgtgtctaccgggttgactcagacgtagtaccggataagcgcagcgtccgctgaacgggnnnnnnnnnnnnnnnnnnnnnnnnnnnnnnnnnnnnnnnnnnnnnnnnnnnnnnnnnnnnnnnnnnnnnnnnnnnnnnnnnnnnnnnnnnnnnnnnnnnnnnnnnnnnnnnnnnnnnnnnnnnnnnnnnnnnnnnnnnnnnnnnnnnnnnnnnnnnnnnnnnnnnnnnnnnnnnnnnnnnnnnnnnnnnnnnnnnnnnnnnnnnnnnnnnnnnnnnnnnnnnnnnnnnnnnnnnnnnnnnnnnnnnnnnnnnnnnnnnnnnnnnnnnnnnnnnnnnnnnnnnnnnnnnnnnnnnnnnnnnnnnnnnnnnnnnnnnnnnnnnnnnnnnnnnnnnnnnnnnnnnnnnnnnnnnnnnnnnnnnnnnnnnnnnnnnnnnnnnnnnnnnnnnnnnnnnnnnnnnnnnnnnnnnnnnnnnnnnnnnnnnnnnnnnnnnnnnnnnnnnnnnnnnnnnnnnnnnnnnnnnnnnnnnnnnnnnnnnnnnnnnnnnnnnnnnnnnnnnnnnnnnnnnnnnnnnnnnnnnnnnnnnnnnnnnnnnnnnnnnnnnnnnnnnnnnnnnnnnnnnnnnnnnnnnnnnnnnnnnnnnnnnnnnnnnnnnnnnnnnnnnnnnnnnnnnnnnnnnnnnnnnnnnnnnnnnnnnnnnnnnnnnnnnnnnnnnnnnnnnnnnnnnnnnnnnnnnnnnnnnnnnnnnnnnnnnnnnnnnnnnnnaagaattcggcacgaggcatgatttctcttgtcctcccgctgggatgttctcaggtgaagtcactggagtaagctgccattcttctgtaacaatgttatcagtaatgctttaaactccagcacctggttatgcatttgaaaccaagtctgtttcttgttttgtattttctctcntggaagttgtaaggaggtggtcttaaataaattaaacaaaaataggnnnnnnnnnnnnnnnnnngcctacagccgcggccgcaagcttattccctttagtgaggtta

SEQ ID NO: 127084 - DNA, 845 bp, Homo Sapiens
  misc_feature (105)..(127): n is a, c, g, or t
  misc_feature (134)..(148): n is a, c, g, or t
  misc_feature (162)..(162): n is a, c, g, or t
  misc_feature (164)..(165): n is a, c, g, or t
  misc_feature (170)..(170): n is a, c, g, or t
  misc_feature (221)..(233): n is a, c, g, or t
  misc_feature (289)..(290): n is a, c, g, or t
  misc_feature (292)..(304): n is a, c, g, or t
ggggagaaaaaaccacagccgtttggttgtgtccccgggtgtttttttgggagagagaactttttgggccggggcgccggcaccccggagggggccgcgccgccnnnnnnnnnnnnnnnnnnnnnnnttttacnnnnnnnnnnnnnnnccaccacaaaaagnannttttntacttcatcgtgtagcgggcgcgctacagggggaaaagaaaagaataacannnnnnnnnnnnnaggataagtgggacagggaggaagaacaggaggggagaggagttcagaggtggtgnnannnnnnnnnnnnnttttcctatttttgtttaatttatttaagaccacctccttacaacttccagagagaaaatacaaaacaagaaacagacttggtttcaaatgcataaccaggtgctggagtttaaagcattactgataacattgttacagaagaatggcagcttactccagggcacttcagtattcctgaggaataaacatgatttctcttgtcctcccgctgggatgttctcaggtgaagtcactgctcctgctctttgacatattttccatgtagaagatatggagcctggaaatcatgctgacagttggaataagccattcctaatcccatgccagaaccgaaggctaatggccacattcttcttttaaagaaggtaagtgagaaaacaattcctaatccaaaaccagtacctatcttcacgaccgcatccgccagacaccggtcccacttcctgccgagctccgactcagacatgttccccacccgcgcctccagctttcctctcggccggcccccgcgctccgacccctgaaagtctcgcgagaccc

SEQ ID NO: 127085 - DNA, 556 bp, Homo Sapiens
taatttatttaagcccactcccttccacttccagagagaaaatacaaaacaagaaacagacttggtttcaaatgcataaccaggtgctggagtttaaagcattactgataacattgttacagaagaatggcagcttactccagggcacttcagtattcctgaggaataaacatgatttctcttgtcctcccgctgggatgttctcaggtgaagtcactgctcctgctctttgacatattttccatgtagaagatatggagcctggaaatcatgctgacagttggaataagccattcctaatcccatgccagaaccgaaggctaatggccacattcttcttttaaagaaggtaagtgagaaaacaattcctaatccaaaaccagtacccttcctttggctatctggactagacagaggctggaacatctgcagggatttctcgggtggacatcaattaccaggattctatcttcacgaccgcatccgccagacaccggtcccacttcctgccgagctccgactcagacatgttccccacccgcgcctccagctttcc

SEQ ID NO: 127086 - DNA, 1840 bp, Homo Sapiens
  misc_feature (38)..(38): n is a, c, g, or t
  misc_feature (68)..(68): n is a, c, g, or t
  misc_feature (94)..(94): n is a, c, g, or t
  misc_feature (173)..(173): n is a, c, g, or t
  misc_feature (176)..(176): n is a, c, g, or t
  misc_feature (207)..(207): n is a, c, g, or t
  misc_feature (224)..(224): n is a, c, g, or t
  misc_feature (229)..(229): n is a, c, g, or t
  misc_feature (527)..(585): n is a, c, g, or t
  misc_feature (630)..(630): n is a, c, g, or t
  misc_feature (730)..(738): n is a, c, g, or t
  misc_feature (951)..(998): n is a, c, g, or t
  misc_feature (1789)..(1789): n is a, c, g, or t
aatgacatatgatgtgcttgaggtaggtgggcggtcgncaaacgatacatgtattggaggagcccagngcccatcccatcgtgctgggaactangtggtgcacacgcgcatagcagaggtgcgacagacggcccttatataatgtgaacacactatattgttatatattgatngcngcaggcacgtagcacggtgcgcgacgtactnagtgtatgctgtgtgtntcgcnagtgctgctctctagcgagtagaacgagtgggcttagggatatgggttctgttgtattagtgaggcgttaagtatatgcgatcgcttctctgcagcaacacagtttgttcgaggtgtgtggtgatgtgttgtatttatatcacagtaccaaacgtatctgcgcagggagctccgtcatggtgcggcccttagaaaacatatcgaccctctagtgaaccattggggttgtgttgtagcattccctcccatcgcacaccttaggaaatccgcgcggtcttctcccatgtggtaataatannnnnnnnnnnnnnnnnnnnnnnnnnnnnnnnnnnnnnnnnnnnnnnnnnnnnnnnnnngccaatgatagtatgggtggcgcaggggtttgccccccacttgtntcccaactttcacaaagattttattagatatttcccccttagggaggcgtattaaaaatctttcggataggggtaagtttgttgccaaaattattgtcgnnnnnnnnnagaaaaggaaagggttctttttaaaaaaagataccccaagggtgtgccggttttttcccagttggggaaggtaggaaaaaaggggggaccaggtgcctaggtttttaatatgaaattctgtatagggggcccgctttgtcaaaaaaaagatgggtaaggggtaagcttggcccccctggacgggttattatggagcggtccgcccggggtggnnnnnnnnnnnnnnnnnnnnnnnnnnnnnnnnnnnnnnnnnnnnnnnnatattttgccagtggaggcttttactggggggactgggggtgggtccagcagcctccctcgcgggggatctgagggagaccgagttcgctaaatattataaataggtcttgccgtcctcctgcccccgcccctcggcacagtcagtggagcacgtcagcctcggtttacagttctctgaaaaggaaccaaaaaacacaaccaacaccaagtatatctccaaaggggccttggagacaacacaagaatggaaatgaaatggtatccacagaggtttgcacatttctcctgcaaaggcgcgtcggccgggcactggtgtcccgtgtcactcagcggagggaggctgccctggacgcggtgccgcccgcccggggccacacctgctgctccgagtcaccccacaggctcttggcgtctctggtgccagggctctgggcagggcgactcgaggactccctgggaggactggtgtggcctctgggggttgggcctttgagatgacaatgcccctgtccctgctggccatccaggtcccagacaccccttctgacctctgcccctgcctccccggggggtgcctgctgggtgtccttcggagggacagggcgggggctgatgggtggatgcccggtgccagcagatgagcaccaggctgtgaactgaggccaaggtcgcttcccagggctggacagaccctctgagcacgcagggaggacccacgtgggcttgtcctgatggatgctgggagccacgcggctggccggttcccgaggagggtcggcccctctcctgngcagagtggaggggctgctctcgtggagtgtgtgtcctcgctggggaactc

SEQ ID NO: 127087 - DNA, 530 bp, Homo Sapiens
cccttcccgtgggaagaccccgaaccttttccctggatgctgtctccccagaccactcccctagggctcgctcggttgccgccctcccacctcagcgatccccacggaccagaggcctttgcagcaaaggccaacctcgcacttggctccagtcaccagtgtgagagagaaaggtgctggcataggatctgcccagaagagaaaatgacccatgcgcagttgggctttggatacggcgctgtttatagcaagtttgccagtttggcctcctgttcctttgctggacctggggtaggctgcaggggtgggcagaagcccctcttaaattgtggttgccatggtaccgagggactcattcctggggctcgctgggacctccctaaacccttcctggaagaaaactggaaccaactctgccctacctccctgcactaaccagctttgaggatggcactgaagaacccttggagcaaacatacctcccttgtgactcccacatcaaccattaaagttatttaacagcagccttc

SEQ ID NO: 127088 - DNA, 1950 bp, Homo Sapiens
  misc_feature (443)..(457): n is a, c, g, or t
  misc_feature (556)..(570): n is a, c, g, or t
  misc_feature (1767)..(1767): n is a, c, g, or t
  misc_feature (1825)..(1825): n is a, c, g, or t
  misc_feature (1929)..(1929): n is a, c, g, or t
ggcacgaggattactgtagtgttagctcatgatcactattctaacatgggcttttagtagatttcactagagaccttcatcccatatgtccctagaagaggccaatatccctgcatagctgaggtcttaaaaacatgacattacatatgcagggtaaattctaaaatagtgagcttgacagactcttccactattcactatatatgtctaatccaatgaaggatatagggcttccctcactcataccccctaataaaaaaccacaaaatcataataatagacattagcacagtttataaataaatcacattttaatcatctggctttgtttaatctacaaaatcaaattcacagctttttctagtctggtctgttttttctaaccagatggcctagtatattttctaaaaccttccatcttttaaggaaaacatgttccaccnnnnnnnnnnnnnnngcaatcccagagccaacttccctaatgcaatcacctcaaagaaacactgatgggctggtggtgaaccacagactcaaagtctttcagaacagtaaaagnnnnnnnnnnnnnnnggaacaaaaggtcactaagcaatgtccagtgttccctggaaagcctcttcctgaatgctccagtcactgagctgtcccctccctgtggtcactcctgctggcccctgtagcattccattccttctgccatctgtttcaggttctgcagtgcttataaggtagtgtctggaggggtgtgagccttatttctttctgctcctaacccaacctgtttctttcatgctgtgtaaatggttctagagcccacctaggccagaaccagttctcagctggtgtgcgggcaccttccatccactgtactatgtgccagttcagagccacagcagtaatgatcacagtgagggctaatgatatgcattacaaagtctacaaaaacaaataaggatttttatttgcagtactttccactcttcctttaaaaacttgccatttgcttatcagttcctctggggctgacccactcaaacaagacaaaggataaagaacaaaagatagtcctccgaggttacaggcttggaagggcagagaggagctacgaaccttggaagaaaaacaaggtgctcaggaattcatcgcctaacatttcacttccccacccaccccttagtgctcccactttggcagtgatctctctttggctttaaagagaaagggggaaatgtgccttgttttgcaggtgtgcaacaacacagctctggcatctcaagcagcaggggagaactctaagacagaagaatttcttcatgaaaatcacggtatgttatcacatactgtctccatggcccatacaaggactccttaaggttctctctaacatacaacatatcccccacaactcagtagagaggtttccttcccactggaatagaaatcctttgcctcatttattacagtctaaaaatccacactggctttttgattctttctagcatgagctcagacactatacttcaaaagaatgcccagaggcattttcttaggtagagacttagctgcgggctgagacttcggccccacatagctcacatcaattctgcagctgcctcctttcctcccaataaaagcatcatagctcagagctacaagctccttgaatggagaaaaccaaatcacccaggaaaggtgacacaactcctgatgtgcagtatcaagtgtgaatgctggaaatgctacttaaaggttgacaagaatggctgnaggttgtctcaactgagtaatacacagactctgagattatctacctcatcctagacanaaaagtaatttagaatctcaccatactacacgtatctcactctctacataactgaggaaaaagattctcctaactctactaaactaaataagggacctaaacantcaggagcacatgataggcat

SEQ ID NO: 127089 - DNA, 778 bp, Homo Sapiens
ttttgctttgtacttgagtttatttcacaaaaccacgggagaaagatactgaaatggagctctttccagcctccaagcaaggaggccccagcagccagtctccagccccttgagccctttttgttaggcccacacccaaaagaggagaaccagtgtgtgcgcgaaggtacatggcaaggcacttttgaaaacatcccagtttaccgtggtgaaattgaacttactctgaaacagatgaaaagggacatgcaaaattgctgagcacatggaggtgttagtaggtgaaaatcatgtcctgggtataacccagcttctccaggttagggtgagccgccgtctggatcagtggtggcgggccacacaccaggatgagcgtggacttcgctggaggaggaaggtgctccttgatcatgtcggcagtaacgaagcctgagctgtacttccagccaatgggaggcctgtccagggtgtaccacaggtcgaactggtctgggtgagtcctggcaatttcttcaagctcttttctgaccaagatatcctcctctgtctggttggcaaagatgagggacatcctggtcctgtcactggggtccttggtgatgtggcgaatgagctgcaacatgggtgtgatgcctgtgcccccagcaatcattcccaggtgatcggccagtgtttttttaggctcactcgtctggtctggtctgattccaagattccctggcccatggtaaaacaagcgtccccttggccttcgaaaaaagatggctccccgaatttt

SEQ ID NO: 127090 - DNA, 730 bp, Homo Sapiens
ctgctttgtacttgagtttatttcacaaaaccacggagaaagatactgaaatggagctctttccagcctccaagcaaggaggccccagcagccagtctccagccccttgagccctttttgttaggcccacacccaaaagaggagaaccagtgtgtgcgcgaaggtacatggcaaggcacttttgaaaacatcccagtttaccgtggtgaaattgaacttactctgaaacagatgaaaagggacatgcaaaattgctgagcacgtggaggtgttagtaggtgaaaaatcatgtcctgtgtataacccatcttctccaggttagggtgagccgccgtctggattagtggtggcgggccacacaccaggatgagcgtggacttcgctggaggaggaaggtgctccttgatcatgtcggcagtaacgaagcctgagctgtacttccagcctggttggcaaagatgagggacatcctggtcctgtcactggggtccttggtgatgtggcgaatgagctgcaacatgggtgtgatgcctgtgcccccagcaatcattcccaagtgatcggccagtgtttttttaggctcactcgtctggtctggtctgattcccagattccctggcccatggtaaaacaagcgtccccttggccctcgaaaaaagatggtctccccgattttcatgttctgcaaatactgagtcatctttccccccttcaggatatttgggggtgt

SEQ ID NO: 127091 - DNA, 1090 bp, Homo Sapiens
tattatatcagtattctatttagtctactcccttaaaaataaagaccacgggaatggtaccgggtccggaattcccgggatgtcacccgctgagggtgtggaacttggattcccgacaactggggtctaggggcgggagtggggactccaggagcttgcccgtgggaactgggagctgaggaattgcctaggaatcagcactgtggagaatgaggaaacgtggatatcaggattcctgtttgagtggcacccggaccttgggtcatgggaccaccactaattgtgaggaaagggagtaaatttaagtctggactctgagctatatgtgttagactcagaccacgtactatgtaaggacaattacttatctaggacaattgcttgacttccttgtatcttattcgaccaacctccatttattgagcaatttacctcgtgctaggcattgtgctaggtgctggtatgcagtggtgagcttacagacaagatcgctgctttcctggagcctctgggtttgcctaccctcattttccctagttgcaaaaatagacatcatagcatctcttgatgtggtgagggttttatgaggtgatcctggaaaagtggttagcacagagcctgtcttccccggaagggctaaactggtgggttctcaattggggccgttccctcccacccccacatttggcaaagtctggagacatttttggttgtcagaactgcgggagggggtgctagtgacatctatgggtagaggccagggatgctgctcaacttcctaccatgcgtggggcagcgccctcccacccccaaacaaagaataatccagctcaaaatgttattagtgccaggttgagaaactctggattaagtaaatagggcatatattgatttttggctctgagcttgccatgtctgtggtgttaagatcaagtccctgtagtgtggaggaaaaagtgttgagaataacaagactgggggctctagttctggatccagcatgtgattttgggcaaatgatctaacctctgcaagcctcagtttcttcatttgttaaaaatgggcgtgggttgggtgcagtggctcacac

SEQ ID NO: 127092 - DNA, 2294 bp, Homo Sapiens
  misc_feature (59)..(74): n is a, c, g, or t
  misc_feature (262)..(292): n is a, c, g, or t
gtgccaagctaaaattaccctcactaaagggaataagcttgcggccgcatacgcggtcnnnnnnnnnnnnnnnnatgattgtaaaaattttattctcaataacaattccactaaaattatacaaagtacattcaatacttaagaatggcaaaggtggggagaggaggagaggaagccagtttggcctggaagcatcaacagttgactccaacaaaggaagcccagctgggctggaggaagttgggggtggaggtccggttgnnnnnnnnnnnnnnnnnnnnnnnnnnnnnnnggccacccacaaggaagcagagtgagcgtgcatgttcctgggggagggcaggaggctcagctgacatgctgctgctgggcactggagctcaggcgggctccgagttggtggggggcaggtttttatgcttgaaatactgcacaacttgttggggcagctccgccagcacagctttggccaaggtctcttttgctgcgttgcggaactctcgaaagggaacgaactgcacaatatcgcgggctgcctcctcccccgtgtgggagcgcagcatgcggctgtccccatccaggaactccatggcagcgaagtccgcattgcccacgcccacgatgatgatggacatgggcagcttggaagcctgcaccacggcatgccgtgtctcctccatgtcactgatgaccccgtccgtgatgatgaggaggatgaagtactgcgtggccgtccgctgttgtgtggcctgggccgcaaaccgggccacgtggttgacgatgggggagaaattggtaggaccgtagaagcggatgtggggcaggcaagctgagtacgcctgggcaataccatccacacctgagcagaaggggttggtggggttgaagttgatggcaaactcatgggagaccttcagtctgggggtaactgggccccgaatcccagagctggaaacatcttatcactgtcgtagtcctgaatgatctgcccaacagcccagatggccgacagatattcgttggtgcccatagggttgatatagtgcaaagaggaagggtcgaggggattcccgttggaggctgtaaagtctattccaacggtgaacatgagctggcagcctcccaggatgtagtcaaggaaggagtagtctcggtttatcttgcaggatcgcaggatgatgatgcccgagtttttatagttcttcttcttcctctgcttcttggggttgatgcactcgaacttccagcgggacgctgtctcgagcctcacacatctgtgacactgaggtctggaactcgccgatgaagtcatggcccccgtcattgtcatagtcgtagcacatgacctggatgggcttctccatgtccccatcacacagggacaccaagggcactgtgaatggcttccacacagggtccagtgtgtacttgatcacctcagtcctgtggaccagcatccacttgccatcgtctcctggcttataaaactcccgaaaagggggtctgacttcccaaagaggtccttcttgtcccagcctcttgcccgccaggcttagtgtgatgacgcgggttgtcggacagctcctgggcagcgatcgtaatcaagcccttccccgcaggcttgtcattcagcagcagcagaggcctagtgatcttcttgctggagacgatcgtgcccaggctgcaggagaactggcccaggaagtcatgctcgtccagccgcatactggacttgtcctggtcaaagagcgcgaacttgagcttctgtacctcctcgaagtggtagtcaagcacgaacttcttggagaaggcggggttgaggttgttgatcgcggtttctgtcctgtcgtactcgatccatctgccattgttctctgtaaagaggacacagaaggggtcggacttggaggtaacatcccggtccagtaggttctggccactcactgacagctccaccttgcacacgcaatactgggggcccatgggggctgcccccgctgctggggcacccccactgggtatgtgggccatgggagccggtggcggtggcaggagttcctggcagtcgcaggtcccgcgggcgccaccgccctcaccgcacggctgccgctgcccgcgctccgagccgcccgggcatccccgggagctgctcctgctcggccgggcccgcgggcgcgggacaggctcagggcgctgcccgcgcggccacggcccgctcgcgtgcgctcccagccgctcggggtccggtcccctcgtgcggaattcgccacccaggcctcgctaccttaggaccg

SEQ ID NO: 127093 - DNA, 404 bp, Homo Sapiens
ttaaaaataatatttttcgggaaaaaaaccccaacaaaacacgattctttcagcagaaaccagaagattttctcatagactctcctacagagagccctgataaagtaataaacatgctaacagtaagaactccaaccaatttcatagggcagtttgcggtaactactcccagtatggagcagacagtcctcttgcaaaacccgatttagcaaactttgctagctccatgtggggcctccaaaggacacagctgggcactaaatcctggctgaaaacaaaggccgatttagaggatccgtagaaacggatgcacagaatatccctcagtcttctctatgtagcaggccctccatatacgcgggttccccaagaccgaaaatattaaacaaatgaatttctttttt

SEQ ID NO: 127094 - DNA, 728 bp, Homo Sapiens
ttttcaataaatatctgtctttgcctttatccacagtgacctgacacaatagccatagaaaaagtactcacaccaagccccagctggggactgggaatgctagcatatggtatctcaagttggctctcagaactaaacagggataagggcctagaatggaagagggaaccagccagaccctcagtccttcctgtcctggactgggagccacagatgtccctgtgatctgtcactgccctgatctgggtcttcagccattaaagctcagtgtcatcttcagtcaccaacgggggtcttggtgtccttccaaacccctttggccaggacagctgactgttttcctcactccacggtgatgggaacatcttccacatcgcgggggactgcactctgaagctcacgcctgatttcgggcgatagctgtggatggggctgcagccggagcagttctaagagggcctctttctggtctgtggccaagtcggccttgtagcgctggaccaaagtcaggaggcactggtgccacagcacaggcagttcacgcttctctgtccggaaccccaggaagtggaagactagggcatccagcacccggtaaggcagtgcatacttcttatccagcagcagtcgcaggaagatgctgttggcaccgctgtattccatctcagcaattttcagcatggccgcactggagtgcacacagggatggagccttggtgatgatgcta

SEQ ID NO: 127095 - DNA, 936 bp, Homo Sapiens
  misc_feature (90)..(98): n is a, c, g, or t
  misc_feature (111)..(175): n is a, c, g, or t
cgttagtgccccccttttttgcgggccctttgtcagagaaaggttgggctctcatttgtggcccccctggtggggttttatttgttgggnnnnnnnnntttgtttcggggnnnnnnnnnnnnnnnnnnnnnnnnnnnnnnnnnnnnnnnnnnnnnnnnnnnnnnnnnnnnnnnnnaatgtggtgttgtggtttgtaaaaccaggtaatttcttcagactttattaaaaaatgacataaagtgcatcttattaaaaaatgtataaaaaccacataaattcagggcccctgtgctgggcagtgttgatatcccttagagtggaggaaggtgagggatggagggtgaactggggactggggagaggaccagggtgcagttagttcctcgtgtttgagttcaaagatggagcgagggtggatatggtgggaaggggcacacgggttctcacgcaacaacggaggaaggcaggcgacagtctcttccctgaattctgagggaaaggcgtacattgtcacgaaatctctcctgagctcgcgctgtcctctcgtgtggccacagcctgatacaggctggaaaggtccaggagttgggtccgagcccaggacctggtgagggccgcagtgccaacctagccctctggtccctgaggtggtgggacgacggcagcaacaactacatcctcggctgactggcaaggcagaacgcacgcagcccaagctggtcctgaatctgcagtgagacagggcagccggtggcagcgggataatgtggaaggtgaagaggccagttggtgagggtttccaactctgtctcagacaaccactttggatgcatctccagcacccctgggaggccatgaactggagcagccgtgtgtgctgcatgccatgctatctcttcctctcatctatttcaatttggaatgttttttaacaag

SEQ ID NO: 127096 - DNA, 965 bp, Homo Sapiens
caagggagaaacagcgtttattggtggaggggagctgggcggggctcagccctcggagaactggcagtacagccgccccagcctcggctccacccatagccggaacgggatctccaggatggcagagaagccttcagccagcgttggggcctcgaactgcttcctgtagccatacatgaccatgtctgacacggggatatgagaggagtccgtcatctctcgaaaccggttgttgtggcgcgcctgctccagagtggcggtgaagaggaagcagcggcaggggacgcccgcggctcgggcacactggacgtacctggcgcggctcgcggcgtctgggtttgtgttgtcgatggcgacccgtttcccttgcttcagggctgtctcacacgtggtcacacagcgctgccaggagcctagcgtgtccctgttcacgtggacatatccggccgacacgaggtgcttcttgagaaaggtggacttcccggccccagggaatcccactgcgacaaccacctccgggctggcgctcaggagggccctggactcggggaggcagagaggccctgagcgggagacagtcctcggatcaaaggctgggagctcgaagccggctgctggccacttgagaaagaactcctcaggcgtggcgaagggcaggccaaggttgagggcaaacaggcgatcggcgcaggagaagtctttcttcttccgccccggggcccagttggccgggcgtccggctgcgtctcccacaaagatgctgtccccgatggatatgggcgtgccgtcgttggcctgctcctgcagatggtcccacatgcccgtcaccggcttccggtacaagcctgcgtgcgtggccaccagcacctggaaggggacccccagcttctccaccacagcctccaccttggccttgaactcctcggctggcagcttcccgcgcccgatgctcatctggtggtgaa

SEQ ID NO: 127097 - DNA, 1435 bp, Homo Sapiens
  misc_feature (1314)..(1348): n is a, c, g, or t
attctagctcttttgaagatggtttattttacataaagttactgtgaaagggaaagaaaacaatagaaaagttttaatatattttatgttttcacattatactttttaaataaagttaaacgtttgatatgcttcctacttctcttgattagttagcattgagaaatcaacttcaaatggttagagagattctaccaggtcgtcatcagtccattcttcctcctcatgtttggatttctttgagacgtaatcatcatcttcatagcctttcctcttcttcgtgattacgttaagtgcaagctcagcagaatgacatcgctccaacttctgtttcagaacagcaacttcttcagatctgggtggttcatacttctttactaagtttctcatgcttttcattatatctagtaactgtgacaggcaagttctgttctctttcagcatcagactctctgataaataactttccatagtaattccagccctggaggcactagataaaatggcagtcagggcaatttgggaaggtgtgtataaaaggtaagcatccgtcaatgcaattctattaagaaagtcatcagctgttttcctcaaaatctctggattctccaatatgggatagcgggtctttaagtcgatgaggaagccctcaaatggtctgtaaggattgtggacaataaggtggaaattaagttgctgtataagaagtagttcatattccagtatctgttcaagtgccttctcctgtccaagaggactctcccggaggtttccaacaaactgaggactagatacattgaattcatctactttgcaggccaaaaatgcacaagtgagcattattatcctggggtgatattccattactgagttattaagataaaaacgtttgaaatacatacaagccgtacccacaacagatcttggcattgctggcttaaacaccgaacagaattccaataaccttttctcatagtatttgcagagtgtcatttcttcatgaggctcaagaaagactggatcattcggaagaaccttcccgttggccacggctttgcatctgaatttgcggttggcgtcagcccgcagtcttgccagctgctcctcgctggagaaggtccagtgccgcttctgactactgttgtggtacattatggaatcgtgaccaggtccagagggtctgcagacgagaacccaaacgcatcagcgtcctggcgtaaaacacccgtacccccaccgaagatctcgcggaagcctagggcccccggccgtaatggccgaattcccgggcatatgtccggtaccgtcgactgnnnnnnnnnnnnnnnnnnnnnnnnnnnnnnnnnnncggccgcttcctcgctcactcggacttcgctgcgctcggtcgtttcggcagtacggaccagcgcccaagtgagtggatatcagctgt

SEQ ID NO: 127098 - DNA, 2533 bp, Homo Sapiens
tttttttgaggaggccacacatgtttattaggccggtcctgacacctgcctgcggggaaggaccaccgagaccagatcctgggtgccatggggtgcagggacagaccggtgcatggcagcggctgcgcctagccgcgctcgcagatgacctcaaccacactgggctccatgggcacagggtctgggcagcgcagggcagcagaggccaccacttcgtccagcagcaagtgcacgagttcttcgtcggccacaaaacgccacaggtagagctgcagaaagtggcagtccacttgcacctgctgcagcccgaagcgcccaaaggtgcgcagccgcacacactccagcagcgtcttcaggctgatcttgatgatgccggtcagcaccgacaccttgttgaactccacagggctgaacacatcaatacgttcagagaatagcttctggatattgctcaagaggttggtgtccatcggggcactgggggtatagctgggggcgtagcggccctgctgccgagagctgctgtacacggagaaagtcctcttgctggagtcgctgctctgggccttgcgaacaccctcttcgtacaggagccccacctgcacgtcgatggcggtggtatcctccaccacccgcttcatgacggcccgcacattccggggctccagagtgctgagccagtcgcgagtctccacgctcttgcgcagcatctgtgatatgaccaggccctgcaccttcacgtagtgggtcagcagccgccgcgccgtttccctggcctctgcacacagcgtgctcacgggcgtcactgggaactgatcctgcaccagaaactgttcatcagtgagagtgaggatgtaggagatggtggccgtctcgtagtccaggcagaggcgggagagcagcaggagcagggcaggtggtgtggcaccccccttctccccagggctgtcgcagaagctctgagccgtctggcacatagagtggacgaagcccacgatgaggccctcacggacaccctgactgcagaactcaccccggaagtagggcttgttggagaaggacacctctttggcggtgaaaaggtgcactgctgccagagaggccttaatgtggctcaggatggagctggccacattggccagcaactcggccaggccagggccctccttcccagccacgcgaggtgctgccagcgcctggcggacgtctgtcaggcagcccaggaaggccgcccggagaccctgcaggtggtggcccaggcgctcgcgggccactcgttccacgatctccgtggcagcgtctgcgagcccggcagcggccagcagggccccgggagcccgcaagcgccggtggaagcggtccagcgcccgcaccagcagtgagttgtcaccaccaccctgctcctgcgccagccgccgctccaccagcgcaaaatagcggctgcccagctgccgggcgaaggccgccagcttctcggcacctgctgggccctgggccgcaaacagctcctggtaggccgccgccacctggcagaggccgcccacgaagccactgcctccatggtcggtgaactctaacacgtcgggagccggaggtgagggccccagctcggcctccaggtttctcagctccttctccagccggccgcgggcgtgcgccaggaactcctcgcacagctcctccgcaggctcgcccagggccagcagcagctccacgcactctgcctgctccggggcgcctgagccgccctccctaaagcgctgccgcagctgctgggccaggcgggccgtgatgacctggcagtcgtcctggatggcgcggaacgagggcaggtgttggtactgctgcagcacggcctgcgcgcggccctggtagcgcaccgcctgcccataggcgcccagttccacgcacttggtgaggcgcgagggcagctcaaagaggaactgcagcttccgcagcagcgcgtggacccctgccagcttggtgatgcgctcgtggcggtcctgcagcgtggcgctgatgcgagcgctgaagtcggtgatcactgccatgttggtggccagccggtccatctcatcctccatcttccggaaatcgttcttcatcttccggatggtgtctgtggctgagatgaacttgttgtagttctcatagaccagggtctgcatgtcgctgtctagagcccggatctgccgcaccatgtccgtctcactgtccatcaactgggccagagggcactctctacgcagcttgtctaggtaaacttccgggtcgaagtgcgccccgttcagatcagtcgggtccagggggtcgggccccgcggggcgtcccgccgcctccccttccgagaggccgtagtaaagcttcagcatcccgtgcgccttccgccgacgctccggagcctccccctcgggcccttctggggagtccccaggtccagaccccgggctaggcccggcggcagctgccgccgccatcgttccaactgcagcccacgcctcgtgccgaattcgccacccaggcctcgctacct

SEQ ID NO: 127099 - DNA, 358 bp, Homo Sapiens
atggttattgttttctttttttaatgaaactagatcactgcttacaaaaccctgcacaagccctcctgcccatccccttcacagttcccttggctcagcctctcctgtctcacaggaactgcaacaaaatgggtgtggaacagccaccaccacgtccattgaacgacaggaagggagaggccctgggctccgaccctgggccttaagagggtgacagttcttccttccacatccgttcccatggggcctggagttgcatggatgagggtggtccatgccaccatggttctcaggccaccactcagaccagagtgaaatgatgtgaatgtcccaccccacagagccccctccccccacc

SEQ ID NO: 127100 - DNA, 868 bp, Homo Sapiens
tggaccggtccggaattcccgggatatcgtcgacccacgcgtccgcttgtctgcccgccgctggcctggccccgtctgtctctctcagcagctgtctttctcgcgcccactggccggtctctcctcttccccgcagttgcctccttctctgcctgcctgggtggccgccatgggccggaagcggctcatcactgattcctacccggggaggagccccagccccgcgacgaggaggaagcggagctggagctgctgaggcagtttgacctggcctggcagtacgggccctgcaccgggatcacacggctgcagcgctggtgtcgggccaagcagatgggcttggagcctcccccagatgtgtggcaggtgctgaagacccaccccggagacccccgcttccagtggagtctctggcatctctatcccctatgaggcaccacgtaagacctcctgcccttagctctcttgctcaccacccaagaacctcaggacagaagcgagagcccattgctcctgctcagctcagcccggctgcggaggaacccttggcaggcagaacctggaggtgtcagaggctcaactcctccatctaaccagcaggctcccagagtccccggaagagcctgccgcagctgaagcagagtgcttctagatggagagtggtcactggggaaaaggacctggccatccaccttccaatacctgccttggcctgtctccctgacccatgatctggcaagttaggcacagtcaaacatggacagttgatccatgaggaaaagatgctcctccccctaaggcccggaaatctggagagcagggactgggctgaacctccccagggcaaaggggttcacttaatgcctta

SEQ ID NO: 127101 - DNA, 919 bp, Homo Sapiens
aatattctttatttgataagccattagtgaacccacttgccctggggagctcagccagtcctgctctccagattccctggccttaggtggggagagcatcttttccctcatggatcaactgtccatgtctgactgtgcctaacttgccagatcatgggtcagggagacaggcagcaggtattggaaggtgatggccaggtccttttccccagtgaccactctccatctagaagcactctgcttcagctgcgcaggctcttccggggactctgggagcctgctggttagatggaggagttgagcctctgacacctccaggttctgcctgccaagggttcctccgcagccgggctgagctgagcaggagcaatgggctctcgcttctgtcctgaggttcttgggtggtgagcaagagagctaagggcaggaggtcttacgtggtgcctcataggggatagagatgccagagactgcactggaagcgggggtctccggggtgggtcttcagcacctgccacacctctgggggaggctccaagcccatctgcttggcccgacaccagcgctgcagccgtgtgatcccggtgcagggcccgtactgccaggccaggtcaaactgcctcagcagctccagctccgcttcctcctcgtcgcggggctggggctcctcccctagctcgggtgccagctcccccttgctgtgcccagcgggcccctccctcctcttcacaaccgggtaggaatcagtgatgagccgcttccggcccatggcggccacccaggcaggcagagaaggaggcaactgcggggaagaggagagaccggccagtgggcgcgagaaagacagctgctgagagagacagacggggccaggccagcggcgggcagacaagatgacccagacaaaccgagagagccc

SEQ ID NO: 127102 - DNA, 1134 bp, Homo Sapiens
ttttttccaggctcaatattctttattgataagcattagtgaaccccttgccctgggagctcagccagtcctgctctcagattcctggccttaggtgggagagcatcttttcctcatggatcaactgtccatgtctgactgtgcctaacttgccagatcatgggtcagggagacaggcagcaggtattggaaggtgatggccaggtccttttccccagtgaccactctccatctagaagcactctgcttcagctgcgcaggctcttccggggactctgggagcctgctggttagatggaggagttgagcctctgacacctccaggttctgcctgccaagggttcctccgcagccgggctgagctgagcaggagcaatgggctctcgcttctgtcctgaggttcttgggtggtgagcaagagagctaagggcaggaggtcttacgtggtgcctcataggggatagagatgccagagactgcactggaagcgggggtctccggggtgggtcttcagcacctgccacacctctgggggaggctccaagcccatctgcttggcccgacaccagcgctgcagccgtgtgatcccggtgcagggcccgtactgccaggccaggtcaaactgcctcagcagctccagctccgcttcctcctcgtcgcggggctggggctcctcccctgcaatgacagctgctcttcagtacgaggttggcttcagtctcctgcccctcacctcccagccttcctcaccaccgctttgcctctgccaccccgcagctagacctggtgtcgggaggggaggacaggccacctttccctttccatcggcccctccgcccctctaggggcctcctctaggcccctccgtgtccactcctcctgcctccctcacacctcagagacctagctcgggtgccagctcccccttgctgtgcccagcgggcccctccctcctcttcacaaccgggtaggaatcagtgatgagccgcttccggcccatggcggccacccaggcaggcagagaaggaggcaactgcggggaagaggagagaccggccagtgggcgcgagaaagacagctgctgagagagacagacggggccaggccagcggcgggcagacaagatgacccaga

SEQ ID NO: 127103 - DNA, 2050 bp, Homo Sapiens
ttaaattcatgtttttaattggcttaatacaaaggtcccccaggaggccctgggaggagggggacagcctgggagaggcagagattcatggccagcagcccacccccacctgccacccactccccaacaagggtcccagactctttcaataatcctaaaaaaaccgacgagagcgcaggcagatgaagagccccttcatcttcacacgggtgacaggctgccctgccctgcccagggccctggtcctccccagccaagtcaggtgcccagcccagaccctgccctggcaaggtggggcagagcaatctggtcctccaggaggcagggcgccatgtaaacatcaacaggccagaccccacttcctccagccagtggggccccggagtccagtgctccaccccacagcctgctcagtcagtcaactccaggcactgcgtggctcggtggagggtgacagcctggggccaggtcccatgtgggcagtgcgagcccaactggcaccctttctggctctggaagtggtggcgacaggaccctggcccgcagggtgggaggggggcacagtcacgcccgggcccccagctcgctgatgcgctgtcgcaggtgaaaggcaaattcaaacatggtggccgcgaggctctggtggatgaggtaccggggcaggcggcccttgagatctgtattaagaatccagacaaaggtgcaaacacgggggttactggccgacttgagcacgatgaagcccccagggccattctctccccggacatatttgtgcgtcgggggcttggcactgtgtgaggtggcgatccctgatgacaagtatcggtccctgcgccgttcaatgcgccggacattcacgaagtcccttggggagaccacgccgccccgcagcccctgcagacacgtcataggagatgagggtgttgtcttccactcgctgcaggatctggcaggcagtcactgtcttgttccacagcaccatcctctcggggctgcaggatcacctcctggtacacgagctccgcaggacagggcaggaaggtcttcaggataaacgtcttgccgtgaaagggaacttcaatggtgtacacggtgtccccatattcattattcttctcaaacttccagttctcttcctgggccaagatctggtccaccactgccgtggcctccttcccctggcggatgtactcccgctcctgagcagagaaacttttcttcccagcaacttcttcatctgattcattgtcagaccctgcaaaggattctgggggtgaatagaactgtccctcggacagagcaccggagaacagcaggggtccacgggcaacagcaacctgggcggcaagataccatcgctcctcttcagcttcctggggtaggactttgaagtcaaggaaccaggtctccaaccaggcgaggacaaaagagacgatggggagcaggtagccaaatgcccctttgctgagcagctcagagaggatgaccttgacaatgaggaatgcactggacaccagcgtcgtgaccgcaatcacccaccagtgccggagctgcagcacggcatagcctaggagcagtccagagaagcggaagaaggccaggacaaagatgtcgaagaaggaagttttaaagttgtactggatgatctcctgctccaagttcttacggatgcctgtgttggtattcagttcgatgatccagagcagggagatgaagagcaggtcgaaggtgacgaagagacagaaggtgcggcggacatcagagatggcccttcgcttctcaggcggcggaaggaggtgcgaggagaggctctggctgtgggacagtgaggagcccagggaggccacggcaggcaggctgcgctccaagtctcgggtcagctccctgggcagcttgctcatcctggtgggcccccacctcagggcggggagggcgcggcctcagcagcagggctgctccatgtcagccacggccccggctcttcccgccccaaccgcagtccggctccgcggcctcagtagcgcctcagagcggaagaagatcttcc

SEQ ID NO: 127104 - DNA, 1082 bp, Homo Sapiens
  misc_feature (165)..(174): n is a, c, g, or t
  misc_feature (370)..(427): n is a, c, g, or t
tgcgtgcttccatgctgggaccaaacgtcgtggagaggagggaggtggtttgtcaacatctctcaaggtcgaggtgttgtcctccccacggtagccacgagggtcctcccgtattgtggggggttaccgcaattttatagcccccgcccaatatgtgtcgccaannnnnnnnnnttttttcagttgaaaaacacaacttttttgggggaaaccccttctcaaaatttttgccccgccggggaataaactgggggttttgggcgtgggagaaaaaaaaccccttttgtgtttccctaagagggctccagggggggttaaagtccggggaaaccggggggaaaggaagattccccttatggattcccaaagnnnnnnnnnnnnnnnnnnnnnnnnnnnnnnnnnnnnnnnnnnnnnnnnnnnnnnnnnnaatttgggaaaatgctcctttttagaagccttcccatccaggtttgatgcccaccaggctggccagaccttgagccactgacctcagagaggatgaccttgacaatgaggaatgcactggacaccagcgtcgtgaccgcaatcacccaccagtgccggagctgcagcacggcatagcctaggagcagtccagagaagcggaagaaggccaggacaaagatgtcgaagaaggaagttttaaagttgtactggatgatctcctgctccaagttcttacggatgcctgtgttggtattcagttcgatgatccagagcagggagatgaagagcaggtcgaaggtgacgaagagacagaaggtgcggcggacatcagagatggcccttcgcttctcaggcggcggaaggaggtgcgaggagaggctctggctgtgggacagtgaggagcccagggaggccacggcaggcaggctgcgctccaagtctcgggtcagctccctgggcagcttgctcatcctggtgggcccccacctcagggcggggagggcgcggcctcagcagcagggctgctccatgtcagccacggccccggcttttcccgccccaaccgcagtccggctccgcggcctcagtagcgccatcccgggaattccggaccg

SEQ ID NO: 127105 - DNA, 554 bp, Homo Sapiens
cccctaggtatatgtcgtgctgcggctccggcactggtgggtgattgcggtcacgacgctggtgtccagtgcattcctcattgtcaaggtcatcctctctgagctgctcagcaaaggggcatttggctacctgctccccatcgtctcttttgttctcgcctggttggagacctggttccttgacttcaaagtcctaccccaggaagctgaagaggagcgatggtatcttgccgcccaggttgctgttacccgtggacccctgctgttctccggtgctctgtccgagggacagttctattcacccccagaatcctttgcagcgtctgacaatgaatcagatgaagaagttgctgggaagaaaagtttctctgctcaggagcgggagtacatccgccaggggaaggaggccacggcagtggtggaccagatcttggcccaggaagagaactggaagtttgagaagaataatgaatatggggacaccgtgtacaccattgaagttccctttcacggcacgacatatacctaggggggatcaactagagtcggcctgt

SEQ ID NO: 127106 - DNA, 1018 bp, Homo Sapiens
  misc_feature (314)..(386): n is a, c, g, or t
gtccttctgtcgctgtggtggcattcgttttcttgggtggtgtgtctgtgctctcttgttttgtcgtcatctcttcgtgccgtttgttgtgcgttcgtgttcccgcagtgtgcgctctcgctcgcgtggtgtttatgttgctgtgcgcgtcctgtttgcttttcctgctgcgctgttcctctctgtctgattccgcccgtctctgcgtgggccctcccttttgcgttctatatggcgcgtcgctgcttactctgtgcgctgccctctcgctgtgtcttccgttttcgcgcctctcctgcgtttgttttcgtgtnnnnnnnnnnnnnnnnnnnnnnnnnnnnnnnnnnnnnnnnnnnnnnnnnnnnnnnnnnnnnnnnnnnnnnnnnagttattaatgacaactttaatatgaacatgtgcttaaccctcaagaaattgtcacaactgaaagacgggagcaagctgacactgcaaggaacacatgatgctttggaatgggtggcctgcgtattcaaacacatcaaagcagcagttacttgaacaatcggaacttcttcaaatactggcccacttcttccttggggtagggccggagagcaatacaagtggcgatattctctggttgctcaagccacagcatgtggtcaatgttcttctgttgcagggtctcggccagctcctttagggtggtctcatctggggcctcgaggaccactttgcgcatgcgccccagctcttggaggtaagcggctgtgtgcgggtggtcgcggtgagtgtgcaaggccgcggtggccgcgtgacaagcctgcgctaccagtgcgcccgccggccaggagaacggagcttgtgatagatcctttcgtaacaccaagtattgtaccaggacctgcggctccgccccagaggccgccatcttcctgaccacccgaaaggcccgacgcgtgggtcgacgatatcccggaattccggaccgtaccagcctgctttttgttaccactgttctatagttcacatgctc

SEQ ID NO: 127107 - DNA, 758 bp, Homo Sapiens
ccaacccagcaaaatcttataaaaacgaaccaggtagcccaaaaatgcccacctgtctctctatgtacagtaatacaatatttgtcagtcactatatacaatattataaaaaatgccgcagacagtacaaattaaggcccttatttctcacaaggcatcacaagcctcgatcctctagtgtagacccggtgggagagaagatgccacttaaattattgcaccattttgaaaaacaaaactcggtcaaggaggatcgtggtcttttcccaccgggccttcagtcacagacgggggctggggtggtggcgtcgtcgtcgtcgtcatcgagggagaccctctgtagccacgctgtgcccggcccggttctctgggtccaataaataccagtcacagtttgggagggggccgcgcccggcgcgtgggacccgccacggccgcgcgcaggtgggcgggggcgtcccggctacatgtgccgtttcatgtgcagcgccaggtgatcggagcgcgagaaggcacgatcgcacagatggcactggaatggccggtggcccgtgtgctttcggtagtggcgcgtgagctcgtctgagcgcgcaaacttccagccgcagccgtcccagttgcagtggtagggcttctcacctgtgtgcgtgcgcagatgcgccttcagatgcgaactcttggtgtaggtcttgccgcagcccgcgtagctgcaggtgtgagtggcggtgcgtttgcggggccaagtagcggcggtgcgc

SEQ ID NO: 127108 - DNA, 1455 bp, Homo Sapiens
gggtcctattcctgaagagtgctgaatggtcaactcccaggctcctgttccagcaataaggaaccatgtctgagaggggaagggcaagatgtgccctcagcctcactcaatgagctccacgtagttggcagggaacatgccaaaatggccatccggcccatagccacgccaccagccttcgtcgatcacctcgatgcccgtgatgaggttctcggggtcaaaggagatctctgtgtcgtcggctgcctggtagtcgtacagggcacgggcacagagcccttgcccactgagcccctggccctgaatgtggtggtcaatgtgctcagagccagcaccttgctgctgcaccagtgggggctgctcgtagaaggtctcctgctctggaggttcctcatacacagcctcctcttctgcctgcaccagacatggaggagtgctgggcgccggctcctcagcagggagatctgccctgggccttgagatggcagcagctggctctctgccaaagtgggtctctggttgggtgagctgcttctgcaggaaggggctcctcagcttgccaggctgaggactggagatggaggtggtggacatggccctctccttctgcttgaaaatctccctcgggtgcacggcagactcctgctcatttcggttccttgaaaccacttcttgctgctgctcccacgtcctctgggggctggcctcgccaccctgctcctgatagcgctgctcccggcgtgcagcctcacgcagctcacgctcccggcgctcctgctccagctgccgctgtgcctcctcggcccgccgcttttcctccagccgacggttctcctcctccttctctgctttggcccagaagctgtctttaccaacccttttaatctcagacacggcattggtcttctggtacacagagcccactggggcctggggtcccacgtcctggaagcggccactctccttgtgaaagctgtagttggcacctgaagccttggccaccttctccatgatgcactcaggctccacatcctcctcggcccgtgcgttgatggtcacatgggcccccttcaggaagctggccatggtgctgacgtggctggcacaggctcccttccgcacatcgttcacgccctcgcctgtccagttgatgaggacaaatttgggcagtccagagttggggtccttcactctgcagaaggcgtacatcaccttcccgctgttgagctcctccaccatctcctccaggccaccctcccctgtgccagccacgcggatgtcattgctgttgccttcataggtaaagagagcccagtcggtcggggacttctcggtgaccacccgcacgtaggcctcttgcagcgctggcccgttccggctcaggttcgccgccatggcccgccccgccctcgtgccgaattcaacacccaggcctcgtacctagcctatgtgttt

SEQ ID NO: 127109 - DNA, 1193 bp, Homo Sapiens
cgtggtccaaaagcatatttgttcttcagagacacggatgagctgggacagaaaataggggaagacaacaggccaaggccactctgtgttacttttcctgaagtcagaatcagttgaggcacacactggggcctgcaggcatcgagtgagccgcgtggaggaacatgttgtgtctgccgtttttgaatacccagggtgggagcttggccatctgcatccccacttcccatagcccaggcagagggacagagaaatggagtggggagcacagagcaggctccaacaagacaaattccctgctgccaaaccaccatgatccactctgactttggtcacaaactctgctaaaaacaattctctacgttcactgttcccaagggtcattctaaacagtggtggccaccaccccttagaagcaagagaaaaagaaaaaaggcaaataaatgcagaaggcagccagagcctcccagatgcccctgctcaggacccttccccgcagcttggcagtggccactcagggcttggccacaggcagggcttggctcagtatcctgtcaggggcaagagccaagctgtctgggagggtcgggggatgcaggaaggatgtgtgggaatcaccaggccattgctgcatttggggtgacaggctgagtctgccaagccggagggagccctgaggcctcatcctcactgggggtcctattcctggaagagtgctgaatgtcaactcccaggcctcctcttccagcaataaggaagccatgtctgagaggggaagggcaagatgtgccctcagcctcactcaatgagctccacgtagttggcagggaacatgccaaaatggccatccggcccatagccacgccaccagccttcgtcgatcacctcgatgcccgtgatgaggttctcggggtcaaaggagatctctgtgtcgtcggctgcctggtagtcgtacagggcacgggcacagagcccttgcccactgagccctggccctgaatgtggtggtcaatgtgctcagagccagcaccttgctgctgcaccagtgggggctgctcgtagaaggtctcctgctctggaggttcctcatacacagcctcctcttctgcctgcaccagacatggaggagtgctgggcgccaggctcctcagcagcctcgtgccgatttaaaacccagtctcgtactatgacta

SEQ ID NO: 127110 - DNA, 838 bp, Homo Sapiens
cggatcaccttcgatgcccgtgaatgaggttctcggggtccaaaggagatctcttgtttctcgctgcctggtagttcgtacagggcacgggcacagagcccttgcccactggagcccctggccctgaatttggtggtcaatgtgctcagagccggcaccttgctgctgcaccagtgggggctgctcgtagaaggtctcctgctctggaggttcctcatacacagcctcctcttctgcctgcaccagacatggaggagtgctgggcgccggctcctcagcagggagatctgccctgggccttgagatggcagcagctggctctctgccaaagtgggtctctggttgggtgagctgcttctgcaggaaggggctcctcagcttgccaggctgaggactggagatggaggtggtggacatggccctctccttctgcttgaaaatctccctcgggtgcacggcagactcctgctcatttcggttccttgaaaccacttcttgctgctgctcccacgtcctctgggggctggcctcgccaccctgctcctgatagcgctgctcccggcgtgcagcctcacgcagctcacgctcccggcgctcctgctccagctgccgctgtgcctcctcggcccgccgcttttcctccagccgacggttctcctcctccttctctgctttggcccagaagctgtctttaccaacccttttaatctcagacacggcattggtcttctggtacacagagcccactggggcctggggtcccacgtcctggaagcggcccctcgtgccgaattcgccacccaggcctcgctaccttagaaccgtatgagttactgcc

SEQ ID NO: 127111 - DNA, 953 bp, Homo Sapiens
gcccccggcttcctcaggcagggaggtttctggggccctgaagatggccaagcagccggcttctctgccaaaagtggtcttctggttggggggagctgcttcttcagggaaggggctccttcagcttgccaggttgaggactggagatggagttggtggacatgcccctctccttttgcttgaaaatctccctcgggtgcacggcagactcctgttcatttcggttccttgaaaccacttcttgctgctgctcccacgtcctctgggggctggcctcgccacccctgctcctgatagcgctgctcccggcgtgcagcctcacgcagctcacgctgcgcggcgctcctgctccagctgccgctgtgcctcttcggcccgccgtttttcctccagccgacggttctcctcctccttctctgctttggcccagaagctgtctttaccaacccttttaatctcagacacggcattggtcttctggtacacagagcccactggggcctggggtcccacgtcctggaagcggccactctccttgtgaaagctgtagttggcacctgaagccttggccaccttctccatgctgcactcaggctccacatcctcctcggcccgtgcgttgatggtcacatgggcccccttcaggaagctggccatggtgctgacgtggctggcacaggctcccttccgcacatcgttcacgccctcgcctgtcccctgtgccagccacgcggatgtcattgctgttgccttcataggtaaagagagccccctgaggcagcccctggcccgaccctggcccgtctcgccgcccaccagtcggtcggggacttctcggtgaccacccgcacgtaggcctcttgcagcgctggcccgttccggctcaggttcgccgccatggcccgccccgcagtctccgccctcgtgccgaattcgccacccaggcctcgcta

SEQ ID NO: 127112 - DNA, 879 bp, Homo Sapiens
ggtggaccatggccccttcctccttttggcctgaaaattctccctttgggtgcccggccagactccctgttccatttcgggtcccttggaaaccaatttcttgctgctggttcccacgtcctgctctgggggctggcctcgccacccttgctcctgatagcgctgctcccggcgtgcagcctcacggagctcacgctcccggcgctcctgctccagctgccgctgtgcctcctcggcccgccgcttttcctccagccgacggttctcctcctccttctctgctttggcccagaagctgtctttaccaacccttttaatctcagacacggcattggtcttctggtacacagagcccactggggcctggggtcccacgtcctggaagcggccactctccttgtgaaagctgtagttggcacctgaagccttggccaccttctccatgatgcactcaggctccacatcctcctcggcccgtgcgttgatggtcacatgggcccccttcaggaagctggccatggtgctgacgtggctggcacaggctcccttccgcacatcgttcacgccctcgcctgtccagttgatgaggacaaatttgggcagtccagagttggggtccttcactctgcagaaggcgtacatcaccttcccgctgttgagctcctccaccatctcctccaggccaccctcccctgtgccagccacgcggatgtcattgctgttgccttcataggtaaagagagcccagtcggtcggggacttctcggtgaccacccgcacgtaggcctcttgcagcgctggcccgttccggctcaggttcgccgccatggcccgccccgcagtctccgcgccgctgctgtagcttccgggcccggccgg

SEQ ID NO: 127113 - DNA, 816 bp, Homo Sapiens
  misc_feature (72)..(147): n is a, c, g, or t
  misc_feature (795)..(795): n is a, c, g, or t
atggaaaaatgaaaaatttattgtcttcattgctcaccattttttagtagaaaagctgttttaaggtcaggnnnnnnnnnnnnnnnnnnnnnnnnnnnnnnnnnnnnnnnnnnnnnnnnnnnnnnnnnnnnnnnnnnnnnnnnnnnnttggatcataatgcatatgctcacatgtgccttccaaatcacacttgttatgtagacatcataaagaataaaagttacccattaattatatggcatgcatcagcagtgcattggtgggcttaaacttggttttcagttatgtgtatatacagataaatctcttcctgagttgagcttcatcttcagttgagacccaaatcatttgctttcctttatttggcaaggtacttgaccatgtgataaggcaatcaaatgtttcaatctccttcccttttcagcggcatggccctcctctgtgagatcaccaatgtgacaggtatgaggacagaccctaaaatatggtcctgtaaaactagagcaggtttctttgttcattagtctcaaggctacagcactgtctcttcatatatttggggatcttgaggttttcagttgaacagattcaaaatggtcttctttttccttggttgccaaagatttgagttttcctagtagtgactgtttattggaatatacaacttcctcttcattatcttctccttccatgatagcacaactgtctgcagccgggagttcacactcttttgagttagtcgtcattactaacttggaatatttgtattccagtttttgattctttttccagangtagcaggtcagagccaccag

SEQ ID NO: 127114 - DNA, 938 bp, Homo Sapiens
  misc_feature (821)..(855): n is a, c, g, or t
ggatgaggctgggattgccttagatttgataaccatttaccaaatagggagttccagtttgacatgctattaatggttgaaaataaccatgcctgtactggtcagtgagttcgggtcagctggtgggaataccagttccagagctttaggcgacacatttgaattgagttatcattgtagagagtcatggctccatcagctatggttatcttctttggtctgaatgcctatcagtccttaccagctgtagcagccactgcttggtaaaactttgccacgaagtctggctcactgaactccagctgtctgacaaattcattgcgctcctgctcagcccagcctcgaaaccactgatcccaaagatgtagctggcactcaaagatagaaggtggtcggtctgccccagacacactaagctgctccagactatccagcagtggttgtaatttttctggcactgccttagctaccaggtcctctaggaaacgttcacgctggggacctgaccaattggcaaaccagtgaagaatacacttcatctcctgggaggtgatgtaagacatcagaggaggggaagggttagtattgtgtggtactgagggtaagagagatgggaaggatagtggcattgaagaggatgactccagtggcatcctccccttttctctcgaagggcacccgaagattgtcacgagtccttagactccaactactgcggcagcttccaaatttcctgaaaaccctaagctgggccagcccggcagcccacccccggccgtaatggccgaattcccgggcatatgtccggtaccgtcgactgnnnnnnnnnnnnnnnnnnnnnnnnnnnnnnnnnnncggccgcttcctcgctcactacttcgctgcgctcggtcgttcgctgcaaagacgctagcgccctatagtgagtgataaattca

SEQ ID NO: 127115 - DNA, 1079 bp, Homo Sapiens
gtgatttttcataattttattaaatcatcactgggtaaactaatggtttgcgtatcacacaattacactacaatctgataggagtggtaaaaccagccaatggaatccaggtaaagtacaaaaacgccaccttttattgtcctgtcttatttctcgggaaggagggttctactttacacatttcatgagccagcagtggacttgagttacaatgtgtaggttccttgtggttatagctgcagaagaagccatcaaattcttgaggacttgacatctctcggaaagaagcaaactagtagactgatgagctggattgcttagattgataacatttacaaataggagtccagttgacatgctattaatgttgaaataaccatgcctgtactggtcagtgagttcggtcagctggttggaataccagttccagagctttaggcgacacatttgaattgagttatcattgtagagagtcatggctccatcagctatggttatcttctttggtctgaatgcctatcagtccttaccagctgtagcagccactgcttggtaaaactttgccacgaagtctggctcactgaactccagctgtctgacaaattcattgcgctcctgctcagcccagcctcgaaaccactgatcccaaagatgtagctggcactcaaagatagaaggtggtcggtctgccccagacacactaagctgctccagactatccagcagtggttgtaatttttctggcactgccttagctaccaggtcctctaggaaacgttcacgctggggacctgaccaattggcaaaccagtgaagaatacacttcatctcctgggaggtgatgtaagacatcagaggaggggaagggttagtattgtgtggtactgagggtaagagagatgggaaggatagtggcattgaagaggatgactccagtggcatcctccccttttctctcgaagggcacccgaagattgtcacgagtccttagactccaactactgcggcagcttccaaatttcctgaaaaccctaagctgggccagcccggcagcccacgcatcgaaggaattccggacc

SEQ ID NO: 127116 - DNA, 1141 bp, Homo Sapiens
tttttggatgccattaaagaaatattttattttgtctatatcattgtagatgctagtacccttagattagtaaaacaaaactaccatatgatctttatttaaaaagccttgggttaagctctggagaattttcataggcaaattcttctgtatgagctggatcagtaaacacgccaataaaatctatctccaggaagaatggaccatccactttatcagccaaggtgaatcctatagaagagatcttatcaagcggaagctcatgctgaacatcccggattcttcctcgattagagaagaaaaatttggaaaaaggaatcttgacctcctgccagtagggtcccccgcgggtgaacatgaagtaactatacatctgattcgtcctctggaagaaatctgtgtcctccttgatattcaccatccaaggccgaccatccccacgtacacggagatacagagtattgaactgggaccaatcgtaagacatcttcctctcaaaagcaccccttggaatcctggatatcattgcacagtacccacttcgggtagactccccgtcctgaggcgcctcagagctcagagttccatatagcagtgcactttggttattcttgcccattttcaaaaacacttcacttctgcctccaatcgtcttatcagaagtcactgtccacttatccaaatcttctttcccccggaattgccagacaaccttggcttgttccagcaagacctcatgcagagggtggccttccggtcctctccaatgatccacaatttcatccttcaaaagcctaaaatggtatattgcttcatctctaattgctttatcgaaactaacatcaggcttctcctcagaagaagttatatccaaagcaacttctttctggtgatctccttgcaaatccccttcagtcttcctctgtgaggaggctttgccaggagaagccactggtttctgaagactacttgaatactctgcaaagcgaataccccaaaatggatacaaggcagaagttggcttagagaattttctgagaaaataagtaccatgcagcaatttgtgaaccaaagccatggtacaaaaaaatcaaaatgtaagtttcttcctgggctagcaagggccaccaagaagcttcag

SEQ ID NO: 127117 - DNA, 995 bp, Homo Sapiens
  misc_feature (65)..(104): n is a, c, g, or t
  misc_feature (712)..(744): n is a, c, g, or t
  misc_feature (813)..(842): n is a, c, g, or t
cgggcagtgccaagctaaaattaccctcactaaagggaataagcttgcggccgcatacgcggtcnnnnnnnnnnnnnnnnnnnnnnnnnnnnnnnnnnnnnnnnaaagcttttctgttcaccctcctgccaggaaaatcccagaaagcttaatgataccccaaaatgattacacccagggaggaaaaaaaggagcgctttctagggtcagaatcgtggagagaatactcagaaatgaacctctttaaagccttgcaggaatgagtcactcttacttaatgaaatgttaaagccaattaaaaagcatgctgtgatgcccagcttccctttccacagggtgcatgcgtctcctgctggtgaatcacatgcggcaagaggcaactggctccacagcctgggatgctgccgtaccaagaggaaagaagcagcaaaatgcctttacgttgttctaaacccccgacgcataaagtgtagaggagggatggccaagggtgggtggtagaaagtgtgttcaggctgacactggcaatgagtacagataatttcactttcctcttctaggggcaaaggctgatggcctctacctttgtatccaggagaaactgcagagcagccctgtgactttacaaaatatgctacctcaaagtgctaccgataaacctttctaattgtaagtgcccttactaagggcacatgtcttaatcaaagttagnnnnnnnnnnnnnnnnnnnnnnnnnnnnnnnnngtatattgatgaatgagatcttacctattaaatatattattggattatggttcctgaaggtcattagannnnnnnnnnnnnnnnnnnnnnnnnnnnnntttatgacttaaatatctttacgtgtgttttttagagcttggttctttaaagatttggagaagatatgtaaattaccaaggcacttggtttttctgttttatatactaataatcagggcctaagttaaataaaaatatgtgtgcatgtatttt

SEQ ID NO: 127118 - DNA, 705 bp, Homo Sapiens
tttttcatgataacagaaatttcaaatgtcctttattaaacctgattgctgactaattagagcctaggcaagtaggaagaaattgcacaactgatatttaactacaggttttttctctggacatattgacatattaaagtatttctcttcttgaaaatattttaaaatacaattgcagtaaaaacaattgcatgtagacattattctccatctgttttttttgtaggagactgtggaagacaggagggagttgggcgtgcacacagaatttaccctaacagctttgttagggaggtggtcccaaatactttatattgggactccgtactcaggtgactttctggttaaaaatattgaagacggatgacaactgggctttttttactttgacaactgagacaaaatgacaaattgtcagtgttcagagatccagaccaacttctcaaaaaaatatgtttacccctgatatcatcattattttagcccaactgtgccttttggggtgatcacaactcattactggctttttgttttaagtataagaatttatagggccttcaagcaagggcatcaggtaaataactagcatgtgtgtgatggctgtaaagcacagaccacatttaggacccgagagcacacccacttcctaccatacaggacttaccaggtgactggtcactttgtagtctggctaatcagaataaa

SEQ ID NO: 127119 - DNA, 706 bp, Homo Sapiens
tttacttgcatgtttgtcttttgagtgtgttttcaatttgtgcattccttagaaaatctttgtgtggactttggagtttctccctgaaatgtgccaggcgcctgagtcagacacaaacactcccttaggaccttcgtcagaaactccacccctgtgtggaatctccttcctctctctctctccggaggatgccacccgaattcgaatgtgactgtgtgtttctgctgagaggtccattgtcatccccagatgaaagaagagaccaaagcagttaccactgatggaagccagtgaagatggttgggggaactccttaacctttcttggaatgttttgaacgaggacgctggtcctttgccagtcaggaaccagcagaggatgctcctgctctgatcccagccagggtggagagtgcagagtcggccacagggctctccgtggaggctatggcttcagacaggccccgaaggtctgtcaccaatgtgctcggttgtgggtcacataacgctctctggagggcttgcctttcagcttgggatcatgaaaagatgatttgacgctgtttctcatggtctccgacctggtttgtcttaggtgttcctctgaacttcttctgatttttcttcctctcactaactgctgataaatacactttttcccaagcttggaacagtcttttcctttcttatgattattccagcctcgt

SEQ ID NO: 127120 - DNA, 1458 bp, Homo Sapiens
tttagagatttcccttttatacatattgcaacaagttctccataaaacattcatctgaaataaattaaaaagtccttttgccactgcctccaaacataaaaaggagcctgtgccctagccccagcccgggccacccatggccctgattgtccatggaagaaagttaaggattgaggggcccacagcctgagatgagagggccagatccttcctctgaagtctccaacaagaaaggcgaggtgacggcatgagcctgggagatggcagccaactccttgagaaattcagggaaaatgactgcacagtagacagcattcttgactcgaagagcctcaccttggcgttcaggggccccgccccgggtgagtagaactggagttgaagccccaggggagcccccacttaggccaagtcctgctccgtctcgcccaggctgaaggaccaattgtgccgcctgccgggccctggttggactgtgtgcatgccgcaggagtaactcccccaaggatggcctccggctcttcactaggggatcagaacggcgtggggcaggtcctgctgcagggccctcagcccagtccaacttgccacgggcaatgaggtacttcttggctttggacagcagtgctgggaagtcctcctgggaagccgcaaagttctcaatcttattcttcacagagcccagcacctgcagcagggacttgacactgggctggaagaccatgttggtgttgagcaggaaagagcggagcaggggctgggggtgacaggccagctgggccaccagccccgtcagcaggaagttgacatagacggagttctgcagcatgttctcgagtttggcaaagagcacagccatgaaggggccagtgaagggctggcttggcagctggttgagagtccgcaaagggctgctgaggaaggggccagggggctcagggggacaggtgaagctctcgtaggcctcctcctcctcaaggggcagtggaggttctaagggggactctgagccagttcccccattgctcaatgccacctctagctcccggagctcctgcccaaagccttctagtcctgccatgccctcggagatgccctctagcagttccccagctccctcctttggcaccagacgaaccttcttggccccctcaggccatgatcctggtaattgtcttccagctctccaggctcctctgcaggggtaggccgtcggccagggctggaggcgggggatgcagaaagccctggtgagcaaggggctgggcctggagactcagagccacccaggctctgctgccgcaggaagagagccagacgagatggtgtggagggccggggtactgtcgtcacagaagaggagtccacacttgggcttccaggacccgtgatgtcctcctttctccctgtctctctgctaggcccacctcgtgcccatgaggcatgctccctcgtgcc

SEQ ID NO: 127121 - DNA, 664 bp, Homo Sapiens
cacagttctgacatttttattcactgatcataaatatagtctcatgagcattaaggtgatcatgaatgatgtactagcacctggaacatgaccatcatggagcactcactgattccccatcactggccaaagaagtcggggcatcttcctttcaccaagtgttcaactttggagggaccctccttctggtgcagcaattttattcttggcttgttctcaacaattaaaaaatcataaaagactgagtgtttgcaataaaatatcaaagaggataagaagattttctgttcttcttaaagtctaaagtaaaaaggggaggtagggaagaaggaaaggaaaggggaaagatgtcagggatctgccacgtttcttccttcctccagagcattttacaaaaacaaaaccggggaggtatttattaatgctgtttggagatgggttgcgtctctctgatgagccactcgagagcttcctggcggccctgtttctgcaattccttcccaatcacatccctgcaggtcaggtggtaattgttgagccagtcgcactctttgtctgtaagagaatccacatctatcattttggtctgaattggaaccaatgttacaggttcagaggtcaggcttccccggttattaaaattatacttggtcttcacaggaac

SEQ ID NO: 127122 - DNA, 1804 bp, Homo Sapiens
tttcacagttctgacatttttattcactgatcataaatatagtctcatgagcattaaggtgatcatgaatgatgtactagcacctggaacatgaccatcatggagcactcactgattccccatcactggccaaagaagtcggggcatcttcctttcaccaagtgttcaactttggagggaccctccttctggtgcagcaattttattcttggcttgttctcaacaattaaaaaatcataaaagactgagtgtttgcaataaaatatcaaagaggataagaagattttctgttcttcttaaagtctaaagtaaaaaggggaggtagggaagaaggaaaggaaaggggaaagatgtcagggatctgccacgtttcttccttcctccagagcattttacaaaaacaaaaccggggaggtatttattaatgctgtttggagatgggttgcgtctctctgatgagccacatggagagctttctggcggccctgtttctgcatttcaaaagccccatcttcatagtacccgggctcatcagtgacaatcatgcctgcctccaagggctcatcagagaatgttttgtaactgatgccgcaagggaccctcatggacattcaaaaaagacccaacaccatgtccagtcccgtgcaagtaatctaggcctgaatcccataaagctgaacgggcaaaggagtcaagaaggtgacctttggttccagtcgggaaaacggctgcactcacagctatgtggcccttgagggacatatgtgaagcattccttctcgtaggctgtaggggtccccaaaatgcattgtccgcgtcacatctgtggtgccatccttgtattgagcacccgagtcaataaggtacacctcatccagggacaaggtcctattcgtctcagggactggcgcgtagtgaatgatggcgccgtttgggtcccgtactggaaattgttgggaagctcaggtccacaaagtctgcctgttgcctgcgaaactcctcagctttgtcagcagctgagatctctgtcacaccacctttgggaacctctttctccagccagttaaagagttcacagagagcaacagcatctttaatgtgagcccgcctcatgccttctgactcagctgaattcttcacagctttggcgatgcagatgggggtgtaaggcatacagcagcggtggtccttggggatggtctcgctcacagcatagctggccttgtcactgacccacaccttctcccttggggagaggtcagcacacagggccttgagctcgctcaggatggacttgtagggatgcacctggatcctgtattcggcttccagacccaagtcaagaagcaggtgctccttcacactgggggcgtctatgcggtcaccatcaatgaagagcatgatcgtctctagtcctatgattgcgtaggagaaaaatactggattgtgctccacatctgatcctcggagattaaatagccacgcaatctcatccaaggcagtgaccacaaaccacatgacgttcctctcagccattttcaaccgaaggtctgcaaccttgtccttccaggagatgcctgtgtaatccaggcccagtgtgaggagaggcttgcaagggcgctcaggacggtctgtccagatttagtcaacgaggttctccttgacaggaatgaggtgatggccggcacttctcagaactttggccattttcttccaataatctgtaggaatgatccaggggtccacaccaaacctggatccttcaggaagaacactcaccagcactcctcactgagatggagta

SEQ ID NO: 127123 - DNA, 786 bp, Homo Sapiens
ttttttttaaatactcaatggtcatttattatataacttaaactcattcaatacattaaataactgttttaaataattacaattttttaaaattaaagaatatgtcactgatcttaacgagacttccaaatcgtctcagcaggggctccagacttccccagcaggcggcaggtttcctgtcatgctttcgccttccttctcatatacaccagtgctagagttcatcatgtgtcaaaattgtatcttgcttcttgttttcaagatgatctaatagttgtcttatctcagcatcatactccacccattctgggacaattctggcagcagcttttagtttggattcttttgttttgggattattgcacagatcaattgttttggctctttgtttggattcatcatcacaccaggtttcacaccacagccagtcttgaggaagagacttaatggcgacttggtaaatcatattattggggagatcctgatctaggtttgaaagactgtttggatcttgactgagagcttgatactggctcctgagcctgtcacctgctccaattctcctgaacttcttgagatccactacatataaagcactgatatggtatttccgtcttaaaagatgtgatgcccagtatcctgttttccagaaacgatatccatccatttccctgcggctatcacacaatggggtatacccataaggagctcatccagatcgaatctcgaattcttttagatatgtccacatctggtcacatcacaaatgatttgtcactgctatgg

SEQ ID NO: 127124 - DNA, 2373 bp, Homo Sapiens
ggtccggaatttcgggatatcgtcgacccacgcgtccgtgaagatgtgacacagattgtggagattctccattctggacctagtaaatggaactggcttacccggcgtctggtagaatttacctcttcagggagtgtcctcctctttgttactaaaaaagccaatgctgaagagctagcgaataaccttaaacaggagggtcataatcttgggctgctccatggggatatggatcagagtgagagaaacaaggtcatttcagactttaagaaaaaggacatcccagtcctggtggccacagatgttgcagcccgtggtctggacattccttcaattaagactgtcattaactatgatgtggcacgagacattgatacccacacgcataggattggccgcacaggaagagcgggtgagaaaggtgtggcctataccctactcactcccaaggacagcaattttgctggtgacctggtccggaacttggaaggagccaatcaacacgtttctaaggaactcctagatctggcaatgcagaatgcctggtttcggaaatctcgattcaaaggagggaaaggaaaaaagctgaacattggtggaggaggcctaggctacagggagcggcctggcctgggctctgagaacatggatcgaggaaataacaatgtaatgagcaattatgaggcctacaagccttccacaggagctatgggagatcgactaacggcaatgaaagcagctttccagtcacagtacaagagtcactttgttgcagccagtttaagtaatcagaaggctgggagttctgctgctggggcaagtgggtggactagtgcagggagcttgaattctgttccaactaactcagcacaacagggccataacagtcctgacagccccgtcaccagtgccgccaagggcatcccaggctttggcaatactggcaacatcagtggtgcccctgtgacctacccgtctgccggagcccaaggagtcaacaacacagcttcagggaataacagccgagaagggactgggggcagcaacgggaaaagagagagatatactgagaaccggggcagcagccgtcacagtcacggagagactggcaatcggcatagcgatagtccacgtcacggaagatggtggtcgccatgggagatggataccggcatccagaaagcagcagccgtcatactgatggccatcggcacggggagaacagacatggaggaagcgcaggccggcatggggagaaccggggtgcaaatgatggtcggaatggggaaagcaggaaagaagcttttaatcgtgagagcaagatggagcccaagatggaacccaaagtggacagcagcaagatggacaaggtggacagcaagactgataagacagctgacggctttgctgtcccagagccgcctaaacgcaagaaaagtcgatgggacagttagaggggatgtgctaaagcgtgaaatcagttgtccttaatttttagaaagattttggtaactgaggtgtctcagggctgggttggggtccaaagtgtaaggaccccctgcccttagtggagagctggagcttggagacattaccccttcatcagaaggaattttcggatgttttcttgggaagctgttttggtccttggaagcagtgagagctgggaagcttcttttggctctaggtgagttgtcatgcgggtaagttgaggttatcttgggataaagggtcttctagggcacaaaactcactctaggtttatattgtatgtagcttatattttttactaaggtgtcaccttataagcatctataaattgagttctttttcttagttgtatggccaggcagtccccattttaggagttggcttctgcaaattcaatccattgagctaactgttggggagcaatttggtagttgtagacatttgcagggaagggagatgtctgattctaaatgggagttgatgctcaggtccccagccaggtttgcatccagccctgagacatgtaggaaacacctttcagacccaggctctgaagattcccagaagccacaaggattgaagggaaaaggtgatcctggtaactgttccaggattgctccaggtttgagatggtattgctaaatttaaaattaaacaagaaacccaacaacagcttttaaagtgtcttctatctcattgtattttttttaacttgccccaatgatagaaaagtcttttgctgaaatgattttgatgatttttgtttatcgtttataaaaaggaaaagaaatatacaaactttgacttttgtgactttgtgaaggtttctttaagatgtgcattcctttctgcttgctctctagtaaatgttttactaccggg

SEQ ID NO: 127125 - DNA, 1567 bp, Homo Sapiens
gggtttcgaaacggcgctcccgagggctcctaatggcgattctcatgttgagggtctcatcgagccgaaatgtcggaggaggtgccccttccgcgcttcctggggcatctaggggggttaagtctgcgccatctagtaatgcatctaatgaagaagtgcagacacgggcggacatcgggccaccagtagtggatgtcttttcttaaagtctgaaaggacctttttctctccctctgatccatttccccatggagcagcccaagattatgaccctcctgttaaaggttattcgctagctcttcagcattgccttttttagtaacaaagaggaggacactccctgaagaggtaaattctaccagacgccgggtaagccagttccatttactaggtccagaatggagaatctccacaatttgtgtcacatcttcatttgcttgtccaatatctccctgcacccctcgaatagggtcgatccaggatgtctctggccaacttttcaatcttcttccgaaaagttgcactaaataagagagtctgcctgtcaggacgaacatgacttgctatggatcgaacttggtactcaaatcccatgtcaaacattcgatctgcttcatcaaacacaaggtaagagactctttgaagattggtagctttctttttcacatgatctatcagtcgacctggggtacacacaacaatctctgccccctcctgaagggccttggcctgctcccacatactccctcctccatatacggccactgatcgaagattatatgcttttccaaaccgcttacattctgcatggatctgctggcaaagctccctggtaggacacacaatcactgcaattggtccatcacctggttccaactccttctggtccattatatgaatcaacatgggccaaatgaaggctgcagttttcccactacctgttttggcaataccaatcatgtctctaccacttaatgccacaggcacaccctggcactgtattggagtgggctgtgtgtattcagatttccgaatctggtgcataagttgttcgtcaaacccaaaatgagcaaagctatttcctggtctaggaggtgcagcaccagagacccgaagattgagcttatgccggagatctattaactgctgtggagtgaggttggttatctcttcatgctcattgtaaaagtttttttcaaatggtggatagtcaatctctgaatgatcaatggggggaagaggatcaatgatttttttggtaggtgcaattggatttccgtcactatcatattctagattgtcttcctcttcctcctgaaccacaccagcagttgggttttctgccatgtatcgaaaataagcttcttggtcatcttcctcttcaatgtcatctcgaataccctttacgttttttctttccttgtccttttcttcaagcctcttcatgtctctagctgcctgatcctccacttcagccatgaatgcctccaagggatcatcatcgctgtcagaatctactggcttggaatggaattgctggcgagttggtgagttttcagcaggaatg

SEQ ID NO: 127126 - DNA, 1538 bp, Homo Sapiens
tttttttcctgggattgaatgtctttattaaataaacgagtaaatggtagcacaaatcaccatcaatatttttggaaggattggggacaagatgtcgagtcagaatataattgttcatttcagggtctcaatgtagctgaagaactgtgcccactgatcagtattacgtattgcaaatgcaggaggtaaggctaaaataggacttatgccgttcagaagattgaattgaaaccttaaaaactatcataatagtaggaatgcatgttaagatttgataactttctttagctagagttttcaacccacagttaggagcaaagttgtaaagtgagtaggtgtgaagaagggacactcttttgagaaaagaaattagctacttctaaaatgattcaattattttccctattttcattttccataatatttcctcctgttttatacctctaactaccctcctgatttctctgaggaaaaaaaagaatataagagcaggatcaaaaaaaaggcaagagacttatccactttagccttttagaaatactgttttgtagcagataacctcaaatttaaaccttccgaggttttcatcaccccctggaagaaatatttggtgtttactgccctggagcaggaaattaggaaggtttaaggaatctctgaagctgattataatagagtcaaaaatcagtcttccattttgcactactatactactctcaggtgtccccagtcaggcctagtttctggagttaatatttgggggggaaaggaggaatccctgtgacccagtactccattgcttgaaccatttactttgtgacttgagggcttttgagagaaatggagtagacagatagataaataaatacatagaactcaactctggcagattcatcagcaccaccaacacagtagggagagaacaagattaaaatgggaaaggagtggaaaggaaggggcttgagagggaagacaatgagggcaaggtgatgggagagagaagtcttggccttagagcaagtccagttcgaaggagtggatgctggcaatgggagctctccagaagttgaaggtgctgtactcaaggaggccatcaccttcagggtttttctcctggtctgctgcagttgcttgcccgatcattttgccaacgctgctgtctttgaccttgtaggtggctgtatctgacagacccaggccttccagctccgacagatccagttctgggatgggcatcctccagaaaagaaaggaactgtactggctactcacagggtccctcatagcttcctgttatcaatcaattactggcgtgttccaaagatggagggagtgcctcgggagctccggggtctgcgccgggctggagaaatacaaagctgttggggctttgacggctttgtcttctcactccttttccctcttcagtgactgagtctgtcagttcactctccccctgcaatgcagcccctcctaagaagggcggaaggattccccgccggacgcgtgggtcgacgatatcccgggaattccggacc

SEQ ID NO: 127127 - DNA, 989 bp, Homo Sapiens
  misc_feature (297)..(297): n is a, c, g, or t
acccttcccggagaggttttttcccttccacccccccctgaggaaggaaaatatatttggggttttaactcggccctggggagccaggggaaatttaggggaaggggttttaaagggaattctttggagagcctgaatttattattaggagtccaaaaaaattcagtcctccccatttttgccactactaatactacctctccaggtgtccccccaggtcaggccttagttttgtggaagttaaattattttgggggggaaaagggagggaatcccctgtgaccccagtacttccanttgcttgaaccaatttactttgtgacttgaggggctttgagagaaatggagtaggcagatagataaataaatgcatagatctcaactctggcagattcatcagcaccaccaacacagtagggagagaacaagattaaaatgggaaaggagtggaaaggaaggggcttgagagggaagacaatgagggcaaggtgatgggagagagaagtcttggccttagagcaagtccagttcgaaggagtggatgctggcaatgggagctctccagaagttgaaggtgctgtactcaaggaggccatcaccttcagggtttttctcctggtctgctgcagttgcttgcccgatcattttgccaacgctgctgtctttgaccttgtaggtggctgtatctgacagacccaggccttccagctccgacagatccagttctgggatgggcatcctccagaaaagaaaggaactgtactggctactcacagggtccctcatagcttcctgttatcaatcaattactggcgtgttccaaagatggagggagtgcctcgggagctccggggtctgcgccgggctggagaaatacaaagctgttggggctttgacggctttgtcttctcactccttttccctcttcagtgaccggacgcgtgggtcgacggacgcgtgggtcgacgatatcccgggaattccggacc

SEQ ID NO: 127128 - DNA, 944 bp, Homo Sapiens
tgtatatgttttttatttttaactttcattttaagttcatgggtataagtgcaggtttgttacataggtaaacttacatcatgggggttcgttgtacagattatgtaatcacccaggtattaagcctagtaaccattactcatttttcctatcccaaagtcttatgagttgaatataaaacagaaaaacaccctttcttcacatgcatacgtttaataacatgaaagccaagacagaggtaaaaacactaaatcaacttggtatccgttttactccctaatattagggggacagtgaacatataactcaagcaataaaatgcctttggaaaccaagaagggaagggcccaagtttgataagggaaagccaacaatggctaaaacatccatgcaacacttcgtgaagtcccttctgccagcggctcccgtgtgtccatatcttggagtgtgttaggctactgcttcaagaacagaccgtggacctggcttcctcacttccccaaaagaattcctacagaaggctacaggaaaggcttcttggtaaccttctttgtttcaaacaatggaaaacatgagaaatggatagcaccctctcatccccaaaacaccatcatcatagcaaggataatgactcaatggagtttcgaatctgtatagtgctttatatgttttcaaataattttcacgtatatgatcttcattagcccatgcaacagccttgtggtttacaatggagaaagcagacaccagaaggaacttgctcaagatcatgcacccagatagtgggacaagtgggcgagcacccagactgcaccgtcagcccagcatttccagccggccattatatagctctctatcttgtcaccctctctgactttcttctcctctctatgtccaggctgcctgtcagttcacaatgctatctcactacagatacagatttc

SEQ ID NO: 127129 - DNA, 2130 bp, Homo Sapiens
gaaatattttaagtttcattttattattgcttgttagttgattaaagtaattcttcttccacttaatttttaaagacagtaattgctacactgaatgaaaccttaatgaagtttcattataagtatctattatcatttgattattttctacatagaagcatgcaaaaagtttaaaattcagtttcatttgacttagccttgactgtaatggaggactctatgaagaggggacacagtgcttatgggctggagtcccagcaactgcttggtggcagagtcccagtcgttccccagttcaagccgtgggcagatagatgggtactgtccttcagttcttcttacccattcacttgcttgctttattgcctcaaaagcccagggaatattcctggaaatagaagcgtcatccattttcatcagtgatttgaacactattccctctttttccaacctggtgcgaataaactgtagtaccagcattgtggcaattaggtccaggagacattctcttccttttacacctagagattgaatgcctttttgtttaagaaagctgtgcaaaccatttgtattaagatttaatataagtcccagttctggtgtaagtttccagaagccatcctctgtctgtagactgaggagttctgtccaaggcacagcatcctgccagtgttgtgtgcacactatttcatcctcttcttttacttccagaaagcacgggatactgtcatcttttgtatcacattttatttgtaaaaagcagctgtcttgaagtacttctgatagctcatcactttctgtgtcagaactttgaaaagcaaagacaggacatcgacttccttcgagactgcctactgattcttctagaagacagagatctactggggtagtccgggactgactgcaaagagcctcaggtaaagcagaggccattggcagcctaaggttggcagtcaaagaggctgcggaaggttgaaaatgaaaaggagagtaagcagagggatgataagacccaaaacctctgatgggatcagggtctgtaggaagagagaaatgaagctggggagaatccagctcagggaaggtgccagcagaaggcctggtagtaaagcctccaggatgttgcagtggagcagactgtgcagagcttaatgagctccctgaaaaaacaatgccacaatagggtgcagaaggtgggttctggggaggtcctgtgggacaagacgccgactgtgggatccagtcagcacaagtgccaggcacagggccttggctgaattgagatgcatcaaactgtctgggaggagcagctgaaccgaaactagctacctgacgatatgaggcaaaagacaaggaagcaggactgtgagcgcgggcagtcgggggaagataggaaccaacggccggagccaaaataggaaaaaagctagaagtagatgtttcccatggactgactttcttaaatagtggttcagttgctgttggtttacatgactctgtccaacttaaatccaatagcttttccacacctccacgttccaaatttgatgtgaaagctggtagtacacctaagccatcctcttcaaaatcttcagaaacttctggctgagataattccatttttcttttggaaaatggaattttcctatgttttcgtttggataaacgtaattctggccactcagaggatgctaaaagagactggttcctgacggcttcttggggctccccctgccagctcatgtagggcaggaagtctacatcttctttggcaataagttcagaaacttttggaatatcaggaaaaggcgactcattctcatcccttttctcaactgccacaaagcttgtaaattgtgttatgagagagttttctttactgagtttaataatcagagatttcaaggtttgttttttcatctcatgactggtttcattttcgtgaagaataccatcttcataatctctgattagagctcgggctgccagcttgtggatcatagttccagttgtcttctgaagctcagtagtcgacaccattgtacaaaattctttctcttgaattagtgcacacagagttgcttgtgtgcagtgaggaatgaatccatagacaaggagtcgatcattgcg

SEQ ID NO: 127130 - DNA, 1209 bp, Homo Sapiens
agcatacattggttctgtatatttcgagaatcacttaagtacacaaaggaagcgtgcaatgttagagagatgatgtgaacagtcttggtggtttatctaatggagaattcggtgtccttcaggaaactaaagatactcaaaagttgctccccaatttctattaacaatctaaaaatgaacatttccatttcatataaatatacaaatttaaaatgtgtgcagttcagaatggcctaccatttttagattgcttatgtgccagaaaatatacagtcaataaaaaaataccagagaggtggggacaaaaggctctctggatctgtacagcaacaatgaatatcacttcaacaggtagctattcgtggaggaagtggcatcctgggaaccaagaagcactgaaagatgggcagggtcacaaatctggtgatgggggatatgatgtatagtaaggcccgttttccctggcatcatattcaaggacaaaaggaggaaagtcaatctgttctggtgatatggcagaaaacagctggtggaggctgtccacatggtggattttgtccttcagtcctgagacagaaaaggtggtaaaaaaccatgttgacacctttgaacgaaatgtgggatgtacaaaataaacagccttcaaattcctcttgtacttgacatcaacaacatcgtagagtttcttcaggaagtcggagtccaggtgattgtattcgctggtcagggtgtgaaaatacactaatacatactccttcacagcaatgtgatccattacatgaatgaaatataagagagccttgtccatatctattaatgttacaggaatgtttcttccaactaccaccatcactgttcgaccacagttatcaacacctgtttggtataaggcttttagagaagcaatatcagacagatcctcagatcttgcttgacataaccagcgattataatttctttgatgctgcttctgcagagctgcctctgataattgtccctgaaggatcagttttctttgcttgtcaatatctccttccattcgagcaaaagcatgagagccaatgaaagagagatcaactcccaagccttcatcctcctcttcttggttatcttctggagcaccaggtttctcacttattctaatctgtcgttcaggtaccacaggctccccttctgcatttccaatatctgcaggtaggtagggcaatg

SEQ ID NO: 127131 - DNA, 1004 bp, Homo Sapiens
  misc_feature (733)..(733): n is a, c, g, or t
  misc_feature (789)..(789): n is a, c, g, or t
  misc_feature (883)..(883): n is a, c, g, or t
  misc_feature (885)..(886): n is a, c, g, or t
  misc_feature (894)..(894): n is a, c, g, or t
  misc_feature (902)..(902): n is a, c, g, or t
  misc_feature (926)..(926): n is a, c, g, or t
  misc_feature (931)..(931): n is a, c, g, or t
  misc_feature (942)..(942): n is a, c, g, or t
aagaatgttaagtaaacagattttattcaatctttcctagagtttataatgaacatttgttatttaatatggtagttatattacagttttaccttacgagcgatagaacatttggtgaataagattaacaaaccggaaatgatgataccctcgaagacactctctggaagcacaccagtcccactgactcatgttacaaatttaagttggcatccagctgatttgtagaatgtgttatcctgatgtttctgcaattataccacctgaagagggtccctgtcagtctctgataggataatatttatcttattctccaagtgagaatccagcatatctcgaaggtcagaaagaaagcctcgttcagtgttgctgtgttcacagaggatgacatttattccttgggaagcagcatccaaagtatcatgatgggacatctcacctgtgaggtaaaggtcagcctcaacaccctgcagaacgctgctcccagaaccagcacacagggccacgactttgacttgagactctaaggttctccccaccccaagggctaagcgaatatgagatagttttaggtgtctttttattcgatcaatcatggttgccagggagacagattcatccagtgtgcataaccgtcccattccagtatgtagaagcaaaggcttctccagtgacagatttccgtcttctgataagttgtttgttccgggaaagaaatctacacctgcatcanagcttctgagtacattcagattatccgtgtttgttctcattacagtcctagcaganaagagtgacagaacaccgtcatcctttcactgcagactgacttgtccagtctgggtgtagttacgttgattcaccgggtgttcctcttaggtantnnggacttgnaggattanggctggagtaaactccagccttancacantgtgacgctgnggcacacaagcgtgagaaataatcgactgttcaagcggtacaggtctcagttcagtacgccg

SEQ ID NO: 127132 - DNA, 1045 bp, Homo Sapiens
  misc_feature (1024)..(1025): n is a, c, g, or t
tggcacgaatttcggagccccatccgggctccgtgtgccccaccctcaatcgtttcaaccaaccacggccgagtttgtgacagtgtccccccccgcggcttagcaattgaaatttttagtctcttttatcgaccaacaggttgccaggaaaacagattccatcccgtgggcaaaccgtcccattccagtaggtagaaacaaggcttctcccagtgacagaagtttccttctttctgataaaagttgtttgttcccgggaaaagaaaattctaccaccctgcatcaaagccttcctgagtacattcagattaatccgtgttttgttcctcattaccagtcctagcagaaaaagaagtgacagaaacaccgtcaattcctttcactgcagacatgactttgtccaggtcttgggtgtagttgaacgttgaattgcgtacgtcggtggtttccctctgtagggtagttgggagctttggaaggatgtatgggcctggaggtacaagctccaagccctttagccaaccagttgttgacgtcctggggcgcagcatcataggctgtatgaggagagtagataccgactctgttctccagagcccggatcaccaggcgctccttccatgtgttccaggttatgcgcttcatgggtcggaagataggcggatggtaggagagaatgaggtctgccttcttttgcagcacctcctccatcacttcctcagtcaggtcattggtcaggaagagtgtatttacagtatgtggtgggcttggttccaccagtaatccaacattgtcccaactctcagcaaacgagagggatgcaaagtcattcaaggaagaaaggagagccttcaaatccatgaaggaacgggaagaattgcagatcagggaatctacataaccgcgactgtcgtggggactgggcgtacgctagatgacaacatacagaaatcagtaaagttccagtttcagtcccggaatcctcgtgccgattatctaaacaccccccaggggcctcgctacnncatagaccaggtatagtttt

SEQ ID NO: 127133 - DNA, 1244 bp, Homo Sapiens
  misc_feature (1077)..(1086): n is a, c, g, or t
ggactggtgagtagtgggcgatttaaaaacccgcgagtgtagttgtgaccttcgcggtaggtgccggttggggccggctgtgattgttatcttggtgctgcagaggacagcagaagaggagattgggtcagaaaactgccctgccgcaccagagcacagcgcactagtgggacaggggtcctgactcagacttaactggctgtgtctcgtggtttttcactgtcctggaaaaggcctgaagtggcactgaaatgaggcatagatgagtccccacgacagtccggtttgtagattccctgatctgcaattcttcccgttccttcatggatttgaaggctctcctttcttccttgaatgactttgcatccctctcgtttgctgagagttgggacaatgttggattactggtggaaccaagcccaccacatactgtaaatacactcttcctgaccaatgacctgactgaggaagtgatggaggaggtgctgcaaaagaaggcagacctcattctctcctaccatccgcctatcttccgacccatgaagcgcataacctggaacacatggaaggagcgcctggtgatccgggctctggagaacagagtcggtatctactctcctcatacagcctatgatgctgcgccccagggcgtcaacaactggttggctaaagggcttggagcttgtacctccaggcccatacatccttccaaagctcccaactaccctacagagggaaaccaccgagtagaattcaacgttaactacacccaagacctggacaaagtcatgtctgcagtgaaaggaattgacggtgtttctgtcacttctttttctgctaggactggtaatgaggaacaaacacggattaatctgaattgtactcagaaggctttgatgcaggtggtagattttctttcccggaacaaacaactttatcagaagacggaaattctgtcactggagaagctttgcttctacatactggaatgggacggtatgcacactggatgaatctgtctccctggcaacatgattgatcgaattaaagaacctaaatatttcatattcgttactnnnnnnnnnnaaccctattccatcacctgccccttgcggttcggccccccccgggtgggggccctccccagggaatcccccaaatgggtgccggaattttccttgcccaaggttttccaatgtcctcaaaatcttcaaggcgctgaaaccaccaagggcggcgcggtc

SEQ ID NO: 127134 - DNA, 789 bp, Homo Sapiens
  misc_feature (48)..(48): n is a, c, g, or t
  misc_feature (167)..(167): n is a, c, g, or t
  misc_feature (312)..(312): n is a, c, g, or t
tccaggtggacagaaatttccgttctttctgataaaagttgttgtttncccggaaaggaaaaatttacccacctggcatccaaagccttttgagtacaaattcagattaatcccgtgtttgtttctccattaccagtcctagcagaaaaagaaagtgccagaaacanggtcaaattcctttcactgcagacatgactttgtccaggtcttgggtgtagttaacgttgaattctactcggtgttttccctctgtaggtaggttgggagctttgaaaggatgtatgggctggagggtacaagctccaagccctntagccaaccagttgttgacgccctggggcgcagcatcataggctgtatgaggagagtagataccgactctgttctccagagcccggatcaccaggcgctccttccatgtgttccaggttatgcgcttcatgggtcggaagataggcggatggtaggagagaatgaggtctgccttcttttgcagcacctcctccatcacttcctcagtcaggtcattggtcaggaagagtgtatttacagtatgtggtgggcttggttccaccagtaatccaacattgtcccaactctcagcaaacgagagggatgcaaagtcattcaaggaagaaaggagagccttcaaatccatgaaggaacgggaagaattgcagatcagggaatctacaaaccggactgtcgtggggactgggcgtacgcaagatgacaacatacagaaatcaggtaaagttcaagtttcagtcccggaaacttctctgcccc

SEQ ID NO: 127135 - DNA, 409 bp, Homo Sapiens
gtctttaaaattgttgtaaatctctgtatgcactttgcttttttattaaacgtactccaaggtgagtcttgactctttagtgtaggacaagattgtacactaacaccagcatggacctgcttttcattgtgtctgaaatgtgagccacgtagtgtcggcctgctgtgaagttaacattgccaggacgattcttctacagaaataatttcaatttttttcagtatttagtagtgaaagatattaatacattaatggtaatacatttctggtttaatataaattaaggatgttttctagttgtgcatgaatgctggcaacttagtaagttttgacaattgtttaaatatgtaatgttaagcttaggtttaaaaaagtaaagctggtaaactgggtctttgtcatttgcttt

SEQ ID NO: 127136 - DNA, 1594 bp, Homo Sapiens
  misc_feature (61)..(87): n is a, c, g, or t
gtgccaagctaaaattaaccctcaactaaagggaataagcttgcggccgcatacgcggtcnnnnnnnnnnnnnnnnnnnnnnnnnnnggggtttataaagtttttattttccattttcttaaaaataacatttgatttcctttatgcatgtgtggagtgtacttgtttccttaggctgagtaataggcagataaagacgacacgaggcagggtccccaagtggaggcagggcgggacgtgagaggatgggggcgcaggggaaaggcagggctggatgactcacgggactcttgagtgcccatcaacgcacacgcacacagtctaacactttgtttttcaattttttaaaagacatctaaaattactgagagatacaatttcagcagttaaatctacagacggaaatccaagcacttgaacacaattcctaactctaagctcagttattgcacatcacacagtttaagcaggcttcaggctggaaagcagtttgctctgctgggaacttcctcgggatgtctgggtctccttctgtggtgtctctcccctgggactgccgccagcccgcagcctctcgacgaccccaggtatcaaagctcagccatttgttctccccaggggctgagggctcgggctttggtgaagcagagggtccccgtgttgatgccaacggaccccaccccctccaaagtgaagttggaagcaggtgaagctcatggaaggctgaaggcaggcgggctggagtgaaggggggtgaccaccccccacgtgtgggacaacagggggcagtcaagatgccgccacccaccacccctcccttccaagctcccaggccatgcttccttctccatcacccttggaccctctgctgagtgttctctcaaggcacatttattgttgctctgctgcaacctaccagatctgacatccacctcccccagcacccatgggccaaggaggcctggggcagccaaggggagttccaggaccaagcaagcaagaaaccgttctttgaacacatggttaagcttcttccagcatggccctaattcccctacctgcctaagccaggggactgggggcaggaaggagcgaggcatcgaggagagggcactggaggggctgggtggcaggccccttggtcaaggtcacaaatcaaggagctgaggaaggaccgatctgcaaccttgctcatgaggaaaccttaaccttgtctaacaaaaagccactttgaggccgcccttcagctccacagggagctgctgttttgtctaccttttgaggggaccagtctcagtggggcgaaaggcagtgtgggggcttcggaaacaggcaaggctggacccctgcaatcctaccagaggctagttcagtcccttttgctttcttcctaaaacatatttacaaggacacacaaacgtgcacagccagaagacccagagacagagagagcacgtgtcccaggagcggagggtgacatcaagaggacaggggacacccttcctctgaactccttccttccccaggccccccctcgtgccgaattcgccacccaggcctcgctaccttaaaaccgttagtagttacttgccgt

SEQ ID NO: 127137 - DNA, 1293 bp, Homo Sapiens
  misc_feature (41)..(53): n is a, c, g, or t
  misc_feature (1180)..(1214): n is a, c, g, or t
tttaaggattcaaaataaatttttatttgcaaaattaaatnnnnnnnnnnnnncaggaacagaaaactagtccgaatcaggttccttcttctttcttctcgtcccttttggatgagtcccagactctgttttttctttgttgtgttcagtttgttgtgtcatccactctttttctagctgtttcagcatgtctggagtgaggagtccttgctgcaccaatctggaagcaagggacagctctcctgcatcggggctgggtggctcagtagctttactccctagagctttggtgccgcgtgtccttctagcttggctctttaaggttcctgacaatcgtgactggctccctgatggaaagccctccaaattcaacagcttatgcgtctcagacattttaatcaatttagtgatattgtgcacaccatcttggataataccatctagttctttctggagatctcgaataaggctggcatctggaaacatatccataaatcggtagcttagccacaagtaaagatccaagacatcgtggacagcttcaagatccatgaggtctttaatattcttaggtggaagtaaaggccatttgatgtatcggcgtaaccatgcaaaggtcaggggctcattcctgctatactgcctggcaaactgtaacagtgaagaacacacaaaaggctgcttcttgttgataggagctgtgcagaaaacatacctcactcgcagacttagtggaatatgctggatcaactctgcagaaaatttaaaatcatccatattgcagacaaaatactgcccatcaacttgtgaaaagtctacaaaaatatcaatgagattggacagtgttgcatcagggagatggtaggcaaacatttcaatctgctcagcagttggatgaagaccagctgcccttataggatccacaggcctcttcaaaatttcctttaataaactgagatcttcatgattcattgttgtaacctctccttctttaaaccgtgagctgaatctgccagctctgccagcaatctgcagggcttgagaggttgtgattggttctagttctctctctcccttttcattgatactgggctttataagggagtaaaaaataattctccttatgctccccggccgtaatggccgaattcccgggcatatgtccggtaccgtcgactgnnnnnnnnnnnnnnnnnnnnnnnnnnnnnnnnnnncggccgcttcctcgctcactgacttcgctgcgctcgtcgttcggctatacgcgcagcccctatagtgatcatacatttt

SEQ ID NO: 127138 - DNA, 2591 bp, Homo Sapiens
  misc_feature (2170)..(2170): n is a, c, g, or t
  misc_feature (2298)..(2298): n is a, c, g, or t
  misc_feature (2348)..(2348): n is a, c, g, or t
  misc_feature (2354)..(2354): n is a, c, g, or t
  misc_feature (2502)..(2502): n is a, c, g, or t
  misc_feature (2507)..(2507): n is a, c, g, or t
  misc_feature (2556)..(2556): n is a, c, g, or t
  misc_feature (2580)..(2580): n is a, c, g, or t
agtgcagcttttttgaaatggcagcagctctggattctttctacctcaaggagcagaccttttatcatgtggcatcagacagcatagaatgcagcaattttttaacttcctatagccccttcagctactacactgcatgttgcaggaccataagcaggggtgtgtcaggcttcatcgactctgaacaaggtgtctttgaagcccctactgttgcattttcttcccttgagaagaaatgtgaggttgatgccccaagctccgttcctcacattgaggagaacaggtatctctttccagaagtggacatgactagcacaaacttcacaggcctgagctgcagaaccaacaagactctcaacatctaccttttggattcaaatttgttttggttatatgcagagagactgggtgctccgagctccactcaggtgaaagaatttgcggcaattgttgacgtgaaagaagaatctcattacatcttggatccaaagcaagcactgatgaagctcaccctagagtcttttattcaaaacttcagcgttctctatagtcccttgaaaaggcatctcattggaagtggctctgcccagttcccgtctcagcatttaatcactgaagtgacaactgataccttttgggaagtagtccttcaaaaacaggacgttctcctgctctattacgctccgtggtgcggcttctgtccatccctcaatcacatcttcatccagctagctcggaacctgcccatggacacattcactgtggcaaggattgacgtgtctcagaatgaccttccttgggaatttatggtcgatcgtcttcctactgtcttgttttttccctgcaacagaaaggacctaagtgtgaaataccccgaagacgtccccatcacccttccaaacctgttgaggttcattttgcatcactcagaccctgcttccagcccccagaatgtggctaactctcctaccaaggagtgtcttcagagcgaggcagtcttacagcgggggcacatctcccacttggagagagagatccagaaactgagagcagaaataagcagcctccagcgagcacaagtgcaggtggagtcccagctctccagtgcccgcagagatgagcaccggctgcggcagcagcagcgggccctggaagagcagcacagcctgctccacgcacacagtgagcagctgcaggccctctatgagcagaagacacgtgagctgcaggagctggcccgcaagctgcaggagctggccgatgcctcagaaaacctccttaccgagaacacgtggctcaagatcctggtggcgaccatggagaggaaactggagggcagggatggagctgaaagcctggcggcccagagagaggtccaccccaagcagcctgagccctcagccaccccccagctccctggcagctcccctccacctgccaatgtcagcgccacactggtgtctgaaaggaataaggagaacaggacagactaactttttaaatgatatgaagaaatcagaggtgaaaattgtacattgggaatatatttatgcaaattttattgaaatttattgtaaataaagattttctcagtggtctagaaaatcagcttgaatgtcattcagcatttattgaagaaggatgacatcccttccacttattgcacaaacttggtagctttgagacaaatacagtagcacagtccgtttgaagatttgtccaaaaaattagtccatattttagtggctcagtgtcaagagttccctccctgtgcccccactgttgcttctgcagtgatacgaaggatgaatgcttaatttcttattagtcagaaaacttgaatgcaacagttgggcattcaaaaataatccagagaggtcataacctacttagccatttgagtgtggctctggtgtctgctaaaaaaagtagctattgaaaaatcagaacagtgagagctatgatgtggttcactcattctagaagcattttcattttcctcccgaaaacccccccagtgcctcaccgagccccggaccttcacccaacacggctgccacgctcaaatgggcctgattcaaactcccaggtacgtccctggcaccagggagtaggataagaaaacctccagaagtgaaactgatgaggaagtgacatttaatcacttcanaaccgaaacttcactggcaaggtcaaaaccccaggccaaggctgacaatcgagcgctggtcagttccaggggtcaggctcggaacctgaaaatgcagatcctagctgttgctgcgtccctcaagtgtnggaggaagggaaaaacagctaggtgtatgtgctggctgtggtgagagtcnaggtanacagctgggagtttctgaacgtgaggggatggatcacacgcccagcttttctcactcaccaaagcaacttttaccccttctccagtcggaactttgggacttgtctcctcctaggctggttcagtggcccacacgtgtctgccaccanctgcnggttctgtgaatcagctaccacacactctctgactgcaacatcatacanagtgtgcttctgctctaagcccanagcactgaggg

SEQ ID NO: 127139 - DNA, 636 bp, Homo Sapiens
gggcgttacaccgtccattttaagaagagctgtgtgctccctttggttcccgagaccccgcttatagccagcgatgcagaaatgaaccaccggagttcaatgcgagttcttggggatgttgtcagggacctcccattcataggagaagtttcagtctagaaggcttgaccggaggagttggtgtcggaaaccagccatcctcatctctagaagtaagctctgccaatgccgaagagctcagacacccattccgtggtgaggaacgggttgactctttggtgtcactttcagaagaggatctggagtcagacccgagagaacataggatgtttgatcagcagatatgtcacagatctaagcagccgggatttaattactgtacatcagccatttcctctcccttgaccaaatccatctcattaatgaccatcagccatcctggattggactattcacggcccttccaccagtaccttccaccatacccgtgctaatctgactgagagtataacagaagagaactataatttcctgccacatagcccctccaagaaagattctgaatggaagagtggaacaaaagtcagtcgtacattcagctacatcaagaataaaatgtctagcagcaagaagagc

SEQ ID NO: 127140 - DNA, 765 bp, Homo Sapiens
  misc_feature (580)..(580): n is a, c, g, or t
tttgctcttcttgctgctagacattttattcttgatgtagctgaatgtacgactgacttttgttccactcttccattcagaatctttcttggaggggctatgtggcaggaaattatagttctcttctgttatactctcagtcagattagcactggtattgtggaaggtactgtggaagggccgtgaattgtccaatccaggatggctgattgtcattaatgagatggattttgtcaatggagaggaaatggctgatgtacagtaattaaatccctgctgcttagatctgtgacatatctgctgatcaaacatcctatgttctctctggtctgactccagatcctcttctgaaagtgacaccaaagagtcaacccgttcctcaccactgaatgggtgtctgagctcttcggcatttgcagagcttacttctagagatgaggatggcttgtttccgacaccagctcctcctgtcaagccttctagactgaaacttctgtaattaaagtcagcactcaggccagcagagtactgcacaccagaggggcaccagctcatacttctcctatgaatgggaggtctncctgacaacatcccccagaactcgcattgaactcccgtggttcatttctgcatcgctggctgcattttccccaggccccagctgtgccttcggaaggagaaaagaaagccatggagcctccttagaccgagcagtttgaggcacttaatgatactgtccatctcctcttctcccgttgcccttgg

SEQ ID NO: 127141 - DNA, 1447 bp, Homo Sapiens
ccagaacttcacaggaaatttattattttttgaaagggctgagggagactttacaagggtctgaagctggtaactagaaagaaagataaataaaatacgaagccagtatgttgtggcaaaattcgagaaaacacactgaaaaaaatctttacagtttaaaactgcttcactttatacataattacaaatgaatatacagcatctgggttttaacccgtcttttttatttaataggatttagcacacaaatgtccatagagcatttgcaaacaagcaatgagagcagaggtatccggtgtatcccaaccaccctcctgcggatccccacgcctcccctgcgcatcccatgcgggcagcagcacacaggagaccacaggctaagcctgaaccacaggcagactcaccaggcacgccccatggcctgtgctcatgccctcaggtggtgacgaaaggtaggggaagctcaggccggggaaggtgtggggggtgagtgcttcctgcagaagcccctccggactgcagcacaggtggtcccacctggttgtagggcaggtcactcacttcggtggcaggggacacagccagtggggggttgcacgcctttaacccttagtgagatggagaagtaattcatggcctatcaatcttttgacaattaaattagatgagtacttggaaagatgcctttatttttccttcctcccccccggctcccttttatggcagcattaaaacacttttcattttaaagcctggccagcaggcagtagattccaaggctctggttaactaggaatgctttgctacattgaaaggaaagttcaaaaccaagcccaaactccctgccctcttctttgtctctgaggatggacgagagcgacggggctggctgggacgcatccataggtggctgcgcacctagacggtcctgctgaaggaaggcaaggcacacagatctccagcagccgctgccccaattccatccacagggttatttttaggctcccacattccaaggacatccaaaacgcagagggtgcacatcgttctgcagtgtctggggtcacctcacagccaccctctttgtgaccacttgaagcccattcaccaggactgtctttctaaactccctcccggggcctgccctggctgtcctctgggcacagctgggccaccatcattagagtaaacctcaactccaatgcaaatactaaaatccttgggaagacctggctacagaaaaagagccctagaaacaaaaatgatgaaatagaaagcacttctgtggacagcaacttctggatcaagttctggcctctaagattatagtcccaccctctactaaggcagggtctatctagttcaacccttgcatgcactaacacctcccctcccacatcaagaaacaacgcccaaggtctcaaaactttgtgctcacgactaatac

SEQ ID NO: 127142 - DNA, 1248 bp, Homo Sapiens
  misc_feature (483)..(531): n is a, c, g, or t
ttttggtgcgagagaaacaataggacggaaacgccgaggaacccggctgaggcggcagagcatcctggccagaacaggccaaggagccaagacgagagggacacacggacaaacaacagacagaagacgtactggccgctggactccgctgcctcccccatctccccgccatctgcgcccggaggatgagcccagccttcagggccatggatgtggagccccgcgccaaaggcgtccttctggagccctttgtccaccaggtcggggggcactcatgcgtgctccgcttcaatgagacaaccctgtgcaagcccctggtcccaagggaacatcagttctacgagaccctccctgctgagatgcgcaaattcactccccagtacaaaggtaagtcccagctgctggaggggttgccacactggcgaggagatgtgagagatcgtggccatggaaggccctggcagccatccctggagccctcannnnnnnnnnnnnnnnnnnnnnnnnnnnnnnnnnnnnnnnnnnnnnnnnggccctcagcccagcatctcacaccctcagttttcaatccctggtaagattgctcaattctgttttgttgtgtggatttgagtttgattttggtagaagtgtagttgtgttttatgttcaggtgtctcttgatcacagtaacccatagtcccccactggggggacggtgggggaagactttgggaggattttacccagaatacttgccgcctgctttttgtcctccaggaaaccagaagcccgggtaattaggacaaagccaaaggccccttgttagctggccatccctgccccattttttcccctggtcctttcccctgtggccacagggaagtgtggcctgaataccccaccccggctcctctgcacccagagctgggggccacctcagaagtgtcatctctctctgagcacgcattcccctgcagcagtcgaggactgagcagattgagtgatgctggggcagagaggcctgggaggaaaggtgttcagccagtcgtttgtaaggcgctcgtcggcacctgctgaaacgcccccacctgacagccccatcctcaaagactgtcttaattactcatggcaggttctagagacttaaggggaaaagctgctttcaaggccaccacatgtctgtgctccccaaccagctctatctgccttgtgttcattttgttattttgtgacgtgagactgcaaagaccaataaaaacatatttt

SEQ ID NO: 127143 - DNA, 1016 bp, Homo Sapiens
  misc_feature (140)..(183): n is a, c, g, or t
agtttgcgggaatttttaatgccctaaacagaaactccaacagcctcatggcttgctttaaagcagagcctgaatacagggggaacacaggtttgcctgagggttaagaagcatccaagagtaagggaagactgggtaannnnnnnnnnnnnnnnnnnnnnnnnnnnnnnnnnnnnnnnnnnnagacaccctagcaaaggcttcccacagtgcccccacacgggtaggcacccaggccttttgttcttataaaatatgtttttattggtctttgcagtctcacgtcacaaaataacaaaatgaacacaaggcagatagagctggttggggagcacagacatgtggtggccttgaaagcagcttttccccttaagtctctagaacctgccatgagtaattaagacagtctttgaggatggggctgtcaggtgggggcgtttcagcaggtgccgacgagcgccttacaaacgactggctgaacacctttcctcccaggcctctctgccccagcatcactcaatctgctcagtcctcgactgctgcaggggaatgcgtgctcagagagagatgacacttctgaggtggcccccagctctgggtgcagaggagccggggtggggtattcaggccacacttccctgtggccacaggggaaaggaccaggggaaaaaatggggcagggatggccagctaacaaggggcctttggctttgtcctggaaaaaaacaacagagaaggaccaagtgagggcccccaactcccccatccccaccgcaatacacatgcatattcagagtacagagaaaggcacccagtacattctgtccttaaagacaatgtttcaacagtcccaaaagaacctaagttgttctagagtcctttatgtaaccaggtaatgcacatttaaaattaatttctttaatggattcttacttgatttacaaaagactcccccactccccaacaaagaccccaccatgctggtggctgctgatgtcccctgtaaaatacattat

SEQ ID NO: 127144 - DNA, 444 bp, Homo Sapiens
  misc_feature (208)..(208): n is a, c, g, or t
  misc_feature (400)..(400): n is a, c, g, or t
atggccagctaacaaggggcctttggctttgtcttgatttacaaaagactcccccactccccaacaaagaccccaccatgctggtggctgctgatgtcccctaattacccgggcttctggtttcctggaggacaaaaagcaggcggcaagtattctcgggtaaaatcctcccaaagtcttcccccaccgtccccccagtgggggactnatcgggttactgtgatcaagagacacctttgtactggggagtgaatttgcgcatctcagcagggagggtctcgtagaactgatgttcccttgggaccaggggcttgcacagggttgtctcatttgaagcggagcaccgcatgagtgccccccgacctggtggacaaagggctccagaaggacgcctttggcngggggctccacatccatgggccctgaaggctgggctcatcctcc

SEQ ID NO: 127145 - DNA, 940 bp, Homo Sapiens
  misc_feature (43)..(43): n is a, c, g, or t
  misc_feature (46)..(46): n is a, c, g, or t
  misc_feature (104)..(104): n is a, c, g, or t
gctctgctgaacattttcggattctggttggcctgccttctcnttngaagccatcatccaccatgttgtcgtgtgccccatcttgagtccaaggacacaaggcnacctcatagcgggaagtcaggtttttccagtaagataaatttgtactgttcccgatgctttgcattctccttcattctctgtaactgttgctggtgacatttcatgctccaaggggttatagtgtttaagctgggaacttatattccccttcttctctacagtgtagtacaagacttcagatttctttagccactcaaattcttcttctaacttatggctcttcattttctcctctttacggtgctgacgcacccagtccttaggggtcttttctgtttctaagacatgatgttttttgtttgttgtccaccttaggagcttactttttggttcacagtctgaattatctacaatgtccacaattccatggtcccctttcaatggatatgctattagacacaagttcctgtcttcatcttcttcaaagcgcacagataccacacctttgtactggggagtgaatttgcgcatctcagcagggagggtctcgtagaactgatgttcccttgggaccaggggcttgcacagggttgtctcattgaagcggagcacgcatgagtgccccccgacctggtggacaaagggctccagaaggacgcctttggcgcggggctccacatccatggccctgaaggctgggctcatcctccgggcgcagatggcggggagatgggggaggcagcggagtccagcggccagtacgtcttctgtctgttgtttgtccgtgtgtccctctcgtcttggctccttggcttgttctggccaggatgctctgctgccgcctcagccgggttcctcggcgtttccgtcctattgtttctctcgcaccaaaaaa

SEQ ID NO: 127146 - DNA, 1339 bp, Homo Sapiens
  misc_feature (214)..(257): n is a, c, g, or t
tccatcattgaaaatgtttattaatttttatgtaattcttctaatcctaaaagactgaaaacattgctctttatagtttgcgggaatttttaatgccctaaacagaaactccaacagcctcatggcttgctttaaagcagagcctgaatacagggggaacacaggtttgcctgagggttaagaagcatccaagagtaagggaagactgggtaannnnnnnnnnnnnnnnnnnnnnnnnnnnnnnnnnnnnnnnnnnnagacaccctagcaaaggcttcccacagtgcccccacacgggtaggcacccaggccttttgttcttataaaatatgtttttattggtctttgcagtctcacgtcacaaaataacaaaatgaacacaaggcagatagagctggttggggagcacagacatgtggtggccttgaaagcagcttttccccttaagtctctagaacctgccatgagtaattaagacagtctttgaggatgggtctgtcaggtgggggcgtttcagcaggtgccgacgagcgcctttcaaacgactgggttgaacacctttcctcccaggcctctttgcccccagcatcactcaatctgctcagtcctcgactgctgcaggggaatgcgtgctcagagagagatgacacttctgaggtggcccccagctctgggtgcagaggagccggggtggggtattcaggccacacttccctgtggccacaggggaaaggaccaggggaaaaaatggggcagggatggccagctaacaaggggcctttggctttgtcctaattacccgggcttctggtttcctggaggacaaaaagcaggcggcaagtattctgggtaaaatcctcccaaagtcttcccccaccgtccccccagtgggggactatgggttactgtgatcaagagacacctttgtactggggagtgaatttgcgcatctcagcagggagggtctcgtagaactgatgttcccttgggaccaggggcttgcacagggttgtctcattgaagcggagcacgcatgagtgccccccgacctggtggacaaagggctccagaaggacgcctttggcgcggggctccacatccatggccctgaaggctgggctcatcctccgggcgcagatggcggggagatgggggaggcagcggagtccagcggccagtacgtcttctgtctgttgtttgtccgtgtgtccctctcgtcttggctccttggcttgttctggccaggatgctctgccgcctcagccgggttcctcggcgtttccgtcctattgtttctccctcgtgccgaattcaccacccagcctcgcacctcgccgta

SEQ ID NO: 127147 - DNA, 1195 bp, Homo Sapiens
  misc_feature (220)..(263): n is a, c, g, or t
tttttttccatcattgaaaatgtttattaatttttatgtaattcttctaatcctaaaagactgaaaacattgctctttatagtttgcgggaatttttaatgccctaaacagaaactccaacagcctcatggcttgctttaaagcagagcctgaatacagggggaacacaggtttgcctgagggttaagaagcatccaagagtaagggaagactgggtaannnnnnnnnnnnnnnnnnnnnnnnnnnnnnnnnnnnnnnnnnnnagacaccctagcaaaggcttcccacagtgcccccacacgggtaggcacccaggccttttgttcttataaaatatgtttttattggtctttgcagtctcacgtcacaaaataacaaaatgaacacaaggcagatagagctggttggggagcacagacatgtggtggccttgaaagcagcttttccccttaagtctctagaacctgccatgagtaattaagacagtctttgaggatggggctgtcaggtgggggcgtttcagcaggtgccgacgagcgccttacaaacgactggctgaacacctttcctcccaggcctctctgccccagcatcactcaatctgctcagtcctcgactgctgcaggggaatgcgtgctcagagagagatgacacttctgaggtggcccccagctctgggtgcagaggagccggggtggggtattcaggccacacttccctgtggccacaggggaaaggaccaggggaaaaaatggggcagggatggccagctaacaaggggcctttggctttgtcctttgtactggggagtgaatttgcgcatctcagcagggagggtctcgtagaactgatgttcccttgggaccaggggcttgcacagggttgtctcattgaagcggagcacgcatgagtgccccccgacctggtggacaaagggctccagaaggacgcctttggcgcggggctccacatccatggccctgaaggctgggctcatcctccgggcgcagatggcggggagatgggggaggcagcggagtccagcggccagtacgtcttctgtctgttgtttgtccgtgtgtccctctcgtcttggctccttggcttgttctggccaggatgctctgctgccgcctcagccgggttcctcggcgtttccgtcctattgtttctctcgcaccaaaatggctgcccc

SEQ ID NO: 127148 - DNA, 944 bp, Homo Sapiens
  misc_feature (396)..(424): n is a, c, g, or t
agcatatgggaatcgaagggttgcgttcatatagcaattgtgggacaattctggaaccagccaagggccttgggctaatcaagcacagggcctccccactccgggcatgcccatctgactcaacgctgctccccgtccttacctaattagcccgggcttctggtttcctggaggacaaaaagcaggcggcaagtatttctgggtaaaatcctcccaaagtcttcccccaccgtccccccagtgggggactatgggttactgtgatcaagagacacctgaacataaacacaactacacttctaccgaaatcaaactcaaatccacacaactaaacagaattgagcaatcttaccagggattgaaaactgagggtgtgagatgctgggctgagggccnnnnnnnnnnnnnnnnnnnnnnnnnnnnnaagcacagagtgggagggagtgagggctccagggatggctgccagggccttccatggccacgatctctcacatctcctcgccagtgtggcaacccctccagcagctgggacttacctttgtactggggagtgaatttgcgcatctcagcagggagggtctcgtagaactgatgttcccttgggaccaggggcttgcacagggttgtctcattgaagcggagcacgcatgagtgccccccgacctggtggacaaagggctccagaaggacgcctttggcgcggggctccacatccatggccctgaaggctgggctcatcctccgggcgcagatggcggggagatgggggaggcagcggagtccagcggccagtacgtcttctgtctgttgtttgtccgtgtgtccctctcgtcttggctccttggcttgttctggccaggatgctctgctgccgcctcagccgggttcctcggcgtttccgtcctatgtttctcatccagggaattccggaccggtccagc

SEQ ID NO: 127149 - DNA, 1492 bp, Homo Sapiens
ttacaataaacaaaaagatttgtattagaacatatacactcagggaagaaagaggtatcatcatcaaatgtggaatgttgaagaaatagttaaaataaataaagactccaagcacagctgggactggctcaggctggggctcacagaggccactgcacatcagctccaggctgcaggagccaccacctggccatactggcttcctccctgacgcagcacagctgtgcctgggacacagagtcgctctcaagtactggagcagctagcaagctcactccccactctcctcacttatctctgtgacaatgtctatcaggctctggagcccgaagatatagccagcatcctggccctcatgcaccacggtgtcctcgccatacagcctgcaggtggtgtgtgcaaagtcgatcatgcgcacatctacagagctggcgccgatgggtttgtaggcataggcaccagcagactcatcagctgattcctctgacaggtcctccaaatcctcagcatctgagtccaggaccacttcgggccgctccttgccatcataaatgaccagcagggagcttgagtagaagcggtaggactcctgtcgctccaacactgccttgagctcagtcagcttcttgagcacagggcccaggagttcacggcgcaggtaccgcccattgtggaagaactggaaaagtgcctccttgaagccctgcaccgatagcttccgtccatggtacttgttcatgaacatgagctgcccactgcctgcttggtacacctgcatgccacacacacgcacaccaatgactgcagatgtgctctgctgacattttcggatctggttggctgccttctcctctgaagcatcatcaccatgttgtcgtgtgcccatcttgaggtcaaggacacaaggcacctcgtagcgggaagtcaggttttccagtaagataaatttgtactggttccgatgctttgcattctccttcattctctgtaactgttgctggtgacatttcatgctccaagggttatagtgtttaagctgggaacttatattccccttcttctctacagtgtagtacaagacttcagatttctttagccactcaaattcttcttctaacttatggctcttcattttctcctctttacggtgctgacgcacccagtccttaggggtcttttctgtttctaagacatgatgttttttgtttgttgtccaccttaggagcttactttttggttcacagtctgaattatctacaatgtccacaattccatggtcccctttcaatggatatgctattagacacaagttcctgtcttcatcttcttcaaagcgcacagataccacacctggaagggggtgaggagcagaaagaacttttaatttagcaggaagaagcgttgtaagtaacatgattgtaacatttgtttttttcttacccagttccttagtctctatgttgccagaggccccaaactcatctgcaaactt

SEQ ID NO: 127150 - DNA, 916 bp, Homo Sapiens
ttaattgggcctttgccagtttcccggtccccaaatttaccaaaatgaaccccagggcagatagagctggtgggggagcacagacatgtggtggcttgaaaagcagcttttccccttaagtctctagaccctgccatgagtaattaagacagtcttgaggatgggggctgtcaggtgggggcgtttcagcaggtgccgacgagcgccttacaaacgactggctgaacacctttcctcccaggcctctctgccccagcatcactcaatttggtcagtcctcgactgctgcaggggaatgcgtgctcagagagagatgacacttctgaggtggcccccagctctgggtgcagaggagccggggtggggtattcaggccacacttccctgtggccacaggggaaaggaccaggggaaaaaatggggcagggatggccagctaacaaggggcctttggctttgtcttgatttacaaaagactcccccactccccaacaaagaccccaccatgctggtggctgctgatgtcccctttgtactggggagtgaatttgcgcatctcagcagggagggtctcgtagaactgatgttcccttgggaccaggggcttgcacagggttgtctcattgaagcggagcacgcatgagtgccccccgacctggtggacaaagggctccagaaggacgcctttggcgcggggctccacatccatggccctgaaggctgggctcatcctccgggcgcagatggcggggagatgggggaggcagcggagtccagcggccagtacgtcttctgtctgttgtttgtccgtgtgtccctctcgtcttggctccttggcttgttctggccaggatgctctgctgccgcctcagccgggttcctcggcgtttccgtcctattgtttctctcgcaccaa

SEQ ID NO: 127151 - DNA, 720 bp, Homo Sapiens
tttcaccattatttgttaattttattttgatttttaaaaggcattattcagtgtacaattaacaaagaaatcagttttctactctactgtacttaggatgcttcaaaaacatcaggtgaaatgatctatgctttaagagccagaaaactcaggcctcagcaactaaaacagagaattccaaaattgtaattacaaatcagatggtaagcctaatttcatgcccctaatattcagatttgtggacactgcaagaggaaatatcatttgcttccaaatatctggcttgaatattgctgcagttaaaggatctcgctaaggttaaacaacaaacccaaaccacttagagcttcacagtttagctgctttagcaagtgaagaggtagtcggtattcaggatgctgtgggaatgcaaatgatttgattttgaggcatggctgttcctttttcactatgcccctcactctgaacaagctcatgctttcactcaatcaaaacctacttatcacagccgttctccaggttccgaacctccgtatggcagatcaaagtccataatcatttctatttataaatgccaaaatagtcattaagattatctgaggacatcacttccataggtaatttaaaggatttcttttcaggtagagcagcacttaaagcacataccttctccagtctttctgggtcaaagaatatgagcagagtcaccctgcgtttggt

SEQ ID NO: 127152 - DNA, 807 bp, Homo Sapiens
gatgtggaaaggaacaacatttattgagctcttatcgggtgctagacccagttctaaggtcttaaccctcagtaatccctgtggccaccctgttaggtggatgggggctgagctcactggacagatggggtaacgggaggcacacagaggttacgacactaaccagatagaggctccagatcctggagctgaaaaaacccttgtttggggtcttaagaccagaatgggacccagatcatccccctgagtcaaccctgggtggaggaaaccgtctactccacactgactgtacaagtcaggcatcaggggatgggagaccctgacatttagagccttaaaaagaccttctacactgtttagtatggtcagtttgaggtcatataaggagaatcaggagattccctcaagccccgtcctctcttcttgaaccatagtttctcaatctgtaaaataggaccgagttctggaaattcttttctcagtcggccagcaggtggagcccactcttcatgccttcctcagcctccagaaagctgcggcgtcccggggaggagggtgtgttctggggctgatccctctggacttctgggacaaagcaggatcgctgctcagccccagcccggcagagcggcccaggagccccgggtgactgccccggacttcagggcccggcttcgctttccgccctgcaggacactccaggtactgcatggccccgggccccaagggcagggagcgagaccctggagtgaagaccccccggccccctcgtccgattcccacccagcctcgtacctagccgtaata

SEQ ID NO: 127153 - DNA, 1085 bp, Homo Sapiens
ctgctgtgtgtttctattaggtttcagaaaagggatccctaacatcagaagagtttgctaagcttgtgggaatgtctgtcctcctagccaaagaaaggttgctgcttgcagagaagatgggccatctttgccgtgatgactcagtggaaggcctgcgtttttacccaaatttatttatgacacagagctaagggttttgtatttaaaatcctttttgtccatatgcttgcgtcatgtagaggttgtatgacattgagctaagagataaaccccgatcaattgagaatttattggaacttcacagtgcaatgtaaatctcttttaatttttcactaaatatggtccaggaaatttattttgtttacgcataggaaaattcagaaaagtgaatgccaatatgaatttaaaatcatgctatagtgcagaaccctcagagtttaacttggaatatagtggattttaacttgatcctcaaatttaatcattttttaaagaagggaatttagttttgcagggaataaaaagggaagttgcatgttcagacaggttagattattattttggtgtaactgaaattcactgattgcacatgacaatgttgggacaaaatttactgcagcatggtatttgaggctcctccccagggcttttagaagccgtcattgacatgttttcaacataccaaataaaatacctttaaaaatgaaataattttatttgacacatatatttatatatattctatctagtttctctttgtttttttaagtgatgatttcatgactggcatttaaagaatgcaactgtgtcattttgtttccaaatgctgtggattttgaaactgaactagagagctgtatagacatgcccagagttatgattacaaatttaggaggtagacggctcaggaattccctgggattgttgtgctggtggaatggcagagggaacttcacaggaaccttagtgttcttttacctcaaagccacagacaggaaatagaaagtggaaaagtaatatctccttttcttttccataaggagtttcaacactgaactttaaaaagtcttatcatattccagcaa

SEQ ID NO: 127154 - DNA, 1147 bp, Homo Sapiens
  misc_feature (273)..(288): n is a, c, g, or t
  misc_feature (886)..(886): n is a, c, g, or t
ttttttaatagtcatcaatgtacatttattgaggaaaccataatgaatacaaaattacagcaatcatgtgaccttttacatacaatgtcattaaagcaaactctaaaccacagttgtaaagtattcaatttacctcaagtccaagctgcatctccctaagacactgttcccatcacagtagccattttaagccaatcttctttttacacacgggtagtttctgtagagaacatttttctcaggacgaaaatgcatcgagcatgcataagaaannnnnnnnnnnnnnnngcgcaaatacatttaagagtttctataggggtatcactgaagaaaataaaaccctgggatttatttgcttattaaaagcaccaatttaaaaaaatccctcaaaagcttatattgtggcaagaaaaatgaagtcactaactcaacaaaaaataaggtaactttcagagccaaaattatctttaattaggtattgttataatgcattttaaagtgaggcagagtttgcagaaaataaaaacaagacatcctcactgattagtaaactctacatcattattctacacaacagataactttctaagtacagctgattttactggcagagtattcaaacaaataaaatgctatcacttctgaatgactcccctttccctctgaaagtactctgctattcctacccaaacccacccttatgaattaactaccaagataatttgtttaaaagatatattttacaatgtttataaacaactagtatcaaattactagttttagtattaaaaccattttttatattaaaaaataaaactatacttctcatttctaaaagaaacatcaaaccatagaattctaagtatcaccacactaagctgtcttnaaaaaacctaaaaacattgtcaaatttttgtttaagtgctaaataagtcagttcagtttcaatctaaactatacattgtttctaacactaatatccaatgcattcaaatcaactggctcaccttttctgctttccatttatttcagacttaagatcagcgtcatttaaaataatgcttatagtatcagtgaaggcttatggtaatgaataaaagaattctcatgagacagaaacaatgccccaatatctattatcatcaat

SEQ ID NO: 127155 - DNA, 947 bp, Homo Sapiens
  misc_feature (732)..(740): n is a, c, g, or t
aatagtcatcaatgtacatttattgaggaaaccataatgaatacaaaattacagcaatcatgtgaccttttacatacaatgtcattaaagcaaactctaaaccacagttgtaaagtattcaatttacctcaagtccaagctgcatctccctaagacactgttcccatcacagtagccattttaagccaatcttctttttacacacgggtagtttcttctacattgagcccttctatggtccatgctcatcggctcaccaatggcatacactcaaaggattcctctttatgggtaactatctcaggacctgattttatgagctatgatttggtgcttgcagcatcttcagcactggtgctttttgcagcagaacctaaggtggaaggtctgggaaggcaagtgcaatgctccttgaaggaacaccatcaaggatgatacacagcacagtcctcctcacccctacagagctagttctatactggctggatcaaacctgcacttcaacagacaatggcaagacagactgtatttgcatgtagtctaatatattaatatgcaaagagccaacaaatatgcaaagagtaaaacaatggatttcaacaaaatatcagaacttcagcatgagtgttaaagagtaataaaatgacttcaagtacataaaaaaattaagttgattcaatgattggacttgtgcatttaccaaaccaagcttatctatactgcataaagagnnnnnnnnngcttgaacgtttccataccccatttatgtttcaatggcagatgcaatgtagctatactttttgcacactattcacttttctatcctaaatttagaaagaaacacactaacattatatacattgaaagagttgcttcacatggaaaaaaactgttcttattagactactcatattcactatctgaaaactgtttaaaattagttatgc

SEQ ID NO: 127156 - DNA, 478 bp, Homo Sapiens
tttaatagtcatcaatgtacatttattgaggaaaccataatgaatacaaaattacagcaatcatgtgaccttttacatacaatgtcattaaagcaaactctaaaccacagttgtaaagtattcaatttacctcaagtccaagctgcatctccctaagacactgttcccatcacagtagccattttaagccaatcttctttttacacacgggtagtttcttctacattgagcccttctatggtccatgctcatcggctcaccaatggcatacactcaaaggattcctctttatgggtaactatctcaggacctgattttatgagctatgatttggtgcttgcagcatcttcagcactggtgctttttgcagcagaacctaaggtggaaggtctggtaaggcactgtgaagtataaataattgcactgtttgcaattaataaagattttaaaccttaaatgaatcaaaatcaacagcctc

SEQ ID NO: 127157 - DNA, 491 bp, Homo Sapiens
ctcctgcttatctctgcaacaaagaaaaatattcaaaaatactgccttcattttcacacacagtgctgaagatgctgcaagcaccaaatcatagctcataaaatcaggtcctgagatagttacccataaagaggaatcctttgagtgtatgccattggtgagccgatgagcatggaccatagaagggctcaatgtagaaggtaaaattggcaaatcataattgagaaatatgaaatgtattcccatacataatatggtatagggtgtaatgtacctgcttttgatcacttttcattttaaagtgctattcacttgatcttaaatgttccatgaactgttaaatttcttaagttacatagttactacaccacatttatgtgtatgttatgttttaatagtcaatgataggtatgtacaattgataatataaaggggctcattgaaacttgagagcctgttgagttttggttagttgtagattgcatttttat

SEQ ID NO: 127158 - DNA, 1012 bp, Homo Sapiens
gaaaggcttgaggaccaggtcggggccgggttccgggtcggggagcggctccgggcggcagctatgaggcgggacgtgcgcatcctgttactgggcgaggcccaggtggggaagacgtcgctgatcctgtccctggtgggcgaggagttccccgaggaggtccctccccgcgcggaggagatcacgatccccgcggacgtcaccccggagaaggtgcccacccacatcgtggactactcagaagccgagcagacggacgaggagctgcgggaggagatccacaaggcaaacgtggtgtgtgtggtgtatgacgtctctgaggagaccaccattgagaagattcgaactaagtggatcccactggtgaacggggggaccacgcaggggcccagtgggcaacaagtcagacctgcggtcggggagctccatggaggccgtgctccccatcatgagccagtttcccgagattgagacctgcgtggagtgttcggccaagaacctgaggaacatctcagagctgttctactacgcccagaaggccgtcctgcatcccacagcccccctctatgaccctgaggccaagcagttgaggcccgcgtgcgcccaggcgctgacgcgcatcttcaggctctcagatcaggacctggaccaggcgctcagtgacgaagagctcaacgctttccagaaatcctgctttgggcaccccctggccccgcaggccctggaggacgtgaagacggtggtggtgcaggaatgtggcgggcggcgtgcgggaggaccgggtgaccctggatggtttcctcttactgaacacgctcttcatccagagcggccggcacgagaacactggagcatcctgccggcagcttcgggtaccagcgatggccctgggagctgaactgccggactaatctctccacctctgatccacggtgccccccggatgcagaacggagctcaaacacctttggctaccagattagtagcaaagagtcgtagagaagcacggaca

SEQ ID NO: 127159 - DNA, 934 bp, Homo Sapiens
  misc_feature (54)..(54): n is a, c, g, or t
  misc_feature (80)..(80): n is a, c, g, or t
ccgtccgccgttcccttggtccgtgcttcctcaaaccactcttctggcacaaanctggtagcccaaggtggttgagctcncgtgctgcagccgggggggccacgtggatcagaggggagagatagtccgcagtcagctccagggcatcgctgtagccgaagcgccgcaggatggtccaggtggtctcgtgccggccgcgctggatgaagagcgtgttcaggaagaggaaaccattcagggtcagctggtcctcccgcacgccgcccgccacgttcctgcacaccaccgtcttcacgtcctccagggcctgcggggccagggggtgcccaaagcaggatttgtgctggaaagcgttgagctcttcgtcactgagcgcctggtccaggtcctgatctgagagcctgaagatgcgcgtcagcgcctgggcgcacgcgggcctcaactgcttggcctcagggtcatagaggggggctgtgggatgcaggacggccttctgggcgtagtagaacagctctgagatgttcctcaggttcttggccgaacactccacgcaggtctcaatctcgggaaactggctcatgatggggagcacggcctccatggagctccccgaccgcaggtctgacttgttgcccactaggatgatgggcaccctgggcccctgcgtggtccccccattcaccagtgggatccacttagttcgaatcttctcaatggtggcctcctcagagacgtcatacaccacacacaccacgtttgccttgtggatctcctcccgcagctcctcgtccgtctgctcggcttctagggggacaaagagactccactgcggacccagcaggcccgccggaccgctgcgggccgggcccccgggaggctacggccgctacctgagtagtcccctcgtgccgaattcgccacccaggcctcgctc

SEQ ID NO: 127160 - DNA, 1345 bp, Homo Sapiens
gatacctctgccagtggaccctggtgacctacctggacgtccggagctgccttggacacctaggctacctgggctaccccaccctctgtgagcaggaccaggcccatgccatcacagtcactcgtgagaagaggctggaccaggagaagggacagacgcagcggagcgtcctcctgtgcaaggtggtaggggcccgtggagtgggcaagtctgccttcctgcaggcctttctcggccgcggcctggggcaccaggacacgagggagcagcctcccggctacgccatcgacacggtgcaggtcaatgggcaggagaagtacttgatcctctgtgaggtgggcacagatggtctgctggccacatcgctggacgccacctgtgacgttgcctgcttgatgtttgatggcagtgacccaaagtcctttgcacattgtgccagcgtctacaagcaccattacatggacgggcagaccccctgcctctttgtctcctccaaggccgacctgcccgaaggtgtcgcggtgtctggcccatcaccggccgagttttgccgcaagcaccggctacccgctcccgtgccgttctcctgtgctggcccagccgagcccagcaccaccatcttcacccagctcgccaccatggccgccttcccacatttggtccacgcagagctgcatccctcttccttctggctccgggggctgctgggggttgtcggggccgccgtggccgcagtcctcagcttctcactctacagggtcctggtgaagagccagtgaggcccctggtacccaagccccctcccctgacctgggtgtgcctcgctgctggggctctgcaggggcagcacagctggggtgcaggccaggctgccactccgggaacgcctttgcgccgggactttttgtttctgaaggcagtcgatctgcagcggggccttatgctgccatgcactgccctggctcctgccggacccccagggtgggccgtggcaggtggctgagcaggagctcccaagtgccggccaccgctgtcagggattgcccacccctgggcatcatgtgtgtggggccggggagcacaggtgtgggagctggtgaccccagacccagaattctcagggctctacccccctttcctggtcctaggtggccagtgggtatgaggagggctggaaggcagagctttgggccaaaagcaggcgttggggggtcccccctcaagtttggagccgtttccgtggttgtagcagaggaccggaggttgggttcctgattaaacttcactgtgtgttttctatctcggatcccagtctctgaagacaacttgctttgattcaacctag

SEQ ID NO: 127161 - DNA, 646 bp, Homo Sapiens
ccgtgtttttaagactttatcattaaaaaaaagaagaaattagagaagggaggtgggggggacaggagggtgaaggaatctctccaaaatgtcggatccgggcgaccctccttccctgactgcccagccaccctgtcccttctctgtcctggcggcgaggccctagctgccatcttctggggaccaaggcccaggagcccagctcgggtcccaggcagaggtgaaggcagaagcggggctcagggcctggaggccttgccggtgtccttgagagccccttgggtgggcactcaggcccccatgtcccagcagggccctagggaggtaggcgttgagcggagaggcctttggaggtggggtcctgaagccggaggaccaggcgggaaccagagccaggtgtgaggctgggggtcacagccggagtgggtccttctcccgcatcagcctctatagataatgccattctccttccaagttcaaactcatccccactgattctggaggccggaaggccacgtgtggctctgtctcggtatagcccccgatgggctggccctctgggctgaaggctgcaccctgccctatgcggttggattgatcgatcataggttgcaccatgcgtctccgggcattccccctcaaacct

SEQ ID NO: 127162 - DNA, 1546 bp, Homo Sapiens
tttttcttggcctccccttcccctccaaagtccagggccaccagaactgactttattaaaaaaatgacaaaacaggtctatacatatttacaggctgggagccaggaggctcaggtccgacagcaggggccaggctgctcacttcttggagagcttgacttgcttgtgcttggggggtgcccacttgaggcagacggagtccactgtgatgggtggtttcttatactgggcacttttgaggtgctcctccaccagcttgggtgtgacacagatcacgtgctggcccttccagtacttgaccatattgagggattgcagggtactgatgatgtcattttgggtgatactggtcatctggctgaggtccttgatggacagtgtgccccggaagtcccgcaggatctccagcagcacccaggaccagtagctgcggtagctgagcttgcccaggtcagacagcggcttctccggggagccgactgtgctctccagcttggagagctcataactgaaagcgatgaggaacttcccgtagccgcggcgttggtaggggggcaaggtcaggatgcaggccacattgtttccatccggggactccttctccttggagaagtagccaacaatgtgggccccctgccggtccacctcagtcaggatgtaaaagacgaacggctccacgtcaaagtacagtgtcttatggtccaggaaaagcttggccagcagacacaggttctgacagtaaatcttatggtctttgccatcaacttcgtacacggagatgttgctcttgcggtagatctctttcccggggggctgccgccactggcactgacccaagtggaagcggtagctcttctcatatttcatgtacttgaggcagtactcgcagagccagagcttgggctgtttcccatagtcttcggggaatggtgagaaataccaggcatcaatttcgtagttcccgatgtggatcttgtccacatacttcaccttggtgatcgcctcatgctccttctccaaggctgctgtggtggggtccatctctgcataagtcttctgcacatggttgatctcatcatgcttgcgcttttggttgcgagtgatcttgcgctcaggctgctctgcgagctcgctcaggtacttctctgagttcttctgtacagcatccttcactgtcttggtcagcgccagccggttcttgtctacccactcgtccagccgccggttaaagcccacgtagtgtacatagaattcctctcggccctcctggtcgttcactcgagactggatcacttcagcagaatgccaggtgctatccggtcgccggcacaggtacgtttctccgatctccaccgtgacttccggctcgccgcgcgccggggtcggcggagagacgcggcccggggatggggcggtcccctcagcggccgcattctccccgggcccgggctcgccctcccccgcgacccctgaagtccccgccgcaaccgccgcagcagctccccctcgtgccgagatcgccacccaggcctcgctacctaggacc

SEQ ID NO: 127163 - DNA, 741 bp, Homo Sapiens
  misc_feature (618)..(618): n is a, c, g, or t
tttttagttcctgagtcgaagtgcctcacacagtccacaccagccccataacctggcacactaacaatcagatgcagtgacagagcctgggttgctatattcatgacactttcatacaaaatgaggtttcaatgttacattcccacttttcgtatttcctgagtattcctaataagagaagagctggaagtaatgattcttctgtattctgttctgattagtcacaggaaaagctttcaagggacactttacattagcactgggaaatgctgcacaaagcaagctagactcaagacctagtattttataacctttatggagttttgctccaaagtaaactcttttgactaacaaacttaaaaatctgactgaagtatttacactattcacagtattcacaaattactttatagtgtggactctttgatggcgcataaggaccgatctgtgcctgaaagccttcccacattcattacatatataagcttcatccccagaatgaattctctgatgctgaacaagggctgagcttcttttgaaagttttgccacattcattacactgataaggttcctccccactatgaatcctctgatgtctgataaggtttgagctcanactgaaagcttttccacattcactacattcatagggtttctctccactatgtattctctgatgagtaatcagctctgagctctgcctgaaagcttttccacattcattaccctcgtgccgaat

SEQ ID NO: 127164 - DNA, 1042 bp, Homo Sapiens
  misc_feature (762)..(764): n is a, c, g, or t
  misc_feature (776)..(776): n is a, c, g, or t
  misc_feature (790)..(790): n is a, c, g, or t
  misc_feature (816)..(816): n is a, c, g, or t
ggttttttagtaaactttattgtaccgaacaaaaaaaatgattttgcaatgattttctctcccacaaaagcgtgggtgaaaaccagtaacttataaaaatactttcggactctaataatacatacattcacaccttatcttctgagtatttaaatgggggaggttcacctgaaaaaacccatagttttttgcctcaactgacctgtaaaaaagtccacctatatcaactttctgccaatctggagaagatctgttttctttgatctgacgtcatgtgttcacaagcttctaaaatgtttgccaaaattaaagtctgctggatggtttttgccttaacccatattcttccattcattccaaatactatctccagtggatagagttttcccacttcctgtatgatttcacaatctggagctaatagctttctaattaagcccagagtcactttaaaaagcagaccatcctgtccaatgacacccattccattggctcgtccacagctgtcaatacagaccatctctggttccatgtctttattagcaaccacaaattggccatagatgagatctccaacctgcacatttggtctgtttcttttagttgcaccttcaaatgacaagtaagacaaagaagctggctcactccctccaacatcaactttgaatatatctccagatttagctgtcactatgccaatcacatggtctccttttactggaacataccgcttctgctgagagtccacccagtaacaccgcnnngcgctgcactgncgggctccttgtgnacggaggcggcgcacttggtgacaancggcggtcccacagcgccgaaggccggacgcatacacgcgcaccgcgagacgctctagcatcaggtcaacggtgctcactgcacccagggctccgggtctcctgtccggcagacagtctcaccgggagacactgactatatgtggtgacgccgctgtgccgcaaatcatcggaaaccagttcgccctgcgatttgctccaggcatccaaagagtcgtatcgacata

SEQ ID NO: 127165 - DNA, 829 bp, Homo Sapiens
gctcggtaccgttacagccacaggactcatccaggcagcacacgggtttgaaataatctttattttgtaaacatctgtgtttaaaatagatgaaccctgctcacaattcatatatggacccgagacacagtacacgaagttcacccgtcacagggagatagtggaggctcaggagcaggtggcgtgcctggggctggatggagtctcaagacagcaggtgcagaggtggtgacgagtaaacaggccagcagagcctggttaacagtctgggcctcaagacatgccccaggccaccaaaagtttagggtgagcgtagctgcaccctaaaatcccaattctccttctgctcccataccttttcccagtcatggcccttgtggatagggcctatcagtctatagaatcctgattccatgttttcccttccagaacccctagggtacagtacaaatatagtccttctttcctgagggggctaggagagaaagacaatgaatggcaccctgcctgatcttcagggaaagctgaaatactggtccacagattggagccactgcccaatataacttctcaagtccctggctgaagacagacttgagggctggcatcacctacttccctagccccagtgtgatgtggcataggtcttgatacccaaggagtcccatcttcaaggaagcaactccagcctagtcacagcttcatcctagagttagctgtctccttttctcattagccagtgatttacaacttcctgctctcctttgctttccaccatctaagctataccctgtccctaagtcctgagccaccctctcctgctgttttc

SEQ ID NO: 127166 - DNA, 871 bp, Homo Sapiens
  misc_feature (86)..(100): n is a, c, g, or t
  misc_feature (108)..(233): n is a, c, g, or t
gcccgggttttttttggaaaaaattttgccctgtttcctttccttttggggccgggcgcccaaaaaaaggttttaaaaaatttttnnnnnnnnnnnnnnncggccagnnnnnnnnnnnnnnnnnnnnnnnnnnnnnnnnnnnnnnnnnnnnnnnnnnnnnnnnnnnnnnnnnnnnnnnnnnnnnnnnnnnnnnnnnnnnnnnnnnnnnnnnnnnnnnnnnnnnnnnnnnnnnnacagaagtaaagtttattacatttgaaacaatacagcagaaacctcaaaagtttactcataaatatagtttaattcttacaaatcttcttttgaaaatgcaattcatatatgctgcaacctcagaagtttgaatttgaaatgaaatatgaaggtagtagtcagggaagtcacatcagagtgccttgtcaaatatccaaacaaatcagcacatacctcttccttgatacaggaggaaaaaagtgattctaaatatatccaagtgaatgcagaaaaatacattactatttgaggcagaccatgctaaaatataatttacaatgattagtttgcacttaagatggttaataacgcatttaaaccaatgaaatgaaggttaagttgaattttgtagtatttgctcagtctctgtactaaacaatagttcatctgaaaagtttggaaaaagcaaataacctgatacttctctttatgcttatcattttctcactgtcatcttaaatgcaaacaaatcaatacagcatcaagattttttacatattaaaatgaatactaatgactcatagactgtgtaccatatagtacgtaatagatgagcttgcaatgaacatcacctcaattttttacataacaccaagat

SEQ ID NO: 127167 - DNA, 1499 bp, Homo Sapiens
  misc_feature (82)..(91): n is a, c, g, or t
  misc_feature (230)..(238): n is a, c, g, or t
  misc_feature (250)..(258): n is a, c, g, or t
  misc_feature (390)..(392): n is a, c, g, or t
  misc_feature (396)..(396): n is a, c, g, or t
  misc_feature (421)..(547): n is a, c, g, or t
aggggctttccgttgtccggcgggaaaaatatttccgggaatagtagtctccccgcgtttttgtaaatatgcgggcccggannnnnnnnnnccaaatgctttcacttaagaggttttttcgtggaggtccccccttttgttcgggcccccagaggttgttcgcttcggggaggcccccttttgggagtttttgtttgcaaccccgttgtttgtttcccggggggacggcnnnnnnnnngggtgggaaatnnnnnnnnntttgtttctggcccacggcattctcttggatacaaggcattttttctgtgggggagatctccggcgccccgggcgccaaacaaagatggtttttgaaaattttttgggggcagggcggcgccccccacgggnnnaaantattaataaaattctcatttattcnnnnnnnnnnnnnnnnnnnnnnnnnnnnnnnnnnnnnnnnnnnnnnnnnnnnnnnnnnnnnnnnnnnnnnnnnnnnnnnnnnnnnnnnnnnnnnnnnnnnnnnnnnnnnnnnnnnnnnnnnnnnnnngcaaagaccacagtgctttactttttgtcttagcagaggagataacttgagggacagcccccaaggcgccaggtagccttcaggggcgggcagggttgggggaggtaggagactcggaccggcagccctggctccagcttcatcatctgtgtcttccctctctggccaggctcttcgaggggatgcaggaggctgggcacggtgagctggcagggggcttggtcttcgggtgcccagcaggttgtcagctcctgtttctgatggactcacctgcaatgattccggcataaccgggacagctgcctgcacttgccactggtgaggatgatgatgcctgtgatgaacagcacagctgcgaccaacagcccccgtttccggagggtgtgttcatcatagaagaaggggtcatcctcatgaaaaccagatggcttgagggtctgggggtctgtctggacgtctgtgcttggggatggtctctcagagagcgtcgtggtgtcatcagtgggatgagctgctttggtgctcttgtgtgtctctggatctgtcactagaggcccatccgttccttccagttgctgggtctgggtctggggttgtggtgtttcatcagcaggccaggttggggttggagaggtgggctggagttctgtgtagactgcatctggggctcgtgtcgggacctgaatgtccatgatagttgagtctgctgaagaactggacgtggtatctttcaacgtctgtcctctggtggggagaatcaggccaacgatggtgagaagacacaggcgaccagagggcgacatgtcggagctgggggtcctaagccggcagcctcgtggagagagggacgcggcggtggctgctgcgtccgacgcgtgggtcgacgatatcccgggaattccggaccgtaccagcctgctttttgtaccacactgttctatagtcacatgct

SEQ ID NO: 127168 - DNA, 1931 bp, Homo Sapiens
  misc_feature (253)..(286): n is a, c, g, or t
  misc_feature (502)..(543): n is a, c, g, or t
cggggctggtaaaaaagtgttggtgctcgcttgatctttggttttgcttcgttgttgtgccggccattttgtgtttttctgcgagccgcggcggtcgcggtgtattatcgcggcggctagtgtgttgtttgtgacgccccccttttatttattcgcgctgtgttatgagtgtttgtggttatgtggtttgcttcccttagggggcgtgtttttagataatttctcctcgtgtgtcggggaggggtgttggtgnnnnnnnnnnnnnnnnnnnnnnnnnnnnnnnnnncgctgtgtggtgggtgtcctcgtgcccgggggtgtctccgtgtgccagtgtttcccagtcttcgcacgcgcttgtgtgaacgtcctggcccggtcctgtgctgtattatagcgcgctctcttcttgtggggcgctccctgtgtgtacccaggaaaaggggttcccggtaaatttgggccccccgcggggagatatttttttagggggccccccccnnnnnnnnnnnnnnnnnnnnnnnnnnnnnnnnnnnnnnnnnngcatgttcctttacattttatttgccataaacattaagataatacagaaaatactggagaaaaaaagctttttaataatttcttgatgcaaagcttcacacttaaaaattatgcttgctccccccatccaccccaattcaacatgcagatatcatttattttcttatatgctgattctagagcattgtaatctcgacggttttttaagagttatctttgcccttgcaacaatttcacaaactgtatacaatcatggtataataccatcattcaaatgaatccctaaggtgagtacatttacacaatattaacactaaaaatctgtgtttttttaaaacaccatagaagtcaaaccacaaaaacccaggatcttgttttaaatgtgtttatgaagactgctgctgagctcaaagcatgcaggtaatcatgaccacctagatgaagctggatgttgaaactccttcatgtccaatgatgtaatttttcactcatcccaagtatctccatacttgtttactttgacttctttttttggcactctttcatgcataggcctgactgaggggtcagtcttttgtgttaaagatacttcatatgactctctgttcttattccttaattcctcatatgtaatattttttcttttaggactttcttcaaggttgggatcaggtccttggacaatatgatcagtaataccagtgggagcagattcattcatagaagaactgaatggaattggctcataatgaggaagcatttctatgttgtctgctgctggggatgtcacaaaagatgattgaccactcacacttgagtcatattttgacttttgataatagtgcccaggtggtgaagatcgtcgtgcttgtcctgatcgtaaagcttctccaaggggggaattttcaagtttcttgaatttctcttggcaagttttcacataagaaagttttccagcaaagtatcccatgatacaagcaagtataagtttagggatggaaccatatttgggatgacttgaaagtattcctttactaattaatccttgagtaatcaacatacttgttgcagccaaaggcacagatctgaaccagaagctttcatcattgcattctgcgaagactctcctttcttcctctgttggaatgtaatcaggccctatgtggggaattggtcttggaacctctgcattcggctctcgaaaatcagccctcccattcatctttcctcccgacgacagcagcaggcgactgcaaggaaaaccaagcgatcaggggcagaaggcccggagggtggactcgagagggggcagggagggagaaaagtgcaaggtaccgcggggagggggaggggtagaacagccgcaagaagtcatccagacaggggct

SEQ ID NO: 127169 - DNA, 864 bp, Homo Sapiens
tggtctcaagaaaagttgaaggaatgaagaaacaaatggaacaaacatgctgactttagcttgatgattgatggtagaacacacaggtgatatccaagcagaaaaaggtcatcaaataaagtttgatacatacgttggaccataaaatgttgaaattcactttcaagagaagtttctaccttggacaatatgatcagtaataccagtgggaccagattcattcatagaagaactgaatggaattggctcataatgaggaagcatttctatgttgtctgctgctggggatgtcaccaaagatgattgaccactcacacttgagtcatattttgactttgtgataatagtgcccaggtggtgaagatcgtcgtgcttgtcctgactcgtaaagcttctccaaggggggaatatttcaaggtttcttgaagtttctcttggcaagttttcacataagaaagttcttccagcaaagtatcccatgatacaagcaagtataagtttagggatggaaccatactttgggatgacttgaaagtattcctttacgtaattgaatccttgagtaatcaacatacgttgttgcagccaaaggcacagatctgaaccagaagctttcatcattgcattctgcgaagactctcctgttcttcctctgttggaatgtaatcaggccctatgtggggaattggtcttggaacgctctgcattcggctctcgaaaatcagccctcgccatgtcatctttccggcactcaggaggccgagacccgagcgcgatctgtccaccctcacaggcaggaaaatggcggaaggtccccggccgtaatggccgaattcccgggcatatgtccggtaccgtcgactg

SEQ ID NO: 127170 - DNA, 1248 bp, Homo Sapiens
  misc_feature (1233)..(1233): n is a, c, g, or t
aaggttgaaattaggaatttcttttttattggccactaaagtcctagcaagtttctgacagaagcacagacagaaaatggaaacaaataccttactgggaatgtttccttgcttgcactaaccttgactacagcaataacgcattgcttaacagtcaaagtgcaccaggtcatttccgcaaatggcagggtgagtgactgtgccgttcccaaggaagcaaaacagacacaaacaggtcccacgcgctgggtgtcctggctgagtacagaggaggctgctagaccggcagtacccttttcccaagtgaggaaagccagctgtgacactctgcttgccggcaggggtccccaccctcccctccaccatctggcccatagctgtaccaccaattacattttcttccagcttccacttcatttcctacttttacagcatttcatcctctccttttgcagcctttacaaataagatcagaaatgtgtccaaacaagtgcattaagataggcccctattggccaagtcaaagagctctcacacatggtggtctttttgccttctcaagaggaacttgtataaacccatgtaccaacatacttgatgtaatcaaggaaggatcccctccaaattttaagcatttaattgcagagtcttgtcaagaaacttcttcccaactttacaactgaatggctgaatttgaaagaaggtatccagcttaatagctaaaataatactatttacaaaataagagaggaaaacacctattgatatattttgttggaagtgcaccattgtgatttgtacaaagctttagaagatgtgagagaaggtggtacagggatgttggggatgggatgggggaggcagggccatcgggtgggtggcaggagtgaggtgggctgttgggagttctataataaaaccttcccccattgtagacctgacctaggatgaaaagataaaccctcctccatgctgggagtgtctccttctgcctcccaggggcacctgggacttagggtcagtttcattctggcactgttctctcttgtgattttagaacattttctcacttggcacaagtgatgcacaaatgttgtgattaacagctgcctagcccagttgttgtcaaaaggggaggttcctttgtgtgataaaatgtagataccaaattatagtgcagctttaacagacaactaaagccctgctgcatttggaggaataggacaaaaccancctcgttccgaaatc

SEQ ID NO: 127171 - DNA, 882 bp, Homo Sapiens
ttttaccaagttcataattttattatactctgaatagagatgatatttaaggagcagagaaaatgactatacaaaagatttatagaacattcatttacatactggatatattctttacagtatcagaaaagtaaaaatatgcactaacaaggcagagaagacgttacaaggtatttgatgctgagaataaatgcacagtgacttttaacatggctatagcttaacactggaggaatacaacaatacgttcttttactgagtagttagtaggaccctggctataacatgcgttgggcacagttcgtgaactctccgcatttactccccagggcagtacgtgcctgtccagcgggagccctggagacaaaatgcctggaaacgttccttttcctgtggccctagagccggtgtccacggtgggggctctctcacggtttctgagcccacagtacaatctgtgatgacacacagcttgttctgtttaatgcacatgtaacacaaaaggaagaaagaaacttcctataccagctcttcagaaatcgtggaaacttgcttcctttggttcctcagagggagctatctgcttggagcaaattccccgatgcccttgaccacgtttaccttgtgtaaaaatcacacctggccaatgagttcaaaaagcacgtttgcagggcttcctgaatgccgtcgaggcatggcttcatgagggccatcgcgggcaccccgatgtctctgtgattccctggcaggctgcgtttctcaatactgagaccctagtttgctctgacttctaaatgagctctctcatccttcatcagaaggataaggaacctggcctgcactctttgggttaaacatgggtagagaccgtctcaggatgag

SEQ ID NO: 127172 - DNA, 723 bp, Homo Sapiens
  misc_feature (263)..(307): n is a, c, g, or t
gagatctttgttaatattttaaaacaattttattataattgatgtcctaaaaaggcactgttttcacatttcatcatgcagtaaattgatcacatttttgaaaattatcatttcctctgttaatcaattgtcctccaaagtaaagcatatttaaatgaaatatttctgctaacctgaactttcaacatttaactgatttctatttccagaaattcactctttgtaacataccacacacaagccccaagcaaatacaggtatgnnnnnnnnnnnnnnnnnnnnnnnnnnnnnnnnnnnnnnnnnnnnngatcacatatttcatgcaaggttctccaattaccaattcaagacaatgacacatgactattcaaggaggtaacattggcaagccatattatggcaccttcattatttgtgctccaaatatcaacacacattaaaattaaaaatgaaaaggcacaaatatagtatttctaagtgttggtctaaacaacagttacccaatgattattcttatagtatgcaacatttgaaaccattcactaccttctcagaaaaagccttgcttaggtgacaaagggaaacaggaacaggctaatagctcaaaaggcgggacagaatatctatacctattttgaaagtaatgtatgcagtttaaaaatgaggagaaggaggctattagagcactcatgtcagaatacattaagtgtttttatcattgcc

SEQ ID NO: 127173 - DNA, 1294 bp, Homo Sapiens
  misc_feature (908)..(908): n is a, c, g, or t
  misc_feature (970)..(970): n is a, c, g, or t
  misc_feature (996)..(996): n is a, c, g, or t
  misc_feature (1009)..(1111): n is a, c, g, or t
  misc_feature (1113)..(1205): n is a, c, g, or t
ggcttcgtggttgtgttttttattctttttcataaacagagtatccccctcaacacacacagctttagaccccgcaaaacttggatctgctcctccccaccccacagagttgctctaggagttaagattctattcataaggcatgtgacatacaacaggtgctcagtaaatgttacttccctccagaagagcccaaaagagggatggaaggacagaacagcaggccggtgtgcttgttacatgtccctttaatgtcccatccattgccatgcaaaagcccagccctgcagggagggtcgctaaggtgcccagctcttctggggggcttccttgtctctgatgtgcccatggatccagtcgaggtagcggctgactttggtgtaaacgccgtagttgtgaaggagcccacagccctcaccccagctcaccaggcccaccaggaaccaggtgccgtggaaggaggcgaccatgggccccccactgtcgccctcgcaggcatcctgccggtccccgaggatgcccgcacacagcatgttctcagacaccatgttgctcatgacctcgctgcactcattgtgcgggaccacgggaatcttgatgaagttgaggacgaaggtgcggtttctcttggcctccttctctcggctgctgtggtagccccagcccgtcacgagggtctcctggccggcctgattgagctcgcgctctgcaaggccgctgtccgggaggcagatgggcactatggtctgcgagagggtggcgggctgggccaggtgcagcagtgcgatgtcattgtcggtggtgctcttgctgtagttggggtggacgaagacctccttgatgtccaggtccagctcccacttctcccagcgccgcaggtcatactctcctgcggggtgacactgcangaggtcgtcccccagcttgtagccaggcgcacagctacagcgccgccagccacctcctctangcagtaatgcgtgcagcgccctcgtngcgatttcttggnnnnnnnnnnnnnnnnnnnnnnnnnnnnnnnnnnnnnnnnnnnnnnnnnnnnnnnnnnnnnnnnnnnnnnnnnnnnnnnnnnnnnnnnnnnnnnnnnnnnnnngnnnnnnnnnnnnnnnnnnnnnnnnnnnnnnnnnnnnnnnnnnnnnnnnnnnnnnnnnnnnnnnnnnnnnnnnnnnnnnnnnnnnnnnnnnnnnagctgcattatgatcggcaaccgcgggacaggcgttgctatgggggtcttcgctcctcgtcatgatcgctggctcgtcgtcggtgcgag

SEQ ID NO: 127174 - DNA, 702 bp, Homo Sapiens
tttccacttttatacatgctttattaagtctacccacaaatgctaaaagtccacagaagtgtatgtggtacagaatataagtcaagatcttcctctccatgttggcttacattaaagagccaagaagaaatgtattatttacattgagattatctactggtgcgtgtagaaagtttaaattagctgcaagaaattttatctagacatgcacctgccaactgctacgagctggtatttactgggcagattaattacaaatatttctctgttcctttaaatatgatcaggcagatgcagaagttggtgctcatggtgagtgcatttcttcttaatgcctcagtttaaaatggctttaaggaattcatagctgtcaagatgacgtgatgctaggagagctggggagagcttcacagaggttgtgacatctgaggctgacctttgtgaggaagtcctgtactcttttcaaacagtttttgtttattcacttttgtcattagttctttggttttctgcatttctctttttaagaaatgtgatgcacaggagattccaatgagattttcaagctctctactgccctccaaagcctgtatactacttaaattttgcattatctccatgatttcttctgacaatttctcaacttttgatagcaacatcatgaattcatcattgtcttttgttgtagattctttgctttca

SEQ ID NO: 127175 - DNA, 1017 bp, Homo Sapiens
gccacttttatacatgctttattaagtctacccacaaatgctaaaagtccacagaagtgtatgtggtacagaatataagtcaagatcttcctctccatgttggcttacattaaagagccaagaagaaatgtattatttacattgagattatctactggtgcgtgtagaaagtttaaattagctgcaagaaattttatctagacatgcacctgccaactgctacgaagctggtatttactgggcagattaattacaaatatttctctgttcctttaaatatgatcaggcagatgcagaagttggtgctcatggtgagtgcatttcttcttaatgcctcagtttaaaatggctttaaggaattcatagctgtcaagatgacgtgatgctttgtgaggaagtcctgtactcttttcaaacagtttttgtttattcacttttgtcattagttctttggttttctgcatttctctttttaagaaatgtgatgcacaggagattccaatgagattttcaagctctctactgccctccaaagcctgtatactacttaaattttgcattatctccatgatttcttctgacaatttctcaacttttgatagcaacatcatgaattcatcattgtcttttgttgtagattctttgctttcagttaaactggggtgattcaatttttttctcttttcatttgatagtccatttctgtgcttttgctcttcagaacttgtgggagaagcaaatagactcatttgacaagttccagttgttggagaataagttataacacttttcttccttgtgatttttgaaggatcaaatgaattttcttctaacagaccatccaacttcagtgatcttttaacaggcattctgagattcgggaaagcaccactgccgctgaataaaacgaacccagcaacttccgaaaacagaaaatccgccaaaggaaacgccaaggcatgaaaggcaagcggacgcgtgggtcgccgtatatttgtagaattccggaccggtacc

SEQ ID NO: 127176 - DNA, 1018 bp, Homo Sapiens
  misc_feature (268)..(276): n is a, c, g, or t
  misc_feature (300)..(356): n is a, c, g, or t
cgacgtgtaaaacaaacaggtttattgataagcaggaatgccgtccagcatacagtgcaaactttcattgtcttgggatcaacacacacacacaagggaaccaaggccccacagagtctccaaattcatcgcttcccggctctgccctgtgatgccaaggaagcctgaggttctcccaggactgtccaccagggggcaggtgcgctccatcatgtcctcatgtgggtccaatgtgggcagaaacctggccagtcccagcagtctgacnnnnnnnnnctttaagagacagggtctcactcnnnnnnnnnnnnnnnnnnnnnnnnnnnnnnnnnnnnnnnnnnnnnnnnnnnnnnnnntgggctccagtgatcctcccctcagcctcctgagtacaggtgcacgtcactgcagccagccagtctgacatcttgattccagggtggaaaacccttcttgtctccatggtaatggctgggctctcccaccctccaatagttcagctgccaagctcaggtccagtggaatttatcaacaatttatcaccctgcccctgctctgctagacaatttcatgccttctcctttatccccatgctcctgagactgagcctttccaggagcccctcaacctgcttcctcccagaatccgggcaaggctacactggtttcccctctgcagggccctggccctgggagggggaaggctgactctaatggggaggaatcccagcttcagtggcttcaaggcaggccattcaacttaccgaccttggctacacacacccacgacacgcaacacagacgcagacacaagactggcacttgggatcacactggccatgtaccaaagtggcagggcagcccgtttggggcccaggaattgaaggtggggagtggggaagaggaacccacccctctgggggaggaggagggtctaggctgaggtaggagtagagagatggctacgaggactcagtcatctctagttcctgaaattccctagtacaacctgccggtgg

SEQ ID NO: 127177 - DNA, 1194 bp, Homo Sapiens
tttttatcttacaaaatcaaatacattttattctattaaataaaatcaagtttattcaaggaatgaccaggagttttcatcacctttcttcctacctcttctctcttccctccaccagatctggcatttaagggcacgatgggagcgggagacaggaggggcatccggtcctggaggctggactttaagtgctccacgcagcagcggcctcccatagtgcacaatggtggaaggaggcggttcgtatgtccccagggcggcatcccaatgccagaccttcctcccatggctctgttcaccctttacaagccagctacttgcagaaaagtggggcactgtgttccatccaacctgcaggcaactggtgcaaacggaggggtgtgtggctcagcttagcagcctagagctcaggaaccaggacagatcctgaaacaggagctgaaagggccagaactggcacctttgggatctcacaaaaatggaaagagccgctttttcacaatatagaggaccgtagcaagaaacagggctagcgcaaggaagatgagaagcttgtccgtcagctcccggcgattgtattttgtgataagcttccggcccagctggatggtgcccgacatggacttaaattcttcatttgcatccaggatcgttcgtgaagaagtgactagagactgcatggcctcctcgctctgctggacctgctgggccatcatcctgctgatccccatgaggctctcagtgatggtactggatgtctgggccaggctctctttggtggttttcctttgccttaagagatctcctccctgaagaagttctgctttctctagattgtcgattgcaattttgcaggtgagattagctttcctccatgaggcctgattgctgagcatctgctttttgtgattctccacttcctggagtagaagttgtttctctgattctttgtcttgctctttagccaactgctccaggtcctgtattctgtgacgcaactgttgaaatttctcttttactttagtattcagttcagtaagagcacttaagggtcctgaacaatcacggatatcctgaataagcgccttcacctccaggtcaaatttgacaatctcttggttacagatccggacgtggacgtcttggggagccgccatttcctcgtccgaatcgccacccaggcctcgctacctt

SEQ ID NO: 127178 - DNA, 1220 bp, Homo Sapiens
gaactaaaaaaaatatttcatttcattctgaataaaaaacagaacagacagaactcttggaaattctgaaaacaatgtcatcgctacagcaaaatttcacagaaatcatcgcagagtggggaccaaggccaggccctgacccgccgtgaaggctgcctctccggggaggggcacgacgcccagtgggccagagaggggcaggcacaggcggtggctgtgcccctctgaccagccctgccgggtctctcgggaccgagctcaaagcccagcccccagcagctgcctcgggactcccaccggggctgggaggggctgcccgtcctcaagacgcccccgtgcgagagcccttcctgctgcggacgctccacatgcccctcttggagtggtagtggtgatagaaattccgcagtcggagccgctccacctccagccctgcctgcaggaccctgtccaggagctcccagtcttcacccccgcactggtctcgggactcctccgtgttcattcctccaacccggtcaaagtccgacttgtagatcccaaaaaggccaaagccgttcacctcccagtaaccgtgggggtcccggggcgagctcccgcagctcaggcgcatgaccacgggcgcgaaggccagcctgccctccacgcagtgcttgcggatgccgtccaggatgttgggtgggaagtggatgtgcaggtcgcagaggaacacgatgctgctggcgtcctctaccgcgtccactcccgcctgcagcccggcggagcgctcgaagttcccggttcgtctcaggtactggtaccggggcaggcgcgcggcgcgcagggcccgctccacgtccatatcctcgctctcgaaatccaccaggacgacgctgaaacgcgagtccccggtgcgcgcgtgcagcgcagccatgtccgccaggaactgtgccacccaccgtgcctggtttttcactggcacgatgaagtgaaccatcacgtcctggcgccaggccaggcgcagtggccggcagagctcggggcggccgtcggggcgcacggaggcggcgggagcgggttcgggactttctccgtctgcatcccctacgcgggctcccggcagccgcaggaagacgtactcggacagtcgcaggcgccgcccccgcgctcctgcagctccagatccagcaggaagccctcgtgccgaattaacaccccagcctcgacctagccctatgctc

SEQ ID NO: 127179 - DNA, 1573 bp, Homo Sapiens
caatactatgtggacgtttcattgaaaattttacttgaaaaaataaaattccagatactcaggtgagacacaaacccactgttcctgctttgagacctgtgaattcttgtgggacagttccactgacagcttgcgttcccgaggtaccagtcctcagtgacctcgggaaccccaaccacttaggtcccaaagccacaagggtgccctttgtcttgctgggaagctggctgagggcctgccagggctggaggaccagctctcccgcacagggttcagggcctctcccagaaaaaagaggttttgaagtgaaaaggcaacgaggggccagagggctccccaggatgggtcttttggaggtagatttgatgcccacaacgcatgcaaggctaagacccccaacttagccaacgaagcccatggcctcagaagggctgcagcttgctcaggccgtgggccaggatgcatgctggacggttctccaaataaaaaagccccaagggtttgtctacactgcttacctgctggggctgtgagtggggagacggcggcctgcctagggctcctggtgccaggctcaggaagagtcattcattgcaaagggccggcaagtgaaccagggccacctctgtccccagcctgtgagaggagcagctagccctgagaagggcaaggatgaatgaggctgaccacgtcacaggagtcctccaagagtgacggggattcagtcatcggccacaatggagagggcccggagctcactgagtttggcctcgttctcccgctcccgctgctcatcggagtggcctggctggtcaagctgatgggacaggtctccaaagatcttgtgcatttccgagtagtacacaacctgagctcggatgagggactcgaagctgggctggaagtagtcgaggcggctgccgtagaagcgcggcatctcctccagcagctgcctgttcttggcttcaaagtcctcccgcacaggccgcagctcctctcgtgcctggtggagcttggccagcactggccccgtcttctccttttcctcatacttctccaccttggcctgcagcctcctgtagtcctgcaaggcctgttcccgcctcttcacagccatgttgaggctcgggaagacactgccgaacttttttaagggctcgatcacagtcttctggatctggttcaccttttcctgattgaaggcatccatccgcttcatggccgtgtccagggccgtcaccatgttcagaaggtcctggtcttgctcacagaggggattggagagtaagtccaaggatatcttcacggcagattttgacatggccaggtctgcgtcggtgctcttcttcatgtctttctgcagcctccgggtctgctcttccagctgctgaagttttccatactccctttcaaagtctctctccactgttttgggcacaatctgtttcttgggctgcccaatcttaaaaggaatccagctcatggtcccgaacctgcgtctgccgccggggtcctcagccacaactcgtttctccctcgtgccgaattcgccacccaggcctcgctacctagg

SEQ ID NO: 127180 - DNA, 1186 bp, Homo Sapiens
  misc_feature (85)..(119): n is a, c, g, or t
  misc_feature (200)..(208): n is a, c, g, or t
  misc_feature (245)..(245): n is a, c, g, or t
  misc_feature (528)..(574): n is a, c, g, or t
agaacttgaattcatcctatagggcgctagcgcggtcattcgaacgaccgagcgcagcgagtcagtgatgcgaggaagcggccgnnnnnnnnnnnnnnnnnnnnnnnnnnnnnnnnnnncagtcgacggtaccggacatatgcccgggaattcggccattacggccggggaagaaagagcaaaaagctgtgtgttttagnnnnnnnnngccaggttacgcaacaggcattgtgtcatgttgaacnaattttaaataaaagagaatatctggtgtttaggagcttgttttgctgaagatttctccatttcgtggtgctgagaataaaggcaaccagtagccaatgtcctttagattgtctgatttctttttgttgtggagcacacttgctaactgctccctcaacataactatgaaatcatagctctgttttcaccaaagaacagaccaattaacatacttatttgcagaagtggtgtagttctataaaacggcaaatgaagttcaacttaatattctctataatgtannnnnnnnnnnnnnnnnnnnnnnnnnnnnnnnnnnnnnnnnnnnnnnggtcaaatgaaacgacttcaggcaagtctcttttataatggtttttcaagtgccatttattctagtttatcatgttttgcatgtttgaaagtatgaatgtgctctttcctaaaacatggcaaatgaatagatgtagagaataacaatattacttacaagatgaaatgattagattagaagtgtccctttattaaactttgtcagcctgactgggtacaattcttttgttaatttgcagtgtggtttgtatacacgtatacgtgttatcaataataagattttgcaactggatgacacaagattttacttgaacagtgaaggacaaaaatcatgattgtggaagatatttttaaaatctgattttgcagcgatcacttttaaaccctgtagtgatgtaagactaaaatataattgctaagattttgttggttaatgtaaagatatgacttttctgcactgtactctcttcataggattgtaaaggtgttctaatccaattgcatgatgtagtaagcctcttaaatatgtgtgttaaatatattgagtttggattaaaatgttgacatgatttcacatttgaaaataaactcatctcttattttgaagttacct

SEQ ID NO: 127181 - DNA, 2352 bp, Homo Sapiens
  misc_feature (44)..(72): n is a, c, g, or t
accctcaactaaagggaataagcttgcggccgcatacgcggtcnnnnnnnnnnnnnnnnnnnnnnnnnnnnnacaacatcactctttatattaaaaagtgcagaacacgaaatacaacatcactctttatattaaaaagtaaggaggtcctggggttaagtacacaaagcacctaagtccttcgggtagtttagtgtcagttctacaaagtaagctttggcttcctggcaccagtgaggctcaatcttctgaagtcttccagaaggcaggcgaggagagggatcaggcagccctccctccctcggtcacagtcacggggcggcctcgggccagacaggaggagatgacagacgacaaccagacggtaatatccaaggactatttacaggggggactgcttctgaggcatgactacgatcacttcatgaatgccacttctgggatctcgcccttggccttgagatgagtgaaggcctgggcagatctggtgtagtcccagttgttgtcctgaaggcacttctgggaccactcgaggttcatgccagactgggtagagaatgcttgcaacatttcctgctgctctggagagagggtgggcaccgggctggaggaaggcgtgggtgcaggcatagcgaaggctctttggatctcttcagaactggcattccgcacaaatagctcatcatttacaatacatagccctgaattgctagcaggaacagcaatgaatgtccgggtgaaggctcgcaaagaatcccgggactttccgtccacttccttgaagactccattgacagaaaaacacagcaatgtgcttgtctgggcgcttatgtctaccacgaaggaattgacgtcgtgctgggttttgggcaactcattgaggaaggcaacaacgttgagacgcgtgtgcttcagcagccggaaccgcaaggtagggtctttaagcttcttcacatttctgctatccttgaaatactcggctaagctgcttcgggcagggttctgaggaatgaaaggaatgctcagggaacagcaggccccatcatggtaggcatccaggagcccttgccggtctccagagtcgtaaattgcatagtactgttgcaggaagtgcaagaccagactcttcaagttttctgttccagaatagcttcccttgcagggcggtaacgtcgtgggggcttcaacatcaaaggcaattggtgcggggtagctcatggccatccaggcgtagtaacttgggaaatcgttcgcgaatggcggtgatgtaggtggactggtctcggaaggtgtcacacagggagtttccatcgagccagagctcttctagcttcagcccctttatcttgtcccgttcccgctcagacttcaattcatttccagaaaggtttaggatcttcaggttgggtgccttctgaacaatgctagacatgtcatccagcctgtacagcctgttgttgctcaagttcaaggacaatagctcagggatgttctcttccaatgatcctcagggtagctgccatacagcttttgcgattcaggacaacgtcaatgttctgggccaccaaatctgggtctgaacggaggcctttgaggtcaagggcttgttgggagccatcgtatcgtttgctcatgatcagctttagctgttctacttgttctggcttcagttcattcagtatagtgtggggtggagcagaagagttgatgatgatagatatccttcggttctcccgatccaaaatcttatagttgacagccttcaatgcagaggcagtactggcgtcttcaacgaagaactgggcccgtgtattctcatagtgaaactcaataggggtgaagggcacactgcacttgctctgaatcatgctcaggagccatgccttgtcatactttctgccataaggaattgtaatcttgaaccagttctttgaggtcccatcctggctggtgccagcccctcctctctctggaggagctctgtctctccgcacagtaacatgaatgcgatctcgatcatgccaagtatcaccccgacggttaggtcgggtggtataggggttgtatcgtactcggggaccatcctgggcatcactcattgccacatctccatcatcttcctcaaggcgggaagaccgaataccagaaccgcctcttccagacctacggtttccttcaccatatttccaccggaagggaccccggcctttcttctttctttgagggaaattaacgcgttcatcatcgtgttcgctgtacgacttcccctcgtccgccatgccacagcgaagatcaagggcgggctcaggcgctggccgctacgccggcaaacaacctaactcccaagcgctc

SEQ ID NO: 127182 - DNA, 878 bp, Homo Sapiens
aattgtgccaagaccctcgtacccgagggcaacttctcttttctttttccagtttgctggagatccttcacgacagcttcttttgatgcaatcatatatggaggaaccaagttcaatattcatttcttggaagagttctctgcactgcatagtaataaagtctccagcaagaggggatttcacaatgccttgttgaaggacatagccatcgtggactggaattgcagtggtatgagtggctccactgtccaaaatcagcccagtagaacgaccattagcaaatgctgtcaaaactgcagttttgcaaaggaagaaggcagggatgttgtagtgttcaaacattaactctgtcagtttctctctctttgctctagtattccacggtgcctctgacatgagaacaggatggagactggcttctgatttgacatgcattttgtaggtatgatccaaaatagcttggaaactatcccagtcttcaaccatcccattttttagaggtgaaatggcctccatattctccctcggaacacgcagagcattagtatctatgtagtaggtgggaccgccttgtttgcctttatcgccatctatttccattaatgtgcttccgtcatctctttctaccaccataccaatagctgtaggaaaatccaccttggggcagtcctcaccagcataaccagctctcacagtataggatccaatgtcaaaaacaagggctccaacttcatctcccccgtacacgccgccgctcatggctgctgccggcgcgactcctaccctaagggctaactggcgaagtgactgcagtggccgcgactgcgagtctcgaggagcgatagccctgactcccttaacttccaccgccacccacc

SEQ ID NO: 127183 - DNA, 1029 bp, Homo Sapiens
cgttccccggccgccttccccgggaatttgccccccgaacacccggataaccggttccccctctaaagtatgccccgtacccgggtcccgggaccccaacaaaagggccccactcggcccggcccttcccctttttccagtggggagacctcccagaacgccttctttgaagcaatccaaaaatggagggaccatccaaaatccatttcttggaagagttctctcgcactgcattagtaataaagtctccagccaagaggggatttcacaatgcccttgtttgaaggacataagccaatcgtgggactggaattgccagtggtatgagtggctccactgtccaaaaatcagccccagtagaacgaccattagcaaatgctgtcaaaactgcagttttgcaaaggaagaaggcagggatgttgtagtgttcaaacattaactctgtcagtttctctctctttgctctagtattccacggtgcctctgacatgagaacaggatggagactggcttctgatttgacatgcattttgtaggtatgatccaaaatagcttggaaactatcccagtcttcaaccatcccattttttagaggtgaaatggcctccatattctccctcggaacacgcagagcattagtatctatgtagtaggtgggaccgccttgtttgcctttatcgccatctatttccattaatgtgcttccgtcatctctttctaccaccataccaatagctgtaggaaaatccaccttggggcagtcctcaccagcataaccagctctcacagtataggatccaatgtcaaaaacaagggctccaacttcatctcccccgtacacgccgccgctcatggctgctgccggcgcgactcctaccctaagggctaactggcgaagtgactgcagtggccgcgactgcgagtctcgaggagccgatagcccctgactcccttaacttccaccgccacccacctcaggcaacaagcgcctcgtgccgatttaacaccgcgcccgggggccctcgatcc

SEQ ID NO: 127184 - DNA, 2133 bp, Homo Sapiens
tcttgaatagtctgtgtacaggagtaaatatgttaagtggtttataaagaaattctgtttttagtcaagtgactttactaatcagttgttctaagtgtgaatatggcatgctaattagctaatttggtagaagctaatttgcttctaaaaatcaggtataaagttcagatgagattcccactttataaattctgacatttaagcaggctttaaatgtcacctgctaccttagagtgtgaaggtgatggtaactgccacagcaaaggcaataccgtagtttttgaatttgaataatagttttacctctgttgttaataggctatgaagaggatgtgggtattgctgttaataaacggaggactttgattcaaaataatgagaaatacatttagtccttaaagtagtaatcacagtgcacaacagtccaaaatatatttctggaatggctaatttttatttaattctgtaagcctaaggtaaaaagcataggcagtaacttttactagtcaataaaaagcagttctaccaatccactggtaattaatacactaaacagagttggaaagcattttactgaaagcaaaatatttagagaaaatagacatttatacaaaattataaaatgcttgtaataagaataagtgcatttcaaggaaagcacaaacttaatttatagagccagttaaagctttaaaaaatttaagtggaaattgaaatatgcaaaaatgtataaacattctacaaaagatggtcattcttttcctgagtatactaaagctatgaaacgtaaggtgacaaaaggaaggtagaagcttgggaactctttctcaagggcattttctttctacacactgcttccctccttcttcatattcttgcttggaaatccacatctgttgaaaggtacccaaagaggctagaatggagccgccaatccatgagctaaacctccgttccactgttgtattatttgcaatcaatttcaaccgcatacttggaggagttttctgagacagctctctattcaacctgtcagtaaaactctgtattagtgtgtttcctcctgccactattacactgccatagagacctggtctgatgtcaatatcacacatcccaacacttgtggtgacaacatgactgactcctaacattgtgtttcctgataacccctttacattggaagggtcaaataatccttctggaatctttagccgctctgcaccaaaatcacaattgtagccattgggggattcataatgaacagttggcatctgtgcagccacttgttcatcataagttgaatctgacacttgaagtaccgaagcttgaaaatcctggataacacaattacacatataattgtgccaagacctcgtaacctgaggcaacttctcttttcttttccagtttgctggagatccttcacgaacagcttcttttgatgcaatcatatatggaggaaccaattcaatattcatttcttggaagagttctctgcactgcatagtaataaagtctccagcaagaggggatttcacaatgccttgttgaaggacatagccatcgtggactggaattgcagtggtatgagtggctccactgtccaaaatcagcccagtagaacgaccattagcaaatgctgtcaaaactgcagttttgcaaaggaagaaggcagggatgttgtagtgttcaaacattaactctgtcagtttctctctctttgctctagtattccacggtgcctctgacatgagaacaggatggagactggcttctgatttgacatgcattttgtaggtatgatccaaaatagcttggaaactatcccagtcttcaaccatcccattttttagaggtgaaatggcctccatattctccctcggaacacgcagagcattagtatctatgtagtaggtgggaccgccttgtttgcctttatcgccatctatttccattaatgtgcttccgtcatctctttctaccaccataccaatagctgtaggaaaatccaccttggggcagtcctcaccagcataaccagctctcacagtataggatccaatgtcaaaaacaagggctccaacttcatctcaggcaacaaagcggcgtccacacaccccggagctcccc

SEQ ID NO: 127185 - DNA, 478 bp, Homo Sapiens
cgttaggtgattttctttttgaggtattgatgactttattattctgcaggtacatgtccaggggcccagcctctgggcccagtaactcagctactctttgtggctttcttcatggctttttttgtgggctgccacgcccatctttatcaccagaatgaggaactcctggaagttaactgcaccatcagtgttgatatccaactctttgaaccagacgtctgcaccctttttcctgatatactgaggacactcggtctctagcaatttcttcaggtcatccctgtagacggcatggaaattcccctttatcagggagtacttgtggtagacgtcgatgatagagttcaaggctttctccagctcggtcaacatgatgcccacggacttgccccaccaggtcttctgaaagacagctgacaagagacatccccggccgtaatggccgaattcccgggcatatgtccggtaccgtcgactg

SEQ ID NO: 127186 - DNA, 1018 bp, Homo Sapiens
  misc_feature (369)..(369): n is a, c, g, or t
gaggtattgatgactttattattctgcaggtacatgtccaggggcccagcctctgggcccagtaactcagctactctttgtggctttcttcatggctttttttgtgggctgccacgcccatctttatcaccagaatgaggaactcctggaagttaactgcaccatcagtgttgatatccaactctttgaaccagacgtctgcaccctttttctgtcaagattgaggaggaagaagccagagtttaaagatctcagagagagccgaggcatagccatctatgaagggtggcagggaggaccgctggccccagggcagccccaggcccaggcagagagccccccgccaccaccccagcccctcctcacccntgatatactgaggacactcggtctctagcaatttcttcaggtcatccctgtagacggcatggaaattcccctttatcagggagtacttgtggtagacgtcgatgatagagttcaaggctttctccagctcggtcaacatgatgcccacggacttgccccacctgaaaaacagaaccttctggggaatcccatggcagggaatttgcatctggccagggcagtacgcagaggattcatgccccaagcgatggccttgtcctggcctgcactctccaaataaccaaaccagcagatggctatggctctggtgggaagggtgggatgatagggatacacgtgtgggaaggggaagggtccattcacacagagacatgtgcacacacacggggcccgtagactttccttaccaccccaccctctgctcaagaaaagtccagcctaggagacaatgtgcccttacccactggaaggtgctggaggatactctccttccttatccctgcctcactccccacctccaggagtatctttgctccagacctccctgagctttctctctcctctctcaggaaggctgctccacttccctgaccctccccaagagaagcccaaagtgcggggccaacccagacagtcccacttaccaggt

SEQ ID NO: 127187 - DNA, 1010 bp, Homo Sapiens
  misc_feature (710)..(710): n is a, c, g, or t
  misc_feature (721)..(721): n is a, c, g, or t
  misc_feature (906)..(906): n is a, c, g, or t
  misc_feature (910)..(910): n is a, c, g, or t
  misc_feature (912)..(912): n is a, c, g, or t
  misc_feature (969)..(969): n is a, c, g, or t
ttttttagaatttttaaacaggtttttataaataatgtgttcaaagatttcgaccccattacataaagtaggaatcccactccttaagaaaaatatacagattttggtaagagtttaagttctgagatattcaagcctgacgccaagcctttaggtttctactacttcaattccaaaggaccagtagatagcaattttagtacacaaaactccactatgctgtatagttccttttctcctgggtcagacagctttattctgcttcattaaccccttctttgctccttgatggatcttggaatccaatttccagatttttggatttcctttaataggaaacttcacaaccatttcctgaggatttttgcagatgaaaacaaatggagaatcagattcttgactgatgtctggaaactgctccttaaattgcttctgggacaagcagtcaattaggtccacacagcccagaagacaacctgacggatagtcattaggaaattccacatctttcccacgaagaagacgatatgtagcctggagttctgagacttcttgaggggagggttttttagctgtggctgctatccaaagtcgtcctctgtggggggtgtaccaggatctgccctccacccttttaatccctctgacaagcagagaagcccagggctgatgtacagagaggcaccagccaccatcaaagccttcctganatttcttgatncctggattcgcagctggtgctgaaatgagtttgactctagtccaaatcctgaagaacggaaagctttcttctgtgaggctgcacctgtgtggtcaacccactggggaggggactggtaatgtttgggattacagactcccaagggctctcagagtctatccatttggtcagtggtggtcaaggtncatngncatggctgtatgtctcatctatcgctagaacctgctatgatttctcttcagatctcntcctgcaatcatgtgacttctaaagtcagaggtgccatttc

SEQ ID NO: 127188 - DNA, 779 bp, Homo Sapiens
  misc_feature (745)..(745): n is a, c, g, or t
gtgaaagacacaaagattttataaatctgtgaaatccagaaaggctgaaggaaaatttggaattgctgaaggaaaccaaaaagattatatcaataatacaattaatagggtatatgagagacatatttttaaaataaatattctctatataaaacaaagcatgcttcaaacaaatacaaaatatttattacacaaaaatgtcataactgacaaactgccaatttgttaaacatagaaaaagtactaacatttcgtaactctaaacaaaaaccactttacctttttgttactcaagctaacttaactccaagttataaaagttacaaaattttggtttaaaaaatgtcattgtatgattgttccaatttactttgctatgctataacaaaaacaaaatctctttgaaatgttttcagtatttaaattgaataatgtttctaacattaacttatttaaataacttttacatcaataataggccaacacatatattaaataccttcttggtagaagcaggaatactaatgacaaagcctcatgaaacttaatacctctcaattcacaatatagcacaataatcaatctgactaagctattgatatttaaagaatgtggttagtcactctctccctggtataacttagtatgttaacattcttatcaactgagtagcaatttgattatctcatactcttctctgtattccttgtctccaggttggaatagccctatgtgggatatgtanaagtggcccagagcctgttggccctatctttttg

SEQ ID NO: 127189 - DNA, 666 bp, Homo Sapiens
tcacgcccacaggactcaggcttgctctattaacttctttataggcacacggggagttacaggctgaggacaaatggggacttcacactacattatcttcctctgttcagatagcttttcagggggagtgagtgcactctatatgatggaggaagaggacattggtgcctgtgggtacttcagcaccaggcttggtaaagcacatactctctgtagcacagccccgcatagcaaatctgggtttgaaaataccagcctgcacgtgtccagataaggagacgcagtggttttcctttccagtacagtgggtcatgggccccatgcatttgtccctgaagctcgcagtgcaggcggggcacatcaggccattctcagtaagattggtcaagggaacagacaaaaaggcactgttgcagccgtcgctctggcagcagaaggagctggttaccatgtggtccttggggcccatggtggtggatataacgccggagtagcagtcctgggacctgatgcagcccttgtaggtgtgcaccaactccttgccctctgtgggatggggacaggcagggacagtgctggctgaccactccctggcttcaacccctgcctcaaggtcttgcctaaccctaggcctccccaaccccacaacttcctgggatggtctct

SEQ ID NO: 127190 - DNA, 661 bp, Homo Sapiens
ttttaatgttaattaactttattcacatttttccaagtaaatacaatattaactataagctaaaaacaatacatagttcttagaaaatacaaccccgaattattgtgtggcctgggctttgtgattatgtgcccagcctttgttcctccagaattttaaagtgaatgcagtgctcaaaacaaacttacgatagcacagggaaaccttccctaaataaagttttgttattagaagagaaatccaaaaagaggcctctactgccttcattcaagtgtcgagaatttcaaaatggaaataatattaaaagagcaatcgatttttttccatctcacactagtaggcttgaaggaggcaaatttggaccaaaaatctagacatagctccttgcatagggtttgatattaagcacacacttgcactgaataactccatatccaccctatagtacaaaaattcatttcaaatgcaaacgttgtgcaatgaccaggtcatatttttaagatcactctttaaaatatcattttactgatcacaaaattatataataaggatcttatatgggttaggtattaagtttgataccaaagcaactatagcatcaagctacataaatattagcaccattttttatctagtccagtgaaatgtaaaactatccatc

SEQ ID NO: 127191 - DNA, 1051 bp, Homo Sapiens
  misc_feature (937)..(971): n is a, c, g, or t
ataatggaaatatagggattcatttattactttttggtttacaaacaaaggcacccaataatgcttttatttcttataaaagattctcaatttacatttaaaacaaacaaaaacccacaaaacaatcccaagttaattcctatagacaacacaaaaaagggggaaaaggaaattcttttccctgctttcaagctttattacacaggttcaaaaatgattattttatgccatccttaagtcaaagaacgtactgccaagcttctctgcactaagtcttaggacatgttaatgttgccaagtcaaatataaatatagtctcaatgacatcacaatttacaaatgcatattccaagattaaaactgaatagggggaaaaaccccaaatgttttagaatacagtttaatcaaatgagttaagtgaaataagaaacatttaatttagtaggctatcctgttaaataagaagtttgtgtaggaaatataatcaaacagaactaaaaatcacgtctagtaaatgacacaaataatttctcaaatctttaagtctgacttaagttcaaagtctagctggtggggattaacaatctatatactctttatactaatcttagaactttaaattctagaatgaccaactaatttattcattagttttcttttgacaacagaactctaaacacacaaattaatgcagtgagtggcctcagcaccctcccagttaacatttctttaagctagattacaagaacaataaaaccattcagaagacatacactccctatgcacttcataggcctgcccaagttgtccccaactcttttgcaagacacacagacaattcatctgattctaagtctattcggcagaagtataaaaatcatacaatcccggccgtaatggccgaattcccgggcatatgtccggtaccgtcgactgnnnnnnnnnnnnnnnnnnnnnnnnnnnnnnnnnnncggccgcttcctcgcttcactaacttcgctgcgctcggtcgttcgatgtagccgagctagcgccctatatgattacagtt

SEQ ID NO: 127192 - DNA, 2081 bp, Homo Sapiens
tttgtggcgagcagtcagtactttaattcaggtcaggctccgacacctggggagacggggtcctgcccgccccaccctgaggtggaacccccagctgctcctgggcacagaatcatttacaaaaataaatatgaaaaaagcagcaactctttagtgatcatggaattaatctgacagcaattaaatgtgtttaagcatctggcatatctcctcaattgcaccaaaagaatttggaagcacttggtttggtctcaaaggcaaaaggaaaggacgaggaaggggccaggcctcccgccaggcccccgcccccctcacatttctgagtccgcatacatcccgttgattaagtagtccacctgggtgtagtccttcttcttgtagctctcataggcctgcagggcaaacaaaaccaagactgtgatgaaaagggtcaccccgagtaacagcaccaccagaaggagagttttgtctaccacggcctgggtgaggggctcagtggtgaccaccatgtactggccttgggtgctgggctggcacgagtccgtggctggcatcttagtgccccctgagctcctgggtgttggcccagtggaatcagtacctggtgtggcttcagtctctacctgctccggtgcctgggatgtgcctggcccagcggccctctgggtatatggcatggggcttggctgtgtcgtgggggacatggcctccatctcagggattgggctggtgtgaggtactggcactgggctggcagttggctccctggcttgtgccttggtggtggtcaccactgtgggggtgggggcgggctctggggttgtgtttgagggcatgggtgtggatttatttgttgtgttaaccacaggctggtccactgacaccttgctaatgggaccttgtgcttggggacgcatagggggtacagggcttgccgcggtgtcactgggcatgtgcttggaaggacttggacgagtgctcatggggctgcttgtgtttgctgtggtcgctacagtctgagcacagtgtggccaatgtggccagggttgctgttcttggcaacggcgtgctctttggcacttgtgcgagggctgtgctgagagatggatgcccagtggcggtagtggccggggtccgccctgtggaagtggacgtgggcgcggggagttcaattgtcatgggagtgctggagcccgcagtcatactggaggctgtagtcgtgggagcaatggaggcccacagttgtactggaggctgcagtcgtgggagcactggaggccacagtcatactggaggccgcagtcgtaatggaggccgcagtcgtactggaggccacagccgtgggagcaatggaggtcacaccatcagctgcacctcctgaagttgctggttcactcacatctgtcctgcttgtgtcctctgttgtgacttccatagagttgaggtgggctgccgaagtccctttggtcaatgtgacaggagaagctgctgccatggttacatcctcagacgttttattatcaactgtttccacagatgcattcctcttgactaatcccttccacattttgttagggacaaagttgcgtggatcgttggatgccgcatggctttcagataaggacaaggagaaaatccaaatgagcacaagagctgtccacatcttgtgggtgagctgggagcaaggctgggcggtccccgaggctcccagccagccagctcctcaggctgctaatggttccctcctgcttggccaagggatcagaggctgctgctaaggggatgctcccagcctggaccatcttcctccttggagagctgtgggcttgacactgtgtcgctgggcgaagtctggctttgcagggggtgaaagccacgtggtggggcactcccgggccatgccatcctttgtggcacatgtgagacgaaggtagactctccactctagtaacagacgcatccgggcgcagcaggcccccggcggcctggtggccctcggacagtaggaaggagcctgaggcccggcgcggggacgtggccggcagcgcaacccaggcagctccgggcagcgcgccctgccc

SEQ ID NO: 127193 - DNA, 687 bp, Homo Sapiens
  misc_feature (400)..(459): n is a, c, g, or t
  misc_feature (636)..(636): n is a, c, g, or t
tggaaaaaaattaagtgatttttatttccaacagttgtaaattaaaattgtacaacatgttttctaatctatgtctcatgtgtcttgctgtatgactgaagacaatgaatgtatttttaaaaattatggcagacacaatatacttggtatttacaatggcctgtgacaaatataatacctggaaataatttctaattttccacttattattgctatttagtcacagaaaagattaacactctccaagaaattttagcatatgtcatatatagatataataattttatataatgaaaaaccataacagaacagggtgcctttacaaggaaacaaaggaaaggcaataaaggatttcttccatataaagattctgatatgcattatttgatttttgtttacnnnnnnnnnnnnnnnnnnnnnnnnnnnnnnnnnnnnnnnnnnnnnnnnnnnnnnnnnnnncagaaggccaaggataaggaactgttctatgcagatgcactgcatacatagtatatatgtatgggctgagttataataaaaatacttattgtcaattctcatatagatttagaaacaacaatttccaatcaagcacgactggacccaacattttctcagtcttcaattacatgacanattacagctacacagcagtcacttctggtcagcagtatcatgataaatgct

SEQ ID NO: 127194 - DNA, 1175 bp, Homo Sapiens
ggaaaaaaaattaagtgatttttatttccaacagttgtaaattaaaattgtccaacatgttttctaatctatgtctcatgtgtcttgctgtatgactgaagacaatgaatgtatttttaaaaattatggcagacacaatatacttggtatttacaatggcctgtgacaaatataatacctggaaataatttctaattttccacttattattgctatttagtcacagaaaagattaacactctccaagaaattttagcatatgtcatatatagatataataattttatataatgaaaaaccataacagaacagggtgcctttacaaggaaacaaaggaaaggcaataaaggatttcttccatataaagattctgatatgcattatttgatttttgtttacaaaatacaaaactgtaatattagaagcaaagggaaaacagcaaagaaaaaaacaataaaacagaaggccaaggataaggaactgttctatgcagatgcactgcatacatagtatatatgtatgggctgagttataataaaaatacttattgtcaattctcatatagatttagaaacaacaatttccaatcaagcacgactggacccaacattttctcagtcttcaattacatgacaaattacagctacacagcagtcacttctggtcagcagtatcatgataaatgcttgacaagatataatttttctccttgttcacttgtaaaaattggtgcctttttgtaatgttctacaagttcttccatggtgctgaatttacgctgcccaatgcagtagacagtctcttttagttggactttaaaatgcttgtttttcccttgtgcttttagtgatactgagaaatcatttggcgaagattcactatcacgaatgaggaaatccccttcatgtcctctttcatttaatgccatttctgcttgatgcctggtgactttgccataataccaaggattgccagcaaactttccagtgagtgaaggcctaatgtaatcacactgtggaggtgatggttccaaacctgaagttaatggattattctgcataacggtaacatagttttttggtactagaccaaccataccattgatcttcctgcatttccaccactctgggtcattttcaggtttttcaataacatccattacatctcctttctcg

SEQ ID NO: 127195 - DNA, 1172 bp, Homo Sapiens
cttattcccccagtaaggtgttcgatgcccaaattccaagggggtttacaataaagttgccattcggccaaattaaggataaacgggaattttcccttgtggggggtattttccttttccggaccattttttcaaccaaagggaagtgccttgtttccataaggtttaattccccggcgaagttggcgggatagcccttcccaatttttagggaggggaatttttcaattcctcatccattgggaaggccagccaggtttttttgtaagaaaaatttattggatttgaaggaagaagatcctcttttagattttcatcccattcaggtaggcggtttcttgattctgtccataaaggtctccagcatcatatagggagtccagccagcgaggccatgaagttagatttgcacaatgaaactttcttttctggtatttctgccaccatttatatgaacattggtcttctctgtgagacaggtttggaagcgaaaatttctggcactttttgaggggatttctaattgaactgcagacactggttgaaggcaacacacattcgggaagaatttgcactttagcttgctggattccatctgactgtgttcttagctcaaggactttgaacctttgtcttcccattgctttcactttcactatctcaattccaaaatcctgttcttctcgataggcatatatctctgctgttgttccaaactgtgcttccctttcctgtacattgctgtatgcaagaacagcaaaggttctatctttctgaattaaattccgcaccatactgacttcttgagggtgaaaaagctgaagaggtaatgtctgtccgggaatcaggatcatcatcacttgtggaagaactggaatcacctgacagctgtcgtcatcgtgcaaagtcctgccatgaaattcttccatatcagcacctaggtatgtatgtgatgtcggcagactggtgtcaaaatttatgatgtttggttttttggcttctttactatcctggtcttcaacttccatttcatcttcttcctcactctctgcaggcaggagcggcaggtggttgcccatgttgtgcgcagcgtcctgctgatttccttcgccggccatgtctcccggccgtaatggccgaattcccgggcatatgtccggtaccgtcgactg

SEQ ID NO: 127196 - DNA, 976 bp, Homo Sapiens
  misc_feature (741)..(741): n is a, c, g, or t
  misc_feature (749)..(749): n is a, c, g, or t
  misc_feature (926)..(926): n is a, c, g, or t
agggtccaataaaattttatttatgaacactaaaatttgaatttcatatgcttttctcatgccacaaaatattattcttttgattgtattcaacctttttaaaaaccatttttagctcacaagctgtacaaaaacagacggtgagtaaattggcccacagaccggtttgctagcccctgggcttaagagatctgtccacttactcctcaacatgcagagtgtgaactgtgtgaactgcataggccacagcaatcttactgcatccattcccgctgcatcattatttttgatttgtattcattcagtccaccgaagcattcacttggcacctctccaaatctgggtactgtgcaagatccttccttgggacactgaaggaaaatcagacacggcccttctctcaagttcgcagactctccggtatccagatactacggctctcatagtatcagaaaacacagccacaagcgcaggtaagtatcagaggtgttttacgagatacatgtatcagattcttaaggctgctgtaccaaaataccacaaactgcatggcttaaaacaacagaaatttattccctcacaatcctggaggccagatgtctgaaatcaagatattggtagggttggttccttctcgagactctgagggagaatctgtgacatgcctgttttcctagcttctagtgacttcctccaattcttagggttctttggctcatagatgcattgctctaatctctngctccatnctcccatggcttcagctctgtgtgtctattcccctcttttctagagctagtcatgatttagggccacctactacaggtgactcatttcaggtcttgattcatctgcaaacttttccaatatgtcaacgtgggatcccatgatgtactctggggcactatcagctataactatcttanaatgctaaaggaaggcatgttacaaagctcagaggagtaaaagctactca

SEQ ID NO: 127197 - DNA, 1439 bp, Homo Sapiens
agctgctgagcactgggtgtggcctgtcccctccgcgttggcacactggcggcttccactcagtgagttaacttggtgggctgcccctgacacaggctggccctgctacccacatttgcctgctgaagagctcatatgaccctcactcttgaggggacgttagcatcaaatctcttcctttggtaaaccccaacactgactccaggcccaagcacgtcccacagccatcaggtccccacccaaagggatcccatgggctttgccctgcaaacttggcctgaccactcaaaggcaggcggggccatgacacagacggtttattcagacctctccacccgccacagttccacatcccagttcagcaggccattctgtgacagttcctactggtgggtctgtctatgacagccccatcctgagttccaagtccatgtcctgactgagtggtgagtgtgctcactcggtgctcaggaagactctcttgcgtgcggtattggtgtaagggtgccagcgccactccacgtctgctgtggcctcctgctccagcgtgcccagacggatcatgtacagcttcagctcaaagcggggcccgacctcagtgagctccacgttgcggtggtctgtcttcttatacacatggtgccggaatgatatgtagtcgtcctggtttgcgaaggtgatgacccggtggctgtcatctttgggcacgggaaataggtatcggaggatgtcagagacccgcttgcccaggcgggaggagaagccgtgtgtgatgaggtggggcttggcctccgacatggtgcccaggtctgggatgtcatgccgcatgaccacattgcacagcgtgaagtaggcagtaggaccaaagggcaggtggctgacgatgagccccacaggtgtgccccgatgctcgtgaacgaccagcagatcggtgacgccgttggctttgcaggctcgcaccagtgcccccacttcatgtcgacctcggttcattcgctgggcgcccgggaacaccagcttcagctcctttgcaaacatcttgaggcgggaactggggtctcgggaggtagtgatcataaccttgggatcctcgactcctgcccatcggtattcatcatccacgtggctggtcacaccttcacctccagcatcatcaaactccagggacccctgtaaggccagagcctctcggcgtaactcagtgggaatcaggcggttttcttccagcgcgcgccgcagccgctccttcctctcctgggctgagcgctgcgcctcctcccgggccttgcggtacaggtactcgcggcgcaggcgggcctcgcggcgcagcatcttgagtgccgcttccacgtgggtccgggagaatctgtgggctcctccagcgcgacacagtcctcaccctcgtgccgatttgacaccaggcctcgatcccctatagg

SEQ ID NO: 127198 - DNA, 1032 bp, Homo Sapiens
tcgtgtatgactagcgtccactttgaggtcaggcggacttgctcgcgcgggcgtgaagtgctgtcagcctgggtgctctagaaatctctctgtgcgcgtcggtattggttaatcggggtccatgcgcatctggcaagtgttggctgtggccttccggctccatgtgggtcccatggccggttcatgtacagcttcagtcataccgggcccggcccgtcaggtggcctccacgttccggtggtctgtcttcgtaattcacatggtgccggaatgatacgtagtcgtccctgctttgcgaaggtgatgacccggtggctgtcatctttgggcacgggatataggtatcggaggatgtctgagacccgcttgcccagtcgggaggagtagccgtggtgtgatgaggtggggcttggcctccggacatggtggcccaggtcttgggatgtcatgccgcatgaccacattgcacagcgtgaagtaggcagtaggacctaatgggcaggtggctgacgatgagccccacaggtgtgccccgatgctcgtgaacgaccagcagatcggtgacgccgttggctttgcaggctcgcacacagtgcccccacttcatgtcgacctcggttcattcgctgggcgcccgggaacaccagcttcagctcctttgcaaacatcttgaggcgggaactggggtctcgggaggtagtgatcataaccttgggatcctcgactcctgcccatcggtattcatcatccacgtggctggtcacaccttcacctccagcatcatcaaactccagggacccctgtaaggccagagcctctcggcgtaactcagtgggaatcaggcggttttcttccagcgcgcgccgcagccgctccttcctctcctgggctgagcgctgcgcctcctcccgggccttgcaggtacaggtactcgcggcgcaggcagggcctcgcggcgcagcatcttgagtgccgccctcgtgccgaattcacacccaggcctcgtacctagcgctatgatgtttcggtgta

SEQ ID NO: 127199 - DNA, 788 bp, Homo Sapiens
  misc_feature (768)..(768): n is a, c, g, or t
ttttttgcaataaatgctttttattgtatgctcatttcaatgagtaacatttagaaataataatcccacataacagtagcgatcttattttacagcgtgtacatcatttacagccacataacacacaattttagtagatattccaaatttaatattctgaagttaagaaagataaaaaatttattctcaaggaactgattcttatctggtgcaaaaacagaaaggtgaacattatttgaaacacaaagccacaatatagcatgaagtaaaattacattttaattatgttgaacagctgaatgtaaacatgaagcaactaaaacttaaaagtacatatcatatgcattacatttatgaacaggattttcataaaatttccctaaaccagcttttaatattaagtgccattttgatttgcagcatgctaacacaaagcgttgttaaagggatgcatattttaagtttatacactgtaaactaaatatccacctccaaactctattggcagcagattgctctgttaaatactgcataaacactgcctcatattgaaaatgcatgttaatcatatggtatatagattttaaaaatcaatttcaataatggcataaaattgcacctttaaacattagagcaagtaagactagaacaatcatacttgctaagactgtcctaaaaaaactctagacattataatatttaagaaaactgtgttctctcaaattaatctttagatcattaagaaatatagtgctgattttgtttgcnacgctatgttgcatcatttt

SEQ ID NO: 127200 - DNA, 758 bp, Homo Sapiens
  misc_feature (685)..(685): n is a, c, g, or t
tttttttgtggcagaaacattttaattgtaaacagcaaggctctctgccaggcagcccagatgaacaggggtggcactgtgctggggtgaggtgctttctttgtgggaacgaaagcagacggcccaccctcgtctagccctgggcccctgtccccaaggccagctcgctgagcctgcgctcctcctggaagcggatgagggcatctctctggttgaccaaatccaccagcttcctcaggacctggtcctcagcctgccgatcagcagctgtctttaggttttcttcccggttcatgtagcctcgtagctcctggtccagctgccactgtttctcctccagattcaattcctgcaccgtgatcatgagctcggcctcctcagccaccaggctgtttttcttgtcaacgagctgtagcagctgtcctacccatagtttcttttgctgttctggggaactgctctggcgcctcaaggccagctccagcttcacgccctcggcctctagctccctcaaggcagcctcaatctcatttagtcgccgttggatggtctgggccttgcagaacctcttcatctcctcctccttcgcacggcgcagcagagtccgacgccatgttgggtagttattcatggtgcctgaggtcttggcacaggtctgcagggcctgttccacatctgagtccanaggcacatcttcttcttcctcttcactggagaagggatctctttttcctcttctccatgccacagagcttgag

SEQ ID NO: 127201 - DNA, 1536 bp, Homo Sapiens
  misc_feature (543)..(567): n is a, c, g, or t
cgtatttaatccccagctcatatttatttgggcacagagtgggcactcaaatatctgatgaacttgatgaactgaaaagaggtctccttaaacaagatatcatctcccgaagagagaagtcccaaccatataaaatgtatgatcaagtcccagaaaactttgccttcccaaggaatgtgtttctaatttggtttcaaagcacactggttcccacttttaccactttcatgacattggacaatagtactactcttttctacttttcttccagacctggggacttgatattctcttagcctcatatcatctttgcaaggagttcacagagaggattattctccatcttacaaatagaactgaggcccagaaggaaatcccttagtgtctttttgatggaacacagttctgtgatgggaagctatcccagtctcccatccttgcaaaactgctgcttagtactcaggtgttctctaggttgttctggaacatttacaaacttctttgggtgtgaggatgtgctgccacaaggccaaaaatcacatnnnnnnnnnnnnnnnnnnnnnnnnnaccattctcctcagtgccaggtggggacagattccacccactgggcctgggaggaagaaaagaccttggccactagtcagggaggagtcacagccagcaagaagagagagacctaagtagacaagagtggtttcaaatgggaagaagcagggccaccagtaagaaaaccaggagactccttctggaaggcttccacctgggaggaaagatggcagcagtgccatggaggaggccagatccctcctcctcaatcctctgcgccgggccctcccagagtcacttcttcagggcacccaggctctttcagggtctcttgggcctgggtcagctgctgctgcagcctctggcgggtgctctcgttggagcccgcttcaggtggccctgcatctcctccaccatggctcggtggccaggagtgttgtgaaacagccgcaccgcccggtccccacaggaggccagaaagcggccagtgatgtcaaaggacaagttggcgatacactcgccatggacccgctcaaagcactcctccttctcgccccgccgggtattgtagagatgaatactactgccactggccaaggccaagacctgggcgttgggggagagggccaggcggcacggcgcggcacccggccgcctcttcaaagcggcctgtcttcagcaagtaggggtcctgcttcttcttgtattccacatctgtgtcccacagtttccatgtaccatccttggagacagaagccatcctccgtgagtcgttggagaaagcaaacgagtgcacagccgcggagtggccctttagttcgaaggctcgcaccacctcctggaactcccccttctttccaaagcagacttcccaaaccttcacatctggggtgaagccacacgaggctacaaatctgccacagggagatacagcagcgtgtgtgcctcgtgccgagttcaaccccagcctcgtacctagccgaattt

SEQ ID NO: 127202 - DNA, 834 bp, Homo Sapiens
gccccaccctccctggaactcccccttcctttccaaaggcagacttcccaaacctttcacatctggggtgaagccacacgaggctacaaatctgccacagggagatacagcagcgtgtgtgttgttcatctggttggtgttgatggtagacagcacttgacccttcaggctccagatgaggacagtggtgtcactggaggcagtcatgataaacttccctgtgttagcaatgccaatgtcgatgacaggcgccttgtgctttttagggaagtcctctggggtggctgtgaaggtgtagcccccatcctcccgcttggtcatcttgaagacacggagggtgtccccgttggccagccagacgatgaaggctctgcagtcagggctgaagcgcaccagggtggcgtggtccagctccacgttggctctcatgctgcggtgctctcgctgcaggaagtccttggtgctccagatgcggatggtgcgatcatctgcacaggtagccaggtatttgccattgctgctaaagtccatgcaagatatgttcccgctgtggctcttcagagctgcagccaggaggcggtgggtgaagttgtgttgttgaggcttctccttccgaatccgctgatattgtttctgcttcttggatcccgaagatttgtcaggtggaaatccatttgctttttggcaggcgggccggccgctcctctcctcccccgcgcgcagccacccccgcgctaccgccgccgtcgccatcagggccagcagcccaagcaacaccgacagccccatgagctccgacatctgcgagagctccatgttggtggaaccactgcc

SEQ ID NO: 127203 - DNA, 1458 bp, Homo Sapiens
  misc_feature (190)..(202): n is a, c, g, or t
  misc_feature (374)..(384): n is a, c, g, or t
  misc_feature (524)..(598): n is a, c, g, or t
  misc_feature (613)..(615): n is a, c, g, or t
  misc_feature (625)..(625): n is a, c, g, or t
  misc_feature (632)..(632): n is a, c, g, or t
  misc_feature (643)..(748): n is a, c, g, or t
  misc_feature (750)..(752): n is a, c, g, or t
cggcgcccgttgttttgtcactgaggggcgggagaatattatttattatctcggcgcggagagtaagagaataagagggggtggggtcttgctccctcgcagtgtgcggctaaatgcgagggcccccccgggttttgggtgcgggcgcctcccctccggcggcggcggcggttttttgtggagggttttnnnnnnnnnnnnngcctaggtaaagataagacggcgggcgggggcgggggttattgttttttgtagagccactgcggggggtgtgcccccgtggtgtaaagagcggaaaaaaataggctcaacaaacacccccgctgtgggttgtttttgttttacaagccgtgtggggccccggcgggcccggnnnnnnnnnnngtcggggagagaggaaccccccgcttgtttggggggccgtgtgtgttttttggggagaaggcgggtaaacccgccgcgtccccctcctttcaggcgcgccggccgcccccgaccccgatttttgggattactgttttttnnnnnnnnnnnnnnnnnnnnnnnnnnnnnnnnnnnnnnnnnnnnnnnnnnnnnnnnnnnnnnnnnnnnnnnnnnnttgctccctggcctnnnttctcctttntcctccncgtggcccccnnnnnnnnnnnnnnnnnnnnnnnnnnnnnnnnnnnnnnnnnnnnnnnnnnnnnnnnnnnnnnnnnnnnnnnnnnnnnnnnnnnnnnnnnnnnnnnnnnnnnnnnnntnnngtacgttgaacgtttattacaactaattggcgatgtgataagacagtgctcacgtggcctgaatgttggtcacaatcacaacaaagcttaatccagcccagcatatataagtgaaaatataaaccatgaagacatgtttagatatgtataagtacttagaaaagtgacgctgaacaattacatagctttaaaaaatatagagccatctaatgccattttacctcattcaactcttttttgtaagaaatgtgtctttttaaatttttataagacttctgttaactaggcagtgccatggaaagaaaggaagctgctgtaaagtgtgcagcacttctaagtggagggaagcaaaataaatttagctttaacaagtaccccagagggaacattcgtgctttaaacaatgactttacacataatactgtgaagagagcaacacgttttttgtaagatactgttatgaagaattcctggcaaattaccattctcactttattttggggcatcaaaaacaactaagtatttgattatgaccacaaaaaattcatctcaggagtcaaatgtgccttggccttaaaaattatgtgcttactattgtgaaacaatcctgtttctcatcccagattcagaatgcctaagaaataatttttagtgtaagaagtatcactccaatttagtcattaaaaataatctgtagtcctttaaa

SEQ ID NO: 127204 - DNA, 655 bp, Homo Sapiens
  misc_feature (599)..(612): n is a, c, g, or t
tttttttgtttgaaaattaaagtttattaggatatattaatgtatgatattatagtattactcatcacatgtaagctttacatctgaagcaattcatgcttactgggagggaagtttgagtacttacttagcttttcctgctattcctaggtaaaggccctcctgtggtcattctgaacagaagagtgagcttactgcaaaccacaggctggacagtagagggtgcatatcctcactgagtggagctcagaaaagaattaggattctgcacacatttattccagactcagttcccactgttggtttttatattgagattattttaaaatcttttcgaaatataatttatttgctctttaagtatgggtggggtgttaagctaaatttaaattgttctgtgaggcacaggcattatacttaagcatgaacctaatgaagccctgaacataccaacaggtagcagtccagttaagctctttataaggccacatgcctaagctccaaagggaatcttaattttttattggggagacatttcgttactacatttagtggactttgttagattataacaagcacaatagatttgtgatgaacannnnnnnnnnnnnnccccctgaaaagctttatgatacaacagctctgttttcctgag

SEQ ID NO: 127205 - DNA, 765 bp, Homo Sapiens
  misc_feature (121)..(121): n is a, c, g, or t
gcgatttcaaatgctgctttattcttacaaatactgtaaaaattaatataaaaaagtgagcatgctcagtcttttcctcttatctacaatacaaagggtttgtctgaaaagtctggtttcntttctttttacaaatgtaccttagctgcatcaacaggagtaagatgtagaaaaagctaccattacaaaaataatttaagggaaaataaacacgtttagcttctctcgcagtttagtggtggtaagtccaggctgtagcttctttgcgctcctatgtcccaagaaactgcagcgggcacccggcggctctggctgcgccagggcagggcgcgctccgctccgggccgtcgggtctgaggtatgggtcgttgctgagtctctcccgccccggccgcgcgttaccggcagtctgctgtcccggcggccggcaggaagggcgggctgggcagctgcttgaagaactgccggaggccggccaggtcccgcgtgagctgctccacgcgctggtgcagcttctcgttctcagccgacagctccaccaacttctgctgcatctcctggttgcgccgcttggccttgtcgcggctcttgcgcacggcgatgttgttgcgctcgcgccgctgccggtactcggggctgccgcggtccgggcccctcttgccggcgctcttctcccgggcggggccgggcgcgggggtctgcctggggctgctgcgcggcggctccggcgacgtgggcggggtgggctgccctgcggccgcaagc

SEQ ID NO: 127206 - DNA, 862 bp, Homo Sapiens
  misc_feature (744)..(778): n is a, c, g, or t
  misc_feature (782)..(821): n is a, c, g, or t
tcttgcgcacgtccactgtttttcctctctctccccttcccgtactcgcggcattccccggtcccgggccccctcttgcccggcgctctttctcccgtggcgtgggcccgggctcccgtgtggtcttgccttgggtgccttcttgcgcggactgtgctccccgcgacgtgcgtccgggttgtggccttgccctgcggcccgccaagctcacccacggttctgtgcgcacgcggccacctgcgcgggcaacagcgagccgggcgcgtcgccgtcgccccagtcgggctcgcgcttgagcaggcggggagcggcagggcccgggcccaaggggcgcgcggggccgccgggaagaagctccaggggccccgcgccgcccgccttgtgattgctgttgaagaggtcggcgaagagctcgtcgtggcacagctccagggtgggcacggcggccatggagtcgatgtaggcgctgaagtcgatggcgctctcgtcgtcgtacatggcgggggcggcggcgcctggctcgcctagggccctggctcggccccgcggcccggcttgcccgcccggcccggttcgtagaagggcgcaggctccgcaggccagggcgcgccgcgcgccgggccgtccaggctgaagagcgcggcgctcatggcggcgtcgggccgggctctgcgtccaagcgaggctgtcacccccggccgtaatggccgaattcccgggcatatgtccggtaccgtcgactgnnnnnnnnnnnnnnnnnnnnnnnnnnnnnnnnnnncggnnnnnnnnnnnnnnnnnnnnnnnnnnnnnnnnnnnnnnnnactacaaccgcctagcgccctatagtgagtcgatacagtct

SEQ ID NO: 127207 - DNA, 1326 bp, Homo Sapiens
  misc_feature (177)..(224): n is a, c, g, or t
  misc_feature (531)..(564): n is a, c, g, or t
  misc_feature (631)..(640): n is a, c, g, or t
gaatcagggctcccgcacccccatttcctaacccccaggatctttcccctcagcctgccagtactaggattacagatgtgtcccccatgctaatttttagaaattttttgtatagatgggttcttcactatgagcccaggctcatcttgaagttctgggctcaagccatcctcttannnnnnnnnnnnnnnnnnnnnnnnnnnnnnnnnnnnnnnnnnnnnnnnagccgtcactctcatttttgagcacaggaattgtgcccaaaggctaggataaggaattaaagatgcatgcccagaaatacccaccaacattaattataaaagggagactatactaatgtttgtgaaaagcttatactaacatagagcaatatttaagttataaagttaaatgaaaaagggtataaaactgtatgaacagtacaatctcaactatgtaaaaaccacccaaatctgccctaaaaaggctggaaggaaatagctccaaatgttaatgtgattgtatttaagaagtgtatctaatagggannnnnnnnnnnnnnnnnnnnnnnnnnnnnnnnnnccaaatgtttctctactggggagatttttttaaaaagctattagggaaggagtagaaccaaagtggnnnnnnnnnntctattagttacaaaatacttgagttctgatagaagcaattgaattttgagttaatgaatctaagtctagcctataagaatttgtacatttagaaaactatgaaacagtccaggctactccatgaatccattggtaggaccagaggctggaggtggaagtgccacctggtcctgcctgattaaaaatgctgaatcagccaggcacggtggcccacacaaccgcaacccctccatctcccagcaggcaggtaagtcaatttcccacgccacacacggtcggctcttccggcgccaacatgaccctggcttgttcctgtctttgcatctgtcagtctccccaggaggaatgtgttctccacgagggcagggactacgcagaactggcccactggagtcatgaggactcggtagctgtggatgcggcggcccgtgccaggcggcagcgttgggtagggctgcggctcgccgtcgaagttgagccatacgggcagcacgacgcgcggactgcgattgcagaagatgacctgggagggctcgcgcgagttcaccgagcgcagcacgggccgcggccgcccggcctccatctcctcctcggcgcccagttcctccgggccggactcttccgggccggactcccccggccgtaatggccgaattcccgggcatatgtccggtaccgtcgactg

SEQ ID NO: 127208 - DNA, 742 bp, Homo Sapiens
aaagcaatgggggcctatttttattctgaggaatggagacccttttggaacttaagggaagggaaccagttctgtttttagatcacaaggactcatccggtaccatcaaaaagtggagaggaaaacagtgtaaattttcaacaggaaatcttcaatcttccccatccggttgaatgtgcaatgcgctcctgtgtcagcccgctccaaggtcttttctgcacattttgggtggtctttccagatcttcgtagagcgacctgacgatgtccagtctcctgtaattctcaggcttgattaggctccggacaactgggaggcatcgctctttcagagtatacactcggtagctgtagatgcggcggcccgtgccaggcggcagcgttgggtagggctgcggctcgccgtcgaagttgagccatacgggcagcacgacgcgcggactgcgattgcagaagatgacctgggagggctcgcgcgagttcaccgagcgcagcacgggccgcggccgcccggcctccatctcctcctcggcgcccagttcctccgggccggactcttccgggccggactcctcggcgcccgactcctccccgccgtcttcttcagggccgtactcttcgacgcctgcctcctccgcgcctacctcggcctcgtcccagttctccgccctccggggcattccctccgcgatccagaccacccgggccggacgccgcgggatccgcgggtcggacgcgggccc

SEQ ID NO: 127209 - DNA, 1706 bp, Homo Sapiens
attcattttatgattaaggtgtttatcactactccagttgggtaaaccacattgaagaatctgactgcaggtctttagattcagccaaatgctttccatcaattttgctctaaaaaatatgaaacattttaatacttcagccatgctcagaacgctgcagtctaaggatgaacttcaacttgcccatgccaagttagggcgacaggagcagaactaaggagctatgacgtctaaaagaatcagagaatctggcttaagacgaagagagcttctgttccccaaaactaaactgtctagtttttaaatccacccttaaccgttcaagaaactgaaaaagtcaacttgtttttaaaataccacacaggtatgcaatcttccatgatttgttttgcatctcagctagcacagggaaacccttgaaaaacctagctgtcagaagtttttcctgagggaaatcattacgcttctactgctgagcttcatgtttattctgtgcgtcggggaaaggagaaagcaatgggacagagaagggaaaagttgcgactgggtgacaaattcattaggtgcatttgaaagtaaatgcaatggaaaaaagtaacaaatgctaaagttttctaaaagtttaatgaagccaataaggcatataaattgtgttctggcagacattaagacctgctttctcttaccaaagaaaatggcacgttttatcaaaatttgacaattcagagtaaagggtactgagattaagcttcagagcaccaacttaaacaaaacaaccaaaaaattgttatccaacgtggaaagaggagcaagaaccaaggcataaaggggaattaaatatgtgttcctccatctcaaaatccttttaggaataggagttctggccacttgtgagcaacacattgcaccaccaaaccccaattccagaatctaaatttacgatagaaaaacaaaggtaactccaaacgcatgtcttgtatattccaaagggaagcttgaaagtattcataatacataggcttgtctgtttcaggtaaaatgacagattgctataattcttcctgctattatagtcaaacgagagatgacccacttgtcgcaaaagtttagaaatctctcactttcagttcctagttttagtatggaattcacttgttttaaataagggctacatctatgaatgaatacagaacttcaattcacacaacatttctgaacattgccattcacatcccgacccagtgcaatgaatgaacatttatggttaactcagcaaagtttcttcacagaaagatattattaaatggctgaagaaattgcaaactttaacaaagtgctgtgagtaattactggaaaaacccgttacactgatttgcaatggtcttttaaggataaaaataggaagtaactgatactggactacaagtttgcaaggaaacatttttcactgtcctacttgatatataatataataatatgatagaataaattacagtacctggcaggctgacatcagttcttcatctaaaaaaacactatcattcagttcaggatattaaaaatgaagatgaaacatgctctaaaacattgtagctacaagaggtcttatatttactcaaaagaggaatctattgagaactttttatttaggtctaccccggccgtaatggccgaattcccgggcatatgtccggtaccgtcgactg

SEQ ID NO: 127210 - DNA, 1621 bp, Homo Sapiens
gaaaccattaaacttgtttattttggaaaatgcaatatgcacaaggtgtgttaaggaaggaaagatgtatttcagtactcctactaatacaaaacattctgagaggggctcgggcaactttaatggaagcaaaactcaacaatgaagaatactatagtacaaaattatggccaaaaatactgtatttttaaccagcaagatcattggggcattattatacaacattaggtgttttttgcaaaactagttcccatccccaaacaatagacagtacatgcatttgaatgacattttaggaacagtaaatattcttttaaatactgcaagttaaaaatgttttctgacaaaactccctaaatacataggtctagtaagggtttccaacaggatgatgggtgaggaatccagcaaggagttgcatttagagagttctttgaggaaaagaaatccaccaaaaacgtgtttcagtcaaagtaacctggacaaagttacgtagtattattccagctttctttcctgaacttaaaaatgttctaccaacgaatacctttctgttttttctgtctaccaaaagcttatataaaagtcagaatttctttatccaagatctgattttacccaatagatgttttcataacatgtaaatgtcatttgctatattgggttggaatcatacggggaaatggaggacacagggtagataaggaaggcaaggaggaaattaatatttgagcacctactatgtgctaggtgtgtattcatactttgaacatatgattctagaggcaagagtgttattgaaagggcagtgatcattgggaagacagcaggaaatggctattctgtgagaaaaacaaatgacaagtttagggtctgtactaagttatctactaaacagcaggtgtctggctccaaaatctctagctaatcatatacaactaagccatttcttttcctaatttgatggaaccaaaatgaaatcccaaagacacagttaccaggacagatctattaacgctacatatgctggaaatatgtagagatagataaacatacaatattactagttttatttttttgtgtttctaaccaaagatatatctttggaagaaaatattaatgtataccaagcacaccttatttgtatcaattgagatgttgattaccaattaagtggttttaaacccttatttaatttgaagaagagcagcaatatacattacaatatttgggtacactttatttttatatgggttaacattctgctatatttcatttcattcgttttgagaaactgaaaacaaagggaaatcaagggtaatcggtaggtgatttgagggaaatttccaaccaatatgtgagtcttgcagtatttcattatacagccctttcttcccattatttatttttttgcaaataagtcattttgacccaaatccagcataaatagcttttcaccaattcctaacttaagacaactaaaatttacaatcatgtggcagtataaattttaaaattacagttcgtacactttgacaatcaagatagtctgaagtacaaaaaagtaaattgccctttagctgaattacctttttaaaataggcctgctagttaatctacc

SEQ ID NO: 127211 - DNA, 531 bp, Homo Sapiens
aggatctggagccaaaggcgctttcatgaaaatatttattacccaataaaaatattcacccagtgcttcagcttacggtaaactaaacacatctattatttacaacatagaaaattaaaggcgatgcccaagtcccggccttccgcaggggcgccgctcccgctggaggacggaagggaccagggaccgagggtgcgcgggcgcatccgggcgcaggaggcggtgcaggagtgcgcagggcagcaagagtagcaggctgggcgcgcccccggcgctcggcccgtgagcgtgggaggccaggaagtctttcgggtcacagcggtcaggcgtctggagggggaggcagtgcagggccccgaagatgcacctgcagaggtggcaggcgcggagggtccaggctccgtgctccagggcgccgcattcactgcgcctctggtcatgctcgcagtagcggccggtgaagtgggccgggcacacgcagaagctgcccagcacgcaggtaccgccgttcctgcagcagcgcggccgccc

SEQ ID NO: 127212 - DNA, 687 bp, Homo Sapiens
gcgctttcatgaaaatatttattacccaataaaaatattcacccagtgcttcagcttacggtaaactaaacacatctattatttacaacatagaaaattaaaggcgatgcccaagtcccggccttccgcaggggcgccgctcccgctggaggacggaagggaccagggaccgagggtgcgcgggcgcatccgggcgcaggaggcggtgcaggagtgcgcagggcagcaagagtagcaggctgggcgcgcccccggcgctcggcccgtgagcgtgggaggccaggaagtctttcgggtctggaaaaacagagaaaccggagatgtatgaaataaagtgttccggctcggtttgagagagtgcaatagaaacgcctgctccctgccttctgcaggcccttttctcctgcgccctcactaggctctgtccctgggacgcgctgcagggtgaggtgtgcggaggccagtcccggccggctgcacagagggaagcctctaaatgtttgtagaactcggagagctgaaggagaattacagtactgtgtttaaagggggaacgaagaacagcccttccgtctttttcatttggcccgtgacctttcagggagtcccgctccaggtcattgagcgatggggcacatagacccgatttaaaacagtgctatagtatataaatcagctcgcttccgt

SEQ ID NO: 127213 - DNA, 745 bp, Homo Sapiens
cgcaatccaaattcatccaccagaactccatcctgttttttgtatcagtgggaacaccttctggaattgcaggtgcagatgctgcctcatccggaataagaactgtcttcatcagccagaagctcatcacctagtgcatccaactctgcttctaaatcatcttcatccagttctggggtgccataactgcgactcagtgcttcttggatttcatttgcatcttccatcatatcctctagctggtcttgtaaatcctcaatctggtcgatcttcacttgcttgtatgccttcttcatttcctttactcccagtttcatagcatcaaccgtggtcttggtgtccttcaaagactggatggtataattggcttgttccatgttgaatgactgttgggcaagattgtcccgctgctgctcatacatcctcttttgctttaaaactcgcaaggctttctgcttgaccatattctttgcaggaccctctctcatcttcttgatctgatccttatacttcactagctcagcatccaatcgagaaatcttcttgtcaatggattctgctctactgtccaccgtgccaatgcagtcagtcaggctgggcggcggagccttgggtttcgctttcccgaagagtcggttcatcttgagcagccgcgaagaaacccaaacactagagcaaaaccagaaacggaagcccccggccgtaatggccgaattcccgggcatatgtccggtaccgtcgactg

SEQ ID NO: 127214 - DNA, 2364 bp, Homo Sapiens
  misc_feature (628)..(637): n is a, c, g, or t
  misc_feature (792)..(802): n is a, c, g, or t
  misc_feature (2247)..(2281): n is a, c, g, or t
  misc_feature (2284)..(2322): n is a, c, g, or t
ggcggcgggtgtgcgataccccgctttcttttttcctcccacagacggtggggtgggttccaccggggaaagaagcggggggcggcgggggtattccccggggagaggggttgtggataggaagaaagaatatgtgtgtttagggttttaaaggcgcaaagtgcccataaggtgagaagagtggtcgcaccacacattgttgggatataagagaatcgggggggccgaaatagaggggagcgaaaattcattgtgggcgccacgccggtttgtttcccccccgtggtgggggcgataattttttattctcccacagagggggacaaagggagggttccggaagaaaaacccatttgggggagaagtaccgagggtgttccttccaaatacccgcggtttgggggagggaggctctacccaattgtagggccgagagaaatgttgttaagaaaaattccccccccggtgcggtggaaaatagaggggccaagatgccaggacgttaatatgggatattgggacatccgggtttggactccccggtgaataaggtccccaaaaaagggccttcaaaaaagtcccttcttggggttgttctagaacgcgtggggttcgaccacggaggggnnnnnnnnnnggtggggaatcacagccgcttgtgctgaatccgggtgttcctatgagaacaagataatgcccaatttcctttaccaatggggccgcccgcccaagggaaggttttaaaaagttttttgaggccgaaggcggccgacaaaggttttggtgttatcnnnnnnnnnnncggggaattttctggagatatattgtgggattggggggatgtagatgtttccttttgaaaaatatttattgagtataaataaatgtcctatacattaaatatcaagaaatattcataattgattacaagtcaagatgtaatactgagggaaccatagaatcaaaatacccactcatgatacagtagtgataattccattccaataatggacacagtaacgacttgttcacaagacacaacaaaacccatcaaaaaggccatcactttaaccaacctataataccacaatagaaaatgattctgaatcataatatgaacagccccaataatctcatctttgtcttatcaatttatcaggtcattttgagactgtagagttacactgtcatagacttttaagattccatttccttagttttatttcaaattattattaatgaatgaaaacaagtcatacgagctaaaaatacttttaaactgagttcgtttttcataagaaaaaaaggaatcaaattttagtacgaagaaagcatttcccaagcaatgagtctcttaatggaaaaaataaaagagcaatgtaattaaactttccttcaaagaaaggaaagaaacctaaatctgttatggcaaatttggaaagataaatatttcctagtcccataatatgtgtttgttttacaagatatgcttgaatgatgcaaatctatgaagcagggatctgtggcaatccaaattcatccaccagaactccatccttgttttttgtatcagtgggaacaccttctggaattgcaggtgcagatgctgcctcatccaaataagaactgtcttcatcagccagaagctcatcacctagtgcatccaactctgcttctaaatcatcttcatccagttctggggtgccataactgcgactcagtgcttcttggatttcatttgcatcttccatcatatcctctagctggtcttgtaaatcctcaatctggtcgatcttcacttgcttgtatgccttcttcatttcctttactcccagtttcatagcatcaaccgtggtcttggtgtccttcaaagactggatggtataattggcttgttccatgttgaatgactgttgggcaagattgtcccgctgctgctcatacatcctcttttgctttaaaactcgcaaggctttctgcttgaccatattctttgcaggaccctctctcatcttcttgatctgatccttatacttcactagctcagcatccaatcgagaaatcttcttgtcaatggattctgctctactgtccaccgtgccaatgcagtcagtcaggctgggcggcggagccttgggtttcgctttcccgaagagtcggttcatcttgagcagccgcgaagaaacccaaacactccccggccgtaatggccgaattcccgggcatatgtccggtaccgtcgactgnnnnnnnnnnnnnnnnnnnnnnnnnnnnnnnnnnncgnnnnnnnnnnnnnnnnnnnnnnnnnnnnnnnnnnnnnnncctcgaccgagctagcgccctatagtaattctatacatcttt

SEQ ID NO: 127215 - DNA, 1116 bp, Homo Sapiens
tttatgtattctctaaaatttatttacagttaataagttaaaaagcaaagtacaagcagattataaatctcaaccataagcacatcaaactgtccagggaaacactttgattccattacaaacaattgttttctaatgcgcttaagacataacactctatcaaaaaatattttaaacacaccaataaatattaggcatgtatgtccattaaaaaccattaaagagtcctgtggcaatccttaaaacaatgaaaaacttttgagttcaaaattgctcagatattttgtattcaaatatttttaaaatttacttaagagttttctaaaaaatagtactatcatttgcacacagcagatcaataggtgtcagtcaccagcttaagttacacttgtcaatattcaaacttgaataaaataaacacacatcacaacagcgacactttgcactatcaacaatgaagcttgccctcaacaattatgacgttactggttttagtaacataaaaatacattgctggttgacaggaaggataaaaatgacatcaagaatctcaaaaagttatgtgaggtgccggtcaccacatttaggcactcaggaattaaaaatcaaataaaagcatagcaaggtgatgaatttcctcctggcttccccctctacttgtgccatatgagataaaagagaaggcaagagaatgaacgaagatcatgagatttctttcaaaaactatacacaagctaagctacagacttcacttcagaggagtaagtggatgcctcattataaaggccactatgccaagtttcttttcacattctgtgacaaagtacccatgaaatactttcactttcctattagtataccagtcaactatattagatgttgcttcacattttaaaagttgtcacataggtttttaccaaagggcaaaaataaagattttttacatcttatttcacagactagaaatggcataatttttgaatagtccagatgaataccatattgaattcaagatggacaatcagatccaaaatggaatcagatagcccatgtaatccaaagaagcatttatgtgagttcaagtatgctaaagtaacaagggataggagagaaaaa

SEQ ID NO: 127216 - DNA, 1131 bp, Homo Sapiens
  misc_feature (531)..(601): n is a, c, g, or t
  misc_feature (619)..(939): n is a, c, g, or t
gcacgaggccatgttttgttcccttccccctgagtatgcatgtgcctgttcagagtctccagataccttttttataaaaagaagtctgaaaatcattatggtatataatctacccttaacagagcttttcttattacagtgctaaaatgatttctgataaaatggtccctaactcaactagaaggctaaaaatacaagaatgaaagaataagcagagtactcatgatgcctttgagaaaaatcaaaacatcatgtagggtgacctagtttccaaaccaataaataagtagtattgtaatattaaaggaaaactgttccaatcatttaaaagtacttattaagtactgctttttacagttatgacaactgtttctttctatgcatataaatcaaggaaccaaatatctgtagccatggaaatgtctgactagaaatatttatattgaattctgaatacaaaatgtccctgtggtagaaaacttactctttatgcctggtgcagtataattcccaagtgtactgtctaccagnnnnnnnnnnnnnnnnnnnnnnnnnnnnnnnnnnnnnnnnnnnnnnnnnnnnnnnnnnnnnnnnnnnnnnncctcgtgccgaattcttnnnnnnnnnnnnnnnnnnnnnnnnnnnnnnnnnnnnnnnnnnnnnnnnnnnnnnnnnnnnnnnnnnnnnnnnnnnnnnnnnnnnnnnnnnnnnnnnnnnnnnnnnnnnnnnnnnnnnnnnnnnnnnnnnnnnnnnnnnnnnnnnnnnnnnnnnnnnnnnnnnnnnnnnnnnnnnnnnnnnnnnnnnnnnnnnnnnnnnnnnnnnnnnnnnnnnnnnnnnnnnnnnnnnnnnnnnnnnnnnnnnnnnnnnnnnnnnnnnnnnnnnnnnnnnnnnnnnnnnnnnnnnnnnnnnnnnnnnnnnnnnnnnnnnnnnnnnnnnnnngaccggtacactaactcagagcggttataggtatccacagatcaggggatacgcaggaagacatgtgacacaaggccacaaaggcaagaacgtaaaaggcggttggggcgttttccatagctcgcccctgagagaccaaaaatcacctcaatcagagggggaaaccgaaggcaaaagaaccaggtttccctg

SEQ ID NO: 127217 - DNA, 1672 bp, Homo Sapiens
tctgccaatgtttagaacattttattaaagtacaaaattgttggaatttagctaatagaaaaacatagtaaatatttacaaaaacgttgataacattactcaagtcacacacatataacaatgtagacaggtcttaacaaagtttacaaattgaaattatggagatttcccaaaatgaatctaatagctcattgctgagcatggttatcaatataacatttaagatcttggatcaaatgttgtccccgagtcttctgcaatccagtcctcttagaaattggtttctctctttgggagattcagactcagaggcagccagaggggacaggtcaagagctgaaataatcacataactactctaattttcttcattctattgactgtgtcaagttatagacacagccaaagtgtttttcttcggcctctgatgatttgagaagatgaagaacatgagcaatttctcattgcttaaagaaaaacttggcacataagaggctgagtgtagtagagtatctgtactagaaccataaagttctatctgatggtaaattatgtataaaactaagataaaacagataattatgctctatctcatatctactgaaagtagaaaaggaggaagagtgacacttttaaatcaaactgctctagttttagcttagtggatggttaataaacacactgctttacgctgaagtgatcagatagctatttctacagttcagaagaacttaaaaatcaggttttaaagacaaaagaaagcagactcaaaacacagacaaagcagagaagaaaacaatgcccatgagatggtcactatttagacagtattataaaaagctaaagaacacttgggctttacttcactttgatgtcttgtactaaaaacaccttcccccaaactaaattcagaggggaggaagttaagagcttcaggtaactttaaaaccagtcttgggcttggtaagataattacttaaaataatcgcctcacattttaaaacagatcatcttcatctgactcttccaggtactttataggtttctttgcccgtacagattttgcccgaggagccacagctgagtcaaagtccatatggaagtcatcactctcccccttggatttcttgcttgtgactgctttcgaaacaattttctcaaaattagagtcagaatcatcagaagtggatggcttccttttgcggcgattcttggttttggcaggatcaggcttttgagagacaccagaattcaaagctggatcccttttagttccttttggggcagccctttttttggcaccggtagtggaggtggaagactgactttttgctgctgtcttcttcactgtcacattctttttaggaactgggtttgtaatttcagtttcatctgggaaatgtgtagcaggagggcttgaagacagtggtacactgcccttaacatcatcagcttcaaggtctattatttcaaatggaaaggaaaatagtacatttaagcaacacatgaaaatccattttctgctttgtccctggtatgaattcctatttaaacaccaaatatgtgacttttctggaatatttaaaacatactcttaaaactttgttctaatttctgaattttttatcagcaagaacagtttttattttttgtatctctagcacctagcaaa

SEQ ID NO: 127218 - DNA, 1041 bp, Homo Sapiens
  misc_feature (307)..(317): n is a, c, g, or t
  misc_feature (758)..(758): n is a, c, g, or t
  misc_feature (769)..(769): n is a, c, g, or t
  misc_feature (854)..(854): n is a, c, g, or t
  misc_feature (970)..(970): n is a, c, g, or t
tttggatttccaactaggttttattttagtttccaatattatgagcaatgatacaggagtaactcaagcaaatacatcaccttaaatacatcagagaaaactcactgtgtcagcacgtcttgcgctccagcaaatgaacataaaaacaacaatgtcagcagcattaaagtgcttttggccatacttctttcagaaagggtctctccctcagtggtataaatttaattttacgtattgaagaagctcaaaatttcattcattccccaggggctacattgaaaaaaaattcatgtttacgctaaagaannnnnnnnnnncaaaaagagcacaaaatccattggaattgtgtgacagtgattttccctgacatgctgtgaagtggcccctgtccattcaggcccggcacacgccgggaacatccacccacagcatgtccacctggcagagtccatcacttcgccccacacaacaggacagactgagggctttaaatacaagcaggtatgtgaacaggacatcacctgtgatgtggccaccaaacagtgcacagaggctaccaactcatttcctcaaagatgagtgatggctgggctgctgggcccctgccttgtgggctgctttttgggagaggtgttgcttatttctaggaagcgatccaacttgtgccacacaggatttgtcacccaaactgcttttctcacacagtcaacaccttggtgacaggcatctgcccccacttcaaccaggtacaatcccanactcaacatcnagcataagacaggggggtcagtcgaagggtctggagatcagggagggtgggaagatggcactgggtttccccacatgtccttggncactgcatcactggacaggaatttattcagggactgggaaggtggggggggggggaacatgtccttaaggacacaggatgatcagctatggttggggtccaaaccatagcctccanacgagcaatggcggcatctcacgtcggttggggcagactaacagccaagtcactcacacatcttttatctt

SEQ ID NO: 127219 - DNA, 2194 bp, Homo Sapiens
ggtggtgtggaaggcagtgggctggcggctcattgccctctcctttgggctctatggcctcctctacgtctatgagcgtctgacctggaccaccaaggccaaggagagggccttcaagcgccagtttgtggagcatgccagcgagaagctgcagcttgtcatcagctacactggctccaactgcagccaccaagtccagcaggaactgtctgggacctttgctcatctgtgtcagcaagttgacgtcacccgggagaacctggagcaggaaattgccgccatgaacaagaaaattgaggttcttgactcacttcagagcaaagcaaagctgctcaggaataaagccggttggttggacagtgagctccacatgttcacacaccagtaaccctgcagcccagcagatagtgggcacctgaggcggagtctgcgtggagaggggcggtgctgccagccctaagtggccgtgtgggctcccccaggggcacgtgtggctcctgtccccctggccactgccaagagaatgaagcacccagtctcgtaccattttgagccctccagcactacttattttcccccacctttgcctgctgttgctggaagagctggctcatacccccaaaggacactttcagcgacagctatggacagcatggtaccaaggagttaagttgaggctttttccagctttctctggttccatttgattgcttgataaggcctcaggatctcagcattgcacaatgcctcatggaagcctttgagggtatcacacagacacccccaccttcctccagcctgtgcgcacctgccctccttgcagcccagcacacctgcaggtgtaagggacgattggagtttcttcccagagagtctgtcccagaaggactgtggcttgtgtgtgtccatctcgcctgttggctcagtgcttcatcccatttgcagagcctcagacacgtcttggtggtgaggctcagttacccctgggcttaggctgaggcgggccctgtgctgggggtggtagaaaggatgctgctgaggcagctggaggagtgggagtagctcagaggggagggctgttggatgtatggggagctggcagagcaggtggcagtcactgggacaaggagggacttgcctctcttctcattattgtgtcctttgctttagtgtcagtcctggacttgtgcaggcctgtttgtgtagatctgttttggaagatggcatggtctaggtggttgaaggatgtagtagaaggatggatggtggaaggtggggacgttggtggctggctgcggtgcatgggccccacacaggacagctggagaatgggccgtccacttggcctcgttctgcgaggggctcatgggtctgagagcccccacccactaggcttgattgcatccctgttgtgccctttaagagacatgtttccaccccacccccaaccttgtcccaagtgccctggactaaatttcctgtgccagtgactgcagttggccaagggacaatgtggaaaacccagtgtccatctttccaccctccctgatctccagaaccttcgactgacccccttgtctttatgctgatgttgagttttgggattgttactggttgaagtgggggcagatgcctgtcaccaaggtgttgactgtgtgagaaaagcagtttgggtgacaaatcctgtgtggcacaagttggatcgcttcctagaaataagcaacacctctcccaaaaagcagcccacaaggcaggggcccagcagcccagccatcactcatctttgaggaaatgagttggtagcctctgtgcactgtttggtggccacatcacaggtgatgtcctgttcacatacctgcttgtatttaaagccctcagtctgtcctgttgtgtggggcgaagtgatggactctgccaggtggacatgctgtgggtggatgtttcccggcgtgtgccgggcctgaatggacaggggccacttcacaggcatgtcagggaaaatcacttgtcacacaattccaattggattttgtgctcttttgaaacaccaaaaattctttgcgtaaacattgaatttttttcaatgtagccctggggaatgatgaaatttggagcttcttcaatagtaaattaattttccatggggggagacttctgaaaaatttgcaaagccttaagctgtgacctgggttag

SEQ ID NO: 127220 - DNA, 2968 bp, Homo Sapiens
  misc_feature (278)..(341): n is a, c, g, or t
  misc_feature (1405)..(1492): n is a, c, g, or t
  misc_feature (2863)..(2897): n is a, c, g, or t
tttcgtgtctcgcttccttggtgctttttcctgtctgctgttggtcgctcctcttggtgcgttattcgtttgtgtgtgttgtttttctggctgtctctgttcacctgtgttgttcctctcgttcgtgtgtcttgctccgttgtctcttctcctgttctgtctcgttgcttctctgcttctgctcgtgctgtgttcctcggatggctcattctgtcgtgtgctgctgtcgtcgtgtttcccatgttgtcttgttgtgtgtgtgcttgatgatcgtgttnnnnnnnnnnnnnnnnnnnnnnnnnnnnnnnnnnnnnnnnnnnnnnnnnnnnnnnnnnnnnnnnttcctcgttgtgcttgctcgggtgatcttgctcatcctctcgattgatgttcgcttttgtgtgttgggcgtgcttttcgtttctctgtcgtgtcgttgtttcgtccgtttcggctccgtgctgtgagtttgtccgtcttcttgttatgtttctgtgcttctctctttgtgtgtttggtggctgattgtcttcgatggtctcgttccctgtgtgtacgctcattttgttgctggccttgttatgtgtcacccattggttggtcctgatcgctccactgtcgcttgtgtggttatcccggcttcgatactgctgcgtgtgtgctcttggtggtgcgctagtgcgctcgctcgtttggtgttgtccacttctgtgttgctctgtcttctgttctgccttgtgcccagtcgtcgtttgtctcgcttgacgtcgtgccgctgattgtctgcgttcgtcgtctttgtttctatgttgtgctcgtggtctgcatttcccttggtgcttgtgtttgtgccgttttggctgcgtttccatccccgttggtgtcggttgctctgcgcgcgtgtggccttgcctcctttcttgtggttgtggtcgttgtgatcctttcgccttgttcgcttgcgctggtgttgatggtttccgtttggtgtagttgtgtgtgttttgctttgacttgctcgtcgtgcggggtccattggcttgtcgtctcgtgtcgcccctttcagtgtcttgtttgtgttcttctctggtttatcattttttgctctctgtgtgttgtgttgctgtccttatctatttctctctcctgtatcgctgctttctgtttcatatgtctactcctgcctctgatgtgtgcttctcgtcgttgttgttgagtatgtactctgtgttctcttgctttggggtgtatgttcgttccgtagttgtctgaattcttggatgtagttgtcgtgtgttctcgctttttggtgcggccagctctctgtgtgcgctgtagcttggtcgctacgcgccgctcttaggttttgatctgttgattgtgtgttctcatctctttgtggtgnnnnnnnnnnnnnnnnnnnnnnnnnnnnnnnnnnnnnnnnnnnnnnnnnnnnnnnnnnnnnnnnnnnnnnnnnnnnnnnnnnnnnnnnactatacaagggtttattaaatacttgctagacacataaaagaacaatttcagagcccacatgattttataaagcttaatggccagccatgtcagcctgctctttaacctctggccagaatgttcctatcacttgccagcgccgtgtctttttccttctttcaacaggcaacaagcctgcaaggaggtggagggtttccccacgtcatcgtccaggtcaggacagctcacacagtttcttcaccaagcaaaggcaatgtttaggttcgaatgaggggtgctctttcatccgctgttccctcatccatggatccctgtcctttgcatgcaagccaggtaaaaaccaaaccaaagaacacacccagcgccatgatgatgtagggtatgttggtgatgatcaaagtagtgttaatcatagacttcagtcgactcgccgtctctttatcaatgtgaacactctcattgaggtacatcactgggaaaaccatggttctaatgtctcccgtttcaacaaagtcatctaattttttgacataaatgttgatttggaacctcttggctgcttttaggattattccagtcaaaggattaatgtccacaaatgtctcatggtcttcctgatttgggtgcatgccttctatggcagaaacaaacctctcatctgcttggtaaaagtgtgggaaagacataatgatgggtgcacattcttgcagatgctgacattcagaactcctgagcccaggcagtttccctcaggtatacagaagccggcattgtctgacgtattggctaatatttctgcaggaactttataccgaaaggcaggcagtccctgtacactctcatagtcactgaaagtaatatacactgacctgcaaaagtcagatgggaagacataaaggacctcatctttggttattagtgggtgaaaagaatctccatctgttccattaatcatattgcacttgtctgttatccaccagtcaagtgacgttttcccattccattccacaatttttgtaaagttaaggtaactgtcttctccagttagaaaaacatagtctccatcattagtcccatttttctgaaaatatgtgaatatgatcatttaaagtaactgtgataattttatgacaacttggctagactatggtgcccagttgtttggtcaaacactagcccagatggtgtggtgaaggtattttgtaggtgtgattaatatctacaatccgttaactttaagggaggttaccctcaataatgagtggctgggccccctccaatctgttcaaagccttacaagcaaaaacagaggtttcttcccggccgtaatggccgaattcccgggcatatgtccggtaccgtcgactgnnnnnnnnnnnnnnnnnnnnnnnnnnnnnnnnnnncgccgcttcctcgctcactacttcgctgcgctcgtcgttcgctgcaagagtagcgccctatagtgattatc

SEQ ID NO: 127221 - DNA, 1448 bp, Homo Sapiens
gtttaacctataaccttttttcctcccacatagtaggtagtaacatcacacggaaacagtgctctgaagacattctggacacatcgtatacagcacagccattcaaatcaacggcaacagaacgcacgaagaacctggttttctttcaaagcatgagcagttctcattttacaacatgtgttttaacataattcagaaagtgcaatctttgcatgacaaccagataattctcaaaggttactagtgagctgataaaattaacgtttggcaaggaggtcatggtttacaggtaggctgtccgctcaccaatgctcagaaaaattcagcagaacatacttttcatatttagatccgaagagaggtgagagacattctactcaagtcatggctgggctttctgtcctcaaacgaaattgggcaggccatttgcgtggtttctctggataagttccatttattaatcattgtacaaaaaaatcttggcattcatttgaagagaaaagaagttgctatatccaaatatttaacattttaacattgtgaaagttcaacgtttataacagggctttttaaaatggagaaaagttttggaaaatttttaaaaagaaacttatgatttattagagtacaggatccaaaacacgtttttagaaaaatataaagtgcccaaataccaacttacacaggtgatacaggcttcctggagccccatgaagcattcatgaagaaagacatttaaaaacagtctagatacatatgtacagctgggtcagtaaaggtaaaaccatctttcttgactttgatgtgtctaagaaaaaaggaaatcaatcaaaccagaaaaccaacaattgcaactctcagcatgctcaggttcttattaatgcatctcattcatattaattaattccgtattatcaaactttcccctttaaatgaaagtagtgtacaatcctcccaaccttggcgggccaggtgctgtgagtggttacgtttccagatgcaggttcaaatcctttgactttggatttgactgatgaggaacatggacagtggattaaatagctcattcaggctggaggagccaggggccaaatccccatctctttctagtaactgcttaaagccttcccttgctatgaagtggtctcaggtggctttccaaaccttggtcaccccagggtttccaaagggtaaacaagcagcaggcattcaacatgggtgagaatactgcatgcagatggacagacaggtgcagagacaggcccctaacgccccattcactagagcaactgcattattttaaatgttgagagcaaagtaactaggtcctaacttcggaagttagcttctatcgattaatgacaagattagctcgcttgagaactggcaggccgagagttggtggagctccagagctgcacaaaggcgtgcagttactctgggctccc

SEQ ID NO: 127222 - DNA, 1752 bp, Homo Sapiens
  misc_feature (1667)..(1692): n is a, c, g, or t
gtggtaccggtccggaattcccgggatatcgtcgacccacgcgtccgcggacgcgtgggccggagcctgcgagccgagaccgagccatgtggctagaaatcctcctcacttcagtgctgggctttgccatctactggttcatctcccgggacaaagaggaaactttgccacttgaagatgggtggtgggggccaggcacgaggtccgcagccagggaggacgacagcatccgccctttcaaggtggaaacgtcagatgaggagatccacgacttacaccagaggatcgataagttccgtttcaccccacctttggaggacagctgcttccactatggcttcaactccaactacctgaagaaagtcatctcctactggcggaatgaatttgactggaagaagcaggtggagattctcaacagataccctcacttcaagactaagattgaagggctggacatccacttcatccacgtgaagcccccccagctgcccgcaggccataccccgaagcccttgctgatggtgcacggctggcccggctctttctacgagttttataagatcatcccactcctgactgaccccaagaaccatggcctgagcgatgagcacgtttttgaagtcatctgcccttccatccctggctatggcttctcagaggcatcctccaagaaggggttcaactcggtggccaccgccaggatcttttacaagctgatgctgcggctgggcttccaggaattctacattcaaggaggggactgggggtccctgatctgcactaatatggcccagctggtgcccagccacgtgaaaggcctgcacttgaacatggctttggttttaagcaacttctctaccctgaccctcctcctgggacagcgtttcgggaggtttcttggcctcactgagagggatgtggagctgctgtaccccgtcaaggagaaggtattctacagcctgatgagggagagcggctacatgcacatccagtgcaccaagcctgacaccgtaggctctgctctgaatgactctcctgtgggtctggctgcctatattctagagaagttttccacctggaccaatacggaattccgatacctggaggatggaggcctggaaaggaagttctccctggacgacctgctgaccaacgtcatgctctactggacaacaggcaccatcatctcctcccagcgcttctacaaggagaacctgggacagggctggatgacccagaagcatgagcggatgaaggtctatgtgcccactggcttctctgccttcccttttgagctattgcacacgcctgaaaagtgggtgaggttcaagtacccaaagctcatctcctattcctacatggttcgtgggggccactttgcggcctttgaggagccggagctgctcgcccaggacatccgcaagttcctgtcggtgctggagcggcaatgacccacccctctccccccgcctgccacctccccccacaagtgccctccaggcttttcttggggaagataccccttttctgaggaatgagtttgcctccgtcccctgcccatgctgggagcccacgctcaccccctcacccctccaagctcactccccaacccccaactccgtgtggtaagcaacatggctttgatgataaacgactttactctnnnnnnnnnnnnnnnnnnnnnnnnnntaccgcgtatgcggccgcaagcttattcccttgtagtgagggttaattttagcttagcac

SEQ ID NO: 127223 - DNA, 953 bp, Homo Sapiens
aatgtgcatttaaccgttttccctcattcagggtgtagaatactttttcccttgacgggggtacagcagttccacatccctttcaagtgaggccaagaaacctcccggaacgcgtgtcccaggaggagggtcagggtagagaagttgcttaaaacccaagcccatgttcaagtgcaggcctttcacgtggctgggcaccagctgggccatattagtgcagatcagggacccccagtccccctccttgaatgtagaattcctggaagcccagccgcagcatcagcttgtaaaagatcctggcggtggccaccgagttgaaccccttcttggaggatgcctctgagaagccatagccagggatggaagggcagatgacttcaaaaacgtgctcatcgctcaggccatggttcttggggtcagtcaggagtgggatgatcttataaaactcgtagaaagagccgggccagccgtgcaccatcagcaagggcttcggggtatggcctgcgggcagctgggggggcttcacgtggatgaagtggatgtccagcccttcaattttagtcttgaagtgagggtatctgttgagaatctccacctgcttcttccagtcaaattcattccgccagtaggagatgactttcttcaggtagttggagttgaagccatagtggaagcagctgtcctccaaaggtggggtgaaacggaacttatcgatcctctggtgtaagtcgtggatctcctcatctgacgtttccaccttgaaagggcggatgctgtcgtcctccctggctgcggacctcgtgcctggcccccaccacccatcttcaagtggcaaagtttcctctttgtcccgggagatgaaccagtagatggcaaagcccagcactgaagtgaggaggatttctagccaccggacgcgtggtcgacgatatcccgagaatccggaccggtcc

SEQ ID NO: 127224 - DNA, 919 bp, Homo Sapiens
ggactcctgacggccacagcccaccttcagggcccagacctccgaacctgcccagaagaggtcagttagaaatcctttaaaccaaaccatgttcagtgcagcctttcacgtgctgggcaacgagctgggccatattagtgcagatcagggacccccagttcccctcgttgaatgtagaattcctggaagcccagccgctagcatcagcttgtaaaagatcctggcggtggccaccgagttgaaccccttcttggaggatgcctctgagaagccatagccagggatggaagggcagatgacttcaaaaacgtgctcatcgctcaggccatggttcttggggtcagtcaggagtgggatgatcttataaaactcgtagaaagagccgggccagccgtgcaccatcagcaagggcttcggggtatggcctgcgggcagctgggggggcttcacgtggatgaagtggatgtccagcccttcaatcttagtcttgaagtgagggtgtctgttgagaatctccacctgcttcttccagtcaaattcattccgccagtaggagatgactttcttcaggtagttggagttgaagccatagtggaagcagctgtcctccaaaggtggggtgaaacggaacttatcgatcctctggtgtaagtcgtggatctcctcatctgacgtttccacccttgaaagggcggatgctgtcgtcctccctggctgcggacctcgtgcctggcccccaccacccatcttcaagtggcaaagtttcctctttgtcccgggagatgaaccagtagatggcaaagcccagcactgaagtgaggaggatttctagccaccgacgcgtgggtcgacgatatcccgggaaatccggaccggtaccagcctgctttttgtacaccactgtctatatgtcacatgg

SEQ ID NO: 127225 - DNA, 960 bp, Homo Sapiens
ttttcccgccttcccttttccaggggaggcccaaggaaacgctcccgagaaacgcctgttcccagggaggaagggtccagggttagagaaagttgccttaaacccaaaagcccaggttcaaggcagggccttcacggtggctgggcaccagctggggccatattagtgcaggatcaggggaccccccagtcccctcctggaatgtagaattcctggaagcccaagccgcagcatcagcttgtaaaagatcctggcggtggcccccgagttgaacccctttcttggaggatgcctctgagaagccatagccagggatggaagggcagatgacttcaaaaacgtgctcatcgctcaggccatggttcttggggtcagtcaggagtgggatgatcttataaaactcgtagaaagagccgggccagccgtgcaccatcagcaagggcttcggggtatggcctgcgggcagctgggggggcttcacgtggatgaagtggatgtccagcccttcaatcttagtcttgaagtgagggtatctgttgagaatctccacctgcttcttccagtcaaattcattccgccagtaggagatgactttcttcaggtagttggagttgaagccatagtggaagcagctgtcctccaaaggtggggtgaaacggaacttatcgatcctctggtgtaagtcgtggatctcctcatctgacgtttccaccttgaaagggcggatgctgtcgtcctccctggctgcggacctcgtgcctggcccccaccacccatcttcaagtggcaaagtttcctctttgtcccgggagatgaaccagtagatggcaaagcccagcactgaagtgaggaggatttctagccacatggctcggtctcggctcgcaggctccggcggcggcaggcgcgcgatctctccctcgtgccgaattcgccacccaggcctcgctaccttggacc

SEQ ID NO: 127226 - DNA, 594 bp, Homo Sapiens
  misc_feature (459)..(472): n is a, c, g, or t
tttttgtacataattttttttattagtcaaaatcacaatcaccttgattaaaaggatgggacactccaccctcagcagaaaatgatacagtttatagaaaacctccccgcccctcccacaccccaattaaaaactacaaaaaaatctcccctccttccctacgatgtcatggtagtctgactcctccagtggcactgcagctctggagtggccagctcaccacagcaccctccacttcaccttggggagaggagggatgctggtggttaaggaggttaaaaccattagttccagtaatgccagttcccaaacatgcacttccttcctttcccccaaggtctgggaccaaggagaaagggaccgaaatgagcccagccatgaggagcaactcgaggagagaaaatatagcccaaggaggttagaagagttccaatatacctcctccctccccccacctcnnnnnnnnnnnnnnggcagtttagggtatttatcacaccaaaaatggttccccctcaggcctgagaaaaagaccaagatgtccagtcttgagggagtactgagaaactcagagctcatctatccttgagcctcccc

SEQ ID NO: 127227 - DNA, 566 bp, Homo Sapiens
ttaagccaaaggttttctgagaccttaggttttgtagtctaaccagcttatgtggttatttaaaagaatattctttgtgtttttaaattgctatttttaaaaaagctttttattacccattttataaaatgttatactcatatttgtctgaatttttccagtattcctacatgaaattgtatgtattaaaaactcaatattagtggcaaatattaatactattaaaatggattttggtgctatattcttgtagctaaagcctagtagaattctcaagaataggtgaaatacactttcaaagttgcctgtcatttaaaagaccaaataagcattttgtattaaataaattagcagatggttagagacttcaaggagagttagcttggtcatttaattgcgacttcatgttatttgattgaaataacccacatccttgctttgtataagatattcgctctggagaagttacatgtaaatagaattctataaattgttttccagttgaccgagtatctgttgtgtttttgtttaaaaagaggattccatgacataataaaaattatttt

SEQ ID NO: 127228 - DNA, 671 bp, Homo Sapiens
  misc_feature (285)..(489): n is a, c, g, or t
  misc_feature (627)..(627): n is a, c, g, or t
gacattaaactgaacatttttattccaattattcaagtttttgctgcacagtattttcaaatgttttattttcaaaatgactattacaaaaaatgtagtttccagaatgtcatggctacacctcaacctactccactcttgcagtgggggcaacagctttaggagcagggaccgtgtgtgggggctgcacccttgcagtgcgtggcctggacacggcccaagccctccgccgcccacagacaacactttcacattgataaatatgcatgcccatcaaatcctgcnnnnnnnnnnnnnnnnnnnnnnnnnnnnnnnnnnnnnnnnnnnnnnnnnnnnnnnnnnnnnnnnnnnnnnnnnnnnnnnnnnnnnnnnnnnnnnnnnnnnnnnnnnnnnnnnnnnnnnnnnnnnnnnnnnnnnnnnnnnnnnnnnnnnnnnnnnnnnnnnnnnnnnnnnnnnnnnnnnnnnnnnnnnnnnnnnnnnnnnnnnnnncagactctctgtagcaataagatacccaattcaacgggactccggtatagcatcacatgacacacagtagccccgaaggaatcaaagtattttacctcaaaatatatttccttgacatatgttgaaatggcccttgcnaagctgtctctcatgggggaaatgtgcattctgcagagatctgc

SEQ ID NO: 127229 - DNA, 676 bp, Homo Sapiens
  misc_feature (88)..(97): n is a, c, g, or t
gataagttgaaaacattttatttcaattctatcctttgggaggcagcataaataatcacagaagaccacaaaggtcaatggggaaggnnnnnnnnnngctccagaaatgtgggaggaggagatgagtgctgacactgtctagctgtggggtacggggtgaggaggccctactgtagctggctgggaggatggaggttcataaaggaaaggcccagctcacctggaggggcttgggtagccctggcctctgtggatgggattttccgtagggcggccatgggaaaagcaggtatggagtataatgcatctagtagatcctagctaatgaaagaaaagagtggacacccatttcttgatttccagatctcaccccaaactgtgactcttctgagaacagtgtttataaactctttgtgcgtagtgggaaatgaaaggaggaaaaaagaaggaataaaagaaaatgtgtacaagatcaaatgaaatgtggcatctcagagttgcgtgaccttgggccacttctctcggtttcctcatctgcagaagggagtagacgtgaggctccatgagatcctatgtgtcaaaggactgcagaaactttaaagtgctatacgggtgcgagtggctgtggtcattctacgtgcataaggctgaaagtggctgagatagcggtgctgag

SEQ ID NO: 127230 - DNA, 795 bp, Homo Sapiens
  misc_feature (688)..(688): n is a, c, g, or t
  misc_feature (767)..(767): n is a, c, g, or t
tttcttttttggagggagaaacaactttattttcatcagaaattagtaatgtttataaatttgtttatagtagtttgtaaattattatcagaaatagtaatgtctataaaccacttactttaagagacaatcaggaactatgatgagggcaataataaaaggagaaatcttacaaaaaattaacctggatgttgtgcttgctctaaggttaagtcacttagggaaacagattcagtattatccaatggcttaaccatccttccttctttctgtttgctttttggtggtggctgggttacaaagagcagtgtcttctgccctgaaggtagcagtattatggtgggtgcctagaggtcaattattggtttagaagagattcaggcccttaacttttacatgtgctttccaggaaaggagacactttctttctcagccctgtgtgaggactatgttagcccagaaagtgttcttggaccactgggtgcccattctcagtgctaggaacaggaagaccctggtttcctggtagaatttatggatcctacagctttctctccatcaaactttaagtcacagtaagataggactctggagtcacaggcacagccaggagaggtcagcgtccttatgctgactcctggtcctagacatgggtcttaagatccagtagtcagtaggtctgttgcanagtcagggactggctagatctctccacagcagaagaaagtcatacatgctgacctgaggaacttatctgacagtttacngacaactcataacgcactctccttcctg

SEQ ID NO: 127231 - DNA, 1075 bp, Homo Sapiens
  misc_feature (22)..(22): n is a, c, g, or t
  misc_feature (44)..(63): n is a, c, g, or t
  misc_feature (796)..(796): n is a, c, g, or t
  misc_feature (798)..(798): n is a, c, g, or t
  misc_feature (821)..(821): n is a, c, g, or t
  misc_feature (826)..(826): n is a, c, g, or t
  misc_feature (832)..(832): n is a, c, g, or t
  misc_feature (836)..(836): n is a, c, g, or t
  misc_feature (892)..(892): n is a, c, g, or t
  misc_feature (894)..(894): n is a, c, g, or t
  misc_feature (915)..(915): n is a, c, g, or t
  misc_feature (985)..(985): n is a, c, g, or t
  misc_feature (987)..(988): n is a, c, g, or t
  misc_feature (997)..(998): n is a, c, g, or t
  misc_feature (1000)..(1000): n is a, c, g, or t
  misc_feature (1010)..(1010): n is a, c, g, or t
cccttcactgacaagggaatangcttgcggccgcctgctcaggnnnnnnnnnnnnnnnnnnnnctcacataagcaccaattttattccaaatattcacataattttaagaaataattttcctaatatatttttacaaaaagtcacttcagtgtcatacattctagaaacgccatcttgtatattagtactaccttacctgaactgaaacattccaaaagttccaataccttctacagatttcatttttacagttcaaaaaaattatttatttttcatgataaatgatgctactgataactttacttggtagaattgtagttactttggtaatttctacatgtttataaataagcaccacatatactatattaaaaaattagccagtctaagggcttgcactggagaccagggagttacattttgttaaacccagattgaacagagttgaatttagattaatacagagaaatgcatgctctgggtttgttgtcctttgtatttcttgaagcatcagatgaatcgtaaaaagttcaaagagcttcttattactcttgattttggaaagtttctgtaaaataatactgagtttttctagtatttgaagatcaagcttaggggctcgaagcagcacagagcaagtacgaaaaaataaagagttgctacaggcttccaggaaaggctgcaaggatttagattccaccgtcatctggagcaactatcaataacattagacaggagtcctttactggatattcttagatgacttaatattactggaacagcctgatactccananacaaggtttttccttcttctgtnctcangtccanacanagagaatcaatgcctgagcccaggtatcagcttgagtgactgttttgagaacattnanggttgataaatctcaatggcnaatggagctcttaaagaagcactgtctttggtttatctcacagatgctgtggagattatcctgatccttnanntacatcttnnanatgtctcacnatctctcatgtgattcatatcgatgtgtgtcacatcactcctaggacatattattacaaagtcgg

SEQ ID NO: 127232 - DNA, 1208 bp, Homo Sapiens
  misc_feature (178)..(196): n is a, c, g, or t
  misc_feature (212)..(271): n is a, c, g, or t
  misc_feature (283)..(454): n is a, c, g, or t
gcagtgctgctcttaaatcctaccttccactcaactcccatacaactttcttttgtacattttgatactttctacctaatggcagctcttccaaaatagctgctttaaactctgatttaattttcaatatttggtttcatttttcaacaggccaagaggcctctggtaatgaagtgcnnnnnnnnnnnnnnnnnnngacggagtctcactgnnnnnnnnnnnnnnnnnnnnnnnnnnnnnnnnnnnnnnnnnnnnnnnnnnnnnnnnnnnngttttcaagcannnnnnnnnnnnnnnnnnnnnnnnnnnnnnnnnnnnnnnnnnnnnnnnnnnnnnnnnnnnnnnnnnnnnnnnnnnnnnnnnnnnnnnnnnnnnnnnnnnnnnnnnnnnnnnnnnnnnnnnnnnnnnnnnnnnnnnnnnnnnnnnnnnnnnnnnnnnnnnnnnnnnnnnnnnntgcgtgagccaccacacttggcctacattttttctttatataccagaacatctataacaggcaccttatctactcattagtgaagagataattggattacacaggcaggcttgtttactacatccagaatgtagaaactgctttcttcaacatcttggttctagctagtaataacaatataattctttggcagatattcagaataacattttaaactacattttcttagaaaattgcattcttgtagtgagcagtgtatggtctcttttgttcagaatttaaaactgataaccaatgaaagccttttctcttattcctctaccgtcatttacatgataatctgaagctaatatgacaatatttaaatactaagtggtactagggaactacaagaatactgtaaagcttaagccattgttatcactgtcatttagcatttaataacaaaactatacagaattatgtgcataccaatgaatgttttgtaccatctagttaaattttttaaataaagttttatgggttaagcagaagacaactgtcatactgaattttattaaaagtatatatacttcaaattcaaagcatcccttaggacccacagaatatattaaaactaccacccttaaattttatatttttgctttaagacagacaatgcaaaggtaactggcaagaggtgagcaaatgttttagaacatttatattattgcttaaaatgagatttgaaattgtaataaaattcttggttttg

SEQ ID NO: 127233 - DNA, 1026 bp, Homo Sapiens
  misc_feature (497)..(530): n is a, c, g, or t
  misc_feature (919)..(919): n is a, c, g, or t
  misc_feature (953)..(953): n is a, c, g, or t
tttttagattactttgaaacatctacttatttccattttaatgaagaattaaaggatacaatgtgttaaagacatatttaaaatactagcaagggattagacagacgaatcaaattttgttgatatcccaaataattacaagagacttcgaaaatgtagtgtaattcaggttttctttccagtttaaaaatttctatccattgcctctatctttggtgtcactgccaccaataaacacagtatacagcttagaaacctaattactatcttcaactaggaaaaggtaaaccaacatcatttctttaaaatgagaaataaagaatgtgatcgtacttaattttgtctcatggtcccacaatactctgaaatgtcatgccaaaatgtaaaagttcaaaagggaacattatcatttgctataattgcaccaaaaatttagctactgtacgctggtgtgatgacagccagtagtatgcagaggctacagaaagacatgtagnnnnnnnnnnnnnnnnnnnnnnnnnnnnnnnnnnctctttagctcacaattagtaaaaggttcagtttaatgtgaaactgaaacacacgacaacataatgcgccttcatgtaaatacgctaacaactttgttttcttgaagtttaaaaggatagtataattaccttaaatttacacaaaacattaagaaacatggtagttgtttatgattaagataaaatagcaacgtaaattaatttaacacagtgttaaatatattcacacgatcaccactgtgattcaaaatggccactaatgcagttacatatcaatatatgtacataacatttgtcacaacagttttttgtaagtttgactttctgcagacaagtttacgagacaatagcctgtatcaattcttcatatatgaaggaataatgtgtantagttcatcctcgcagggcggggggagactctanatcatgtaatgagaagtcactcctctgcgatctggccgagggcatctaatgatcgataatcgtacagtaacgt

SEQ ID NO: 127234 - DNA, 1673 bp, Homo Sapiens
tttttggctgagactgctttgtttcctggcacttccactgattgggtggaggtgggtgggtctggttttggggaccaggtgtctgatgggttccagcaagcgtcctgcccaccacagttgtctgctctggtggggcctggagagtcctggccatggggatctgctggatgccagcacagtcactttgcgtctgtggggagaagcggcatgcctgtgcgccactgaggggagcgggtgaggtcggcaccatctgaggtggttggtgttaggtttgagggtccctgggtgatttggacgtgcgggatatttgacgtctagtctgatcggcagctccagacactaagattttcccatctggggtgaaggcacaggtgtgggccacatccaggactccctgcttcagggtctcaaggcactttcctgtgttgcagtcccagactttgaccatgcgggaatagccggcgctggccagccacagctcgtcgggagagaaggctatgctcttcacccaggtgacatggcccttcagttggataagcaggctgctggttgtgggcttccagatgtggatggtcttgtcccaggagccggatgccaggaggccggatgctgaatagcacaggcagctgatgttgccactgtgtccctctagcgcctggtgggagactgctggggtcacatccgcaggtcccagatgctgtacggtggagtctcaggagccggtggccaggcagttcaccgttgggtgagaagtcgctgctctggatggagtcacggtgcccaactaagaggcgcagcatctgccggactagagagagccctgagctgcagaaggtggttgtgggcttccggctgtggctggtcttgtcccaggtgccggatgccagggggacctggtgctgaatagcactgggggctgctgtgtgccagtgtgtccctgtagcggctggtgtgagcctggtggggtcagccttggttggttgctgatgggtatgggccatggagtcccagtggagggtttgggctgggagttcacggttggtgagaagtcgctgctctggatgtggtccttggttcccagactaggtggccgcagcctctggccgtacctgcacatcccagagcatcacccgcttgtcccagccacctgatgccagctgtctcgagtcagggctgaagctgaccgtctccacactccgttggtgacctgcaggcaccagcccggggtcggggaaggtggaaaggtgacgtgacacaggacacagcaccatctgaaagggaacgctggcctggctgcttggctcccagctcactcacccttcaggacccgcagacacttcgctcttgccacatcccacaggcggacagtgcagtcacaggaggcgctggcgaagaggtggccatcaggggagaagcggcagaacttcacggggcctgtgtggccacccagcctccacagcagctgcccactccgggtctcccagccatacacgcagccatcttctgagcctgtgagcagcatctggccatcaggggagaaggcagaagagttgacctccccgccgtgctggccgaagaatttcactctccgcacggccagcgtggccgggaccccgctgttcatgggcacccggccccgccccgcaacggcgggctccctcctaggcggccgc

SEQ ID NO: 127235 - DNA, 2707 bp, Homo Sapiens
  misc_feature (2589)..(2597): n is a, c, g, or t
taacttaagcaaaaaagggtatttattggttcacataactgaaaagtccaggggatattctagcttcaggcacggttggatccaggggcacaaacgctgtcatcaggattcaagtctctccatattttggctctgctttcccctgcactggcttcattctctacatggtaggccctgttagtttgaggttttcatcctacaaagctaaagcaccctcagtaaagagagcttctcctccacagttcagatggatttgctgattgatgaggtctgaattacatgttcacccacaaagctcaaggttgggtcagactgtccaaaccacagactgaaaataggaagaggtggttttaagaaacatcagggagttgttacaagatggaacggatgctgggcaattaaaaactactgatgtccaggataagaacagatatgaaaaagcttaatctctgcttaagaagttgaatggtaacagctggcatggtttcttccttggttataaaagtattctaaaaaaacaccatgagagataagtttgtcctgtcctcaagaagtctgtaatccatttgaatggaataataatcatgtccaatagcatatgttggatgaaaccacagtttcaacacaagcaaactcagtggtcatgagtctgagagcccaactgtcctgctgatctgaagtaagacaactagccttctacatcaaataattctgtgaggcaatttgagtcagctgtaaattttaagtacagtggaaacttttcttcttttgctaggttgaactggtacagttctgtgtgtactggtgaatcggactcatttctgcactactgaaggagagaaatggacgcggctttcgaactgctgtattccttccagacccgatagatgaggttccaggtgctgaaaatgaacaattacatacaggaatagaggcctactctgcacttaaaaatatcttcaaaaaagttgctggtcaaggagtatgcagcaatggtccttcctgttgtgaacattgagtcctagtgggtgaggtgtgggttgttactattaaaaatccttgttgtattgggcacaagatagactgaaattgactgtagtcctcacggtgagtctaattgcagcaacatgtgaaaaaggcaggcaagagctgagtcaggaaaatagacaagcagggtaccttcagaaaggccagccataccaatagccagaatatgatctggaagaaccagcagatcaataaggaagttctgtaaattagtttttactctgggtactcaggggttaatccatagggcttattctggatacagttttctgatcttacagagccagtcaggtacatcagctttcagtttcttgctcatctgccaaagaactttcagctcaggagaaggccttatcctcaatcagacttgaggttctgtttaggagtctatgctacatctgggagtgacagggtcagcagagccagatttgtcaaagttggccctactttctttggtaatcaagtcgtcatcttttttaactcagccgatctctgagaatcatcttacaagcaagtcaaggcctcagattggttgaatggtgctgttcaaagatttagatgagatctgaggcatggagacatggagacagtatacagactcctagatttaagttttaggttttttgcttttctaatcaccaattcttatatacaatgtatattttagactcgagcagatgatcatcttcatcttaagtcattccttttgactgagtatggcaggattagagggaatggcagtatagatcaatgtctttttctgtaaagtataggaaaaaccagagaggaaaaaaagagctgacaattggaaggtagtagaaaattgacgataatttcttcttaacaaataatagttgtatatacaaggaggctagtcaaccagattttatttgttgagggcgagcagtctacagcaaccagacctaggccttgtttgacgagatgtagagtcgagtcatgtaatcacaattggcctagagagagacaaggatataaacaactatttccaatgtttaaccagtgcattcattcgagtagctcaggatagctggcctttaaattgactgggaagtaaagaatgagttttctcatgacacacatcaaagtctccttgttcaacatgatctggtctgagagttcataaactgaatccttcctgctgaaacagataagttgtctttatgtctgttacaatgcctgccttaaatatatatcatggcaaggaatgaagtcagctgctctgagtcagtgtaaaatgacagtattgagactgatgtggttccactaaaatatccacaaggacaaaagctcttaagtctaccgataaaatccttagctgcagtcttcatagattttgtttttcaaatcagtttgtttccagcaaaaaggtaggcaataagctatcggaaatgcccagcaagtaagctaatggcctgctcaaagggccagcctccaactctccctaccacctatatttggtggtatcagacatcaaaagattcatcttaaaagaacatctctcggcacaaggcagagcattcnnnnnnnnntctattactggctagaagaaactttcggacgcgtgggtcgacgatatcccgggaattccggaccggtaccagcctgcttttgtggtaacaaacgtgttcatagtcactaa

SEQ ID NO: 127236 - DNA, 665 bp, Homo Sapiens
ttcataaatttgacacatttattttatttttgagtttcatttttacaagagaagacacaaggtaaagaaagacaaccactttggagagggatcatggtgagggcaatgtcactgtcatggccatagtacaagccttccaagaaaagggacctgcgttattccctctcctgagcaagctgcccctgtcccacaaaccagttctatctgttttcacatctagagcactgtccataaacatgtccatcttggctgtgctccagtgagatgaactgaaagaaggaataactcataaagggacctttgttattaagaaaaattcttgtcttcccaaaggaatcaagatctcttcagagaaggagcaactgttggaaaatcagaagtgaccattccctaacctattcctgaccacgaatgccttgtgcaaaagctaagatgtgactctcttgtctttctttcaactgactcttaggagaaggcattcctcctccactcttatcagttagctctggaaagaacaaatgtgaaagccaaagtcagctaagaaactttgagacggcaaagtcaagggcacgatggatcaggcctgaggtaggagggaggagccctgcactgtccgcctctttgcctttttctggcaaagacactgaggcagttcctaggctaca

SEQ ID NO: 127237 - DNA, 1626 bp, Homo Sapiens
  misc_feature (74)..(92): n is a, c, g, or t
  misc_feature (581)..(607): n is a, c, g, or t
  misc_feature (1576)..(1576): n is a, c, g, or t
ttttgaagtttttatactttaatgaataaagcgaagaaatttaaactaagtaaatataatctgagaggcagttnnnnnnnnnnnnnnnnnnncccaccaaaattgaagaacacaatcttttgaaacatttaatcagtccatagcaaatagttattacataccaaaagctctaagtgttaactagttccaccacaatgccatgtaaatcttgacaatttagaaatcttgagatcaacacttaagttcttttcttgatctctacagcttggtttgtaagtacatacatgcttttgtggatctattcccctcgccacacacacacattttcaaggagccaataacatttttttccatctgtgcctaaaaatgttacaattcagttctagcacattgaccctgataatgaaaatgtttaagttaaagatggggacacaatttcaatcttataaaaatataccagtattaaccaaaccttaaactcagagggcacttcacatgtgcacgagactttcagtaaaaatgacaagatcctagaacagctgtttccaggactttttaatgaatcaagtactctctctctnnnnnnnnnnnnnnnnnnnnnnnnnnntttttatactattggttttgttaaatccaggctatctggattaagtagataggggatgggtttttatagtttttatttttgtaactatagggcagctactataacaatagcttaacaacactgaaaaatttcaattaagttcaccctgtttttagaaagtgtctaagtgtaaatgcaaattcacctcttcttaagttagcagtttatattaaatcagatatggtttctgaaatggaagtaatgtgttggagggcaacccataaggacagttgcgaaattatgaatgagaaattaaagtaaaaccaaatcaaaatatgttatacattttagagatgggacaaaaaggatattaagacaaatgtcttctttcctccccattcaaaagcagccattcttctactgtgaaagaaactgacatggatattttcccctttcaagagatgtatgatatatttacccccactgtgaggcagaggtgatagggtcagttcttgtttgcaggaaccaacatcctaaaaaagaaaatgtcaagatggggaggggtgggaaagaagggttttctattaatgtcatggaatatgccactgtagaggcagaacactcctaataataacattcaccagattactactgctgtttttttcagactaagaaaatactgacaaaattggatttttttctcctttcaattgcaggatattctgattatttaaagttagggaatcccttttttatccccccacccaataaaatgggccaatttgtagggatatatgcaaataaaatgttctctgtttaaaatacttacctggtttaatataacacatttatctggccaataagagcaacagaaatgtagctgttatgaagactaaaaaaatacaaaaaccaaagctgaagctttgtcatccctccccactaactcccactgcaattctttactacccaccctcgtctaggaacgccacncaggctcgtacctaggcatataggaaataaggggggatatgggggataac

SEQ ID NO: 127238 - DNA, 1985 bp, Homo Sapiens
  misc_feature (854)..(865): n is a, c, g, or t
tgtgggttgagaggcacggcaatggggaacatagtgacggcggggcgatgagcggcaggagatccaccatgatggggccatagcggttgtagcgaccacacgccggtcggcgagagcggtggagcgaagaaccgaatatcaccggcgccgccggggggcggggacaggaacacagagaggataggtgacagaggcataggcagaggcggtgtccgggacacactggcgagctgagcgagacgagagcgataagtgtaagcgaggggctggaatgaagaggaagcgggcaccgccgccgcccgacgggcgcgatccgaccaggacggcatacagagggtgtagggggcggcgaccagaccacggcggaggaagatggggaacactccatgtactgagggcgcgtgggtcatgcgcggccgtccaatgggttgcggcgggtgtgccgacggcgcgtagcaccagggtgcgcgcggccgcccgtgcgcgcctatggcgtgagaggcggaggggagccttatacgacgcccggacacgttaggcccgcccgcaaggcccggcctcgaggcccgcagcgcgcgatgagtaggggcgtcgggcacggcggcggcggcacagcgcgcgcggaagcgatggctatggcgagagaaacgaagggggggagacggaagggagcgggaggcgtcgggaagggataagcgccccgggcgggggcggcgccggccgatccgaggccgcgcggccgggaaaggtggtgctgtcgaggaggggggttttgggcagaggggaagggtagtggatgtggggggtagtgcgcggcgcgccagtacttattggtggtagtgagtcgggtttannnnnnnnnnnngggtctaatacatgtttatttcactgggatggagagcaggccctacttccagggaacaggttgagatctggagtccctgtagggtcagagctagaggacccagaggaggaagtcctggaaggccttcctggaggaggggctgtcagagctgagtccaaactgaagaggcatttgcaatccaggagaaagcgacccctggtagggggagctgcaagaggaaaagctgagagataccaagaaatgcaagggacctgcatccccatgcatccctctgcccatctgcaggggcacttagaagtacacggagccctcgctgtctccttggtcatcgaatttctggatctgagtcttgagatgcctcagtttacccttcaggtagtggcagcgagcctgcttgtccaggaagccaggatccattcgcttcatctcaaactccctccaaacccgggctgcaacttgggcctccttctggctttggggtgggggcagggagctcagcagggcctccagctgcctgagctttgcctgtgcacaccccacctcgtgctggagctccaagaactctccgtactggtcctggaacactgcgacatagcggctccgttccctctcactgctcactggcgggtacttaagctcatagtcgggcactgggtggggcctaggcttatgccccttagggatggctccaataggcttcttggcgcccaggagggcctgggagagcaactcatcctcaaacacaatcttcttggtctttgccttgtggggtcccggctggggctggcacggagggcggggggcgctggttttgaggcctcggggcgccagtccctgcagcgggggcccaggcccaggcgggtgagtatgcaggtgacccccgggagccgcgagtctttgggggctcccggttgggcatcggcctccgggagaagcagctcaggggtttccgggctgatgggcgtgtccatgcggggggacgtcgtgtcccgcgcgcggcgggggtggtctgcgggcggcctgtcccagcgtctggagctccgagcctggatctgctgtcggagaggcacttccgtccgggtgtcctcgtcttggatcgccacccaggcctcgcttcctt

SEQ ID NO: 127239 - DNA, 1109 bp, Homo Sapiens
aatctacgctaggtagcgaggcctgggtgtgagaattcggcacgaggccaagaggaggacctcacagaagaagaggaccctgagtcctgaatttaatgaacggtttgagtgggaactccccctggatgaggcccagagacgaaagctggatgtctctgtcaagtctaattcctccttcatgtcaagagagcgtgagctgctggggaaggtgcagctggacctagctgagacagacctttcccagggtgtagcccggtggtatgacctgatggacaacaaggacaagggcagctcctaggagctggcgagtcccagcctgactgctctgtcttcctgccttcgtctcgctccatcaccgcctcaatgtgatgagcctaaagctagggtccaagggcagagcctgtgcccttcagccctttcacctaacaggcccatattcgggcctttgcctgaccaaagagaagaaccgtatgttccctttactgcacggcctttatccttctgggcccctggggcggggacctgagctggctgtttcctgctttgcctgcacattgttctcccttcctcccaactcctcagggccttctgtatctgtgcctggccagtggcagcactagcagtggtattagcttatgccaaatacagctttggaaggatctttttttctttaactagatggtcaccttcttccctaccacacatgggtgggaaggtggacaggctaacctctccagctgtgagcctcttagactactgcatgtagcaaatgttcagcagctcaggcccccatgtccagttctgtccccactgtcctcaaccctgtcctgaaaattctactgctttgatggctggggccagtctcttgtcactttggaaactgaggacgcgtggattctactcaagcctccaagtagtggcatatcagtcttggagctcctagctggtgatacggagagggctttggaggacttgggacagcagggccaatttttttgcccaagtgcctaggctgctaactcactgactagaacttaatctggtactttacagttttgcaccaactctgccaagccactggatcttacattaaacatcatactcaaacc

SEQ ID NO: 127240 - DNA, 1590 bp, Homo Sapiens
  misc_feature (325)..(325): n is a, c, g, or t
ttaagttaaaatatagttgttatattttataccatattgaatacagacataaaaataccagtgtttttctcttgtttcttttcagacaattaagcaaatgttttctttggtgcctgggagtttatcaatatttagggataatggaagataagaactccaagactgacaagcctaaaatagaagattcaaaatcctataccataaaaattacaatcaaaagtggactaaagagaaaaggagcttaaagttatactgcaatagggctgatacatattcttcccccaaatcatactctggctcccaaaataaaaaatactacagcctnattgtggttttaatctgtgttttgagatttttttcaaatggaaagatattacagatagaaacacatcattctaggtttcaaaatcaccaaagtcagtgagaagaatgtacattcatttaaatgtaatcatttgtaaataaagaaatcttgaaaaggctgaacagttcaatcaaattgaagaattgatctagatttttcattattctttgttaaataatgagtaagtgtagatatagtgtacatacaagttgacattctgattcattcaaaatagtcacatccctttgcttggttttggatgttccagagactaaaatttaataccattcataacatagtattttcagtaaaaagaattatagagcaatgaaaaatcagaagatggctcagagagccttataatctctaaatatacacacatttataacctgcatttattttctaaagaaacaaattttaagtaatgctaatttaaccaatggagaaaaaacttctatcaaaatatacaatttccattacagactagaaggctaatattaaaaaaatagttgtaagccaaaaagtttgcttatatggatgacaggtatcatctccttgaagcacaaagcatcaaataaggtcttataaaagatcaatctgtgaccttcttcatttttaagttcttgataaattcataaagcttgagtctcaatttccagaaatggaggagccaaataattcagaatctcaagtgcgatttatgctttaccatgtacctgtccaatgtttcccaaaaccgtaagaacactggtctatccaaatgacgtttgtgatagctgagttctaatactgttacatcccatttctgaacatttggatccagacgaacttcatcatacttcagatggaaggctttaattttagcaaatatatcaactggtgatccatcaggcaaaagccatggccaacctttgaactgccatgcaggaccctgcacaaaaacggctacaacgcggtcccagtcttgaggcataagtttaaggggctggtctactactctataaggtactgtaacactaattgcagtgccccctggttgcatctggtcttttcttctttgtattagagtttcattttctcgttgacaaccttgtttcttcttttcatctgatgggacaaatttcaggtcctgtagaaggtcttttgcattaagcatggttattaaagaggtggtagctgcaggaattatgataatgggtgttcgagatactttcttctgatttggg

SEQ ID NO: 127241 - DNA, 1163 bp, Homo Sapiens
  misc_feature (402)..(402): n is a, c, g, or t
gcagtgacatttgatatatagttttatcagaagtaatacatttaggttacagttacatgaaaaagagaaactatgtgaaattataggctttctcctagaatatccaaaatgctcatcaacagttaattagtacaagaaagatgaccaccaggtgattgaatagacagaatgtcatgtagtattttaaaaacacagattctgggactagaagctaccaccaaaatatccagaaatctgagttaacaggtcctttattttgcacacttgctgctgatatatagaaccacgaagtgtttgcacagaccacgaatgcagccgctagcctagaggctggtcacagaagagaatgcgatgaacaccgtcctgccagtgtgaggacggagtgtctgatgtgtttgtgtncccccaccacccccccatatacaaaggccatctctagggcagaaatctctcaacagctcaagcccatcctcgctgccccctccacgaaacgacacagctcaagcttggtgctgggaagtctttccgatgctggtttgattcctgatcacccaactggacagggccctctccaggacctcccaggttctccctggtaccttccctccctcaggaggaggcagcactgtctctgaagccaccaacgagtaatgctagaagaatcagaagaaggaagtatctgatgaaaaggcacctgcaagtctaaagtcctctttggtgagaacactgtacatccgctgaggcagagctttggagtagggagcagggcgcggcacagtggtgcgcaaaatgaattcccggccagcagggggtgggaagtctgacacggagttctgccttctttcctctggggagcccattctcttcaattcctcctctggtggagtcatagctgcagacctctgggcattcacaaacagcttgtgaatgatcctgccagcatgtcctcttcctgcaccggtgactaacacttcaggctgctccagcaggcaactcacaaacctttcaagatcttccttttcctcctcctgttcacatttctcagttccaaacttggcttttagtgaccgagctctggcaatgagagcttccacattagtaatctggtgaatgatttcttccaatttcttgtcttctggattggggaagtgcaaaactttact

SEQ ID NO: 127242 - DNA, 759 bp, Homo Sapiens
  misc_feature (77)..(99): n is a, c, g, or t
ggttttaacgacggcctgtgccaagctaaaattaaccctctgtaaagggtgtaagcttgcggccgcggctgtaggcnnnnnnnnnnnnnnnnnnnnnnngaggggctctctgtatcctttatctccggcagggtcagcggccctccagggcccggtctcgagcgatgactgcctcctcgaacttgatcatgagcgtggtgcccttgtgccagtgcgccgtgaccttggcagggaagccgctgtgtgtgagcaccgcctccacgatgcccgccgtgaagctggcgcagttgagcgtgctgttctccttgggcacggagatgtaggtgttgatgagcggctcgcgctcgatgatgtagaaggtgcgcgcgtcatcgttggcctgctccagcttgtccgcctccttgccgaagagcgccttccacacggcgcccttgacgaagagcaacgcgcctagcaccttggtctcacgccgggcacccttttcgcgcgccaccagcgcatccagcacgcgcgcgcccacctggcggcccagcgcggccaggcgcgactgcagctcggccacggagaagacgcggctctggcagtgctgtaccagctcggagaacagcagtgcgaaggcgctcaggctcacctcggtgcgcggccgcgccagcgcgcgctccagcagcgccgacttcccgcgcgtgaagcgcgcctccatgccgccgccacccaggaaccgcagcagtctgctcggccgagctgctttacggcgccgta

SEQ ID NO: 127243 - DNA, 1691 bp, Homo Sapiens
  misc_feature (498)..(534): n is a, c, g, or t
  misc_feature (671)..(686): n is a, c, g, or t
  misc_feature (697)..(715): n is a, c, g, or t
  misc_feature (757)..(817): n is a, c, g, or t
  misc_feature (1677)..(1677): n is a, c, g, or t
tttgttgtattagaaaccaaccagatgtgccacgcggagggggtaggtttattccgcgcccggttttttgtgtgattataagtagcggtggggcggcagaagtgatgggggagcaaaatattttttgtgtgccgcccccgcggttgtgtcgttcccacgggggtgggagaaaatagttatattttgcgcaacaggagcgagccagaaaggtgtgtgtgatgttgcaccattggggaggaggtttcgagggttgttatacaaatccccgcgttttgtgtgagagggatatgcgcccaattgcgggcggaagaaaaagtcttaataggggggtgtaatagaacacgatgttttaaaaaaagaggggggcacgacggcggggggggctataatttgggaagtatagaggagtccccactgggggggccgcgcccttgtgtgtggagagacccccggtgaatggcctccgcaagaactccccatttgggaaaatgtgtttannnnnnnnnnnnnnnnnnnnnnnnnnnnnnnnnnnnnaatttgttaaaatatccccaaccccttggtttatgtgcccagggttttttctttgggaaaccagtattgagcccaaggttccaatacactgtggggcgccccgccccccaaaaggaaggttttaggaaaattttttnnnnnnnnnnnnnnnnccccacaaggnnnnnnnnnnnnnnnnnnnaaaattggaaggattgtgtggttttatgtgtgttaggtgtgnnnnnnnnnnnnnnnnnnnnnnnnnnnnnnnnnnnnnnnnnnnnnnnnnnnnnnnnnnnnnaagtatcagtttttattaaaaagtgcattttgattaatttatgatctaggtaagctgtaagataccagtatactctctggaataataactttacaaagatttaaaacaaacaaaattttaaaagcctttttatttccttcaccattattgttttacaatacaaatatcaccttgtgaatacacaaaaaaatcctacggaagataattctgctgcacgtaaaatacagaatggatatatatacttcttcattcttaaaaaactattttgttctccacattggcaagtatagaatagaatacttccccaaacatatgtatgttaggagtaaaacttagagttacatgcagtttctgcacaaatatcttttaaagaaatagatctcttttttgttgttcaccaacaaaattgtcatgagagtatggataactaattcatagctttcaagttttaggtaagtgatcattttcaaaactctctttaagaaaagatattcatggctgttttcattgagtagttaaaattgaactaccaaatcgacgataaaataatttaagtggtacatgtcattgctacctgatcacaatatgtgaacaggctctgactctaattaacaacctcattatttaagtcattgcaattttaaaaccataagcagtcttctgattcaatttagctataaatgcaaaatttagtagtgtatacatatatttatattttcaaggaatactttattttaaataaaaacatttaagattgcctactgaccatacaatcaagacaagaaaggcactagaaacatagacaatttctctcccaagatgatttttaaattttaactctcttctctctgacatgttanaatcttttaatttg

SEQ ID NO: 127244 - DNA, 597 bp, Homo Sapiens
  misc_feature (532)..(532): n is a, c, g, or t
tttgcttattacccgatttattagagagatctctaaaaagacggggtgtggcgggggtaggtgggcgaggaacctgggatgcaaaccagtgtttggggccaggagtggctgtatggtttcagaggcgcccaccactctgggtttgagggacacagcaccctcgtctcggcgctttggattgtcacgcaccagaccacggggcggaggaatggagtggcatccctggggggagttaagacacacgaggtttgcagtttcattttgtttcagaatcagtttggccataaaaatgggactgggttggggacaggcggagcgattgaaccaccggagatgaggaggaggtggcaggcgcctctcctggggtggggactgagggctgtggagacagtaccatggtgaaggaccccatggcaatgggagtattgcactgagccaggtttcgggggaacggggacgtgtcgggatggcgtagggggacagagcctggcaggagacaatggaagtttccgccttgtcagtctcagagcanacccttttagtctttacagtacaggaatttggacactgcccacgttctcagtggacagcaccatc

SEQ ID NO: 127245 - DNA, 670 bp, Homo Sapiens
  misc_feature (643)..(643): n is a, c, g, or t
tttgtaggtagaatcatttttattggagcatgacctgtttggggcttataactctgcagcccctatgggtagctgggggtgggggaagatagtatcaaaaaacggtgaagagagctgatgaggctgtggggactggctggaagctgctggcagggtggagtgggctggggccccggcagattcagatcgaggtacagcagcgttaataatactcttggagcgttaatactctggggaggggcaggcacttggggggccctagggcatgaaggcacttggggttggggaggggacaggggatgtactgcgggactgggcggggccaggccctggggtttggcaggcactttggggagtgctggggttgggcaggttgggccccgacagcccagaaggctttggtagtggcacgcacagtctctgggccgggtctgcattaaatagaagaggcttctttagtgctcatctcgaagctctgaaggcagaaacttgtactgctgctgccggatctgggccagtttcttccgcgcctcttccagctctcgttccttccgaagcatttcttcctgtgctgcgatgatctgggcaatgccgccaaccatcttctctttcaccaccactgtctcattctcctgctcttcanaggctgcagccttctgtgctgctttca

SEQ ID NO: 127246 - DNA, 2630 bp, Homo Sapiens
tgtaggtagaatcatttttattggagcatgacctgtttggggcttataactctgcagcccctatgggtagctgggggtgggggaagatagtatcaaaaaacggtgaagagagctgatgaggctgtggggactggctggaagctgctggcagggtggagtgggctggggccagtttcttccgcgcctcttccagctctcgttccttccgaagcatttcttcctgtgctgcgatgatctgggcaatgccgccaaccatcttctctttcaccaccactgtctcattctcctgctcttcaaaggctgcagccttctgtgctgctttcaccagattatctgaggctcgcttcactgcgttgccagcagcctgaagtcgtttcattgcctccgagtcctggtcagccttgacctttgcaggccacaaaggagctggggctgtggaggcagctacctgcttggctgatgagatgagcttctcctggctggcatggccttgtacagctgcattggctgcctcacacagattgttggtggccgcagccacccatcccgggcagcagaaatgaggccctgggaccactgcccatcgtccagtgcaatggctggaatggcacccaccttcccttgggccactagttctctctgggcagccgacgcagcctttaccagtgcactggtggctgctgcaatggacttggcagcttctagtatctgctcctcaaagttcaaggactcatctgcctccttgggtttggcccggggcttcagctgctctagctttttggctgcagcctcaatggcggctgcagctcccaggagctcattctcagcaatgactgtggggtcctctgggtctacccattctgttcccttcatggcttcagcagcctggatgagctcagtgacggaaccagccacacgctttgaatgtcctgtcaactgctgcttcagttctgggcttggcttctgcagggtcagcagtacatggtccagcagttccaggtagccattggcacactcccggccatagtgcagggctcgaagccgcacatcaggggccacttctgggtggtaagctgcttccttgcaagcccgaagcatatctgcaatagcacggcggctcagattggctgtggcaatgacatcttcctggcgacaggaattgccagcagcaacggccttggcggttgccatggtgatacccttggtcattcggatgaagtcttctggggtagaggtcttggcaggtggctctggggaacagaaaaccgccagctcctgccgtatgtgttctgtggttgcctccagggcccgagtgcctttggtggcctcatcttccacggcttttactgtcttaagcaatgatgtcacattggtcaccatcaccttggcagagttctttagctgccacacagcagggtcatctccaactttgccagctgcagccttcgttgcactgatgaggtctcccagggctttggctacatctttcactgcgttgattagtaccacctgggtctcagggtcctcagctcccaggctggctgcacccagcttgaccacatcagcgaggcgggtgatggtcgccacggaggactgggcagcctgcgccaacttctcctggctcccagctgcgttttgcaccaggaccttggtgtcctccaccagcaccttcgcagtcttcaggatgccctcccggtggtcagcgaaagtttcagtaccctcacgattgagcgtgccagcagtggcgaacatgatggtggtgtcgaggtcagcaatgataccagacacagcgctggctgctgtgatgcaggcctgggtgccacgattcccagcctggagcgcagccaggacgtgggagaccttctcagagactctccgggcacactctatgagctccttcttggtgtaggcatcactggggctgcactgcagggcgcctgccttggtgaccagagcggcacagccatggcccagctcctgtacccggtgtttgatatgggaacctatctcttcattttcagcagccaccgctgcaggcttggcctccgaggccagacggccatagtcactggtcagctggttagcaagagggcccagctcctctgggctggtgtttgacttggtaaccatctcctgaacggtcactgcaatggccttggctgtccgcaccatagttgtttggtaatccacgaaggaaccttctggttcacccattggtccttcatctagctggttgatggcctgggtgatggagtccaccatgccacccacgaccccggcagcactggctgcctcgttgagggttgttgtcaggtcctctacggcctcggtcatcatctgcacagcctcctccagggcttcctgggtgtgagctgcttgctttgggttaccaccagcctccttggcagtgtatagcaactgcagggcagactctgccaatgttttagtctggtccaggagtgccatctgctgcgggtggctcagggtcttggaggcagcacccactgcagccagggtgagcggctcaaagtactgcgccatctgggacaccttgtgtcccagctgggaggcttcagacccggcagcatgcctcgtgccgattccacacccagcctcgtacctagctagct

SEQ ID NO: 127247 - DNA, 1016 bp, Homo Sapiens
  misc_feature (60)..(60): n is a, c, g, or t
agtagtgtgtgcccacaggcattctcagagcatgcattatcttcaccaccttgagatgtncgctcattgaaacgaggctgggtttaaagagtcaatctagtacaggggcctagggatggagcagctgctgagagtggcaggactgcccgggttaacggggacaccacgccacactggtgccagcctctgcagaagggcctccccagacaggcccacgcccagggctcccacacccaagagatgagaggcctgtgcctgctgggggccaggaggggcctacctgctcgtaatcttccacatatttatatttcttctcccgatagtagagtcttttcttcatgcagtagaggactatgatgtcacacagcacggtcgccatgcctagcagtgccaggccagagccgatgttgatcatagtggggatgatgtcaaatttccctgccttcccaacacaatgatgtcgaagcggatgccataggccttgatgagcgtgcgctgctcgttgccagccaggtctctgtagtacttggcaaacctgaaattgtagccaggagatacgttgtgctcaacgtcccgtgtatcgaggcggcggaaggagtacctgggcaagcagagggagagcggctctgtccacgttgcaccgtctccacattgacctggatagcccactgatagcctcccttcaccggccaagtcctggaaaccgtgtcccgccgtttcttcccaccttaatttgcccaaagacggaaatatggggcagaagggatctgttttagcatcataaatgcacgacttgaggtaagtagtggtgatgttgggaaggatattcctcttgctgaaattaaatttgggataccagatgttgttcttaaccaaaagagtgaagttttctgcagcctttaaaaaagcaggttgtggcacgtgtgtgtcatcctccaccgggcaccaggccgccacctcacacgccccggccgtaatggccgaattcccgggcatatgtccggtaccgtcgactg

SEQ ID NO: 127248 - DNA, 985 bp, Homo Sapiens
aggtctcggaagtactggccaacctgaaattgaagccaggagataacttgggcttcaacgtccgggaatccgaagccggcggaaaggagttaccgtgggcaagccagagggagccggctctgtccagggttgcagtccccagttgacctggatgccccatgatgcctccctccacggccatgtcctggaaactgtgtcctgcgttctccactattttgccaagacggaatatggggcagaagggatctgttttagcatcataaatgcacgacttgaggtaagtagtggtgatgttgggaaggatattcctcttgctgaaattaaatttgggataccagatgttgttcttaaccaaaagagtgaagttttctgcagcctttaaaaaagcaggttgtggcacgtgtgtgtcatcctccaccgggcaccaggccgccacctcacacgtcttgacagacccgttgaaagctacgcacctgcctgttgagactccgttgctgtgggtgccggcagagccggcagtacagctggcatctgatttacacacagtggtcgcatctggaatctcggggcacaggccctgtgtctggttcatggtgaggatcacgttggtcatgacgaagagggagttttcctcctgagctggtatcacataatccgccacatcccagatccggaatccaagtttagaagtgttggtcacagccacgcccttgaccttggtcgtaacggagctgaccacggagtcagtttcctggtagcccttttcccacacaaacacccacccgatgacgtaggccaggatgagcagttgcacggcgcggttcatgagccccactttgcggctgcggatgagcacgatgcgcggcgtgtcgtactcgaacaggaaggccgccagcgcggcgcagcagcccgccatggccgcgccgcccgctcccagcggacgcgtgggtcgacgattcccgggattccggaccggtccagccgt

SEQ ID NO: 127249 - DNA, 531 bp, Homo Sapiens
  misc_feature (86)..(86): n is a, c, g, or t
cggaatatgggggccagaaaggaatctgtttttagctccataaatgccacgacctggaggtaaagtagtgggtgatgttgggaagngatatccctcttgctgaaatttaaattggggatcccagatgttgttcttaaccaaaagagtgaagttttctgcagcctttaaaaaagcaggttgtggcacgtgtgtgtcatcctcccccgggcaccagggcgccacctcacacgtcttgactggcaccgttgaacgctacgcacctgcctgttgagactcctacaagcacaatggtggcaggggggtcccatgtccacaggggtctcctattttctacctttttggagtagggagtgagagccccatccagcctcccatgcagccagtcttgagctgtgcaaatctgggatttagacagtgtcactgtccaggagttagaatcggaggaagacagttacctgtgtgccagccacatctcagccagggtgatgccaagctaaagaatgggacaagaggccaggcacagtgggtcat

SEQ ID NO: 127250 - DNA, 1646 bp, Homo Sapiens
cttggatgacagggccgggttcccacggtttcccaagcctggagcgcagccaggaacggggaagaccttttcagaaaactttccggggcacactttaggaggctccttcttgggtaggcatccacggggggtgcatgccagggcgcctgcctgggtgaccagagcggcaccagccatggcccaggtcctgtacccggtgtttgatatgggaaacctatctcttcattttcagcagccaccgctgcaggcttggcctccgaggccagacggccatagtcactggtcagctggttagcaagagggcccagctcctctgggctgggtgtttgacttggtaaccatctcctgaacggtcactgcaatggccttggctgtccgcaccatagttgtttggtaatccacgaaggaaccttctggttcacccattggtccttcatctagctggttgatggcctgggtgatggagtccaccatgccacccacgaccccagcagcactggctgcctcgttgagggttgttgtcaggtcctctacggcctcggtcatcatctgcacagcctcctccagggcttcctgggtgtgagctgcttgctttgggttaccaccagcctccttggcagtgtatagcaactgcagggcagactctgccaatgttttagtctggtccaggagtgccatctgctgcgggtggctcagggtcttggaggcagcacccactgcagccagggtgagcggctcaaagtactgcgccatctgggacaccttgtgtcccagctgggaggcttcagcccgggcagcattggccagcggctcaatgagatgggagatctcttggactgcagtgagcatctgagtgtgcaaggcctcttgagagattccctcacggggagcaagctgctggctgactgcagcgagggaagcctggtctaggtcccgtagacaactgttcagagctgcaatggccgtttcacactccagctgccttggagctttgtccttcatgcttgtaattagcttcttgatggagtctgagacagtacgggagtggccggccagcaccgaccagttcggggggtcccggggattgactgcgagggcccgggctgtctggatgagtcccccggcactctctaacattgtcttggcagagatcacaatgggctccatggcagcccgaccctcagggctgatctgggcaggaatgctggagaactcagggttggacgcaaaggcactcagattgtccacagcctccagcagaggggctgttgctgctcggcactgggcacggttttcctctgtgaaggccccatctagcgccttgatggtcttgacaagattagctgtgctgttggccacctccttggctgactgtacaaactggcgcttggcagtaggattggtggtacgggcagaagccaggcgacagctgttacacagtgcagaggtgtgtttagccacaatggtggctgcagagagcacctgggcctgggtacagccaggctctcccaaactctggcaggccatctgaattgcctggtttgcacgggcaaactgtgtgggctccactagcccttgctgtccagcttggctattgggcctcgtgccgaattcggcgcgccgtcgacttcatactctctcgcccc

SEQ ID NO: 127251 - DNA, 474 bp, Homo Sapiens
ccggagtgcaatggctggccggagtgcaatggctggccggagtgcaatggctacctggaactgctggaccatgtactgctgaccctgcagaagccaagcccagaactgaagcagcagttgacaggacattcaaagcgtgtggctggttccgtcactgagctcatccaggctgctgaagccatgaagggaacagaatgggtagacccagaggaccccacagtcattgctgagaatgagctcctgggagctgcagccgccattgaggctgcagccaaaaagctagagcagctgaagccccgggccaaacccaaggaggcagatgagtccttgaactttgaggagcagatactagaagctgccaagtccattgcagcagccaccagtgcactggtaaaggctgcgtcggctgcccagagagaactagtggccaagggaaggtgggtgccattccagccatgcactccgggcagccat

SEQ ID NO: 127252 - DNA, 1562 bp, Homo Sapiens
  misc_feature (1513)..(1513): n is a, c, g, or t
ctgactcagtgttcactgcaatttgcaataatctccccttcccccaagtctgaagccttccttcccccctattcaaattgtctgcgtcattctcataatgctactatttgggtactcctgaagccaaaccaataaaaaatgctaggggagctttatatgaattcaaacatgatgccaaagtcatctccaaaaaagtttattagcatgattaaaaacattttcttgaataataacagaaagaatttctaaacatgaaagaatatcagtggctataccttaaaaccagtatttggaattgaatggacagctttattgccagtcttcaaaaaacaatccattgattggttccatgaagtcgtgactattgctttgtctgggaatgagtccctactgcaattaagtataaaaaatatcttccatcataattggagtgtgacctgcattggagagtggctctgagtaaagagttgataaaaatccacaaagagttgggtttttgtcttttaaaaacattcctttacacactacaaagaaataattagtattttggctttttaaattcctacatgatatttagaatggcggtccccaagggtcctcccttcacgtaattgtgaacacagaccctcttccaagggcacatcccggagggtgcggactctgaagacttcgacctccacgtgtttatactggtttgagaacaaagacagcgtcatccagaacgtagtagtcattatacatgtcgccttcacacaggtatggtagtctggtgaaagcttcgataacaaaaccagcttttctgaaaacttcaggcagactattcacttgttcttcccagttctgtcctttgatttccaaaatttctgatggtttctcccacttgccacctacgttttccacatagggatgaaaggggaggacaagggcaaggatgaccctgcctctagttggctccaagacacttctgatatcttttaacaaagtcaggggctgatcacagcggtccagcaagttcaggcagctgatgacatcatactggaaccccgtattctgccattcatttataccaaggactctgtatttctttttctgaagctgccatatcatagtttcagaaagctcagtggcatagatttcttcaaaatgagggctcatgatttttgtgacttctccatctccagcacctaaatcaagaagtctgtgggttttccagtctggattaattttaagcagtctctgaaactgatctggtgaaaacacaaacattgagcctcttcctagcaacccattgatagatgttctagacataaacaggctaaaaacagatgacacaaaagaatgatataattggataaatagccagcccgatttctcaatgctgttgtttaagaagatctgtgttccttgatcaaggtaactctgaacaaagacagcctggagtgattcgcataatttctctctgttgcacacataccactggtggttctccttcctgccgcccgcggccgccgcngcccacccgggccgctagtcatgttcacgtacagggagcgggtgagcgg

SEQ ID NO: 127253 - DNA, 1301 bp, Homo Sapiens
  misc_feature (82)..(82): n is a, c, g, or t
gttcttcagagggtgccgcgaaggggcggccccagacaatgtttacctggttggaggcgtggcaagcgctggaagcgggccnggccagtgggtatatgacgcctgcataggattgtcatgccaattataaaaataaaggccggtccttttaaccaaaaggataggggaggaggtgaatgtggacgctttttccgccttacaaaaaagtaatgcccttataataaattttaattcacccatttaggggggtcagctgcagtgaaccttttatttcttcaaaatgctgcttctcccaacagaatttcatgttctcttctttacagatagataggaactccttcaattgtaattctgtttgcccttgtggccagttcccacatctccatttcatgatgatcttcttatttgttaaagaaaataaaacacaagctctctcttcctcctttacagtgaagatgctatacagctgctctacagttgtgtcaaacagttccatcatgtgaagagccacagtgggaatccttacacccagtgccactggagatgaggcctgaacctgcagggtattcccactcagttttcttttgacagtcaattcctgggttgccatagctttcgttggtaaaatcattcccgttgtaaattctcagtgtcatctacttcattttcctcagaaagattgggtatttcaatcaatcccttgtgcttcactccagattctttaacgatgcctttccagcccagtttgatgttccactcatagaagaaaatcagctttcctttgcggctgctgcacgaagcctccccttccacctgcttcaactcgttgatctcgccgcggccagcgtcattctccacaacgatgcccaccaggagctcctggaacttccctttggacaagctggtggcatcccgctctgtcctgccagggaccagaaagtcgtgaatggaagccccagctgggatccacctgcctgggtgccagggtcacgtccaagcccagcccagatcggcccaagtcctctcaagcagcctcgaaacctgccaacctccaatgtgctcctcaaacctgctttctatcaaattcttttcatcctgctcagttctttaagatattattgtccactatgcaagtagtattctgtcttaaaaacactggcttatttaagggaggaggatctagctagctcgcccactggaaataggcaaagcctaggccacagggaaagtagcagtagtgaaataatcagaatcatgacaataccagctatcaagtgtcttcgcatatacatcgtctaatg

SEQ ID NO: 127254 - DNA, 900 bp, Homo Sapiens
gaacatcaaactgggctggaaaggcatcgttaaagaatctggagtgaagcacaaagggattgattgaaatacccaatctttctgaggaaaatgaagtagatgacactgagaatttacaacgggaatgattttaccaacgaaagctatggcaacccaggaattgactgtcaaaagaaaactgagtgggaataccctgcaggttcaggcctcatctccagtggcactgggtgtaaggattcccactgtggctcttcacatgatggaactgtttgacacaactgtagagcagctgtatagcatcttcactgtaaaggagttaacaaataagaagatcatcatgaaatggagatgtgggaactggccagaagaacactatgccatggttgcactgaattttgtgcctactctagggcaaacagaattacaattgaaggagttcctatctatctgtaaagaagagaacatgaaattctgttggcagaagcagcattttgaagaaataaaaggttcactgcagctgacccccctaaatggttgaattaaaatttattataaggcattactttttgtaagcggaaaaagtgtcacatttacctcttccctatcttttgtttaaaaggactgtctttattttatattggatgaaatctatgaacatatatacaatgtaaagcattgtttgactctttattataactagacactgcattgatttaaaagtagcaagcaacctgaaattaagtattaacctgaccttccatcgatattcctctggaaataggtaagtcctgagtgcaaatagttgatgttccccaagttaagcttgtccaaaagcaagctggcttgcaactgtctttttagtccaagatgccaaagaattaatgggcatgtttgccccta

SEQ ID NO: 127255 - DNA, 3431 bp, Homo Sapiens
  misc_feature (1414)..(1414): n is a, c, g, or t
  misc_feature (1416)..(1416): n is a, c, g, or t
  misc_feature (3373)..(3373): n is a, c, g, or t
agaaaactgagtgggaataccctgcaggttcaggcctcatctccagtggcactgggtgtaaggattcccactgtggctcttcacatgatggaactgtttgacacaactgtagagcagctgtatagcatcttcactgtaaaggaggtaagtaactccctaagctagcatgttaagtgctgacattgggagaaaatacattacaaagaacaggagctggtttttggttttccttgtggctgtgtttttgattgaagggatgtgggatggtggtgacagaagtctgagcatagtttctgaataattggaggggagatgggcattctttgggactatgtccgcattacattgagttttctccctctaggaagagagagtttgtgttttattttctgtaagtaaaagctacatgtttaggatttttaaaccatattaattgttatattttgtatttcataattatattatgtgttagtgtgtactggaataacatgttttatttggttagttggtgcaaaagttttctaaatctactgctgtattagaaactgaaaagggagggaaattccagatgtttgatgggaacatcactggtgaatatctaggattggtaagtagactcaaggttgaagaagtaaggtgggattaactcttaatattactttttgtatatgctgtttttagcaccgaaatcacgagggtctgtgttgcctcaaccttaacagcagccctctgttctggttactattactgtacttaaaacattattatatattcctgctgtccttgatgttactgctgttctgagacattttggcaataaagacaattatcagtggtgctgatgtataaactggaagaaggaccgtatgttgttcattgattcttctaggagtttcaatgaaaggatttttctgtgttgtattgtgggaagtcttaaaagattttcagtggaatttcccctctcttttcagttaacaaataagaagatcatcatgaaatggagatgtgggaactggccagaagaacactatgccatggttgcactgaattttgtgcctactctagggcaaacagaattacaattgaaggagttcctatctatctgtaaagaagagaacatgaaattctgttggcagaagcagcattttgaagaaataaaaggttcactgcagctgacccccctaaatggttgaattaaaatttattataaggcattactttttgtaagcggaaaaagtgtcacatttacctcttccctatcttttgtttaaaaggactgtctttattttatattggatgaaatctatgaacatatatacaatgtaaagcattgtttgactctttattataactagacactgcattgatttaaaagtagcaaacaacctgaaattaagtattaacctggcccttncnatcgatattcctctggaaataggtaagtcctgagtgcagatagttgatgtttcccaagctgaagcttgtcctatagcaagcttgcttgcagctgtacttttagttcaagatgacaaaaaataaatggcatgttgacactattcctttattttactttagggtttttaaggtgtgtagatcttaggtcgtaaaacagtggtatattgcattcaaaagcatgttgaggtgagggcaaattggctgtgttttgctccacatctccctgcacatctccctgctgtggttttgcacttcggtgtggagaggattgagaagtctgtggggacacattagttctgtggactgctggtaacacttccagtgaaacagcatataatggataaatgtttcccccctctttcacggttttctcactactttcacctgagaagactgaagcaacgtatgtaaacaaatgaaaagtcatcacaatcagtttaattaagtgcacagaatagcaatcaatcagtcatgtcaataaaaataaaacaattatttttacatcaagtgtgctttatttcctccacaggtattctgttaaataaagcaccatttatatactgccaggccacagctaaagaggattctttacagaatcaaatttcttgtggttgttccgtatacaagtaaacttaattttgataataagaaccacagcgatcggaggcaatctgcctctataaggtacaaaactggcacagaggacaccatatcatacacagtaaaaatgctgtaagtttaaattacattgtacagggctaggcaaccctgttcttcccagacagccatattaaatgaaagccactaaagtgaactcttaattacataaaacatatccattatctgattgccctttaggaagtatactgaagatgcaagtttttttcatctggagttctgcctgaccaagaattaagcctataaatctatcttgccattcaagcagagagcactggacaaactgaagcacaaaaacaaataagcaaaacttatacaaacagcatgggggttgggggtgagggacttaaaagtagacatgctacacctaatgtcaagaagcagcttggtttcctttgccagatatccttgtgacgacatggattgtagattcaatggtcctacacagggtatctaaaatgtcatgttgctgcatatgactaaagagtcctctggaatggccacaactgagagataaagcaacctcagggtcctgggagggcaaagcttggccatcacagcttctcaagtcagctaagtcagacagaactgcagagatagaagtagaagggaactcagattcttcctcagctagggtagaatccttggaacagtggaggtctttaaattctttacaatcgtcatatctaccattgttggactgttcttctgcatgctgtgacctgatatttgacatgtcttctgaaaacgaagatggaacttccattcggtattctttaacagaactattttcaggggaaggaagatcttgctcagttcctggatcaataattgaggagtctctggtctcattgtcagaagtgctcgttggggtcaggacctccctggtttctgttttcatgtcactgatgcagctgtctacagtgtgctcctcatcactgctaacacgccgccttttaatgggagttgctccttcatcatctttagtttttctttctttggctttttgctcttggagtgagtttctctgttgcagacaagtcctgcatttgcttaaaagctcttgcagagttggaattagagctgggttcaactgtttgggagtgtgtactgacaggagcaaagcgagtgccctcaggtcctacaaaaacccagataggaacatttcaaattctaaagccaacactttgatgcagttgtttacagttaattgcagatgtttattttcccaggaatccantctttcctaagaataccctggtttctctgggattcttagaatgataaaaccagaaagc

SEQ ID NO: 127256 - DNA, 1392 bp, Homo Sapiens
  misc_feature (66)..(108): n is a, c, g, or t
  misc_feature (1284)..(1318): n is a, c, g, or t
ttttttttaagtcttcctaaattttattggcactgaaatagaacatggattgagcataaacccctnnnnnnnnnnnnnnnnnnnnnnnnnnnnnnnnnnnnnnnnnnncctgaatacaaaatctaaccttttcccccagcctccctaagggtaagttactgactttaaggcagctattaatagattgccccacaattccaggtttcaatttagccaatataggacatatcaccaagtgagctaattcacagcaatgcacacaagactcctcaaggtcaggcacagagtggggggtggtggccagggggaattgagggaggctctaagctaggggcactgcatggtgggacaggatggccccttgaggactgaaccctggggagaagacaaacagtaataataaaaacaaataacaagtactttaagaatggattgtatgacctatagtgacagatgacatcactaatactgaaagcttcttatattaataattttggcaaaatgtcattttgtaatatagtatatgctttccaggtgtgggggtggtaaagtaatgaggccaaaatcatcctgccccaagactaatatcttctaatggtgcattagcaaggaaggcagaaatcaatatttagatatcagtagagtacataatactgtagaaagaagaagagcacacatgagacagagaaggaggtggatgctcctgggttgagagcaaggggtgggggtgtggaagggactaggccagaatccccagcagctctctggtttacagctccaagggacagaacagctggtgtcaagacctgggttagaggtttgtcaaacagaggcagggcccagtcacctctttggaggggagtgatgagaaggggattttggtcacctgagagggttgagtaaacttggatcagggcacaggcttctctcaccatactcagctttttgcactcactccctagttgagcctactggcatcaagctctagatgccaaggctgggatggctgtggagcaggagctatggcccaagtagctctgagaggggaagagacctaaaacccctagcagggaaaatactgacgctaggtgtgaacatatcctctcttttcacaagagtcctgatggggctggctgagcttttgggtactcatccctactgttatagctggagaggatttgggtattgaagcagggaggggcagatcccacgaagtgactgcagatctggaatcccggccgtaatggccgaattcccgggcatatgtccggtaccgtcgactgnnnnnnnnnnnnnnnnnnnnnnnnnnnnnnnnnnncgccgcttcctcgctcactactctgctgcgctcgtcgttcgctctgacgagctagcgccctatagtgatctata

SEQ ID NO: 127257 - DNA, 881 bp, Homo Sapiens
aaaaaaagagctctttattccacgtcgtccgatatttttacacaagtaaaataaaatgcatatctctatataccgcgatctgggtgggaggcggcgttctggaacaaacgctgccgccgaaccctgtaaacatgatggggtggagatgggggtggcgggcggcaggcgtccatcagggaggacctggcctggcctgccccacgggtcggccgcccggctggcttggcggcgtggagagagaccccgtatgtacacacacctggctgctgagcacgctcttgtgtccgctgggggtcagcagggcccaagcactgtccacagcaccagcgccaggcccaggggggtgaggctgcaggtgaggctgggtagggcacctgagccttctgagtcaccagtcccgccacccccgctgcctgcctggcccagacggcagtggctgcgggtgcggttcttgcgtgaacagcctggcctccggcgagggcccgaggtggggaaccctggtggctcggagccctcgggccgcactgcagtgagcgggggctcagcagagccaggcagagtcccaaagggtgagtcattgatgtgccgtgggccagagccgttgcccggcgggctgtcaccgggcggcacgcgtcccttcagcgcattgcctgccgaagctggtcttccaggctccagtactgaggccttgtcagcggcatctggctggcagcacttgggaagccccagcggctcctcatcggtggccctgccggtccagatgggatggtaagggccggtggccacagcgcagccctgcaggtcattggcagctaggcgtttgaggtcacggccagccaggcgttgcgggaggctgcagggcacctcggaggaggagccgc

SEQ ID NO: 127258 - DNA, 965 bp, Homo Sapiens
  misc_feature (13)..(13): n is a, c, g, or t
aggaaaccacagnagaaagttgcagtcgactcttttaagggaaattcagcagttctctcaagggactcggaagagtgctacagataccagtgctaagtggagactctcacactgtactgtgcatagaactgatctctaccctaacagtaagcagctcttgaatagtggagtttcaatgcctgtcatacaaactaaggagaaaatgattcatgaaaatcttagaggcatccatgaaaatgaaactgattcgtggacggtgatgcaaaataaataaaaacagtacatcaggaaccattaaggagacagatgacattgatgatatttttgctttaatgggagtttagatgttcgttcatatgtgagacttttaagtgattaacaaggctagttcagtgttctaagtagaactgctaagatctggaagtaccacctggactcacagaggagctgctttagtgcagcattgcacaggagttcatttcagttcagtctacatttaaagtagcattgtgtcatttcatcaacaagtatttcttttttggcttcaactacatgtcaggtgttaatatgaaaaatctgccacagcctacccttgagaagcagatgtaattccttgagtgaggctagtaagtctctgaaaaactgaataattttatgacttactaggcaatttaataatcgtttgcaaaaaccattgtgtcttgaggtaaatgaggagcgggggtgggagatagcaaggaaacacctgaaaggtcaatttggtcttattggctccattatacataggtccgcctctgaatactaaagtttgtagctcctgacatttatgttttcttgtttatatgttggaattgatcaacaaggtttgccactgcttgtattaccagggactggttacaaccattatttctcttcatttgcttggcttatctcatattaaagtgagtttggagttctccaaaaaa

SEQ ID NO: 127259 - DNA, 643 bp, Homo Sapiens
gcctgagtggcgaattcggacgaggggaacatggcggtggcggacctcgctctcattcctgatgtggacatcgactccgacggcgtcttcaagtatgtgctgatccgagtccactcggctccccgctccggggctccggctgcagagagcaaggagatcgtgcgcggctacaagtgggctgagtaccatgcggacatctacgacaaagtgtcgggcgacatgcagaagcaaggctgcgactgtgagtgtctgggcggcgggcgcatctcccaccagagtcaggacaagaagattcacgtgtacggctattccatgatgagacccacgtgcgtccctctgggcgcctcaggccccaggatccaccatcaaggcctatggtcctgcccagcacgccatttcaactgagaaaatcaaagccaagtaccccgactacgaggtcacctgggctaacgacggctactgagcactcccagcccggggcctgctgcctccagcagccacttcagagcccccgcctttgcctgcactcctcttgcagggctggccctgcctgctcctgcggcagcctctggtgacgtgctgtccaccaggccttggagacaggctagcctggccacagaattaaacgtgttgccacacctgc

SEQ ID NO: 127260 - DNA, 488 bp, Homo Sapiens
  misc_feature (48)..(48): n is a, c, g, or t
  misc_feature (424)..(424): n is a, c, g, or t
gcggtggcggacctcgctctcattcctgatgtggacatcgactccgantggcgtcttcaagtatgtgctgatccgagtccactcggttccccgctccgcgcttccggcttgcagagagcaaggagatcgtgcgcggctacaagtgggctgagtaccatgcggacatctacgacaaagtgtcgggcgacatgcagaagcaaggctgcgactgtgagtgtctgggcggcgggcgcatctcccaccagagtcaggacaagaagattcacgtgtacggctattccatggcctatggtcctgcccaagcacgccatttcaactgagaaaatcaaagccaagtacccccgactacgaggtcaccttgggctaaccgacgggttacttgaagcactcccaagccccggggccttgcttgcctccaagcagncactttcagaagccccccgccttttgccttgcacttcctctttgcaaggcttgggcctcgcttg

SEQ ID NO: 127261 - DNA, 1313 bp, Homo Sapiens
  misc_feature (76)..(76): n is a, c, g, or t
  misc_feature (168)..(185): n is a, c, g, or t
  misc_feature (187)..(196): n is a, c, g, or t
attgtggtggggaattcccaaaggccctttggtccatgggcccacggattcttccctaaggaaaccaagctattgnacccatgtttcccttaccctacttgggcccggcgccgccaaaacgaaaggttctagaaaactttctcgaggcccgagggcggccgacatggnnnnnnnnnnnnnnnnnngnnnnnnnnnncggtgtggcaacacgtttaattctgtggccaggctagcctgtctccaaggcctggtggacagcacgtcaccagaggctgccgcaggagcaggcagggccagccctgcaagaggagtgcaggcaaaggcgggggctctgaagtggctgctggaggcagcaggccccgggctgggagtgctcagtagccgtcgttagcccaggtgacctcgtagtcggggtacttggctttgattttctcagttgaaatggcgtgctgggcaggaccataggccatggaatagccgtacacgtgaatcttcttgtcctgactctggtgggagatgcgcccgccgcccagacactcacagtcgcagccttgcttctgcatgtcgcccgacactttgtcgtagatgtccgcatggtactcagcccacttgtagccgcgcacgatctccttgctctctgcagccggagccccggagcggggagccgagtggactcggatcagcacatacttgaagacgccgtcggagtcgatgtccacatcaggaatgagagcgaggtccgccaccgccatgttcctcctcccggagtcccccatgggggaatgcaggaacacaatgggccctggagggagggctctgccgccgaccctgggagaaccccaggaagcctgcgtgctcagctggggccacgggtcagggcagcaggctcaggtgggcctcgaagctggtactggggcctccggccagttgggatggcgtgctggcaggctcataggccatggaatagccgtacacgtgaatcttcttgtcctgactctggtggggagatgcgcccgccgcccagacactcacagtcgcagccttgcttctgcatgtcgcccgacactttgtcgtagatgtcccgcatggtactcagcccacttgtagccgcgcacgatctccttgctctctgcagccggagccccggagcggggagccgagtggactcggatcagcacatacttgaagacgccgtcggagtcgatgtccacatcaggaatgagagcgaggtccgccaccgccatgttcctcctcccggagtcccccggccgtaatggccgaattcccgggcatatgtccggtaccgtcgactg

SEQ ID NO: 127262 - DNA, 773 bp, Homo Sapiens
gtactagttatgctgatgtgcattaagtgatatgtcatttcggggttagattttcattttactaatgaaaatgaaaaggttttgttgagtaccttttcatgggcttataagccacttcacataatttttagagaaatatctgtttaagtattttgcccatattttaaacaagtagtttattattgctgaattgttctttgtatattctggatagagtcctctttatctatttttcttttgtttcttgcgtttttggtgtcctgttaaaagaaatcactgccaaatccagccttatgacgtgttttacctacattttatactaagaattttgtagttttagctcttacatttaggtctttgatccagttagttaattttttcttatagtagaagttaagggcccagcttcactcttttacatgtgggcacccaatttccccagcactaattgttgtaaaggcagttcatttcccataaaaatcatttgaccttatatatgagggtttatttatatgggccttctatattactccattagtctctttgtagcatgctattttggaattttgtattaagtcttgaaatcattaagtgtgactgctctaactttggtatttttttcagaattatttttgcaatttaaagatctttgagattccccataaacttaaaaattgattttttaatatctacacaagagtaattggcattttacttcttcgttacttcctaactactttattcttttgatactattgtaaattgaattgttt

SEQ ID NO: 127263 - DNA, 830 bp, Homo Sapiens
tttctgatttagttcattcatttattccagcaacaaatatttgagaacacactgtgtcccagacactgttctaaggactggcagcgaagtccaagacaaacagtccctaccttcagcaagtttgcagtcaagcaggatgcggatgctgagcattacaagggaaatgattattctgagagaggaagtatggggtgctatgggaacatacaaccagggacctaattttatgggaaagggaccagcccagatccaacacttgctctcccagtttacctccagtaggttctttttaacttgaactaatcttgtttggtggggtacacagtgaggaaaaagaagagctagtgacaaaatctaactcccttctcagtcttaagcaaggtgaaggcaagggagtagaagatatcaagggagtgagtggtggtagccaccaaaggagatagcagactgaggccctaaaaaaagaaaggaaatctaaatctatccagcaggaccagagaaagagtgctgagggtgattagatggaatccctgcatgtactctcccggcattctgaaaagaagccaaaacaaggaagaaaccggggtatctagttaagacctcacaaatcactcatccattcctctgacatgttcataaactttttatagtggttacgaaccaaaagcttggcatttcttggcacttttccaataccctttaccagctcacattatctgggctcccacccaggctacagatagcctggctgttagcacttcacagaagggatatagactggcccagattcaagagctgcccttctaatttacctacagtgggtttttaac

SEQ ID NO: 127264 - DNA, 356 bp, Homo Sapiens
aattaaacaggaaagagccagacttctcagaggtcagtctgttcaacaagtgggaccccagggccttctgtatgttcagcaaagagagcttgcagtgacctccccaaaggatggtaggttaggaagcagtgaattgggcgttatcccaaaaggctattggatattttattttatttcttttttaaacaggctccatctccattcttgggttctgatgatgccactacttgtcacattgtggtcctgaggcacacaggtatgatgagagaggtgaaggaaaccattacttaaactgacccaacctttgggaccactgactttctcgtgttgagtttcctggtgtcttgttggatgcg

SEQ ID NO: 127265 - DNA, 490 bp, Homo Sapiens
tccgcgatgccgctgttcgtctaggggcggcgagtgcggctgccgcagtcagccggggacctcgtccgagcccacccgcctttggaggtaatggggccacctgcttgacacattgtgacggaaccgacaccaaagctgaggtccccttgatcatgaactccataaaatccttttctgaccacgctcaatgtggaaggctggaagtacaccttgttggaggcttcagtgacgacaggcagttgtcacaaaaactcactcatcaacttcttagtgaatttgacaggcaagaagatgacattcacttagtgacattatgtgtgacagaattaaatgaccgggaagaaaacgaaaaccactttccagtaatatatggcattgctgtcaacattaagactgcagagatttacagagcatcctttcaagaatcggggtccgggggagcagcttcgtgctgcgcgaactttagcaggaggaccaatgattagcattt

SEQ ID NO: 127266 - DNA, 1543 bp, Homo Sapiens
  misc_feature (400)..(425): n is a, c, g, or t
aaattggtttcttaaggaggagtttccccccgcggggtgggttttgagatggaggtgttccggggtcacagcggggctcaagtttatacgtcgggaattttctcttgtgggcctctccgcgctgtaggatggtctcccaataaaaggagcctcgataaagctcccatccgtgggtatttttttcgaagaacccgctccggttgtccggccgggggggtcgggtgtatgttgggggaggatttcccaagccctctggttccggtgcccggtatttgcgctggggaagaacaaagctaggtaccgagggtgcactttccctatccggggccgcgctgcgcccaaagggaagtggtctggaaaagcttctcggaagggccgagggcggccgacatgttgtgtnnnnnnnnnnnnnnnnnnnnnnnnnnccaaaataaggttttattttgaaagtcatttgatgaaagtcatttgaaagacactgaggagggaaggaggcctaagacccaacagatgtaggatccagatctggattcgtgccagccccaccaatggtctgtcaggccaagaaggtgctttctttggtaattcatgttttttaacttcctggagaagagatcttttcccacaagccatcttcattttttttgtagagtagggctttatttccagaaaacagtgtgtgagctggagatgggtgtttttttaaaaacatcaaggtagatctaatatgttcaacaaagtggggtggctcagccagaggcgaagtggaaagattctctagtatttgcttgtcatcttggtgcaaccagaaatccacatgtggaaatggtgtccaggagtacggtcctatacgaagttgttctgtctctgcatcataaatgctaatcattggtcctcctgctaaagttcgcgcagcacgaagctgctcctccggaccccgatcttgaaaggatgctctgtaaatctctgcagtcttaatgttgacagcaatgccatatattactggaaagtggttttcgttttcttcccggtcatttaattctgtcacacataatgtcactaagtgaatgtcatcttcttgcctgtcaaattcactaagaagttgatgagtgagtttttgtgacaactgcctgtcgtcactgaagcctccaacaaggtgtacttccagccttccacattgagcgtggtcagaaaaggattttatggagttcatgatcaaggggacctcagctttggtgtcggttccgtcacaatgtgtcaagcaggtggccccattacctgtgtgcctcaggaccacaatgtgacaagtagtggcatcatcagaacccagaatggagatggagccatcctttggggaggtcactgcaagctctctttgctgaacatacagaaggccctggggtcccacttgttgaacagactgacctctgagaagtctggctctttcctccaaaggcgggtgggctcggacgaggtccccggctgactgcggcagccgcactcgccgcccctcgacgagcagcggcatcgcggaggcggccgc

SEQ ID NO: 127267 - DNA, 507 bp, Homo Sapiens
gaccccgatcttgaaaggatgctctgtaaatctctgcagtcttaatgttgacagcaatgccatatattactggaaagtggttttcgttttcttcccggtcatttaattctgtcacacataatgtcactaagtgaatgtcatcttcttgcctgtcaaattcactaagaagttgatgagtgagtttttgtgacaactgcctgtcgtcactgaagcctccaacaaggtgtacttccagccttccacattgagcgtggtcagaaaaggattttatggagttcatgatcaaggggacctcagctttggtgtcggttccgtcacaatgtgtcaagcaggtggccccattacctgtgtgcctcaggaccacaatgtgacaagtagtggcatcatcagaacccagaatggagatggagcctccaaaggcgggtgggctcggacgaggtccccggctgactgcggcagccgcactcgccgcccctcgacgagcagcggcatcgcggaggcggccgc

SEQ ID NO: 127268 - DNA, 562 bp, Homo Sapiens
ttttgaaatgaagcgtcatttattgaaacttgtattagtggggcaacttaatgctaggctaagttgcagtgagtaataatccctaaccccagtgacagtgcagaaaaagaagggtttcatatgtggagtgtgatgcatgtcaatgggagtttcctccacctggtgactcaggtatccaggcacattcatctctgcaggtctgccatcttgacacgaggtcattgcagaaggagagagggtgtagagtcatgccagttcttaggtgctcctgacaaggagatctgcagcactctgctcacattcctgttttccagaactcagccagtacccagtgcaactgccaaagagtcttgcaggatggagtcttggccgcagactgagcctgtacttcacccgtctcccaccaactcttggtactggacgcagccatgctgggcagctctatggaggcctggcgggctagcttgggggtctggccagcagtcctttcacagctggggagtggagtctgggcctgaggtctcccgtgcgcctctcggcgcctgcgcccgcgctgtgcccc

SEQ ID NO: 127269 - DNA, 1598 bp, Homo Sapiens
gtttcaagagaatacacagggagctttattatacaaaatggcggggtggggggcggcaagcagcgggggacgcagcatcaagcatcctgcatggccgttatcagcccttgacctgcagtttccccttggatctgggggggtgacccaccctctctgcacaggctgtgcctcaacctcctaacttcctagaaggcacttggcctctccaggggtaagtccctttggccaatgatcaggagtttctttcctcccccaagtaacaagaagcggagctgggtggggagggcgggggcggtggtcaaagagtggaagggcagagaggctaaagggtccaggagcaaaaggaggtggcagcggatggcatcaaagaggcgagggtaggtcatgctggcaacaggaagcaacttcttagccagggccggggggcgggtgtctggctggaatctcccctgggtacatggagggtgccagccggctggacctgcagacccaggaagcgagatgggacgcctagggagccgggcccccttccacaagcaccttctcatacttcccatgcccggtggccacaaacttatacctcttcccagatggggtgctcttaattgttgatgaggtcttggagcctcccttctgctcccagaggcttttcttgctcatgtctccagccacaatatccttgcaggacggagtcttggccgcagactgagcctgtacctcacccgtctccccaccgactcttggtactggccacagccatgctgggcagctctatggaggcctggcgggctagcttgggggtccggccagcggtctcgatggcctgggtgtattgttccagccactgatcaatcttggagatgggcaagtctggctgggatttcttcacactgttactcttctctatggagcggtttagggactcggtcctgtcgatgagtttggtggtagggctcaggggaggcgagctctgttcgatggtcccctccaagaccaaggggctgggtgtcctgggctgctgacatttctggtgctcctcctgttcctcctcagcccctgcggcccccaggttgtcctggacagtgtcctctgggcctggcccctccttgctcagactcaactcctccaggtggacttcatcactgtcctccttttcgtaggcatgcaggccgggcctgtcctcttgctccccctcaggactcctgcactgggggggctctccgctgtccaaggtgccctgcgccccctcgtgctgctgccgctgctctggcctctgggaccagtcgccaaagccctcgtcctcatccagttcaggggcctccgagggcttcaggctgaggagcatctcctgcttcggccgctcggggacatggccgcctccctcctcgtcctgggcctgaagctgcctgtctctctcatgctggcattgctcgtggacggcctcctcctcgtcctccacgctccactgagcagtgggccccagcaactcttcccgctcctcggcacccgggtcactcgaagcctccgccatcagcctgtagtctgggccccacagggtgctggcagatccctggagtgggtgtacgtgctgtgctttc

SEQ ID NO: 127270 - DNA, 845 bp, Homo Sapiens
cacttaatttttcctgtttcttccgttgtttttccatgtgtctaagagtttccaatcttgattcaggagtaaacaaacagggcttattccagaattccaagtcatcttcactgttgtctaatttctttgtgttgtgttcctcttatgtctggtgcctgtaggtggtctttgctctttaaagaggaaagagtagcattgatgtctgtgtaccaacgtccatcaaagcctgcgttacttctcttgtcttcatttttatcctcttcttggtgtttcctctgagcctcttccttgagtttggctcgtttaagacagtgatctttttcctgctctctgatttgtggttcaattactgaatagtcctgcaatgccttaatcctttctgaaggctctatttctttaccatccaaccactttaattgtggaagagttgctaccacgaactccctatagtggtcaaaggaagcacatgggttccccatgagaaagagctccttcagatggatattgtgctgcaagtttttaatgctgctcagctctccaatgaaattcacagtcaggtcaagttttgccagctcttcacatccttccaagttttctattttttcaatgttgtttaaagctaaattcaaatattcaagtttcttgagtttgctaacattttcaattttcccaataagattattttgaagatagagaatttttaaatcccggcaccatttatcaatgtgttctagtctttctatttcttgctgatgcaacgagagttcctccagggaaaaaatgacacagtcgttgtgttcagcattccgtctaataagatcttctgtgatccagcccatggcgcc

SEQ ID NO: 127271 - DNA, 1285 bp, Homo Sapiens
  misc_feature (137)..(139): n is a, c, g, or t
  misc_feature (141)..(142): n is a, c, g, or t
  misc_feature (151)..(151): n is a, c, g, or t
  misc_feature (157)..(157): n is a, c, g, or t
ctatttcatggcccagggatcttcctagggaaaccagttatggccccaatttcccctttaccttctggggcccccggcgccaaaacgaaaggttctagaaaagctttttgaagggcccaaggcgggccgacaatttnnnanntcgggcggnttcttnttttttccatactgaattaggaagtttattaggctcctagtttccatgtttagaacatgagcatggatttacatgcattgtctcattttgtggatcttacatgcatgtcgtctcagtcagctgcacctttgattctacttgtcagtaatttaaagttagctcaatgtgagtaaatgacaaacacagaatgatgcataagctgtagccacaaaccccacccaataccatttatcttatattccaaactatatcacaactctctcttgtaaaaaataaatttcagaacaaggcatttaattgacctcacagagaaaaataaagacaattctatcatttcagaattcagcaatgaatgtccaactatggctgaaaggtacaccctgagaattaaatgattttaacgaacccactgaggtttataaagctgtgttaacctaatgttgggaaaggataagagaaacaggcacaaacacccccgctcattttgctgtgcaattctccaaggaggtggtgttacaaatgtcctcattgtcttcaatgcttgaagcatctgtggagtcaggatcgctcaccacaatgcctacagaagagagactggtaatgaaggcgtgcatccgctgtgcatatatatccctaatgttaaagtaaggtagctcatgacacttctctggtgcatcctcactgcactggtccacatcaatgtccttttgcttctggtagtacttggaaaacttgttgaagatgatggtgatgggaagggccaccaccaagatgccacagatgatgcatgtgctggcgatgagctttcccgccaaggtgaccgggtgggtgtctccatagcccacagttgtcatgctgatggtggcccaccaccagcagatggggatgctggtgaggctggatgtgtggtcatctttctccacggagtagataagcacagagaaaatggaaatgcccacagagaggaagagaagcagaagcccaacttcatggtagctgtgtctcagtgtggcacctagagaccgaagtcctaccgagtgccgggcaagctttagaattcggaaaatcctcataagccgtaggatctggaccaccttgcccatgttctcaatatcctcactctcttcc

SEQ ID NO: 127272 - DNA, 2067 bp, Homo Sapiens
  misc_feature (214)..(214): n is a, c, g, or t
tgttttaatcccaaaatatttcttgttaaaaggttatatataatattcacgggggcaaccgaaacccagccgcaccaggctgccaatttttgctggtgccaatgttctccccaagatgtatggttgctgttttatcaaaaatgttccctcggattggtttttccaaatgggcttggaaaaggcaatcccgttggacgttccagtgaaatacggnttccacacatccaatggccctttaccagaaaggagggagcatacttggggttaaatggaaaaggggcgtggccattcccgggctggtggcaatattaattatgcgccttaaagtggtttaaaaggtaaagggtaaggctccatggacaccttcttcttgggtgcatcccttcactggcactgggtcccaccatccaatgtcctttttgcttgtgggtagtatttggaaaaacttgttgaagaatgatggtgatgggaaagggccacccaccaagatgccacagatgatgcatgtgctggcgatgagctttcccgccaaggtgaccgggtgggtgtctcccatagcccacagttgtcatgctgatggtggcccaccaccagcagatggggatgctggtgaggctggatgtgtggtcatctttctccacggagtagataagcacagagaaaatggaaatgcccacagagaggaagagaagcagaagcccaacttcatggtagctgtgtctcagtgtggcacctagagaccgaagtcctaccgagtgccgggcaagctttagaattcggaaaatcctcataagccgtaggatctggaccaccttgcccatgttctcaatatcctcactctcttcctccttggtgtctacagccaacgtggcatagaagggaataatagagacaaagtcaatgatgttcagagggtttttccagaatttcttttgacaaggagcggcagccagccggacggcaagctccccggtgaaccaggcaatgcacgcgatctccactccttccagcaccggatcatccacttctccatcctcattctggaactccgacatgctgtgaacgcacatggccacgatggaggccagcaccacgctcaaggaggagatagcgataagcttagcggacaggcagtacgctggattctccattctaatccagattttcttccggagctgaccaaatcgcagtgtgtcaaacttctccagctctttctcaaacagagacgactcttcaaacgaggagtcggtactcacatcatggcttttctggtcccagtccttctcgtggttttcctccttgcgttcctggtagcgattgctgcagcaagaatcaatgaagagctcgttgatgccccagtactcgatctcctggcagaatgagaatacgcacagctcctccatgacatgcagcttccccgtgtaataaaaattcaaaacatatctgaacaaggagggattccgatcaaagtagtattccttatcggccacactgtaatcatcacacagctccagaatggcctcttcagaatggcaagtaagcagcttccccagtctggtgtgaggaaaccgcaggagggtgctttggtcaacagactgcttaaagccccccacattcaggttgacaagttcctcgtcttgtccagggcgatggaaaaactcaccaaacaccatggtggatacagaaggcagagtgctggctggcaagggagaagaggaagatcaggctgcacccttgaggtggagatgccacacgctctgccttcatcctgcccggtgggacgtccatcatcatccaagaagctctgcccttctcagcacactggaatgtgtggtgcacataggcatttggtggccaaaaagaagggaagaatcctgttctctggttgtacaggccaaagcaatcactggaaaatcactctcacctgcaggagtccggacgcatccagctagctccgctctgcgacgccgcctgcccgggctgcagggatcaggcctcgcggcgcggccccgcgcctgccgccgcggcgtttgagttattcggggtggcccgccccgctttttgatt

SEQ ID NO: 127273 - DNA, 1924 bp, Homo Sapiens
  misc_feature (348)..(348): n is a, c, g, or t
  misc_feature (970)..(1032): n is a, c, g, or t
  misc_feature (1535)..(1545): n is a, c, g, or t
tatatggttcacgcggcggaggggaatgtgttgcgcgcggagtatatgagtagggaatgagaatattctccgggcgccgacgaaatgtgtacccgcgcgcgaacgggcggtgttatttcgttctgtcggacgacagtggttaaaatagacggtgatagtgtcttgcggagggaggcaatatattttctggtgcgggggagaggggttttttatgtcggcgcacgcccggtcggtggtggtgactatcgaaagatagtgtgtggggcgcgcccgattattatttgggagcaactggcacagaggtgtgtattatgcggcacatacaccgcaggtgtgtgttactaaacnacccacatatacgcggccggccacgatcgtggtcttgtttataccgaaccacaaagggtggcgtcgtattaataaaacggaacgggttattaagagtctaccgcgcagtcgtttggggcgcggaaaattataacagatgtggatgtttccatacacagatattgtcacccgtatattcatatcggtggtgggggctatataacaaagggcgggcggggagcaagagaaaatgggccctggacaacagtgtggtttttggaaacagaaggtttgatcgccgagaagaaagttggcccacaaaagttagggtgcccggaaaatatgggcctttggggaggctctcctcctagagaagggtcctcgcttgagaaagaccctccggggaagacccccctccaggaaaattcccactcggaaaatgttgtgttacgaaacacctctgggttttcgctcccggggggttttgttgtgggcgcgacgattgcagagccctagtttctatgccagagggcggcccaggaacacagaggaagtgcccagttcgttttcgctgggtgggaccggcggggcaaaagaagtggtttagggaacttttttgaggggctagggggcttgacaaggnnnnnnnnnnnnnnnnnnnnnnnnnnnnnnnnnnnnnnnnnnnnnnnnnnnnnnnnnnnnnnncaaagtcaattaaattttatttcaaccaagaatataaaataaatgcaatgtaatttattttagttttaacagtcatttcaagaaggaagtcaggtcaactcaaaagcaggaaaccctcgctccaaagcagtagctcgtcctgcactccatggagcaggcctcgctggggtgcagcggctctgagcacaaacctcgcagtggagcacgaaaagctacagtcatctctataaccatataaagggggatgcgtgcagaaaatgactgaaaaaagagacaagaacaggtacacttcacaaataggaattataggaatatacaaactaggcagtttagaaaggatatactacataacatatataaaaagtactttaaattgttgttaaaaaggacaccttcagtccagattttgtgtaatacttttagtgtctacacagacaaatctttaaaaaaattaaatagtattaatttactaaatatttaggagataacagtgcattaagggnnnnnnnnnnnatataatacatacatatcacccctttgcagtgatagcatagaagagtaagtatggccttaggtacaacacgttttttaaaaaccctaaaacaatgaactttgttatatttgtgactatttttgaggattatggggacctaaactgctatgttttatacaaaatattacttgtacttgaatccttcaagcctctgttggtctaactgccatttctactgcctttctctactccctaggaagacatcatcatagagttttggatttgtaatttccatagaattcttccttcattgtatagtttctgctgcataaatttactcaaaagcacatcaagttgcacctgatttactctagaaaataaaagtagaaaatactgaaa

SEQ ID NO: 127274 - DNA, 1283 bp, Homo Sapiens
  misc_feature (252)..(286): n is a, c, g, or t
  misc_feature (327)..(351): n is a, c, g, or t
  misc_feature (474)..(490): n is a, c, g, or t
  misc_feature (498)..(625): n is a, c, g, or t
cccccccgtttttttccacggggggaaaatatttatttccacaaggggccccaaggggttttaatcccccggggggattcagagttctcccccccgccgtttgggagagggttcccccttggggcgcgaagaatgtttttaaaaaattttccccccaatcttctcccaaaaaaatggccagcggcgcggggggcttaatttttatatttttggggcctcccccccggggacccctcccgtgtgataagagannnnnnnnnnnnnnnnnnnnnnnnnnnnnnnnnnnttgggattttgtttcacaaaacccttccggtgttccccccnnnnnnnnnnnnnnnnnnnnnnnnnaatccaacacctctttttctttgccccgggttttctttggaaaacccgttttggccccctgtttcctttcccttttggggggccccgccgcccaaaaagaaatggttttagaaaaaatttttnnnnnnnnnnnnnnnnnccccacannnnnnnnnnnnnnnnnnnnnnnnnnnnnnnnnnnnnnnnnnnnnnnnnnnnnnnnnnnnnnnnnnnnnnnnnnnnnnnnnnnnnnnnnnnnnnnnnnnnnnnnnnnnnnnnnnnnnnnnnnnnnnnntaggtatgaggctgatgccaggtaagtttttattatatttagaaaaaaaatgtaactggaaataaaggtaagtcatttaaaatgaatgagagtttttaaacccctataattctttaatggcagcatttgggtccactgcccaagccacttttaacccaaccaagatgctggaaagcagagcacacagttgtgcccaccaagcccaggagggcgatggaccccagggctcctcgactacgcttgctgggttctcccgtgtaatagccataagcataaagaactcgtccaacaatccaggccaagcccaggccagaagctatacgcgggtggtaaacacctccaacagctagaaaaaataagaagggaggatacacttccaacgtgttctggtgggctcgctgaatgcagttgaagatgtgcccattttcagggtccgtgctgtacatgataggatactccactttgtacttcttgcgggccttggaaacattgatggctaggtgggccaccattataaagctggcagcaccagttagaagcacaaaaccatattccttagagaggacagccatcttgcgtctggatcaccttcgaacagccctcgtgccgattcaccacccggcctcgtacctagcggtatggtgtgagtcggtgtggt

SEQ ID NO: 127275 - DNA, 1205 bp, Homo Sapiens
  misc_feature (52)..(62): n is a, c, g, or t
  misc_feature (65)..(87): n is a, c, g, or t
  misc_feature (130)..(142): n is a, c, g, or t
  misc_feature (159)..(371): n is a, c, g, or t
  misc_feature (387)..(554): n is a, c, g, or t
ggccaaaagcgccgccggggggtttataccccccggggggatacgggttttnnnnnnnnnnngtnnnnnnnnnnnnnnnnnnnnnnnaaagttttttagaaatttcccccctctttctaaaaagtggccnnnnnnnnnnnnnatttttaattgagcagnnnnnnnnnnnnnnnnnnnnnnnnnnnnnnnnnnnnnnnnnnnnnnnnnnnnnnnnnnnnnnnnnnnnnnnnnnnnnnnnnnnnnnnnnnnnnnnnnnnnnnnnnnnnnnnnnnnnnnnnnnnnnnnnnnnnnnnnnnnnnnnnnnnnnnnnnnnnnnnnnnnnnnnnnnnnnnnnnnnnnnnnnnnnnnnnnnnnnnnnnnnnnnnnnnnnnggggggggcccaaagnnnnnnnnnnnnnnnnnnnnnnnnnnnnnnnnnnnnnnnnnnnnnnnnnnnnnnnnnnnnnnnnnnnnnnnnnnnnnnnnnnnnnnnnnnnnnnnnnnnnnnnnnnnnnnnnnnnnnnnnnnnnnnnnnnnnnnnnnnnnnnnnnnnnnnnnnnnnnnnnnnnnnnnnaggtatgaggctgatgccaggtaagtttttattatatttagaaaaaaaatgtaaatggaaataaaggtaagtcatttaaaatgaatgagagtttttaaacccctataattctttaatggcagcatttgggtccactgcccaagccacttttaacccaaccaagatgctggaaagcagagcacacagttgtgcccaccaagcccaggagggcgatggaccccagggctcctcgactacgcttgctgggttctcccgtgtaatagccataagcataaagaactcgtccaacaatccaggccaagcccaggccagaagctatacgcgggtggtaaacacctccaacagctagaaaaaataagaagggaggatacacttccaacgtgttctggtgggctcgctgaatgcagttgaagatgtgcccattttcagggtccgtgctgtacatgataggatactccactttgtacttcttgcgggccttggaaacattgatggctaggtgggccaccattataaagctggcagcaccagttagaagcacaaaaccatattccttagagaggacagccatcttgcgtctggatcaccttcgaacagctggagcagaacaaaactgcgcagcgcggtgtgggtgcggcgccctcgcctccc

SEQ ID NO: 127276 - DNA, 977 bp, Homo Sapiens
  misc_feature (773)..(773): n is a, c, g, or t
  misc_feature (916)..(916): n is a, c, g, or t
  misc_feature (936)..(936): n is a, c, g, or t
tttttatagaaaatgggaaatgtatgatttttttaataaaacaattctgcttcagtgcaaatatgtagtccaaaacaacaaaaaaagaaaatgtcttatgtgacttagcacgaacagtttccacagcctttcacactattgacaatttcttcttgtagtttctttctttcctcctctttggatatattttctttctttgcttcccatttggggttatcatggttctgcacacggctgctctgtgtatgccacatttctgaatagatactatgagggttagcaagcaaaccatggtgggtaccacgttcggctaccttaccctgatccaagacaatgatttcatctgcatcaaccactgttgacaatctgtgtgcaatgaaaatagaagttctgtgtttgaccacatccttcatggcaccaagaatagtctcttcagtaatcgaatctaacgatgaagtagcttcatcatagagtatgactggggggtccttcaaaatggctcttgcaattgctactctttgcttttctcctcctgaaagcttgagtcctcgttcccctacttgggtgtcatatccatgtggcattcgaagaattgcatcatgaagtccagctaattttgccactgcatacacttcctcaggtgaagcactgatgtttccatataagaggttgtaataaatagtattatggaagaggacagcatcctgaggtaccactcccactgccctccgaaggctttccaggctcacatcttgtatattttgaccagcaangataaatgctacccttttgagggtcatagaagcgaataatagctcactattgtgcttttcctgaccactactcctacatgggcactttcttcctgcaggggactcaaggatatccactaaggacttctggcctcatgtatcanatgcaatatcaaggcaggtnactgtcgtgggtgatcccgtgcgaatctgggccgagggcaa

SEQ ID NO: 127277 - DNA, 1326 bp, Homo Sapiens
  misc_feature (256)..(276): n is a, c, g, or t
  misc_feature (350)..(364): n is a, c, g, or t
  misc_feature (513)..(522): n is a, c, g, or t
  misc_feature (1219)..(1253): n is a, c, g, or t
  misc_feature (1272)..(1272): n is a, c, g, or t
ccaatatttaactgatatttattttacttgaggatgatgtaaatttccaaaaagcatgactatgagacgataaaatgtccatccttatatattttcgtatgccaactagtagagtcctaaaaaattagcatttacaaaatacttggtaaaaatagcttttaaaagttgtcccaagagatacataaaatcaaccccaatttttcatgacaattcattctccctcgttatctacagattcagttttctgtgcctgtgnnnnnnnnnnnnnnnnnnnnncatatagttactactgaaactactataagcaaaggaaattccacccaccaacacacacagttttgaacatttgnnnnnnnnnnnnnnnccagctttactgcaaaacctatttcaactctgagtgaagaagacaaggcaggaatatattacacaaacactttgtttcatttattgctttctgcttttcaaaccaccacagaagccttacctgcaagctcccactcttcataatgattnnnnnnnnnncccaccacactactatctgattctagtcactgcaaacatgcagaattttctactgtacccttaactctcactgtttcaatctgcccctttactgacagtgtgctgggtggggtgcctctggaggttgagacattaacagttgagcgagagatgtggatctgcaataacattacaggcaataaaaagagacattaagaacgtgctatcaccggctgaaggattgagaaatttctttaaagacactgattcaatcagtgggaggtatttatggaaagtacctcttcagctttagtttcaccattttcagatggtgcagtaccttcctttccagcttcctgcttttcctccttcttccctttagcacctctgctaatctttgctccaggttctttcttagcagatgtttttcttggtttgggttcaggttttggtggagcaggtttcgctgacaatctggcagaccgtcttgtgggctcctgtttagttactttggatccatctttgccctctgtattctctggagactttctcttcggcataatgactatgtcggtgaagcaaaaagtaaagcaacggactggaactgctggcgccgccgctggatgctgcctctgccgctgcagctgctcacgcgcagggcacgacccccggccgtaatggccgaattcccgggcatatgtccggtaccgtcgactgnnnnnnnnnnnnnnnnnnnnnnnnnnnnnnnnnnncggccgcttcctcgctcanctactcgctgcgctcgtcgttcggctaaacgagctagcgccctatagtgattat

SEQ ID NO: 127278 - DNA, 893 bp, Homo Sapiens
tttctgcagacaagtaaaccttttattttaaaccacaaatagtcagcaggtggccacaactatccatgtttcattaaaatcacataaaacctaggtacaaaagcaccactgattattgctctagaaaaactgcatgaaaaattcaaatatgcacagtaaaaacaccacagtatgcacaggactaaattttaaagcaagtgcatggaatgctgaatcaatcttacacacagcttccaatatttaactgatatttattttacttgaggatgatgtaaatttccaaaaagcatgactatgagacgataaaatgtccatccttatatattttcgtatgccaactagtagagtcctaaaaaattagcatttacaaaatacttggtaaaaatagcttttaaaagttgtcccaagagatacataaaatcaaccccaatttttcatgacaattcattctccctcgttatctacagattcagttttctgtgcctcttcagctttagtttcaccattttcagatggtgcagtaccttcctttccagcttcctgcttttcctccttcttccctttagcacctctgctaatctttgctccaggttctttcttagcagatgtttttcttggtttgggttcaggttttggtggagcaggtttcgctgacaatctggcagaccgtcttgtgggctcctgtttagttactttggatccatctttgccctctgtattctctggagactttctcttcggcataatgactatgtcggtgaagcaaaaagtaaagcaacggactggaactgctggcgccgccgctggatgctgcctctgccgctgcagctgctcacgcgcagggcacgacgtagcccggcctcttcgacctgcacctccgcggctccctcccc

SEQ ID NO: 127279 - DNA, 881 bp, Homo Sapiens
  misc_feature (55)..(55): n is a, c, g, or t
tttgggcagacaagtaaacctttttattttaaaccacaaatagtccagcaggtgncccacaactatccatgtttcattaaaatcacataaaacctaggtacaaaagcaccactgattattgctctagaaaaactgcatgaaaaattcaaatatgcacagtaaaaacaccacagtatgcacaggactaaattttaaagcaagtgcatggaatgctgaatcaatcttacacacagcttccaatatttaactgatatttattttacttgaggatgatgtaaatttccaaaaagcatgactatgagacgataaaatgtccatccttatatattttcgtatgccaactagtagagtcctaaaaaattagcatttacaaaatacttggtaaaaatagcttttaaaagttgtcccaagagatacataaaatcaaccccaatttttcatgacaattcattctccctcgttatctacagattcagttttctgtgccttcctttccagcttcctgcttttcctccttcttccctttagcacctctgctaatctttgctccaggttctttcttagcagatgtttttcttggtttgggttcaggttttggtggagcaggtttcgctgacaatctggcagaccgtcttgtgggctcctgtttagttactttggatccatctttgccctctgtattctctggagactttctcttcggcataatgactatgtcggtgaagcaaaaagtaaagcaacggactggaactgctggcgccgccgctggatgctgcctctgccgctgcagctgctcacgcgcagggcacgacgtagcccggcctcttcgacctgcacccctcgtgccgaattcgccacccaggcctcgtacctagccttaa

SEQ ID NO: 127280 - DNA, 744 bp, Homo Sapiens
  misc_feature (43)..(51): n is a, c, g, or t
  misc_feature (701)..(701): n is a, c, g, or t
tttatactttaagacgtcttgctttccttaagaaagcaacacnnnnnnnnnatttatttataaaggctaaccatatccatttgtcaatattttcggctttaaggaaaatagtttaaaaaacataaaaaggtaaatacactcaagagtaactgctattaaacagttctgaacaggcagaaaatgtagactttcctttaacagaaaatgttaaatctgtaatagcagcataatttatatatagaaaaaagctggttttgaaaacccagatttatacccaaaacattttttttctgtacaactgcgtttacactgggaaataagtttcttcacattatgttcattcccatcaggtacaggtgtgagcttgagtttgatcagccagccctgagcgcaagctcagcgctcagcacaatcttcaatccaacaccatggcagaaagcgcatttagatctttcatgtatgggtgggccaccaagatctggtctattttcagtctttgctctgagtcagggaagatcttcagaagggcttccctcagctcgttggtttctgcagaagatctctgagctggcatgggcaggttctgctggagactggggagggctggcagcagtgggaagtggggctgctgagggagccagtggcttgaaggggctccctgaatccgggtcggaggctggtggctggtgctggctgcctgngtgccagggactctgaagctggggtcaaacatgcccacatttg

SEQ ID NO: 127281 - DNA, 877 bp, Homo Sapiens
  misc_feature (153)..(182): n is a, c, g, or t
  misc_feature (760)..(794): n is a, c, g, or t
  misc_feature (798)..(836): n is a, c, g, or t
attctttaagtttttcaaaaggtgtagggagctctttttcacaggatacacttctttggtgtagggggcctgtaagttttatcagatgttttacattttcatgctttaatctttgcgggtagtctaaataaaataaatacacagtgttcaggnnnnnnnnnnnnnnnnnnnnnnnnnnnnnngtgttccacatgaccacagcctctgcacttgtgcctctgatccatatgacaccaagaccaactatgcttttcatatgatttctccaattgggtcctgtgacctttcacagaattgttgaacatttcctatgagatctgtggttactgcagagctccaatctgctttagccgcgtcagcagttccccactctgttgcaaagagactagatcactgcatccgcctatacaatctttaccaataaagactcgaggcaccgttcttgctcccgtgagctgttgcaaataatcttgaatctcgttagtgtggttggtggctgtgatatcgacaaattccagaagcccttgtttgatgggcaattgactgaggatctcttgggccctcctgcagtacgggcaggtgggcttgatgaacacaaccaccttcccaggctggattttgcagttcacaaactcttgagccatgccgatgggctgcggtctccccgggaagaatcctcagttgcaggtattgcttggggtattgagcccccggccgtaatggccgaattcccgggcatatgtccggtaccgtcgactgnnnnnnnnnnnnnnnnnnnnnnnnnnnnnnnnnnncggnnnnnnnnnnnnnnnnnnnnnnnnnnnnnnnnnnnnnnntctgagaccgacttagcgccctatatgatctatacgttctt

SEQ ID NO: 127282 - DNA, 837 bp, Homo Sapiens
tttttcatctataggttttttttattagaaaagaaattaagtgttgtcactagagattgaaggaaattaacaatcttacaattctagaacaggcaaacttcatgataagggattcttaagttttcaaagtgtaggagctctttcacagatacactcttggtgtagggggctgtaagttttatcagatgttttacatttcatgctttaatctttgctggtagtctaaataaaataaatacacagtgttcaggattatctggatagccatcttaaataagcagagtgttccgcatgaccacagcctctgcacttgtgcctctgatccatatgacaccaagaccaactatgcttttcatatgatttctccaattgggtcctgtgacctttcacagaattgttgaacatttcctatgagatctgtggttactgcagagctccaatctgctttagccgcgtcagcagttccccactctgttgcaaagagactagatcactgcatccgcctatacaatctttaccaataaagactcgaggcaccgttcttgctcccgtgagctgttgcaaataatcttgaatctcgttagtgtggttggtggctgtgatatcgacaaattccagaagcccttgtttgatgggcaattgactgaggatctcttgggccctcctgcagtacgggcaggtgggcttgatgaacacaaccaccttcccaggctggattttgcagttcacaaactcttgagccatgccgatgggctgcggtctccccgggaagaatcctcagttgcaggtattgcatcggacgcgtgggtcgacgatatctcggaaaattccggaccc

SEQ ID NO: 127283 - DNA, 1961 bp, Homo Sapiens
  misc_feature (60)..(95): n is a, c, g, or t
tataggggctagcttgatgagcgaacgacgagcgcaggaggtagtgagcgaggaagcggnnnnnnnnnnnnnnnnnnnnnnnnnnnnnnnnnnnncagtcgacggtaccggacatatgcccgggaattcggccattacggtcgggggcagaacgatcgccgcggccggaagagttggcgctcggggcggactccttggaactggcttagcgcacccatcccaccttcccgcaccctgggaccggtccaacgagcgctcctccaagcggagccttggagggcacggccggcaccattacctccaacgagtggagctctcccacctcccctgaggggagcaccgcctctgggggcagtcaggcactggacaagcccatcgacaatgacgcagagggcgtgtggagcccggatattgagcagagtttccaggaggccctcgccatctacccgccctgtggcaggcgcaaaatcatcctgtcggacgagggcaagatgtatggtcggaacgagctgattgcccgctacatcaagctccggacagggaagacccgcaccaggaagcaggtctccagccacatccaggtgctggctcgtcgcaaagctcgcgagatccaggccaagctaaaggaccaggcagctaaggacaaggccctgcagagcatggctgccatgtcgtctgcacagatcatctccgccacggccttccacagtagcatggtcctcgcccggggcccggccgcccagcagtctcagggttttggcaaggagctttgccaggccaagccggaacgtcccatgatgtgaagcctttctctcagcaaacctatgctgtccagcctccgctgcctctgccagggtttgagtctcctgcagggcccgccccatcgccctctgcgcccccggcacccccatggcagggccgcagcgtggccagctccaagctctggatgttggagttctctgccttcctggagcagcagcaggacccggacacgtacaacaagcacctgttcgtgcacattggccagtccagcccaagctacagcgacccctacctcgaagccgtggacatccgccaaatctatgacaaattcccggagaaaaagggtggactcaaggatctcttcgaacggggaccctccaatgccttttttcttgtgaagttctgggcagacctcaacaccaacatcgaggatgaaggcagctccttctatggggtctccagccagtatgagagccccgagaacatgatcatcacctgctccacgaaggtctgctctttcggcaagcaggtggtggagaaagttgagacagagtatgctcgctatgagaatggacactactcttaccgcatccaccggtccccgctctgtgagtacatgatcaacttcatccacaagctcaagcacctccctgagaagtacatgatgaacagcgtgctggagaacttcaccatcctgcaggtggtcaccaacagagacacacaggagaaccttgctgtgcattgccttatgtctttgcaggtgtcagccagtgagcacggggctcagcaccacatctacatgctggtgaaagaatgaggagactcggggagccgggaggggggcaagagacgtgtgtgccgggaacacggggacgtggggaggggacctgcaggggcagcctcttgaagtgccaggagagctgaggagaacatgggacctacccagggacaatgggctgacccgtagggggccaaacccaagtaaccgcgaagtgtcggtcacaacacaaacaaaccgcggcctatgcgcgggcgcacaacggtgtgaaagccagggacacggtccgccccctcgtaacatgcaacgccgcccgaagggggaaacaaaggtgcgcgtagacacagcacagagcagggaggcagagaaacgcaaaagacgaacgacgaggagaaagagcgcgacgacaacacaaccgcga

SEQ ID NO: 127284 - DNA, 663 bp, Homo Sapiens
gcggcccagtgccctggttttagcctctgcccaaggtcccctctgtaaggcacagggtcctctttcaataaggaggaaaaggacagagcactgaatcaaattccttccctggtccccaaggaaagaagaaaacttttaaggtatctagtctggagcacagaaacttagatcttcttggttaaatattcatctttgttccttcataatgtgtagataaaggctgttcccctcttctcctcatcctaactccctaaaagcactgcaagtcttgcttatttcctagaacttttgctttcccttaacattctttttcttagttggaaagttgtatagcagaaaactttttatgtgggcctgagaagactcctaaagactttccttcccctttgcatttcagacagaaaaggatatcatcttgcgggaggacttagaggaactgcaggcccgctatcccaatcgctttaagctctggttcactctggatcatcccccaaaagattgggcctacagcaagggctttgtgactgccgacatgatccgggaacacctgcccgctccaggggatgatgtgctggtactgctttgtgggccacccccaatggtgcagctggcctgccatcccaacttggacaaactgggctactcaccctcgtgccgaattct

SEQ ID NO: 127285 - DNA, 1680 bp, Homo Sapiens
tttcaatatcacacaggggcctcagccccatttatttgcacagccaggggttcctgccacaaacagcagttttcgattatcagtagctgtttccctctagcctgggcaggggctgagagagacacacacagaaatatgatatttcagactcctttgagatctgaagaaatcatttcctcctttcttgccatctccataagaccacctctggaagtatgctatgctcaacttatactcacacatacagatttgctcataggttgaacagtgaagtttaagtaaaacccattgcacagactgttcctttcatcacagacacaaagaaggtgagagtaagatgctatcaaggaactagccaatcttggaccaagcgtacatgctcccttccttcttactccatggaagagactgctccatgggcctctcctggacctgttgccacggggagatttaggaggccatccaaggagtgactgagccttggccctcttccatggctacaggaatattgttcctgcaggtactatccagatttcagctctagatgtaactgaaaaaacctgaaactctgaggaaaggaatctaaggcttatagtgcttgagtactgatggggaacaactgcagcgaacagcaccagggaagctggaggatgctcagtaggtgaatcgcatcttttgtgagtagcccagtttgtccaagttgggatggcaggccagctgcaccattgggggtggcccacaaagcagtaccagcacatcatcccctggagcgggcaggtgttcccggatcatgtcggcagtcacaaagcccttgctgtaggcccaatcttttgggggatgatccagagtgaaccagagcttaaagcgattgggatagcgggcctgcagttcctctaagtcctcccgcaagatgatatccttttctgtctggttggcaaaaagcagaaagcactgggttggatcttcagggactttcaggatggcccggatcagctgtagcattggggtgattcctgtcccgccggcaatcattcccagtttcttcgccactcggggttctggtggagatttcttgttgggctgaatgttaaaatgcccttttccagtgtaagtgagcaacccgcttggcccccgaaactccaccacatccccaaccttcaggctatccaggtactgagacatcttccctccctcaggaaatttggggtgcacacccttcaggtagaccttgatgacaagatccacatagccttgatcctcatcactggtgacaggagtgtatggcctgatgaccaggctgccatcaattcgggtggagaggtagatatgtttgcccacaggcagccccagagtgtggtgggcggtgggcagggcaaagcggaacctcttggtgttgtggctcacagtcgtcttgtctagcagtcgtagcaggtacttttcattggggtccaggagagtgacctgaggccggcgggacctccgaaccaagtaggagcccacagccaggccgagcagagtgaccagccccacccccagggaggccagcaggacggggctcgtctggatccccatgacggagcgccttttcctccaccacctgacaagccgaccgacgcgtgggtcgacgatatcccgggaaatccgaccgtaccagcctgctttttttaacactggttctat

SEQ ID NO: 127286 - DNA, 738 bp, Homo Sapiens
gagtaatttatttaaatttgtgaatctagaaaatgtgtgttatatatttatatacagggaataacaaaagttaagtgtttaattggaaagaaaactgtgactgataatatgttgtaattaccgttttataatattactttccattgcaatgacttaaaatgaagaaataagaataggaataattatgctaacaaattcactttgttttctgtgccactaaatttctttaggatcaagaactctttcatattcagacattaaacaatattcaaataattttataaaatagacatacaagtttactcatattaaaaaaacaagttgattttcatttcctgtagaaaaaccaaaacagagcagatgtgcaagcaaagataaatgaaaacactggctgtttctcaataaaggtgatagtctgtttttcatactaacttatgtacgatataataaatagccactaaatgtagtaacagggggaaacttggctggaattgttccttttgcaagtcgtaaccagacttcctgcccataatttaattctaataaggcatccccagttaaaaccctatcacagtgtatttcactgttaatattttcagactcaaatgcaagcttgtctattccatcaaccactaaaaatccagaaatatgagcactaaatgactcgatggtgtacttgaaaacatatactccaagatacggaattctaaattttccagttcctggggtatatgaagc

SEQ ID NO: 127287 - DNA, 1015 bp, Homo Sapiens
  misc_feature (970)..(970): n is a, c, g, or t
aatattaaaaatactgatttttaatattgaaaataaaagcatttaatatctcttaaagggcatccacatctgctttatccctagcggaagagtgagggggcttcacacgtgcactcacactgtggagagagttggatttcccagacccctgagggcacctgtcagggtcatccccattggtgctgcttgaggctactggggactgtggcactggacgtggctggagcaggtggtgtcacctgagtacattctttgctagcagacagtggatgaggccccttcctcttcctcaccaagcctggggctgtgccagcctgtcttaggccagggccttgcagaaggcgctccaggcgtggaagcagcgggtaaaggcgtgctgctcattgcccttgcggaccaggcgcagccggcgcggccgctcatgttccttggaccgcatgtgctggatatatacctggcaaggggacagcgagccttgggtgatgaccctgccctgcccacaggcccacctcggccctccctccacccagattacctggcaggccttcaggctcagcttgatctccacctggctagtctgggtccccacccacatgtagacctgtgggggcagcaggggagatacggttgcatgggtgcctgggaacagccccttgctcctggcccgagaattcccatttgtaagtaagtctatgggcgcctccttggatgggcagggctagtggcaacatcacacctcttggccattgtctagcaacatgatgtcatcatctgccaggtcatcttggcaaaagtcggagcatttctcagtcactgcaaagtagcccttctcgttggagcacctgggaatcaagggtcaaggtgaggccagaggtcataagcagcagtgccaggactggggggagggtcagggccctggcctcaccggaagagacgtgtgtgtttcatgtactcggcatcgtcatcatangtgcttctgtgccccaatgcccacccagaagaagttctcaggctc

SEQ ID NO: 127288 - DNA, 2599 bp, Homo Sapiens
  misc_feature (107)..(203): n is a, c, g, or t
  misc_feature (227)..(269): n is a, c, g, or t
  misc_feature (277)..(391): n is a, c, g, or t
  misc_feature (393)..(393): n is a, c, g, or t
  misc_feature (395)..(396): n is a, c, g, or t
  misc_feature (398)..(402): n is a, c, g, or t
  misc_feature (404)..(422): n is a, c, g, or t
acctctccctgtggtgaatgtaaaccccccaataaagagccctctccacaaaaatccccccttctgggattttttttaaaaaaaccccctgtgtgtttccccccgcnnnnnnnnnnnnnnnnnnnnnnnnnnnnnnnnnnnnnnnnnnnnnnnnnnnnnnnnnnnnnnnnnnnnnnnnnnnnnnnnnnnnnnnnnnnnnnnnncccttttggggcgccgcggccccnnnnnnnnnnnnnnnnnnnnnnnnnnnnnnnnnnnnnnnnnnncgacaaannnnnnnnnnnnnnnnnnnnnnnnnnnnnnnnnnnnnnnnnnnnnnnnnnnnnnnnnnnnnnnnnnnnnnnnnnnnnnnnnnnnnnnnnnnnnnnnnnnnnnnnnnnnnnnnnnntntnntnnnnntnnnnnnnnnnnnnnnnnnnattttgaaaaataaaagcatttaatatctcttaaagggcatccacatctgctttatccctagcggaagagtgagggggcttcacacgtgcactcacactgtggagagagttggatttcccagacccctgagggcacctgtcagggtcatccccattggtgctgcttgaggctactggggactgtggcactggacgtggctggagcaggtggtgtcacctgagtacattctttgctagcagacagtggatgaggccccttcctcttcctcaccaagcctggggctgtgccagcctgtcttaggccagggccttgcagaaggcgctccaggcgtggaagcagcgggtaaaggcgtgctgctcattgcccttgcggaccaggcgcagccggcgcggccgctcatgttccttggaccgcatgtgctggatatatacctggcaggccttcaggctcagcttgatctccacctggctagtctgggtccccacccacatgtagacctcttggccattgtctagcaacatgatgtcatcatctgccaggtcatcttggcaaaagtcggagcatttctcagtcactgcaaagtagcccttctcgttggagcaccggaagagacgtgtgtgtttcatgtactcggcatcgtcatcatagggcttctgtgccccaatgcccacccagaagaagttctcaggctcctcaccttcgttgataacctgcttgctgtaggaggtgtcaaacatggtgttcaggatgtcttctgccaacttggcttcgtcagggtctgatgcccggcccacccaggcatacacgatgccctggttgtcctcactctcaaagggaaccttgaggatgaagcagaactcggagttgaggaggctggagtcggtgttgatctggatgcaccgggtgcagagggcgctgccgttggtgcggatctggtagaggctgggctgttgggcgccctggaccgccttcctcttgccccggtggatgatgaacttcctcttgaaatgggacaggaacttggggttctcctgctgctgcgtcatgcgtaccacctccagcttcccagggaagaggctctcgaacttcttttgcaggctgaaggtgaaggtgagccagccccatattggaggcttcacggccctgccagaagtacacgatgcactggaagtcctcctctggctgcttctcctctgcgtcaggcggttgcttcctcgccttctttgccctcggccttctcctccttgtcttccttctttgtcctcctcgtcgtactccacaggcacccagtacctgcagaggaagacgtagcagtcctgcgtgtagaagtggccaaactcctcttccggcagccgtgcaaacttcttgccctccagcacgaaaccctccatgccgtctaggtcttcgttccactcctccatcagctgctccgcctcggccagcgacatgggcggctgccgcggcaggaaaagcgcagtgaggtcagccttcatctggtctttcttctcggcgtcgcgtttcaccttcccggagagacccgggctctgcagcacggcctccgcattgcgtgtgtagtccaccgtcaacacatcgtcccaattcttgaacttggccttgaacacctgcgcctcggtgccctcgaggctgcggctgaccgtggcatggcgtggccggtgcagcatcccgcacagctcctgacccagcttgagggcggcagcgcgcaccaggcgcggggacttgcggccgagccagatgaacacgtcggaccaacagtccagaatgtacacgcagcgcgtgtccagcagactctgcagcagccgcattcttggcatcagctccaccttgggacgctgcttatgttccacggagagcttgtagttgatctgtggcagctccaggtagcccaagcccaggcccaccttgtacagcttgggctgcggcggccagaagtcttcaggcacgtgcttcttgatctcagagggctccccacccagtgcctcccagaactctgggagctcctggccctgcaccagcagtgtgatctcagccttccctttccgctcattcttgttaattttctctgcaaagagcctggccttggtggtgctgctcaagtgtggcctgggccccccgccataccctcgtgccgaattcgccacccaggcctcgctacctt

SEQ ID NO: 127289 - DNA, 2004 bp, Homo Sapiens
  misc_feature (776)..(776): n is a, c, g, or t
gctttccccggggaggaggaccccggggttttctgaaagcaacggcctttccggcattggcgtggtgtagtccccaccgtcaaacacattcgtccacaattcttgaacttggccttgaacacctgcgccttcggtgccttcgaggctgcggctgaccgtggcatggcgtggccggtgcagcatcccgcacagctcctgacccagcttgagggcggcagcgcgcaccaggcgcggggacttgcggccgagccagatgaacacgtcggaccaacagtccagaatgtacacgcagcgcgtgtccagcagactctgcagcagccgcattcttggcatcagctccaccttgggacgctgcttatgttccacggagagcttgtagttgatctgtggcagctccaggtagcccaagcccaggcccaccttgtacagcttgggctgcggcggccagaagtcttcaggcacgtgcttcttgatctcagagggctccccacccagtgcctcccagaactctgggagctcctggccctgcaccagcagtgtgatctcagccttccctttccgctcattcttgttaattttctctgcaaagagcctggccttggtggtgctgctcagtgtggcctgggccccccgccatacgtagatgtctagccctcggtccagcaggaaaacaaaccttgggtccagagaggtccccttgaggggcacaggctccaacttgatgttctttttcccatacacacgatacatcctggtgacatagtgtgtgtcttccnacagtgtagaagccactggctgttccaccctcaatgtaggagatgtcgttgtcaaacacctgcaggaactcctcgctctcatcgcccatctcctcccggacagtgcggcacctcagcacccaggtagttgcgcaagttgacagcgtggatggcagagcaagctttctgtgtcgagtgtggcctccccgccaatccagtagtagatctcccagttgagggagccgctgtcatccagaaaggtcttgagcacaatgtagcagtcagcctcgtagaacttgccgtggaaggcttcctccaccagcacaggcacgaagttctctatctgccagatggtcagtccgggcagctggcccacgtcctccgtgaagaactcggagtagtcaaggcggggcttctccaggccctggtcccaacgccgcaccttcccgctgggggcccgggcatcttgcgctctcctcctgctttttgttcttcctcctgggcaacatctgacaatgcccttcagcacctgcttggcctggtcatcctgggctgaatccttgcgcctccgcagtcgcatcttgcgagccatagggtcccttgggcccactccctgcagctgcagctgcagccacggtagcaggagaggcacccgctagccgcagctggttctgcagcgagaagtcgatgttgtaccactcaggccggcacggtctgcgggcttgggcggcatgaccaggttggggttctcccgcacatccaggacctcgatctccgtcaggaaatggatggcttctgggagggtcaccaggtggttcttgttcaggacaagtttcctcagctttgggcacctgcagagactttcagggaccagctccaggttgttgttggcagccatgaactcttccaggttggtgagcttgccaatgcctgagggcagcccgtcaaagtccagcttgttggaattcaggtacagcttcttcagcttgctcagcttgcaaatggctgactggagggggaacgggcaggggtgggaggtcagggccaggctcacggccttcctcccatccccctactgagggcctcagacgcacgggcagtgaggtgagctgatttcgggacaggttcagagtttccacgtgcacccactggtctatgcacagggacagctccgtgatctggttgctgctgaggttgaggcggcgcaggctggggagggtgtacagacactcgggcacccgtgtcaggt

SEQ ID NO: 127290 - DNA, 656 bp, Homo Sapiens
  misc_feature (46)..(46): n is a, c, g, or t
ccagcctcctcaactcgagtttctgcttcatcctcaaggttccctntgagagtgaggacaaccagggcatcgtgtatgctagggtgggccgggcatcagaccctgacgaagccaagttggcagaagacatcctgaacaccatgtttgacacctcctacagcaagcaggtcaggaggcgggcgggcaggcgggcacacacagaggagccagggcaggcaggggccctgggctggactggcctttcccgcaggttatcaacgaaggtgaggagcctgagaacttcttctgggtgggcattggggcacagaagccctatgatgacgatgccgagtacatgaaacacacacgtctcttccggtgaggccagggccctgaccctcccctcagtcctggcactgctgcttatgacctctggcctcaccttgacccttgattcccaggtgctccaacgagaagggctactttgcagtgactgagaaatgctccgacttttgccaagatgacctggcagatgatgacatcatgttgctagacaatggccaagaggtctacatgtgggtggggacccagactagccaggtggagatcaagctgagcctgaaggcctgccaggtatatatccagcacatgcggtccaaggaacatgagcggccgca

SEQ ID NO: 127291 - DNA, 1271 bp, Homo Sapiens
gtttgggtgagtttatttacatctaaggccttataaaggcgtaaaaagtctcattttatggcacatttaacaaaatgtattgattaaagctggaattgtcccagaaaactcaggatccctagtcacactgggctctctgttcagcagtcctgtagggtgggtcagtcagaacccaaagcttcagcttgcctcagaagcatccaagctcagtccatctgaaccgcatctagttcatccaagaagcgccggcacttccccatcagtactttgatggcttcactcaccagcacatctggtggcaacacccccgttgactcaacagagaagatataatgatctcgaacccgggcaagcctcacaaccttctttagcttctcattccggaagatttctctgctgaaggtatccagccgggggttggcaactctggccacctttttaccttggacttcctgcacctcaataacaccaggtgagaagcacctgctcaactcctcagctgcctccccttccacgggctcaagcagggtgatgtctggcaggagcctgtaactggctgttgccactggtgaaaacttggcatgatctttgccaatgcccttgacacagtgcatgagcaggtcaatttcttggccaggccgcagctgagcgatgaggatatcatcatgcactggtcggatagtgccctctggaaagagatcagcctggttccccagggggatccatgtcatatgcctggtatacactttgtggttcacgtacagttcgttggggtcagaggaatctttagcagcatgggggttccgagtgcatctgacctggagacgaaactgtagagtatctatctctgtgccttcttcatctccttggttccgatactcaaaaagacggggatcagcatgaatgggaatgagccccagacggtgagcaagaatctcatcctgaacaatggatgtattattgtacaccaggaccttctccacagccatagttggcacctcagctagcagaattcgtcgaaaagcattggcaatggctgcgtcaattcccaccatgtcaaactccagtgagttttcatccatgtgtactacatccacacggaaattcttctcgaagcggtcctggtcccaggcatcatcataaccggaatagttaccgggaaagtcagtagtatggacattgcgaaccccaaactcccccagaaccacgcggctccgcatttcctccaccgcctgagaagccgccatcttcaatctctccacgagactccc

SEQ ID NO: 127292 - DNA, 586 bp, Homo Sapiens
acatttaactgatatattttttatttattaatgtaggctaaacaagcagaagccatcagtaagagacaagaggaaagaaacaaagcatttattccacctaaggaaaaaccaattgtgaaacctaaggaaggtaatgctttctatgatgtaaaagtctttattaattaggaaaagtaaacccataataaatttgtctgaatctttttaagaaacagttgtatcttttcatcagttctcttagcatttcattaattactaatcctaaggacaagggatggctgagataatttataatttagaggcagctaatgcctatttcagtgcaaactggattgacagtcctctcctgacctctggtctgtgcttggaaaagactctttgttgtgaaagatacaaacccagggcagccagtgcatcttctgtagaaatgcaagaagatccctgagctctgctgtcatgcctctcaaagaggaattatcagaagttgtactttttcttctctttatgtgatcttggcttagagtttggcttctatatcggtaacatggatttctcatcaccttagactaaaggatgctgacaggtc

SEQ ID NO: 127293 - DNA, 1316 bp, Homo Sapiens
  misc_feature (1192)..(1226): n is a, c, g, or t
  misc_feature (1230)..(1268): n is a, c, g, or t
cttttcatctgcctccatcttaagtgcaatttcttcagctgtaagagctcccagtttcttattctttgctttcttaaccttttccttgatgctggccacatcaattttagtttcagtagaagcttccttaggtttcacaattggtttttccttaggtggaataaatgctttgtttctttcctcttgtctcttactgatggcttctgcttgtttagcctttattgcttccattttctgccgcttcttctgatttgccttcaaaaagtattcaccactagccaattctttatcgatctgactttctggttgtggtggtgggaatggcgtatattctttcttaacagtttttttctttggttccttgcgtttattcacatttttgtgtttgaactgtggcaaaaatctctcccaactttgtgatcgtaattcagaatcttttgccaactctctcttaatcattaagcttttaatgttataaattggatgaatattcttcatagtatcaaggactacttttctaacctcttttaagccactaaaaggtccaatggctgaaactgtgtttccctgaaccataatgtaacaattagttaagagttccaatgccttcaatgtagatcctttgggaccaataagccgttgtcttcgttttacaaatctctctttattccttactaaagaacctattttaatgatgtcacatgcaacatcatcctgaagaattcgtactgcctgttcaaatgaaacactccttgctaacagttttatcagatctctggccctaatgatgatatatggatcaaaagtcttctttgtagtacaaacagtcatgctgccttcgatcaggtccagggttgcattaacatgatgttcatttaaggctttctgcaccaatggccaacactctttcaagtaagcttccctgtattttgggaacaaagttgcgaaactgctctcctccaaaagtcctctgggattgtcctctttggaaaaagctggttccttccaaccatcaggaaccgtaaggagttctgattcatcttggttctccggcttcggcttctggttacgaaattcactttttccagcgcctttttctggccgctccagcgagggagacgccatttgcaagctgcttccccccggccgtaatggccgaattcccgggcatatgtccggtaccgtcgactgnnnnnnnnnnnnnnnnnnnnnnnnnnnnnnnnnnncggnnnnnnnnnnnnnnnnnnnnnnnnnnnnnnnnnnnnnnnactgagcagcgatgcgccatatgtggtagttagttttctggttggtgt

SEQ ID NO: 127294 - DNA, 752 bp, Homo Sapiens
  misc_feature (631)..(631): n is a, c, g, or t
  misc_feature (726)..(726): n is a, c, g, or t
ttttaagtttaaacactttaatcaactataagtcaataatcatatattatataaaaattctgattcatgcatcagattacataaattatacaattgtcacattatacaatgcttacatacttttgaatttgtacctgcaaaaatgtatacaagttatgagagcatttacttaagaagataagtgttatactcttcagttataaataatgcttctatctttcaaatacccgctaaatatatgcatttctagatctgcagcatttttttgtacctcaaaacacaaaccatctggaagcttcgaagactaacaggcccacatgtatcatgtattagacttcaactccactgtgagagtgcattttttggatggataaaaccaatgggatggaacctcaactctattttaatgcttgaagagcttctatacctcttattaaatatatcaggaaatggttcatatgcagattaattagctaaggtgctaccaattgcatattaaatacttccaatgattgcatctggattattaaagttctacatctgtgcaaatgggggctttccatgtgtgctgacagacccttctacataccatcatggcccagcagcactgtgatcctttcccttatttcanagggaccaagtgaatgagcatgcatcatacttcacttacacatacacacaagtgacacctaccacctacaagacatatgagtacatgaacatcanaaaagtttcagcttgatttacaatcc

SEQ ID NO: 127295 - DNA, 1340 bp, Homo Sapiens
  misc_feature (1100)..(1145): n is a, c, g, or t
  misc_feature (1199)..(1199): n is a, c, g, or t
  misc_feature (1283)..(1283): n is a, c, g, or t
  misc_feature (1306)..(1306): n is a, c, g, or t
ttttcagaagatttatttattctattttttcttttagctcctctctcgatcggaagatttttacagccaccctactgatctttagggatttgtaaactattacccaggaagaaggcccatggagctaaggcctcagaacaccaaagtctggactgtctgagggcacatgctaataacaggaggctggcaaagtggccagatcccatgcctttgcatgcatttgtctttacctcctgctgcctgggaacatccttccaggagcaatcgagtcaacagcaccacagacactgctattccgttgagaaaagttttatatggaaacacatactgatcatgaacacaataaacagggagggaagctcgggctcagccaggaaacctgccacaaggaagatgtttggaactatccaggagtagtgtcaaacactaacaccatatttacaagtctaatttggaacctggccctttttaagtgcaggaggaagttggaggagaagccatgcatgaagtaaaaaatacatatacacagacataaacacccacattttcacacttcttttgcccatttgttccacaaggaacaaatgagagaaagaagcccagcctctctccctggagtccgtatacttactacagatttgttagagaagccccagatggggcttggattcaaggagcagacttcactcttactggccccactcacgtgacaattcaccaagggaatgcttgggacacaagcatgaatgtccggaagaggcaagaaaatatatggctcacttaacttacacattacacataagaggcctcagtttctccaagtactttcacatttgatctttagcagacttctaacctgcagagacagagctcagccaagctgtgagacacagaggaaagcagcattttgatccagtgtgcactgggtcagtcacttcatccgagacagtcacacatgccagccccaggtacgtccctgggggcttgcagctgttttctttgtggagtggaaatttgggttttttccttcagtggattctccctgctgctgtcactgagctccacgctgctcgctctggacccgagacagctgctcggcnnnnnnnnnnnnnnnnnnnnnnnnnnnnnnnnnnnnnnnnnnnnnnaatttacgggtctgctgctgctggcttgtccccggctgctggctcgtcctcggncactggcttctcaacctgtgactctggagggatcagatactggacctcctctgtgctgacggtacttatctggctggagcactnctgaatgttcaggtgcttcacanatcagtccatcacaagatctgagctactctcggg

SEQ ID NO: 127296 - DNA, 783 bp, Homo Sapiens
aatttactgtttctgctgcctgcttggcttgtccccggctgctggctcgtcctcggcgcactgggcttctcaaccctgtgactctggaggaatcagatactggacctcctctgtgctgacggctactttatctggctggagccacctcttgaaatgttccaaggtgctctcatcagaatcaagtccatccacaaagaactctgaagctaacttctcctggaggaaccgatcccagcattccttcttggcttgggccagagttcgaagcactagtgccttggaagtccccttcctgatttaaccctttgattcttcttagcttcttctctagagatgctaaatacacttctgaatcctgcaagggagcccaaggctttacagctggctggacagcaaagtcagccacctccctctggccttcaccttcagggcaagaatccacaaaggagtctgagaatgcattgttggcaccatcttcttgttcaggatttggcagacaggaacaaatttcagcccagagatcctggccagatcttgtggctgtagagtcagcgctctcaaacattttcatttggaatctgagcccagggcagggcgtccagaaccacgcaggaaattccggcgtccagatcccaggcctcagtcgctcaggtctctagggctgtctggacgggatgaatcaggtcccaaggcctctatgtggtattccggggccgggccagagtgggagatccaaaacgctgggcaccccagcccctcctcacttaccgtaacagctgcccc

SEQ ID NO: 127297 - DNA, 827 bp, Homo Sapiens
  misc_feature (137)..(179): n is a, c, g, or t
ccgggcttccgctgcttgctttttggaggtggtgatcttgggtttttcctgcacgggggttctcccctctcgctgtctctcgtgttcacgcggtgcgctctgtgccccgcgacaggttctctgctgttcgtttgtcnnnnnnnnnnnnnnnnnnnnnnnnnnnnnnnnnnnnnnnnnnngtaatttactgttctgctgctgctggcttgtccccggctgctggctcgtcctcggccactggcttctcaacctgtgactctggaggaatcagatactggacctcctctgtgctgacggctactttatctggctggagccacctcttgaaatgttccaaggtgctctcatcagaatcaagtccatccacaaagaactctgaagctaacttctcctggaggaaccgatcccagcattccttcttggcttgggccagagttcgaagcatgtccttggaagtcacttcctgatttaaacctttgattcttcttagcttcttctctagagatgctaaatacacttctgaatcctgcaagggagcccaaggctttacagctggctggacagcaaagtcagccacctccctctggccttcaccttcagggcaagaatccacaaaggagtctgagaatgcattgttggcaccatcttcttgttcaggatttggcagacaggaacaaatttcagcccagagatcctggccagatcttgtggctgtagagtcagcgctctcaaacattttcatttggaatctgagcgtaacagctgcccagtaaacgcttggctcagctctgtcgcctgtagcccggaggaaatcgggaggggcggag

SEQ ID NO: 127298 - DNA, 1869 bp, Homo Sapiens
  misc_feature (1205)..(1235): n is a, c, g, or t
  misc_feature (1376)..(1385): n is a, c, g, or t
  misc_feature (1693)..(1693): n is a, c, g, or t
  misc_feature (1703)..(1703): n is a, c, g, or t
  misc_feature (1715)..(1715): n is a, c, g, or t
  misc_feature (1734)..(1734): n is a, c, g, or t
  misc_feature (1736)..(1736): n is a, c, g, or t
  misc_feature (1743)..(1743): n is a, c, g, or t
  misc_feature (1750)..(1751): n is a, c, g, or t
  misc_feature (1770)..(1770): n is a, c, g, or t
atacattactcgatttttatgcttactttcttttacatttcaaccatataattaatttttccatgagacagggtaggacacataatcttcttggatacattactgtttattgtttcaagtggatggaatatataaatcccactgagtagtttagtgtggccttgtatcttttataaacaggttaaatggagactttacactgtaatctgtgtatttatctgtctaccataaattgtcttcgtgacaaatgcagaatttcttttattacttggctcaaattaactgttgatccttttcactgataatatacaagggtaaaaaagcaggaagcctttaaaattgaaaaaagaaataagatattttccactaaattactgaaaattgaaatttttatgttgactgttgatgactgaaaagccaatgttaagaatcaatatcatccaatataaaatagtacattgaattatttaataaacagaatattaagagcttgtatatgctgactgggaacagtggtggctttttaaattctcagaaagtttaaacattttataattagaagaaaccactggtgatgatgaagatggtccatctctgtagcagccattacagtgaaaatcttgacagaaccttttcactatcagaaagataattttactggtattagtggtaaaggtaaggagagaaaaaggagtgaggagataagtctgtattagttttaaaagtgagaaaaggtaataaaacaacatggaaaagccagaaatttcttcttctatatgtgccttgctacaaataaaccaaaaagaaagcaagatgggtattttaaaagccaatgtggggaaacatccaatgataatgcccattattttactttatacttaaattacaccagtagaaaagttatgcttattaatagtttaatgtatgaaggaaacatccagatttctgaatatgaaggtacatatctcacattaatttaagtctacataaagtagagcctctatactgacatattgaaatttactttctgcttagccttttctgttatgtaaacaattgtacatttatttgccattctaaaacttcaggatcaagtttacataattttgctaaatttccgtgtttgctcagaagcagtttacagtactaaaaccaaccagccaaagaacagcttcaacagaaagttatgtccaaaggggaagagnnnnnnnnnnnnnnnnnnnnnnnnnnnnnnntgctaactaaggtaaaacggatgatgatggggaatgggcagtcacaaatgttcacagaaaataggtcagttagtaagatcttctgcaaaaagcctacacacttcagtcaagcacatcagtagaatgatttgggagcataannnnnnnnnncggccacttgtgatttcctccaaatgaaaaggaatctgcaggctaacaagctgatcctcatcagccaagctggttcatatgcacactgttcatgtgaggtgcccagggtccagtccacaccgtttgagggccattattttctgtggagctggaaaccatctttatcagtgagttccaagaagggtctgcagcatgagggccattaaatatgggtcctccagcaccatcagggataggtgctactggaggaatcattgcattcccatacacagaaaaaggcatacccccaactttaggaaagtccatgnttagccttgncccccccaaggnggggggaaaaaccaattgncnttggaanttggggnnaaaaaattttggggttttnaccagaaggagttacaattcctgtactatctcgctccattgcttgatgttgtgaaaatactcctgggtcagacatcggtctgtggataagaggatttga

SEQ ID NO: 127299 - DNA, 837 bp, Homo Sapiens
ttctctttgtgggctctagggacatttagttgattgtttgccctgactgtattcttgaggaccatggctttacttgcagtttcgcacccgcgtcaccccatcttgaagaagggttagtatgtgaatgttatcaagtagatatggaccgttgaaggactggataccaacacttaagtgtcgtaagttccagcttccatctgaatcatcatgaaaatgtttaagtgataaatatagtgtaaagaaagagaaagaaaaagaggaggtaacgggggtttccgattgaacaagatcctcacatttcatctaatacagtcaatcttggctagagtataacaaagtggaaacaggattactatgatacaaaacttccactacagcacgctgtacacacctgtgttccaagcccaccccaacccccccagtgcttccaacacaattatttcccagcctgttgggcctgccgacgaaggagcacgtagatcttctctttaatccagtctttgttataaggctggtatgtctgggtatcagctcggtaaaccaggcagctgaggtctgccagatcatcgatgaaatcaaacaactgactgatgtcatatgtgatagagggactgttgggattcattcttttcagatgttcttcatacattttacaaacaccttccatgcattcattcacagattcgtagtcagcataagttctgccttctggcctcttggtaggctgtaccagcaaaatggtgtgagacatcgcgccaaactctcttcgctacagcagctgccgacaccgccgccgcctcgtgccgaattcgccacccagcctcgtacctagcctta

SEQ ID NO: 127300 - DNA, 840 bp, Homo Sapiens
  misc_feature (83)..(83): n is a, c, g, or t
  misc_feature (205)..(232): n is a, c, g, or t
taaagggccatttattttattttttcccaagcctttatcctgagggccagggctaaaattgcattttccaacccccccacccncttctggaagaagggttagtatgtgaatgctataaagtagatatgaacagttgaaggacgggaaccaacattaagtgacgaagaacaacttccatctaaatcatcataaaaatgtttaagtnnnnnnnnnnnnnnnnnnnnnnnnnnnngaggaggtaacggggttttccgattgaacaagatcctcacatttcatctaatacagtcaatcttggctagagtataacaaagtggaaacaggattactatgatacaaaacttccactacagcacgctgtacacacctgtgttccaagcccaccccaacccccccagtgcttccaacacaattatttcccagcctgttgggcctgccgacgaaggagcacgtagatcttctctttaatccagtctttgttataaggctggtatgtctgggtatcagctcggtaaaccaggcagctgaggtctgccagatcatcgatgaaatcaaacaactgactgatgtcatatgtgatagagggactgttgggattcattcttttcagatgttcttcatacattttacaaacaccttccatgcattcattcacagattcgtagtcagcataagttctgccttctggcctcttggtaggctgtaccagcaaaatggtgtgagacatcgcgccaaactctcttcgctacagcagctgccgacaccgccgccgttacacgagcttaactacaacgccgctaacagccaatcctcgcgagaggagccgccggaagtcgtccc

SEQ ID NO: 127301 - DNA, 866 bp, Homo Sapiens
  misc_feature (53)..(53): n is a, c, g, or t
  misc_feature (138)..(153): n is a, c, g, or t
  misc_feature (275)..(303): n is a, c, g, or t
  misc_feature (636)..(636): n is a, c, g, or t
gggggaacagagggcgggccgcccaacggggggcacatggcgggctgtatgtncctggtttaggtaagagggccattttatttattttttacccaagacttttttctggagggccatgggtaagactgccgtttccgnnnnnnnnnnnnnnnnttcttgaagaagggttagtatgtgaatgttataaagtagatatgaacagtggaaggactggaaccaacattaagtgacgaagaacaacttccatctgaaatcatcataaaaatgtttaagtnnnnnnnnnnnnnnnnnnnnnnnnnnnnngaggaggtaacgggggtttccgattgaacaagatcctcacatttcatctaatacagtcaatcttggctagagtataacaaagtggaaacaggattactatgatacaaaacttccactacagcacgctgtacacacctgtgttccaagcccaccccaacccccccagtgcttccaacacaattatttcccgagcctgttgggcctgccgacgaaggagcacgtagatcttctctttaatccagtctttgttataaggctggtatgtctgggtatcagctcggtaaaccaggcagctgaggtctgccagatcatcgatgaaatcaaacaactganttgatgtcatatgtgatagagggactgttgggattcattcttttcagatgttcttcatacattatacaaacaccttccatgcattcattcacagattcgtagtcagcataagttctgccttctggcctcttggtaggctgtaccagcaaaatggtgtgagacatcgcgccaaactctcttcgctacagcagctgccgacaccgccgccgttacacgagcttaactacccc

SEQ ID NO: 127302 - DNA, 1454 bp, Homo Sapiens
  misc_feature (245)..(245): n is a, c, g, or t
  misc_feature (513)..(640): n is a, c, g, or t
  misc_feature (872)..(900): n is a, c, g, or t
cagtagtagggatatgggctagcaaggcgaagaagagtaaaagtcatgggcgataagacaagagggaagagaaaagaggcagttgtattgaagtataggaagcgaaataaatagtggtgagtgagtagaaggagactctatataatggagggaagaaacagtacatgagagcagtaggaggtaggatcgaaagaataagagagcaagaagaagataaagtaaactgcaagtacaagcagaagacnggcaaattaaagaaggaaggacagaatcaaacaaataggggcaaagaggatagggaacaaaaaggacagagaaatagtatgggggaaacgtgagagggtaaaagaagagacgaaacagctccagagcatatagatgtaaaagaatgagcgacaacaagagaaatggaagaatggaattagaagaaggtatggaagagaaggaaaaacggtggaggggatctataaaaataagataggagaaggaaaagggccggagtaaagaaggggnnnnnnnnnnnnnnnnnnnnnnnnnnnnnnnnnnnnnnnnnnnnnnnnnnnnnnnnnnnnnnnnnnnnnnnnnnnnnnnnnnnnnnnnnnnnnnnnnnnnnnnnnnnnnnnnnnnnnnnnnnnnnnnntaattaaagaagcgaaggagaggaaatggggtaaactaaaggacatttatttatttttaccaagactttatcttgaggacatggctaaactgcatttccaccccccaccccatcttgaagaagggttagtatgtgaatgttataaagtagatatgaacagttgaaggactggaaccaacattaagtgacgaagaacaacttccatctaaatcatcataaaaatgtttaagtnnnnnnnnnnnnnnnnnnnnnnnnnnnnngaggaggtaacgggggtttccgattgaacaagatcctcacatttcatctaatacagtcaatcttggctagagtataacaaagtggaaacaggattactatgatacaaaacttccactacagcacgctgtacacacctgtgttccaagcccaccccaacccccccagtgcttccaacacaattatttcccagcctgttgggcctgccgacgaaggagcacgtagatcttctctttaatccagtctttgttataaggctggtatgtctgggtatcagctcggtaaaccaggcagctgaggtctgccagatcatcgatgaaatcaaacaactgactgatgtcatatgtgatagagggactgttgggattcattcttttcagatgttcttcatacattttacaaacaccttccatgcattcattcacagattcgtagtcagcataagttctgccttctggcctcttggtaggctgtaccagcaaaatggtgtgagacatcgcgcaaactctcttcgctacagcagctgccgacaccgccgccgttacacgagcttccc

SEQ ID NO: 127303 - DNA, 761 bp, Homo Sapiens
  misc_feature (119)..(119): n is a, c, g, or t
atatacagtgagagtctagaccagctaaaaatgaagttgggtgttaccaacaagtacctctttatggatgcagccccagtaagctggctttaactctcagctccttccctgtctcctcntaatccaagcccttttataaaataaagccccttctgtcccactgctcacatacttatgtgctgctagtctctactcgaagttcgtgcaggactaatgcttttaaaatgaggtctaaaaaataattactagtcgagactattattctttaaacagaactgcctttttctactctttatgtaaactctttctattgtgttggtctaacaaggcactattttaaaattttttaatttttcccatagcacttaaaagagattttgtaaagaccttgctgtaaagattttgtaataaaatggtctaagggctctttttccaacattaccatttttaaaaaatgttttaaaagctagaagacaacttatgtatattctgtatatgtatagcagcacatttcatttatggaaatatgttctcagaatatttatttactaatatatttatcttaagccatgtcttatgttgagagtgtgacattgttggaataatcattgaaaatgactaacacaagaccctgtaaatacatgataattgcacacagattttacatatttgcagaccaaaaatgatttaaaacaagttgtagtcttctatggttttgtaacaaattgtacacatgactgtaaaaaaaatacaattttatc

SEQ ID NO: 127304 - DNA, 993 bp, Homo Sapiens
aaaatatctcaaacaagacttacatttaatagactgtatattaagcataattgtttgacataaaacattacacatatacatttcatgctttgtgaagggttcttgatactaaatcaggatcctattttatgtatagaaatttattgcttgacttcaagagtacatatttgaaatgatgtaaagacactcccttaagggaacctcgcaataagttcctaatcagaaacgtattcacagacgcggatttagtttacattctttatcagaaacccaaattattctgaaatgggcgattttcttccacttccctgcctgtgctctggggtagcaggttggggataattggtttcaggaacttgaactcatttgtcccggagcctcctgtcagacacacctcatactggtagctctgggatagggtcccggtgccgctcacgtccaccagatgtcctggaaaggggccctcaggcaccgagcagcgacccaccgaggccgccctgctcctcctgcacagccgcaccgccacgaacaggagcaccgagaagaggaagagcgacgacaccgaggccaacgccaccaccaggtagacggtgagcgagttggcctgggtctggccgggggccagctataggaagcggagaaaggcttggagtagcccgtcaccagaaccacgtgcagctgtggcgtggccgagcgcgaaggctcgccattgtccttgaccagcaccaccagcctctgcttggctgcgacgcgctcgctcagcatcctggacgtgcgcacctcgtcatcgtgcgcccacacaccgaacaggccaggctacgtggccttgagcagctggtacgacagccagacattctaggcagagtcgtcgttcaccgtcaccaccgttgtcaccatgtagatccgctcggccgactcgtgcaccagctcagcgcagggcgtcgtagccgtctgcatcgagtacagcacgaaaggcgacgtgtccgtggcgtc

SEQ ID NO: 127305 - DNA, 910 bp, Homo Sapiens
  misc_feature (126)..(164): n is a, c, g, or t
taaaaaccaaaaaactccccaaaattttgaaggctttggaaggaaaattacaacatgggataaattatgaaaatgatttacacccccaaactttttgtcaaaaaagtcaagcctgtgtgaataagnnnnnnnnnnnnnnnnnnnnnnnnnnnnnnnnnnnnnnntcatacattcttatgtagtgtcatatagtgtgaaaggtaatttcagaattagagttatcgtttattaggtggggttaactttcatatcacccttcaggaatgaatactattaatttattcagaaatatgaactttcctgatataaaatatttataataatacaataatttgaaaactaacaatcagacaaaggaaatgagtaacattactaaagacaacagtagaaatttaaaaaaaagtagaattcaagattactaaagggttaaaaaaaactaaggtgaaaagtgaggaagacaaaattaacagacggtcggaaagctacagatacctacattattctagaaattctgatttcctcctagagtcctggcttacaatatttgggaatataggcttcaagaacttgaaatcattactttcagagcctcccgtcagacacacctcgtactggtagctctgggaaagggtcccggtgccgctcacgtccaccagatgccctggaaaggggccctcgggcaccgagcagcgacccactgaggccgccctgctcctcctgcacagccgcactgccacgaacaggaacaccgagaagaggaagagcgaagacaccgaggccaatgccaccaccaggtagacggtaagcgagtcggcctgggcttgggccggggccgcctctgggagcggcaggtagggctgagagaagccgtccaccaggagcacttgcagcgtggcggtggccgagcgcg

SEQ ID NO: 127306 - DNA, 1100 bp, Homo Sapiens
  misc_feature (80)..(80): n is a, c, g, or t
  misc_feature (108)..(108): n is a, c, g, or t
  misc_feature (1009)..(1026): n is a, c, g, or t
  misc_feature (1065)..(1065): n is a, c, g, or t
cagccgatccgagagagcgtaggtaggagttgagccacccgatgagatataactaagtggtgttcgggaaatgagaatgnagataagaggagaggcgcaggttgaatnagaaagatgacatgaggcatcgagggtttacgggaaagaatgaatatagagcggacagttacaacattaattagagagaattaaggtagagaagggagcggaaaatggaaaacccaggtcgaggctttgacgtgtggtgccatttatgacatattgaaagatgtcatatgtgatagtcgccagatagtgtggatacggttgagcagccactgatgaaggtgtacctcttgcacgcgggggaaggaacgaggatagggagtccgtgagcgaggaatccgaatgaccctccaatagtccaaaccgcttttaacctacacggtgtcagatgacattaatgcagatggtaaaaacagatttcaagaatggaaggggggcggaggtgcatgcaaattaatgtgagtaagaaaagtaattaggcacaccaagaattgacacttatggaaacgggctcgtatgttgtgtggaattatgagagaataacaagatctcacagggaacagtgatgaaatgttaacgaattgaataggacttaagttagggaatttggccttcgggaccatgaattcggcaggaggggactgtttatttttttaatctgtggcaggacccagggctctcaattaacatccatgaactcagagctgggtggggagctgcaggcaggggaggctggggcgccagatgagccggccggggacagcaggcgtcgcgccacgtcctggcgttggtagaagaggacataggctgccttggactcgatctgattctcattgacaggggagacgctgttgtcatcaaagtagtgccactggccgctgtccttgttgcaggcaaatgttgtgtagtgtccatcacgctctgagttcatggatgttaattgagagccctgggtcctgccacnnnnnnnnnnnnnnnnnngcctacagccgcgaccgcaagcgtatgccctttagtgangataattcgagatgacagtgccgtcgttaccacct

SEQ ID NO: 127307 - DNA, 3219 bp, Homo Sapiens
  misc_feature (372)..(387): n is a, c, g, or t
gtgtgttttttggggagcagactggtgctttatatatacacacacacagcagaaggtacagggcctcaataagaaaatacactctgtgttcaggtgaacccccatcaccacccacgcagaacactctgggctgaggagagggaagggcacgaccataaataaagactagaagggagggtcactgctggaagggcaaacacaggcggggcgcgcactgctaggaggagacacgacctgttctttcccgggagagagcgatgcagcggcacaggagaacagtagccacgactaagcctgcaatgcctggcgggggcacctaacacgaataagagaagcggggcggacacgagaagcgagattgcagagagggcnnnnnnnnnnnnnnnnctgtggcaggacccagggctctcaattaacatccatgaactcagagctgggtggggagctgcaggcaggggaggctggggcgccagatgagccggccggggacagcaggcgtcgcgccacgtcctggcgttggtagaagaggacataggctgccttggactcgatctgattctcattgacaggggagacgctgttgtcatcaaagtagtgccactggccgctgtccttgttgcaggcaaatgttgtgtagtgtccatcacgcatgcccccataatggttggaaaccgcgatgaggtcatatttgtacagctccggattcgactcattctgtggctggatgacaaactcagagaagtccaggtcccggataggaaactccacgagggtgtccagcttctctcgggagaacttggtgtaggaaaagcgtttcaggtggatgatgagaatctccggcagcatccacaggtccagcttcttggttgccagctggtgctgcttgcaggaagggcagtaccaggggttttccttctccagggtctccacagtggtgaagagctcaatgcactcctgcagccgcacgggagccttcttcatcacgtacccgacgcagtcatgcttcacgtagccctcagcctctacctcgtcatagtaacgcttcttcatctctggctcccagtcgatagcaatgtacggctgggcatggacttcttcaggggagttgtgcggtcgctggtcccattggagttcaccgtctgcagggtgaacagctgcttgcgtcgtcgccttgggggccactgagatgtgccaaggcaattgtccaggaggaacgggcacctgttcgtgactccagagctgggcccagcctgctctggctcagggtctcggaggctgcccccagttgagggcccagggacgtcatctttatcctcctcgtcatcttctttctcatccccatcgtcctcatcatctgagttgggtttggtcacgtagcgtgagagccggtacatcaggacgttatacaggccctcccaggtgaagcggtcccggggcactgataccaggagggggtgtccaaaaagcatcaggccgtagtaggagttgttgtagtcacgggcaggggtgcgctcccgcaggtagacaggaaccacgatgtcctctcttgagccctcaatggcctcaatgcgacctgacacctcatagacgaagatatcatcacggtccaagatgctgctcagaggctcctctagctgatagagcttatagaagcggtgactgaagacatcagccaccatcatcctctctggcgagatgcccgtgtgtttggacagagccacacatagatccgagatcttgcctttcttggggaccacgagccggtgctgctctggcttgcggcgcggttccatggggataaagaagacctccaagaccctcttgtggctgataggcagtggaacactgaggtagcagaaggggtcgaagttcacagatacattgccacaatcggggcacaccagcgtggacttgaagaggccgtggaaagtgtccacgatcacagaatcgttccgccgtttgtggttttgccatgcctcctgtgccacctcctgatccggtcgcccagcagcatcgcacagctccacatactccttcttcttcacccgattaaggtcctcatgcagcccgtccaggaggaatgacagcagctcctgagagtcatgctgctggtagcccagaaattgggatgcaaaatggccaaccttgttcttgaacacatgtggcacaatggagcggtggtggccagaccacgcctgcttcaccaggtctgcataggcctctgcgatctcacccttcatgcccagtgggttgcggaagttgagctcctccaggtagcagttgttgaggaagtactcggtgagctgtggcacattgctgaggcactgcagggccgagttcatgaagcacgtgttgcccagattggtgaggccacagatgcctggctgacccttgaagtcctcatcctcttccgacatgttgttgttcatgacatgcagctgtgcgctgggccaagtgccatctttcttgcgggtctccatgatgatcaactgcccagtctcaagggccgcatcgagaaccgtgatgtgtgtgtcatacaacctatccaaagagccttctgagttcttggcccaaagccgagtgtcttcctggggctccaccagaaaccgctcccgagctgtgcgcaatactaggccaatagaatcggtatggctgaactgaacagtgtgagatttgcccaaatcattgtgccggacaagcagcagttctactgggtacacttcgaccttctggatgttgggcagctctatgaccttgcgttcaatgggtggctggccatgctctagaccataccagctgaccaggtaatgccaagcagctgctgggagcagcacataatcctcgccttccaccagtccctccttgaggcgccagtttatctcatcttgaaagagtgtggcattgttgatgcagccagggaaggtgctggagtcctggtcccctccctgcacgtatgcctcccactgcttataccagtgcttctccacaaggaaccagctttcgccggcccgcagtggacgttctcgcccactctcgccgttttctatctggcgccactggctgtccaggcctggcagctcctcgtgctgtggctctctatcctcagtcaccgccgctgccgccgccacagccgccgcagcagcagctggatttgctgcgaccgtcgccatcgccgtccgttctcgtgccgattcacacacccagcctcgtactagccta

SEQ ID NO: 127308 - DNA, 1313 bp, Homo Sapiens
ttgtgccctagccttgtgactcttcgttgatcctggtgcgaaactatgcctgcctgtcgcgaagagtcccgctttgtgtcacccgattgtgtcgccgctatcaccctgttcctgtggttgtcactctcgtctccgatagtgttgctcctcctgtgtagcccccagaattcgggagcctaaatggccgcccgttgttctgaagaaaaagttggcacaatggaacgtgtgtgtggctccaatgccaacgcctgtcttcaccaggtctgtcaataggcctttcgagttcgccccgcgtgaatggcccatgggtgtgccggaaatttgacgtccgccaaggtagcattgtctggagagtacttcggtgaactgtggcccaatgctggaggcatgcaaggccgagtttcaatgaagcaccgtgtttgccccagattggtgaaggccacaaaatgccctgggctgacccttgaagtcctcatcctcttccgacatgttgttgttccatgacatgcagcttttgcgctgggccaagtgccatctttctttgcgggtctccatgatgatcaactgcccagtctcaaggccgcatcgagaaccgtgattgtgtgtgtcatacacctatggaggtgtgggtggcgcttctgagttcttggcccaaagccgagtgtcttccctggggctccaccagaaaccgctcccgagctggtgcgcaatactaggccaatagaatcggtatggctgaactgaacagtgtgagattttgcccaaatcattgtgccggacaagcagcagttctactgggtacacttcgaccttctggatgttgggcagctctatgaccttgcgttcaatgggtggctggccatgctctagaccataccagctgaccaggtaatgccaagcagctgctgggagcagcacataatcctcgccttccaccagtccctccttgaggcgccagtttatctcatcttgaaagagtgtggcattgttgatgcagccagggaaggtgctggagtcctggtcccctccctgcacgtatgcctcccactgcttataccagtgcttctccacaaggaaccagctttcgccggcccgcagtggacgttctcgcccactctcgccgttttctatctggcgccactggctgtccaggcctggcagctcctcgtgctgtggctctctatcctcagtcaccgccgctgccgccgccacagccgccgcagcagcagctggatttgctgcgaccgtcgccatcgccgtccgttctccctcgtgccgaattcggcgcgcctcgacttcatactctctccaca

SEQ ID NO: 127309 - DNA, 545 bp, Homo Sapiens
  misc_feature (40)..(40): n is a, c, g, or t
  misc_feature (83)..(83): n is a, c, g, or t
  misc_feature (85)..(85): n is a, c, g, or t
gctgagtttgtcatccagccacagaatgagtcgaatccgnagctgtacaaatatgacctcatcgcggtttccaaccattatgngngcatgcgtgatggacactgtatgtgccaggctgtgggtggggcctgccctgggggttctgggcaggggggcgatcaggaccttcccagtgagtgactagggatgtgagccagtggtgaggttatcgtggtgggaggagtgacaagagtgaatctggacacttctgagaggcaggaagggtaggcgaggataactctccttccctttcagacacaacatttgcctgcaacaaggacagcggccagtggcactactttgatggcaacagcgtctcccctgtcaatgagaatcagatcgagtccaaggcagcctatgtcctcttctaccaacgccaggacgtggcgcgacgcctgctgtccccggccggctcatctggcgccccagcctcccctgcctgcagctccccacccagctctgagttcatggatgttaattgagagccctgggtcctgccacagaaa

SEQ ID NO: 127310 - DNA, 974 bp, Homo Sapiens
ggattttaggtttcttaacctggttgcaattcccagcatttgggtcaacatcgtggcgaccttaaggagggctcacgaacttgatgaatgggtcccggaatattgatcgatgttggtcttgccttttgttccgaaattcccaatatccccgttttatggatggaatttttgtaaaattcaaccttgaaccgctcagaagagtctaactgatgatactcatttactggggacatagtatgtgcccaagaacttgacatgcaccttctgtcttccatttagtcatcgttacctttagaaaaagctgattccgttaacaagatctttggagggaatcagcttcacaaacgtagcagtgggtgggggtcatgttggttaaccagttcacacatcagctcactaaaggaaaaaatatttctgcaaaaaatcttcacttgtcagaggggggtgcatgaaatttgagagccatgtgttatgcatccagctcttgaactggtctcagcttcagctggctgcagtgccctaggaagttactatgggaaaagtggaaatagttgaggcccagggaactgatcaggccagaggaagtggaagctcaagatcaactgtgcttattttgctgatggctgggcctaaatgccccaaccacctacttgggacaggaaatgacaggaccctctcaaccttggactgggaaaggagggcttcctggcccctgacagaccctggggtcctgaggctaccttagttgggattaaatgcccgtattggtctctagctgtcactccctctgctccttcctcaatttctgcacacatctcagagcttcctctagcagctcttcgacctgttttgttgttttattttctttctccccaggtgtgaatcaacttcttgggccttggctctgagttggaaaaggttttagaaaaagtgaagagctggaatgtgggggaaaataaaaagcttttttgccc

SEQ ID NO: 127311 - DNA, 1885 bp, Homo Sapiens
ttttgggcaaaaaagctttttattttcccccacattccagctcttcactttttctaaaaccttttccaactcagagccaaggcccaagaagttgattcacacctgagaaacaagtcgggaactaggccagtgccctcagagccgggttctagaccagtgggactcccggcgcgggtggaagcacatagcagtgacacagcagagaaggccacagaagagaagcaggaaggagcccaagaccagcagcctggagccacacagagccagctcctccgaggtgagcagcttggtcagcacaaggccttcatggctccagacactaacacattcctcacccattctagggctcagggtggcatttccagccccctcctctgagcaggatatgggtggctggctggagggtaggattcctggaacagcactaaaatataggcaggttcctgcagtcctttctgtggtcaccctggctgtgataaggaccagttgtcctgcagaagatcctttcaatcccatctgacttcccaggactgtggcctggaatgtccgggtcttgttcctgtctggaccgtctccgaagttcaaggtggtcagcaagcccacgacgtgagaccctcgccacttccctgtgactgtcccattcctgggacacagggtcagctggccaaaagatctcaaaaaagagacccagtcctgggggatgtcagggctgcgcaggccagtcctgtgggtgaggaggaagctgccaaggcccaggccagagaggccaaggagcagcaggatcaaagtggcacagaccagaggtgggtggtgggccagacacaggtgcaggttgtgccctgcctggcagttgcccatggggagcagagggggctgagcctccggggagagcctgctggaagacagggagggagaatgggacaagagcaccgcttttacgcaaagagaaaagaaagctcagagaagacaaaggacttcccaaggccacacagtaagtggcagagccagaacaagaatccaaggttcccgactccaaaagttcaactccctgcactgctggataaatatttgctgcatttcatttctgaagtaatctaagtggaggcagagcagtgtactccgtgctggaagaaggaaactgaaagggagacttcttagctggagaaacaggaagcactgttctggggcgaggatttggctgaggaatagttccagccagagcccagacaagggaagactctggagaagaactccactgtgcagctaaacggctagatctgaatccctttctgttattcactgactctgtgagcttaagaatccatgaaatgggagttctgagaacaccaagtaataaggattaaacgtggcggatgaagcagtctgcgtggtatttggccatgcaggaattcaacaaatgtccacttcctttctctttctcgtacagatcctcaaaaccgggtaaggcgaggcaaaaaatactgtgagggaaactgaggctcgcggactttaacacaggaggggtagggccaagatctgaaccccgcctcctgcttccaagtggggtgctccttcccacgcaaggtgcgacggcctgatggaaaagaacttctggaaggcgaagagataaacaggggtcgggggaaaagaagggagccacggaaatgtaggtgtcacaaatgctcagccctgccccgcctcccgtccggctggaagggggttaaagggaggggagggcagagtctgagggtccgccgccgctggtgcacctgagcaccccctccccggaaagcccccgccccgaacgattgcaacgccctcgtcccctcccggtctcgcgcgtcggatccgccagccgctcgctcatcccgggaattccggaccc

SEQ ID NO: 127312 - DNA, 1213 bp, Homo Sapiens
  misc_feature (52)..(61): n is a, c, g, or t
  misc_feature (351)..(351): n is a, c, g, or t
  misc_feature (693)..(701): n is a, c, g, or t
aggggttcccgttttttggaaaattccaaggggaaaggggggaaaagaggannnnnnnnnnttttatttccaagtttcaaaagccccaaggatcccaagggcagccccggaggctggtggacaagccacccggaaccacaagaacaccggtttttggcctgcttgcctggagcgaagagggccctggtttttgagggctgcaagcatgggcactgggcattggcctgtgcttccagatgggggactccctgcgaggtctcacaaatacagggaggaatttcagttcacacaaccccaagggccctgtgtgcagagcggccctcacacgcgcacagcagcattcaacagagntgggcaaggggaaggggagagagagtcaagggattgaaatgaagggacttcaaaaagaaggaacaaactaaaaacccaacccacacacaatactgttaataagccagcgactttccaccacccactccttaaatactaaagtgacaggtcccggctggccccgcaagaccccccgcaagagggggtcccgccaccagagggggtcccgcctgccactgcacggctttcctccctctatctacaggacaaacaaaacacgggagaggggaaaaagcccacattttcttcttgataaatgctgttcaaaaacccatgaaggactcaaagtgacatggtggtttnnnnnnnnncctaaatgatcaacagatgttgctttctatatttttcctttgttctgtttgaactgggctaagtaagcacagttagaccctgctgttcacttgaccacgtcctaaacccgggacaagtgagcactcattcatgcacagcagacccggaggcatgggctggggcagcacaactgggttcccgcagcgccctgcctgcaggctcatgctggaggccacggaaccaggcggcacagggcagattctgtttgtcaagcgccccacaagccttgcccagattgtcaagctcagcagcgagaatggttttgacgaggaggatggaaacagcatctgctctggaagccgctctggcgtggggagagtggggagagggtgcgcttgctgcagctgctgccttaggaggctcctctgtggccaggcttctgcctccctgcaccctgagggaccattcgggtgcctcagggatcccttccctcccagcctcgtccgaatcgccacccaggcctcgctacctt

SEQ ID NO: 127313 - DNA, 1212 bp, Homo Sapiens
  misc_feature (434)..(448): n is a, c, g, or t
  misc_feature (1103)..(1137): n is a, c, g, or t
ttttttcaagatttgaaaagtttattatatgtaagatatatgtttacggaaaagcctctaaaaacataagacaatggagctttaaaaaaggttaggttttacatctttaaaactcattaataagataccaaattcaagagattatagttacattgtaaaacgtaatcttcttttaataaaagctaataatgactgatgaattacaaatgcacttatttattggtgattacaaacaatacttaagaacttaagcagcttgagtagtagtttaagctagacagagcaaagaaaattcttgtttaatatatatatatttttaattccagtaatattttcttaaattcctgttaaaaatataatcaatattaaagtcagcaaaatgcctttgactgacgcctggattattttaccacttaacctggttacacagtgannnnnnnnnnnnnnnctgtcagatgtaactgacaaccagtttagtctttctttaagataaatgaagtgataactcacattgcagcatcttgtggaaaatattcaaactacatttaaaatgcttctgtaaaatggagaactctattgctccacaagaaaatgtatatgtaaaactacaggttggctatggtaatagtaactaaactacatccaaccctgaaggtagaaaaatccctgaaaagaaatacacagcctagtcatagtatatcatataaaggttattttcttattttgaaaattctcccagatttggagaaatccaaacctttccatagttcccttactaggcagtgccacataaagttatttagttaacattatgatcatggcttacgattaaattccatatgacaaacacttatatatagcagccgtcattttggatgttggttatgacaatatttgcagtttgattacagaacacgcgttcattaaatttggtacaaagcatgaacactcaggacagattggcacaatacatgcagttcgagaattctcttatcatctcaagccagtcatcactgaataagccatagtcccagtctcgttttccaaatcttcccggccgtaatggccgaattcccgggcatatgtccggtaccgtcgactgnnnnnnnnnnnnnnnnnnnnnnnnnnnnnnnnnnncgccgcttcctcgctcactgacttcgctgcgctcgtcgttcggaaatagcgcgtagcgccataggtctggtcagc

SEQ ID NO: 127314 - DNA, 1222 bp, Homo Sapiens
gggtttatacaaaaaccttttattgactgtatttcttctccccataacctggaacccagccagcatctatggcttcctgctgtctgattcttgaaagtggggccttgggaacatgtttggaggctatggaaggtgggaatctcctcacccaccggctatgcaggttgaaggaagctttcttgcctggctgaagctacggcagcttcccagggtagcccctcaagtctagaggacccatcccccactaaatgggtgtgaggaagagatgatgcatctttcagaggctttgtcactcactgctcctatcccactccagactgaggccctagagccgaaccagtctctcctgtggagatggggcccagcagcgaggggagggggttagaggtgagtgtgtgcagcagctctgggtcctcatcaacaaaaaggaaacgcaaagaggttggcaccgctgaaactgaactgaaatggaacaggagaaggaggatataggagaacaaaagatgggtttggggtagtgccacctattaagagaggacatggcccctgtgggagcaggtccttccagccccacaaacacctgggagaggaatacggtgccctggccctacttagacaaaggactaatgacacagtcaacacttttggactgagactgccaggaaagggcacccatcagcccagaaaacggcagccagccctcatctgccagacataggctaggctgcctccctggccaccaaagcccactctgggaactgtcacctctgcctccaccgttcctgccccaccacaagctctgcataccccctgccccgatggagcagatgctgccaaccaggctgcagctggcagggcagaaacaaggaccctgagctccagggccctgtccctggggtgaggcctccccatggagatgttaggctctttcccacagtcctgctgctttgagccagacatccagaactctcttcggagggcagtcagcccacaggttctctggaagacgggatcctagggaagcatgctcggtgaggaagaagagccttgaaggtattggttcctctctttcctgtcccaggtcctgctctgcaggctcagaagtccgagtctgcatccatgagttccgacgcgtgggcgacgcgtgggtcgacgatatcccgggatatccggaccgtaccagcctgcttttttgacaactggtctatagtacaagccttcg

SEQ ID NO: 127315 - DNA, 717 bp, Homo Sapiens
  misc_feature (681)..(681): n is a, c, g, or t
tttttcacatctcaaaaaaagtttattatgtttgatacaacagattctcaatattagcaaatcattccacttacccccaagcgccagatcttgactgtacagtctaaaaacatttgtcaaagtgagaaaaatgttacagaacatctcataaaagaattaagatacaaatagtatatacagatagtagattgtaacaaagtggaacgtacttgcaagacatcacctagctaaaatacttgattccctatgaggacaaactgaaaaataaaatatttcaagcacacaaagaaaggacaaaataggggaaaccaatgggaaatataaagtttaaacttatttttaacatttaaaagcaactacacttttccatttgagccagttcaaaaaggagaagtcaaataaagactttagaatcctgtgaccaactataatttgagcttgataacatgaatggcatctgaaagatgcaagccaagtatttctagtactgtgaccttgagagataataactgagcaacctgctaggttaaccttgaggggtaaatcatattgatagaacaaactgaataaagtgaatgatacaccagacaattaggcaccaattaggctcacttctccattttccaaacctaccaaaaaatatctgaatagacagatagattcagaccagggagtgagcanaaaataaaaatgattgctaattaggcaattatatac

SEQ ID NO: 127316 - DNA, 794 bp, Homo Sapiens
  misc_feature (714)..(714): n is a, c, g, or t
gccctaacaaaacatgctttatttgataaaaatgtgagtgtaaagggggtgagacgaggggggcagggcaaaagggtgcagtgttggaggtgggggcgggggtctacatagctgggacctggccctggggggtggacgtcttatcaggacggaggaaacagaggtcaaaagttccggaggtgggcagtcctttgttaacagatcatttgtttttccaggggtgaagaaaggagctccaaagacctgagtaggatggggggcaagctgtccagtgacatctagggaagcccagcccccagcagcagcaggaactcttggggacagtcttgtcttgttgcaaagccagcacagcaagcagcctccgcattagttccatagcttgactggcttctaagatgggcatgtcaagatccagaatctcaaagcatcccctctttggctccatcatccaagggtgagaaacagcagagcctaagtgagagtctgagtcaacaccttggctcagttttcaaatgaattttaaatatcctcagtcaaaaggaaaatagcaggaggcagaaacaaaaggtacgaacccatcccaaagctgttgggcactgccacttctggatggctctagcgccagcggagcccccattcccctccacgtcagacgtaattcttggtagggtactcagagggccccgagagatggcaggggcagatgttgagtancgggccatgtatggctggggcctgggaccccccgaggggcaatgcagcacagcaccccccaccagcacaaaggctgaggc

SEQ ID NO: 127317 - DNA, 855 bp, Homo Sapiens
tgatgttggagcgagaggcgggactctgagggaagtcaatcgctgccgcaggtaccgccaatggcttttggcgggggcgttccccaaccctgccctctctcatgaccccgctccgggattatggccgggactgggctgctggcgctgcggacgctgccagggcccagctgggtgcgaggctcgggcccttccgtgctgagccgcctgcaggacgcggccgtggtgcggcctggcttcctgagcacggcagaggaggagacgctgagccgagaactggagcccgagctgcgccgccgccgctacgaatacgatcactgggacgcggccatccacggcttccgagagacagagaagtcgcgctggtcagaagccagccgggccatcctgcagcgcgtgcaggcggccgcctttggccccggccagaccctgctctcctccgtgcacgtgctggacctggaagcccgcggctacatcaagccccacgtggacagcatcaagttctgcggggccaccatcgccggcctgtctctcctgtctcccagcgttatgcggctggtgcacacccaggagccgggggagtggctggaactcttgctggagccgggctccctctacatccttaggggctcagcccgttatgacttctcccatgagatccttcgggatgaagagtccttctttggggaacgccggattccccggggccggcgcatctccgtgatctgccgctccctccctgagggcatggggccaggggagtctggacagccgcccccagcctgctgacccccagctttctacagacaccagatttgtgaataaagttggggaatggacagccctgaaacaccacca

SEQ ID NO: 127318 - DNA, 1969 bp, Homo Sapiens
ttttactttggaacctggtgctttttatttacaaaagaaaaacaataaaagaagagtctgaggctaatcagctggagacacaggagtgaaggtggcaatggggggtagggttgtttttagagagaggaagatggggaggggctctggatctagggaagcctgaggttctcagcctctgctggcttcacaaaggccagccctatcctccctcaaaggctcaaatcaatggcccgcagctgagcctcccactgcccaggtttttccaggagcctgagttcccagctcaagggggctggagtggcaggggaaacaggccggagagggcccacgagtcctgccaccactcctcactgtggtgtgatcttggcagcctcagccctgatgagggcaatgaggtcctggttgataaggaagacgaatcgcaggctggcgatctccaccacagagttgttgctgaggcgccatttggagccacagagcaccggccgtccatcgatgtagatgggccgtcgaccctcattggcaatgaagaaatcaccgttgttcttcagcttgatgacaccttgtttccgggatatcttccaggccggaccctccagagacaggtccacatcaatctggttatccttggttgctctgcccagggtgatctcacgcgagcgcatcaggtaccgcaccatgcggccccgcagcactgccagtgtctggttgtcgaagtccggagagctcatgcctgtgatgctgtccactagcacctgccacttatgcagttcctgttccagctgccgaatctctcgcttctggcgccggtcagccaccatcagctcatgttccaggacctcatctcgcatgtccttgagcttactgtcatcaatcaggtcctctgcatcagagaagttcagcacttggtcccctttgggcagcggctgcactgtctggtcctccagcaggtaatactgcttcatgagctgccagtgggcctgcagggccttcgcggtacgggccaggtagaaggcatcagggtgtctgtgcagcaggtcctggaaggtctccaaggtgggctggctggtcgatcccactttgctcagcagctgctcctcagccttgctaaacagggccttgctctggatggctgcaatagcctctgggtgcagctgcctcatggcctgacaggccaacttggagatgacaggatcgtagagcagggcgtaccaacgctcctggacctcccgaagggtgaagcggcagctgaatttcacgcccaggtggacggaggtcaggtcgttggtctgcaacacagcatttatgagcaggaggtcatctgcaggcttccagcggcccagatccttggtcacctgaagtggctgtttactcttcttcacacgcttggtgagtccaggggctggggctgggctgggtggcacaggagtgctgggggctttggataccttcttcttctcactggaggagggttcactccccgaacagcgccctggttccaccccactggccccctttgcccgggtagaagattttgccaggctgctctccaccagctcatcatcgaacttcttcctcttgatgaacctggaggagcttctccgtttagggatggtgcccaaggcctgggaggaggctcgcttctgccctgccagtgactcctcatcctctgagcggctggcagtgcctgatgccatcagggatgaatctagcagcccctgagaatctttgtccatcctcttacagtcccaaagccactggttccaaaccaccgggctaggaggaacggtcccacaggctcatccaaggattctgaccaggtgagcttaaaggctgagaggagattcattcctagactgccagatccaacaatttctccgcggcgacggtagcagccgcagggccaaagccggcttccgtgaggtacgtccctcgtgccgattcaaccaccaggcctcgtactagccta

SEQ ID NO: 127319 - DNA, 1594 bp, Homo Sapiens
  misc_feature (642)..(652): n is a, c, g, or t
  misc_feature (818)..(831): n is a, c, g, or t
  misc_feature (852)..(913): n is a, c, g, or t
  misc_feature (1099)..(1107): n is a, c, g, or t
ccgtgtgtattggggcaaaggacccatccccgcaccgtcgtcccccctcactcgcggggtgtgtcgtgggagacaaaaaggacggttgtgcgtgtgtgctgcggagccctacagctccctgcgggcacgcagatgttccctccccgcctcccttcgtacgatattggaaagagcgcgcgcgcccccataagtgggaacacatagtgtttttatctcctccgccggaggtgttctgcgctgcgagggggttggaggattcttatttgtttcgcgctttcgtggggggccaagacaggtggctgtgaacttctcccccctcgaggggagactgagcagggttttttcgcctgctaggccccccgttttcgagctcagagcagttgtcctcccacatctcgcggccgcaagaaagaggggctccataagtcaatattttccacaccacccggctccccttccgccaacaaagatattgccaaatggcccagggggcgagcgataattttctatatttagggggctcctcgtctggtgcactcccgccgttcgttgaaggaacccccgcgcaatacgctcccccagaccaaccgcccttcggagcgtttttgacgaaacagggcgcggcgtggcccgcgggcgggnnnnnnnnnnnggtggggaaattcaaggccgttattcatgatcccagtgttttcttatggaaacaagtgagggccgcgtgtcgctttccctcttaggggcccggcgccccaaaaaaaggtttttgaaaagtttttttgaggggcggagggcggcccgccacagacctctctctttcnnnnnnnnnnnnnnctggcgtgcgccgggttatgnnnnnnnnnnnnnnnnnnnnnnnnnnnnnnnnnnnnnnnnnnnnnnnnnnnnnnnnnnnnnncataatttaaggatctctttatgttcgtcacaaaggttatcaatgcttttaagagcatctgcatagttttgttatttaacctttacacacaatacatgtttttcaaactgcaaagttgataactaatatcattttcaaataggcatagtataaccttaaatattacatgattcaaattattattannnnnnnnnacaaagaaataaacctgtaaaggatcactgcactacagttgtccattaattatctgcggcaaaactgggatcctagtagaagcttcagcatatggatggttcctctactgcctgggcaccctctgtgacagctttgacacatttggccattgtctgtgaggctctgctaattgaatctgtcatgtagaagtcttttatagttagctgaggtggaacaagtgggtcagcaagaagctgctggttcactagctttgagagctcatttgcttgctggaagtaattagccccttcaatatcatcatatcgaacaagattaggagagacttcttccaatctgttccttacttgatccagagtatcatatggaagagtcattccagcaatctcagagagtgctcttataattttccagtcttctcttgccaagccaggaggtgtcactgctaccttagtctgctgagctctaccctcagtgttgacatatgta

SEQ ID NO: 127320 - DNA, 884 bp, Homo Sapiens
ttgtttttttgtcctcttgcacttgctttgcagaacctgcctcccacacaggggcagccacctcggggatgggtgactcaacctctcttcccggctggcttcctcactgccgtggagactcaggtgtgtgagggctcgtccaggctgcagctggacagagtggcagaggcggctgaggcttgggcagccaggtcccggtaagcaggcgacttcaggaagcgtgggtaggagtccttctccatcagggtacgtgtcttcccctgagccgcatcaaagcatgtggctgtggcagtctgcaggttcatcctcgtcagctcgcgggtctcatggtcaatgttgacctctttaggggcctcactgcaaatgaactcctcaaagatctggtgtgccctggaggccagcttggtagctgatcggatcttcttgaactcctcacaggccagccagaactccaggttctcctcactgaactctgtcttcaggaaagcgtggaaggcagccactccatttttactgctcagcagcaggtcgaacgactctctccaccccagcacatcttctgagaagtttctattctctttgctgtgtttactgccccactcgaacttgccagtactcccagtatcgcagcccagctctgatttgtgaagaaagatccccagacgtgtcttgaactctttggctctctccaggcaggtggtggggaaggcggccagggtgcggcacatggctgcgggcgcagggcagcacgtagtaggcaggatggtggcaggctccaggaggctccgcgtgcgccaggaagcaaaggcgcggtagcaggtgctagtcaactgcggttgggtttcctcgtgccgatttcacaccccagcctctacctagcctaa

SEQ ID NO: 127321 - DNA, 551 bp, Homo Sapiens
  misc_feature (138)..(138): n is a, c, g, or t
tctcctgaatcttttatctatgccttaagccttttctgttcccttcaggacctaggcttttgaaacccaaaagccaggaaaacatgcctttgttatctgctttctgcaatcacgtctcttccatggggcactgagcangagaatggtgtggccaagtgagtagtgagaagcagtgaggaggtgtgagctaggtgtctgttcccattttagaaaatactgttcctacatcagaaataccacattaagacgtatagagccaggtcactgggatgcttgaacccaaatagctgggattctggacagagtcagcagagtacagaaggctctgaagtgggagacggagctggggtgcatccctcccagtgaggaggggtcatgaggggcgtctgggaagagggacatttgaactaggattagctgagttgccatgatgctaagataatgggagagtgttctttgtggtcaccagtgtccacatggcatcccttccctgagattttcatcactccctgtggtcttcagtcagtaaagctcttagaacacttgtaaaa

SEQ ID NO: 127322 - DNA, 994 bp, Homo Sapiens
  misc_feature (150)..(150): n is a, c, g, or t
gagatgggggcctgcgaacagcttgtaagataatccaataaagtttcccacaggattgtgatccagtagtaaaacttccctgacaccacttgtcttcaatttggggaaatttcaaaagtccggaaccgcgtttggccagtctgtggctanatctgacaaggactgcaagaagttgggaaatttggttcgtgtgtgaatacctcctggagggctggagaggaggaaactgacctctcaggaacacacacaacatagacgggttccttggaaaggatacattagaattactgaggtcttccagattgctaagcagctggtccaggttacggtcagccattgtcttcttctgctcctctggcagcccctcagtgaccccatcctcttcctcttcatcgtcctcctcctccccacacacatccaggctgaagtgcagccgggctagcttctcctgcatctcccgaacgtgctccagctgctcaaaggagcattccttcccgaaggcctgcagccggccagagtggaaatcattgagcaggttcaggagtcccccctccatctcatagacatcagtcacctcggtcaggaaggagtgctgcaggggcgtgcctgcagagccgcttccacctccagccaggactgggcggcacttctctttgcctactctcttgaacttggcccgctgcttgggggatggcagatgaggaagtcctagggccaaggagccgctgtggctggtaggcacagggaccctccgtagtgtgcctggggcctgggctggctgggccaggcagggcttgggactccgtttcttctttttgtcatccattgggcgctggctgggcctcaggcctggaggtttggggtctcgagtgatgcctcggtgcaagttccctccgccctccgccctctcctcccgggaacaccaccgggtgaaagctaagctggaggcctcgtgccgaatttcaacgccagcctcgtacctagccgtaaagtt

SEQ ID NO: 127323 - DNA, 1217 bp, Homo Sapiens
  misc_feature (98)..(216): n is a, c, g, or t
  misc_feature (230)..(230): n is a, c, g, or t
  misc_feature (239)..(239): n is a, c, g, or t
  misc_feature (245)..(248): n is a, c, g, or t
  misc_feature (254)..(300): n is a, c, g, or t
  misc_feature (302)..(313): n is a, c, g, or t
  misc_feature (315)..(418): n is a, c, g, or t
tccgcgtgttagagaaccaagaatgcccgcggtgccacatgtttggggatgggtgtgaaaagtgttatggtagaatttgggggtatgtttttgttgtnnnnnnnnnnnnnnnnnnnnnnnnnnnnnnnnnnnnnnnnnnnnnnnnnnnnnnnnnnnnnnnnnnnnnnnnnnnnnnnnnnnnnnnnnnnnnnnnnnnnnnnnnnnnnnnnnnnnnnnttatgggttttttnggtggtttntttttnnnngggtgnnnnnnnnnnnnnnnnnnnnnnnnnnnnnnnnnnnnnnnnnnnnnnntnnnnnnnnnnnntnnnnnnnnnnnnnnnnnnnnnnnnnnnnnnnnnnnnnnnnnnnnnnnnnnnnnnnnnnnnnnnnnnnnnnnnnnnnnnnnnnnnnnnnnnnnnnnnnnnnnnnngctttctttctggtttaattccattcaacgcccccctcccccatagcacctggggggccgcagaacacccgcccgagtctgtaaaaagtcacagtttgaagagaatgagaggggcagtgtgggcctgcgtgggacgcctacgcagcggactgctcctcaggctcggcgttctcggccaggtgcagcttctggatagaattactgaggtcttccagattgctaagcagctggtccaggttacggtcagccattgtcttcttctgctcctctggcagcccctcagtgaccccatcctcttcctcttcatcgtcctcctcctccccacacacatccaggctgaagtgcagccgggctagcttctcctgcatctcccgaacgtgctccagctgctcaaaggagcattccttcccgaaggcctgcagccggccagagtggaaatcattgagcaggttcaggagtcccccctccatctcatagacatcagtcacctcggtcaggaaggagtgctgcaggggcgtgcctgcagagccgcttccacctccagccaggactgggcggcacttctctttgcctactctcttgaacttggcccgctgcttgggggatggcagatgaggaagtcctagggccaaggagccgctgtggctggtaggcacagggaccctccgtagtgtgcctggggcctgggctggctgggccaggcagggcttgggactccgtttcttctttttgtcatcccttgggcgctggctgggcctcaggcctggaggtttggggtctcgagtgatgcttcggtgca

SEQ ID NO: 127324 - DNA, 1960 bp, Homo Sapiens
  misc_feature (450)..(501): n is a, c, g, or t
ttttttgctttctaaagtggctttaatatcacacaagcggctctttggtctacagtgagagaaaacagagggagccaggaaaggctccccgctggcctctggagtccaggagccttaggaaggctgaaagccagccctgaccagcaggcttagttgtcctgagaagagccagtgaggccacctggtccagttcaccaggtttcccagggaagcacaggcatctctgggtccccgagcacagtgccagggaagacacccccaatccccatctgaacaggccgagggcagcatgggaaaggctcagactgcaggttcatcccgcaggatggtaaggacacgtgctcctccctcgcagagcaggctgtgcacagcccggcacagggccagccagggcggcccctgcggctgtgcagcgcttaccaggggggaggagttcagccatcaggaccnnnnnnnnnnnnnnnnnnnnnnnnnnnnnnnnnnnnnnnnnnnnnnnnnnnnaatcctgggacaggcttcgaggcccccatgcttcagccctcctccctccttctgaggctccaggctcccttcttgccgtcccaggccccttctgacccatgcacttcccaacccacacacacagaccccaggcttgcccccatcctcctgggtcctggggggtggagcagtcaagcccctaccctcgggtcctcaaggctgcggacctctgttgcacccccacctcctcttccagaagcaccttttccaagtggatctgctggtccagcacagccactcgcagcttgagggccgccaagggtctgcagctcactgggtgcctggagtagccaagcagctgggggctccatgcaggctccgctctacccccacaggacggcgaggctccggggggcctccccacaggacatggtcttggtggctgttccgccaccgctgcacgcagctcctgcagcctgtgcagacactggcccaccatggcctgcagcccctccagcgtgagcaggcagcggtactcctgcatccagtccatgggggctgccgagagctcctccctcatgcgcagtctcagcagcgagcaggccttccgcaggcgccccgcctccgcctccacctccacagcactgagcctgggctggggcccgcctgaagctgtctgcatgttctggaggaactgggttttggcagcggcggcatccgtggaatcactggtctgtgtggaactgagctgggcccacaggctcgagttctgggaagctgctttcctgaatgccgcaggcagccgcagcaggtgccccttctccttgagtgtgaaggcttctggggcctgaggagcagcggatggggccatttgctggtccctgaggcccgccccaggcctgggggttcgggctcccatcccaacacgggtcccatcccccactgacagcagccggcgctcagggtggcccttggcaggcaccgtggtctggcggaggcccttggtgggtctcgtgtctgaagcatggccaccagcttggcctggggaatgcggtggggcggaggctgtcgtgccagaagaggtgacaatggacctagatttcaggctgggggccttgtctctctctccggccttagtgatgcctcttcgaactcgtacagccttctccagtgcctgggtcagaaactccaactctttgaggtcttgtggactgggtgtgcatgctggaagggggtcctctccattagtttctggccctggaggtggcttcaaagcccgggtcccagttggttcccaggcatgcagcagccgacggcaaacgcgcaggctctgctccaattgcaattgtcgctgtgcgcaggcgtccagggcgccctgcagctcggccaccagccggcgcgagcagcccgccggcagcatgaaggcggcggcgtctccttgcattgccctcgtgccgattcaaacccggcctctacctag

SEQ ID NO: 127325 - DNA, 1225 bp, Homo Sapiens
caagtgaaactccaaaatgataacctttaatgcttattagatggcacaagtgttaggttgggtattttactaaatatttaatcattgtatatgcacatatttatgggcatgtgagcttaatttctgtttttaaattcagaatgcttcaataataacattgcattttatataatcctgattttcttttttaaaatcagctcaaaaggagaagttaaatattcagctttaatttcaccagtagatttttaatgttttgtaatcataatgtttaatttgtgctgttcttagaactttaattatgaagctaaattgtactaatacccattaggtacttcttaattgaaggcacatcatatgtctgatgtggcagtactaattggtgtaattaaattctaatatgcttcagtagcctgatttttttaagtgaataaaaagctgatagaaataagtcagctcttgaagctgcatagttgtataatacatacacgtgtttgcatttgtaacatgcacatttattcagaagaaacaactcattaatttattctaaaaccatttcacctgataacttaaaatacagagtaaaacaaattggtcaggtaaatatacatgtaacttaaaaagaaacagtcatgtactttaggcataaggacaatgcttttctcttttacaaattctaagttaggtcaaattctctgaaagtcactacctttctttactgtgatgtgttttcggtgaagttacagcctatttgcaaatcacatcactggtttgtccaagcagaggtagatgagaggtaagctcctgtcctgctaaaagtctcctaaaaacagcaagaaaatatttttacatgttcaaaaatgctcatttatttatattcctaaattttcttttactcagtataatatagataatttaaaaataagtagaatatttttattatatatgttttatttttatacttctagttaaattaatagtggaacattatatatctattaaatgttttaaattacatggaattaaaatatcaaagttaattatgttattataatttttaaatttcagaaaccttctttaaaattcttactgttttatcttaaaaaattcatatagaaattgtggtcagatgtaaactgtgactctgagcacaatcccaatgctattgccaatttaattccaatttttgtgttcacacatgaaatgtagtttttcttttattgagttt

SEQ ID NO: 127326 - DNA, 515 bp, Homo Sapiens
tgcggccgcctgaccctgcgccccgcgctgcggctgccgtcgcttttgctggtgcacgtgtgtgcgcgccccgagaagccgcccgggcaggtcacgcggctccgcgccctgcccctgacccaagggcagctggttctggtctggtcggatgaacacgtgggctccaagtgcctgtggacatacgagatccagttctctcaggacggtaaggcgtacaccccggtcagcaggaagccatcgaccttcaacctctttgtgttcagcccagacacaggtgctgtctctggctcctaccgagttcgagccctggactactgggcccgaccaggccccttctcggaccctgtgccgtacctggaggtccctgtgccaagagggcccccatccccgggcaatccatgagcctgtgctgagccccagtgggttgcacctccaccggcagtcagcgagctggggctgcactgtgcccatgctgccctcccatcaccccctttgcaatatatttttatatttta

SEQ ID NO: 127327 - DNA, 609 bp, Homo Sapiens
tttttaaataagcatttaattaggatttcattagtatttaatattgctttttcaattccaaaaagttaaattttcactttttagcagatattttaaagtacaatattaagtttatacaaaatgagcaattaagcaaacaccattatttcacattcttcaaaaatacaaattcatatttattcttttttgggtttggaggtttcttcctttggaagtactgaacctgtaacgttttcacatcgctcagtggaagtccgttgttcccatgtttcacacttacttttacataatccaaataaaactatttgggattttaaaagttgtcaccaagaccccggccaatgattagtgtatgtcaaaaaaaagggctcttgggggctcttgcctttcctggctagaagatctgagccagaaattcagcaaaaatctgtttccagccaccctccccaaatagggactagaaagagttcacaggaaaagggaacagacaccttgaactctgacccccacccccacattctccaaaacacaacgaaggatgtagactgttgagtcaaacagcccttgggaggcctgagaacacagcaggaaaagggcaagagaaagcct

SEQ ID NO: 127328 - DNA, 501 bp, Homo Sapiens
ctcccaccctccctccttgccccctgtcctgcttcccaccccctgcctgcccagcctgggccctgcagtgtggagagacacataagccttactgtcctctgggggcaggagccgagcctttttgttgctccgctcccaggagagtgagggtgacgcaattgattaaaaccattttgttctaggtgtggctggtggcatttgtggggtgcagatgggtcttggaaccaaagtgagggcacctggtccctcacctctgtagctctatgacttagtaaccacacctctactggacagaatgaggcctgccttgaagggtcaccgtgagcagcggccacccagcccagcagggctgagtgcagagcccagctctcatggctgtgatttgtaatcatcagctttcactctctggctgttttctcatcagtaaaataagggacttggaatcttagtggtttttcaaaccattttacattgtgacccaatatacacatgattacttgt

SEQ ID NO: 127329 - DNA, 627 bp, Homo Sapiens
  misc_feature (571)..(572): n is a, c, g, or t
cacaccaaggaggcaggtgagaggccgggcgggcaccacctgcatctggtttattgttctgttttctccaaacttagcagagcagaatgtgaggccacctggggggcggctgggcccgctgcgtggggccagccagagtcattgtgagtgtgtggggccagagtccatgagacatccactgggggaagaccccaaatacaggaggcctggcaccccctcttctgcctcctccatgcccaaagcccccacagggaggcatgatgcggcaagcatgagagtgcaggtctcaaaggaagtgggggcagctgcggggccaagcagctgttggaagctccacgggagcctgggcaggcctcccgaggctgcggggcgccaccctttcgctgcagagaagttgggatgctgggccagttgagatgggtcagatgcaaacaggacctttccaggtcacttctccctgagctgtcctctttcccacggtccccatcccacgctcccctcactcaacaaccctggtctgcacaagatccatctctttcagagggaacaagacccagacagtgaggcccannatcccagcacctccctgcgatgctgtcctgccaagagcatctgcacagtgctggg

SEQ ID NO: 127330 - DNA, 2142 bp, Homo Sapiens
ttttttcaccggagcaaaaactgtatttacacaacacggggttatacaaaaatttgaaaaggcggagtgaggagacgacggtcaggaggcgccacagcgctggccggcggcgagacccaggatgtttgccttcaggaaggactccatctgtttccccgttatgccctccacgcgttccaggtcctccacctggctgaaggggccgtggagctcccgccagcccacgattagctgggccttcttcgggccaatgcgctgaagactgcggagatctcgggctgagccttcgttcagcagatccagtattttttggcgcccatgagccagtagctccgggctgatctgtagctcccagcagtcctcagccttctcctcaggctctagggcatccagggactccagctttctcttccggcctttattcttcaggatgtggatctcggcatttggggatgctgcctgctcctgaattagctgtaggggcatcaccacagcctttttcaggggctttgcccctgtgactgtgcgatgtgaaaggggccggagcattgtgggacaatggttctccttttcctcagccttctgggccaacatcttggcctccagttctttttgcttcgtcttaagcctctcaatctctaggtccttctcttctactgtcttcattagcaccatccgctctcgctttggggtactcaacagaggggccccctggctcccctgggaggcaagcagacggtccaagctgaggaggcgctccagcatggccgggtccatgctgcttagcttctgtagggggctgagtttctgggaggcagaggctggagctgccatgggctcagggctcccaatctcctcttcctcagggcctcgggctctctttgcctctggtggaccaagcaattctttctgagacagcttaacaggtcccaaggcatgaggctgcaggctctcattggtaaaaggccgattgatcacctccttggacctggcagcaaagttgagtgcggagactgtgtctaggtagaagcgtctctcaggggcaatgttggcaataaggatactgtgggctgagccacccagagagtcctgcaataggcgagtgagcttgctgtcccgataaggtacacgagggaggccctgattcagcgcatctaccactttgcccaggacaaacagggaggtgttgatggctccactctcttttagccgaaggcccttgttgcctgtgcgccggttgtcctctgacccagccaagtcaatcaggtagagttttccctctcgctggcgaaatggggccaaacgttcccgctggtccaccttgaccaggagcacagcatgactgcgggaggagcgctggttgagccgggtggctcctacagtccgatttcgactggctggcaggaagtgccgctcaaaatcagcaaagctactgatgggcttctgggagagacccggaatcaggatattcccccggcagtcttctcggattaccaggtctcccgaagcagggtccaggaggtctaataccttctcctggtagatctctaggtaagacatggtgacagaaagggcccatggccggccctcggcaccctcctcccttgtgagctgcaggaggtccatgagagcccgcgggatcaccccaggttgctctgggctgcccagcattgtgtgcgtcttcccagctcctgtgggtccataggcaagcacactggcattctgcccttccagcaagtgccttaggatgggctgcactgaacctgcatagatgtcctgctgagtactcctctccccatagaaggcatcaaactggtatttgagagtctcctggtggttcctccagttagcaatctctagagagcagctgtccatgccccgcacacaggggggatcacttgctcccgctgttccatccacaaatggccgcagtcgcacagccacccttacgcgagctggaggtggacgacgagtagctccaatcttgcttagccgacagcgaccagctcctgagatcgccgccgctgaagctgccgccatctcgcgtcgcctctgctgcgtcgagccgcccgcggccattccactccctccgttgggcccctcgtgccgattaccacggggcctcgtacctagactatcgtt

SEQ ID NO: 127331 - DNA, 887 bp, Homo Sapiens
tttttatgtgtactagatgctatttattaaactgtagacaggagataaatactttatttcaaaagtgcaaagaagggaagacaaatcacatttctttttatcatgtaaacttgtaccaaagacttatgaatagatttatgaattggagtagaaaacatagacatttctaccttgaggatatagaagggaacttaggaagtgagaagtcagattaccctagtcctctagggtgcttaaagctaactagtcccgtgaatgagaatctaacctatgtgaaaatctccagcctgtacctgtacagcatcagccctgggacaacacagtcaggggcaggctgtagtcacatctcttagcctaagagtacacagctgtcagggaaagtcctgatggccacagtgaaaaaggtcatgggtggagagaagcaaagtaggaaggatcatttgaagcacaaacaaatggggaaactgaacagacaatctcagtatcaccacatctgcttcaaaaatagcacaccaactcccttccaaagtgcatcgttacactgcaccatcgtggaagaaatggaagagcaggatggatttggctggctggagtcacatcttggggaagctggccaggttggcaatgccacaggcgttgttcttatttcgagccatgaggatatatcctttgtttccccagttttctccccagctgtttttaattatccagtgcttgtttcccttctggattccatatcccactgccaaaaccgcatggttcagattatcgctattgcagctttcatcataatacacacctttgctgtaaaactggaaggaggtcaggcttgcatcaatggccacagagacaggtcccactcgggccactgccctcttcgggctttc

SEQ ID NO: 127332 - DNA, 1263 bp, Homo Sapiens
ttttttggttataaaagattttaatatcaaataaaatgtacatgatcaaaaggctttgattgccatgtaaagcatagtttccaggttacatcaagtgattttatcttctcccatttcaaatgaaatgttgaaagcacaaacaatctgccatgaatgataagaagcaaaggcagcacatatcatctgcaagtttcttcccaagctataaaatatcatgttcatatttttcctgtttgtgatcccaaaacaggcaatattttcatttcatccactctattcttatgtatttgaaaagcaggtgttatccacctaccacaagagcactgttcaccataccagttgaaggaacccaacttggcactgcattttgggcaaagaagctgtccatccatcactcccaacaaagcagattccatccactgtacaggttcaatgaaataagatgtacattgagcttgcctccctgtggtaagcatggaagatggtgtcattctcttgtgggcaaaggctataggtccacttccttcacggtgatccagaatactagaacttcgaaataatgatcgcctgcactttctacacttgtagagaacctcatctttcaatccttgtgaaacggtagttgggtcaacagcaaagagttcttgaggtaaattctgcaattctggatacttctctgtaaccttttgtaaacgatattgcttataaattgcactagaggtatccacttcgtatcccattgcctggtataatttcagttgccactcaaacccctcattcatcttagcctctggtttgagaatctggagcttttcataggctttttcaaagggaagttggtcagtcttcatgagaaaagcagttattatggccacacttcgactgactcctgcatgacagtgcaccaacaccgcacggccctcagcgcgggcctgaccgatgaaggccacgcaccggtccagatggctgagtaggtccgtctcgggtttgtccagcgctggcacgaagaggcgccatagatcctcgaccccaggccccgccttgaagctgggctcctccgagtccactgttagcacggccgtgatgcccgcttccctcaggtgatctggctccgcgacggccgccggccccaccgagatacatcctggctgcacttccatgcatctgcccggcacagctgactctcgctcggcgctcggggttgctcgagctcgcagccatccaccctcgtgccgaattcgccacccaggcctcgtacctagc

SEQ ID NO: 127333 - DNA, 657 bp, Homo Sapiens
aataagttgaaaatttcatataattttatttattaagaattccaatctaagtataaaggtacaaggtagtgagaaggaaatactacagttcggagaactgcttatttccaagtatatttaacttataaagttaataaatagttaaatgaaacaaagtttataggtgacctttagtaaatggggaaattaacaggactttcttcttcatcttcaaactcttcagaagcagcaacagggctagttaattcaactcccaattgttctgaaagtttttttaccttctcttctaagagaatattcttcttcacttcttccttgtaattatacttaagatcttcaatttcttcaaaaaatgaaggatcaaaattttccagttcttttttcagcttctttatttcctccttcaaatgctgcttttctagatctgacattttgagctgtgtctctagatcttttattttttcctttagttgatcagcatcaggtatggtgctttcagctccactttggtccttgttagcttctatctgatggattaattctgctttctctttatccagctgatgattagctaatctaagaacttgaagctcccgtttaaggccttgctctgtctcagcaccttcaggaacatgtttaagaatcttaatctgttgt

SEQ ID NO: 127334 - DNA, 727 bp, Homo Sapiens
aataaaatttttttacacataaaatatttcatggaaaaggggtccctcaagcagctgagattttttttatttgatgaaaaataattcctgatgtggaaaccccggagtatctccattccttgggtcattatttgcaaagctcagatgcagtccgaccctccatgttcagatgggatgactgaggcttgaaggtggaatgggtggtgggcatggggcgagttctcattccaagatcaatcattggcagaacacaccccaggcgtaaggataatagtcggggtaggcatatgggtggggaatacttaaatctgtgatgaagagtatgactccaactgcagagcagattgcactgacgatgttcaagcccaaactgccagacagcaggcaataagaatatggctgattttctgctgccacggagagagatcctgaaatgataaaccacaagcctccccagaagggaaagcctccgtagaatgaaatagacaggtattcccctacgagaaccgtcgccatgatggagccgaggccgatgtgagccaggccaatgatgatctggatggcccccaaggttttgccttctttcagagctttctgcacaggctgcccattcacattcgacaccaaactaggtgggttcccaggaactaggtggacttgcggctggctgtttggatacaggggcacgtgagacataattcctggggtcacaggataccattgtggg

SEQ ID NO: 127335 - DNA, 893 bp, Homo Sapiens
  misc_feature (773)..(807): n is a, c, g, or t
  misc_feature (810)..(852): n is a, c, g, or t
ccatctgcaacccaagtggaagaatgcgcatgcgatgccagacctccaggaggcagaataccagcagcacgccagaaatcgccattccagggttcacaccccaggcgtaaggataatagtcggggtaggcatatggcctggggaatacttagatctgtgatgaagagtatgactccaactgcagagcagattgcactgacgaatgttcaagcccaaactgccagacagcaggcaataagaatatggctgattttctgctgccacggagagagatcctgaaatgataatccacaagcctccccagaagggaaagcctccgtagaatgaaatagacaggtattcccctacgagaaccgtcgccatgatggagccgaggccgatgtgagccaggccaatgatgatctggatggcccccaaggttttgccttctttcagagctttctgcacaggctgcccattcacattcgacaccaaactaggtgggcttcccaggaactaggtggacttgcggctggctgtttggatacaggggcacgtgagacataattcctggggtcacaggataaccattgtggggtgccaccaccaacacagaattggccaccggaactgctgaagtcatcgaattcatgcttgctctgccagcagccacgtatctcttgatcctattccttttctttgctgctggggaccttgttttttttcctgagagaatgaatgtccccggccgtaatggccgaattcccgggcatatgtccggtaccgtcgactgnnnnnnnnnnnnnnnnnnnnnnnnnnnnnnnnnnncgnnnnnnnnnnnnnnnnnnnnnnnnnnnnnnnnnnnnnnnnnnnacaacggacgctagcgccctatagtgagtcgtatacattta

SEQ ID NO: 127336 - DNA, 1219 bp, Homo Sapiens
  misc_feature (68)..(68): n is a, c, g, or t
tgtgtgacaggccaacaagccgggagagaccaacaattgtgcgatgtcattgtgccacagcaagtcanctctattggtcgaacagcttcggctgtcaaagcttccgcgtcctctcgcttatagacagtaacagcactgtcttcatatacacgtcactgcaatcattgcatgcttagatgtgcaacacttggaagacaccttttctgcgcctgttacgtcatcacgcgaaccgacactgggtctattggaagtgtcccacaaattgattgatgaattttccttttgggttccagtgaaaaagtgctttccagaatctgtagcgctttactatttgcgttggatcctcccctggtatgaactttgttggtgagctcacccggttctgggcgtgatcactggcttttgctgcattagatgctctggataagatgacactcacatgcttgattgacagcagaccaactggcaccaaagtgggaagatgcgcatgcgatgccaactccaggaggcagaaggaccatgcagcacgccagaaatcgccattccagggttcacaccccaggcgtaaggataatagtcggggtaggcatatgggtggggaatacttagatctgtgatgaagagtatgactccaactgcagagcagattgcactgacgatgttcaagcccaaactgccagacagcaggcaataagaatatggctgattttctgctgccacggagagagatcctgaaatgataaaccacaagcctccccagaagggaaagcctccgtagaatgaaatagacaggtattcccctacgagaaccgtcgccatgatggagccgaggccgatgtgagccaggccaatgatgatctggatggcccccaaggttttgccttctttcagagctttctgcacaggctgcccattcacattcgacaccaaactaggtgggttcccaggaactaggtggacttgcggctggctgtttggatacaggggcacgtgagacataattcctggggtcacaggataaccattgtggggtgccaccaccaacacagaattggccaccggaactgctgaagtcatcgaattcatgcttgctctgccagcagccacgtatctcttgatcctattccttttctttgctgtggggaccttgttttttttcccctcgtgccgaattcgccacccaggcctcgctaccttaggaccgttatagttactgccg

SEQ ID NO: 127337 - DNA, 1337 bp, Homo Sapiens
tttttgaatgctcagtatctatttattaaatgaatgcacaattgaaagagtgaagattgaatgtctagatatttgttcctctaacccacaagctcacatgcagcagagcacacgaatgtgtgtgtgccaaggccccagaggctggatgcccacatatgtgctgatgcatgtgccctagggagtccctcttggttaacatctgtttaaaatctctgtcttcttcttgatagagaaacagcatggtttcctagactgaattgaagaatgaaggtgagagtacaaacagtgggagagacgtttcctcagctgtcagaacaggaacgacctgggttatggaagcccagaaagggaggaggacttcttttggtcccagtgaaagatgcttccagaatctgtagccttacttatttgcttggatctcactggaataacttggtggtgaggtcaccggttctggggtgatcactgggtttgctgcatagatgtttggatagatgacactcacattgcttgattgacagcagaccaactggcagccaaagtgggaagatgcgcatgcgatgccaaactccaggaggcagaagaccagcagcacgccagaaatcgccattccagggttcacaccccaggcgtaaggataatagtcggggtaggcatatgggtggggaatacttagatctgtgatgaagagtatgactccaactgcagagcagattgcactgacgatgttcaagcccaaactgccagacagcaggcaataagaatatggctgattttctgctgccacggagagagatcctgaaatgataaaccacaagcctccccagaagggaaagcctccgtagaatgaaatagacaggtattcccctacgagaaccgtcgccatgatggagccgaggccgatgtgagccaggccaatgatgatctggatggcccccaaggttttgccttctttcagagctttctgcacaggctgcccattcacattcgacaccaaactaggtgggttcccaggaactaggtggacttgcggctggctgtttggatacaggggcacgtgagacataattcctggggtcacaggataaccattgtggggtgccaccaccaacacagaattggccaccggaactgctgaagtcatcgaattcatgcttgctctgccagcagccacgtatctcttgatcctattccttttctttgctgtggggaccttgttttttttcctgagagaatgaatgtactggggccagttgggtggtagggttagaaggatccgaagtcctctatttcctggatgcaggccaggttacatgctgcttagagctcagtttcat

SEQ ID NO: 127338 - DNA, 673 bp, Homo Sapiens
gcaggtccacaggccatcaatgctttaattttgtcagaggcaggcactgagcagccctgctgaggtctccccagctactgtgccacaaccagctcggagctgccactctaacagcagagtggagagctggggtcagggccatagcccccgggctgaggaggccttcttgcaggaccccaaccacagaacgagtggtcttcacaacacctgcggcctgcggactccgttttttgccaaggagtctgagatgcttcatgcccatcagaccatggggtggccttcatgggagacctgcagggccaggctggccagacttggccagaaagacttcccagggaagatgcttggctctctgctccaaggtgggccatggtatagggccctcgaagggcttgtggctggggtgatcccagggggcattgctcaaagtgcacaggaggtggcagcagggtcaggcgagttcctgttccagggacatcaggagggagggtagaagcctagggagtgtgcgaggctgctgggatgagggagctcaggggctaccagctaaccagcctcagctcaatggtttctccatccttgggtctgtagtcagcaataccttgcaacagtggggtgttggggtctcggagaactgccagaatccctttctccggccgctttcccatcacgg

SEQ ID NO: 127339 - DNA, 684 bp, Homo Sapiens
tgaattaagtatttcatgtttttatttcaaaagaaaaaaggataccaagaagcagaagaatgaagcagttaaaaccagcaaagctgcaaagtaggaaagaaagctgagggagagattgatccgatttcaacgatgtggccacttaatgcaaacacaggggtctgatgctgcaaacctaagtcacatgagtccagtgacttcagcaggtccactgatccaccacagtgacagggccaggccccttcctgctgaatcctaactttacacattctagacacatgtcatgcacatacaggttacactttatggttacatgaaattgcatgcaattcacacagagaatcattttgaaggcactgtattttgcagcaggagctgctactttctggcaagtccttcctaggttggctcacaagtggtcctcctttttatttattcctatatgaaactttggtccaaaaatcaggtgcggtctgatcctaccctcccagctgttttagtttcatgtctcaccttctcttccacgttcccttcttaaacggtagatgtcaagcttagaagatgtttcctgacaatgagatcctgtttaattcagattttcaaacaacttgagtcaagcaagcaggagcttatagtatgttgatttaaaacaagttgttaccagtttcccttaccctctgaatt

SEQ ID NO: 127340 - DNA, 2037 bp, Homo Sapiens
  misc_feature (1946)..(1946): n is a, c, g, or t
  misc_feature (1953)..(1953): n is a, c, g, or t
  misc_feature (1969)..(1969): n is a, c, g, or t
  misc_feature (1977)..(1977): n is a, c, g, or t
  misc_feature (2021)..(2021): n is a, c, g, or t
caaaattttccccttttactaaaaactggcaaaattatggatcattaaggaaaccctaaccaggtattaaaacttttactttacttaggctcttccaaattaaaaattgggattccttgggagcccacattctatttttgggccttgttgaatacataagtttaaaaagatttggcaactgacataggaatttaattacttaatactatcttaagtgactttccctttctgtttccaaaatatagacattatgccatttcttcaacatcctggattcctataatcactaccatactgtatttattagaaccaaattaaagcttctctaacaagcaggtagaaactatttatgttccatatacggctgataagttataacacaacttatgtttcatatagggctgatcagttaattcatatagggctgatcagttgtaacataacttcttaagcaaaactaatcttttttttaaagctatcactcaattatggagacaataatgtcatctgaaaaggtaatgttggactctaggccatctagttgggaaaatgtaaaagtaattctaaaaacaataagtaaactataactacaagttaaattaaaaatccctctctcatagcaagcatgctcattaactttcatttctttcccccagcaaaggtttgaatattcataaacctcagttaaaccaagagaaccaatgtaattgtttcaaaagtaccacctatatatttgaataatatgagtatggatggactaggtaagtaatactatcaacaattactgaattggagtgaaagagtaaaaatcatgacagacttccaaactgggcagtctttgaaatgtcatagtggagctcaaaatgaattatgctgtaataaaactatagtttttacctctacacaaaacagaaacaaaataaaaaaacataaccaccaaatttatacaaatactattaaacatactccttcctagtttttgaatgtcttgaagtttttctaaacaagtatattgatctgagcatatatatttattgcctatatatgtactcattttaaaagacaaattcagatactacagaactgaactctttcaccaacccaatccaatgtctactgattcacacagcaccccccccttaattatttaaaattcacaagttttagtttagttaaaagggcagagggaatgcaaatgcagatttagagctttgtagaaatttcactgtatttttataaacttgaagttatctgtaacactgtttattgatcaaacgaaggactcgctgctatctaaaatttcataaacaccattaaaaattcaaaattgatattatactgaaccttaaattttcaatagttcaaagagacagtttttacatgtatagcacacaatagatgaaacttaatagcagacatccctagaataccaatgacaagtccaccaagatgcatacaaaattacagataagcatttctttcactgtttttgttgtgcagggaaaaacatttatagaagaaatagaaactcagctggtgaatttcagatatcatcatcatcttcttcatcctgagaagatcccgcctgattagatgcactggctgaggcagcagcaagctgggcttgttgggcagcttgctgcatttgaagccattcctgttgggccaattctgcttgttgctgtctagcttttgcaaataattcttgttgctgtctcaataactcttcttcaggaatgccaaggttttccaaacgagaactggcctttcttctttttaatgctactgttttacactcttgcaagacttcttttacttcactgatgtaagagccaaatcccaaactttctagtgcttgtatgacatgctcttgtgagattgtcttcttttccgatttgttacaaatctcattggcttcagaagatataacgtgaatgaattcagtngcgcagntcaccaccagctctcngacatcgntggccaccccgacattaaggaagagtctccttgatcattttatngatagcagctcctggg

SEQ ID NO: 127341 - DNA, 663 bp, Homo Sapiens
  misc_feature (635)..(635): n is a, c, g, or t
ttttgtgggtcacagttgagggtttattgccagtgttaggaagaatggggggtctgggtggccaggggtcttgggaggaattccaaatgagcactgcagggcctgtgagtggggaggagagctgctgcccccctgccacccaggaggccccagggctgatgccaccatatcctgactgctagtggtgccttaaaaggtggcctccccacaggaggggagccttgggggcccccaggagtcagccctcaccaacaagccctctctcaagggggccaggggcctttattcctcatgggacaggctgggccgtgcccattttaggggagctgaccacacctcagcagctctgggctcccagattttatgtggtgggccctggggccgggggtgggatgcaggcatcccggctgatttctaccctgcggtcttggggcacctacaaggcaagggatcctcctagacagtcactgatcccctcatcctgggcatttgagcccgcagttttactcacagactgagtctcataagggtcccacccctggccagccctccctcgaaccacgggcccacttctccccggtcaggcgatgtgctctctagaagggagggtggtaggcagggggtgcacccagagntggaggcagacagggccctccttcctgg

SEQ ID NO: 127342 - DNA, 610 bp, Homo Sapiens
aaaatatttgaagagatttattctgagccaaatgtaagtgaacatggcctgtgacacagccctcaggagaccctgagaacatgtgctccaggtggtcggggaacagcgtggttttatacattttagggagacatgagagatcaatcaaatacatttaagatatacattggtcctgtccagaaaggcaaaacaacttgatgtgggggcttctagattataggtagatataacaattttctgattggcaattggttgaaagagtaattatcgatagaaaggaatgcctgggttgtaagaggttgtggagaccaaagttttatcatgcagatgaagcctccaggtagaagacttcagagagaatagattgtaaatgcttcttatcagccttaaggtctgtgttgatgttaatgctggagggtatgatgaggcatgttcgactcccacttcccatcatggcctgaaccagtctttcaggtttaattttcgagtgtcctggcccagaaggaagtccatttagatggttgagggggcctcagaattttgtttagtccccatggctccctctaaagttgaactcatagtcctttcttcttgcaagagttcctgtaag

SEQ ID NO: 127343 - DNA, 784 bp, Homo Sapiens
  misc_feature (125)..(171): n is a, c, g, or t
caaacgcatgatgagctttgttttgtgagtaaaacataatacgcaaaagaagtatgcttgtagaggggtcttgggtcgtcatttcttttctgtttctggtttgtttttggagagagtctggcttnnnnnnnnnnnnnnnnnnnnnnnnnnnnnnnnnnnnnnnnnnnnnnntcctggggcttcgcttcctgattcggttgtcctatttcagttcactcctcaggcgcggaggaaatggtggaaggcccagctctgggtgatcctgggcgctgcccccgttacccgttaccaggaagaaggtgagcctggcaggtcacagcacgagcgtgcacaggcccagcagggccatcagcagcagcgggagctggggcacgggcgtggtgccagaggcatacagacaggtggtgtaagcgtcaatgtccacctggcgcatggcacacacgtgctgcatgctgcaggcctcgtcgcagaccccagcagagtagctgactgagttatagacgtagtagcgctgcagtgtgctctggtcgccagcgatgcggtccagcactgtgtgcatggagtgggcgctggcgtccggcaccccataggcctcggtcagctggtactcgagctcccagcgcggcgtcccctgagcattcgcctggctcaggttcatgaagtaggtcaccatgtccttcaggctcagtgtggctcggtcatattcgaacacccggatggctggattgttggccccattgaccactccaggtaatgtggttttccatggggtgactccaggtgt

SEQ ID NO: 127344 - DNA, 492 bp, Homo Sapiens
tggtaggttgggtgtgttgaatgcatttttgacttatgatattttcaattttgggggacgagcccccattgtaagtcaaggaaaacctgaatatatctccaaggccatgctggtaggtggtggcagaatatagtgcactgtgatcatttccattctgacgtgctcggcatccccggtctgccgctcactcgctcagtttcctcatctgaaggtggtccggaagcatcatcgcgtcatagcagggcagttcttcgggcaccaccacaccgacagctttcggatgctctggagtggtcaatggggccaacaatccagccatccgggtgttcgaatatgaccgagccacactgagcctgaaggtcaggagtccttcttcctggtaacgggtaacgggggcagcgcccaggatcacccagagctgggccttccaccatttcctccgcgcctgaggagtgaactgtgggccgccgtccagtatgcgctcggcggccc

SEQ ID NO: 127345 - DNA, 1300 bp, Homo Sapiens
  misc_feature (764)..(764): n is a, c, g, or t
  misc_feature (1011)..(1025): n is a, c, g, or t
gcggccgctgatgggagtcggagcccgggcgggcgagcggcggcgcggcggccaccatggggaacaagcagaccatcttcaccgaagagcagctagacaactaccaggactgcaccttcttcaataagaaggacatcctcaagctgcattcgcgattctatgagctggcccccaacctcgtcccaatggactacaggaagagccccatcgtccacgtgcccatgagcctcatcatccagatgccagagctccgggagaatcccttcaaagaaaggatcgtggcggcgttttccgaggatggtgaggggaacctcactttcaacgactttgtggacatgttttccgtgctctgcgagtcggctccccgagagctcaaggcaaactatgccttcaagatctatgacttcaacactgacaacttcatctgcaaggaggacctggagctgacgctggcccggctcactaagtcagagctggatgaggaggaggtggtgcttgtgtgcgacaaggtcattgaggaggctgacttggatggtgacggcaagctgggctttgctgacttcgaggacatgattgccaaggcccctgacttcctcagcactttccacatccggatctgaggacactgccgaggctgtaggggcctagaagtccaccatcctgccctgcagtcacatgggtgtggcctccaagctccccaggaaagcagtggcagcctctggggtttacaccacaaatatatcctgtggccctttcagcaaaanaaaaaccttaaccaggaagggggcctgtgaaggttaggacccttcccacagccccgctgtggtccagccccgggacccatggcctctctccaggccctccgcaccccgccccatgccccagtcctttcctactccagaaatgctccccacccccccaagagggaaaagcagataacccaacaggaggtggtggggtctgacgtgtccaagtgctggcagacaccctggtcacccaggacagagcggnnnnnnnnnnnnnnngaggtcagggttttaacgagctatgcaatctttttccaaaacccaaggttgggctgcttcccacccctgcctgttccccttctcccggcctccttcacgaatgtgaagctgtgggtgcgagtgtgcccaagggctcttgctcctgtctctgcctctgggtcatgagtaccaccctgcctgcctccccaacaccgtggaatcctcactggtgtgctgtccacagatttgtgaactcctggtagtaaaacacttttgcatccctttgctctccatgt

SEQ ID NO: 127346 - DNA, 676 bp, Homo Sapiens
  misc_feature (271)..(271): n is a, c, g, or t
gcggcggcgcggcggccaccatggggaacaagcagaccatcttcaccgaagagcagctagacaactaccaggactgcaccttcttcaataagaaggacatcctcaaatggggaaaccgaggctcagagggatttggtcactcctccagggtcacacaggctgtccacagtctggctccggggccctcctgcttatcctgcacccacagtgattgctgtgtgtgtttttcttaggagaatcccttcaaagaaaggatcgtggcggcgttttnccgaggatgttgaggggaaccttcactttcaacggactttgtggacatgttttccgtgctctgcgaagtcggctccccgagagcttcaaggcaaactatgccttcaagatctatgacttcaacactgacaacttcatctgcaaggaggaccttggagctgacgctggcccggctcactaagtcagagctggatgaggaggaggtggtgcttgtgtgcgacaaggtcattgaggaggctgacttggatggtgacggcaagctgggctttgctgacttcgagggctcttgctcctgtctctgcctctgggtcatgagtaccaccctgcctgcctccccaacaccgtggaatcctcactggtgtgctgtccacagatttgtgaactcctggtagtaaaacacttttgc

SEQ ID NO: 127347 - DNA, 444 bp, Homo Sapiens
agcacggaaaacatgtccacaaagtcgttgaaagtgaggttccccttcaccatcctcggaaaacgccgccacgatcctttctttgaagggattctcccggagctctggcatctggatgatgaggctcatgggcacgtggacgatggggctcttcctgtagtccattgggacgaggttgggggccagctcatagaatcgcgaatgcagcctataaaaagcaaggtgactgaatagggtgggctgcccactcggcctcaatgtgggaatgcaggagctgtgtcctggggagcaatcggatctacttgaggatgtccttcttattgaagaaggtgcagtcctggtagttgtctagctgctcttcggtgaagatggtctgcttgttccccatggtggccgccgcgccgccgctcgcccgcccgggctccgactcccatcagcggccgc

SEQ ID NO: 127348 - DNA, 691 bp, Homo Sapiens
aaattgacaacattattttactggaatttagcagggagaagataatatcttcaagctttcacaaagaaaatctccacattgaactcaagccaaataaagaaaatccaagttcctgtttcagtctcaactggcccgggtactaaagcaatgcactcctctcttaggaggcatgtgtcaagctgtcagtgatgtggccatcttttcatgacccttaactctctgcatcatgtctcagcaataccaggcatgaattctgaaaaacttcttccacttatatggttttcctcatccagctgagaatgctgctggttactgcaaaactgttcaccaaccatatgctctggtccatacagctttcttcttaaactctgggagaactctcaaggacagcagggtggctttcaaaagatccctggactgtgctgagagggcttctttagggctttccatgatgctgaatagccagtcaatgaacttctgggtctgttccttccatggctctttctgcagcagcagagccatgctattgggaaggagagtgagaacctcctgcagagtgaccctgtgcattggactcctgccaaggaagcttggtactggcccagccgggccattctcctgatgccatggcaaccaactggcactgaggccgaggaggagaggggcagtgtggtcagcccatgcaccactg

SEQ ID NO: 127349 - DNA, 534 bp, Homo Sapiens
tttaccacttgtaacaactttattgtactggtggagaaatctcacttttatattccaaaatgaaaaccagttttggtgtataaggggtacggtagcatgttgctttctgaaagcctttgaaaaatcctaaaatggccacagtgaaaacaacacaggtatcagacctggctaagtgagaaaggcaggagccagcggtatgtcctccttcttaagacacctcctgagatgggcagttttttaagctgccacttcgagcttcacagcccttcagagaggtggtatggagaggaacttcattttctgatgagaaagcagcagtttaaagaagagaacaaaggtctccaggcctggcaggcagcagctaaggggctagaatccaaatctcatgattaatgacctaataccttttccactatatcaagctgctttgcagatacacagcaatatttccagatttccaaccacttttaccatatgtgagcctcaaaaccaacgcagctcagctgcaaagataaccatgataggttgagacct

SEQ ID NO: 127350 - DNA, 1295 bp, Homo Sapiens
acacaagtgtttaaaaatcgtttattatgcaaaatgttaacttttataaaaagtttaatatacatcgcattgttacagaaagtcaccttcctgtaaaaaaggtacaaaacctatatactctattatagagttcataaatcagggcaacagaacctttctccaaggagaccagaagaccagctctgccgccgccttggcatagtttggagagcagccactccttccacacctccacgctctgaaaagaccttagaacttgggggtggggtgggagcagggtgacgtcgcccagctggtggccagagctagctctggctcttcaggccacaagttcacagtccttcgctcctgagcaccaggtttagtctccaggaagggatttggtgaagtcaagtgggcagggcgaagttggggcccatccctgccgtccggcttccggcaggagaggttcccggggtcccaggcagaacgggcgccagcacctgcgttctggaggtgtcaggacacggccgagtcagtggcaaaagctccttttgtcgttggagatgacaagttccggagcgagctcggctgtctggatgggaaggtgggggccatcagggggtccaggggctggctcggccaggactacctgcaggtcgagaatgtagtcgatgacgcgctgtaggatttccacctggctaagctgagtgcctctcgggactccgggtaccagttcccgcaggcgggagtagcagtggttcatgtcgtccagcaagctcagcggctcctcagctgccgggcccttccctcggccccgggcgatggccagactgcgttccgacaggcagcacaccgcctcgtagcagccgcgcaccgggctcagcgccttcatgctggggagtgagtccagaggtgccccaaagagaaagaaaaccaaaagaagtcccgctacagtgacctgcaacgcgcgcacgctcgccgcggcggtcacttatagagcctgcctggaaggcacgcctctttattcaaaatggcccgcctcggccctgcccccgccggccctgggcgttcacagcccgcttaaattgcaaacaggcttcctccggctggtctgacgccgaagactgcggagccgcggattcaaagaatgaggaagcgctgataccggggagaggcgggcctctccgccagcaaggatttaaaaatcactcaaaaccattaacttccagaatttgctttttcctggcagcaccccagatctttgagcttccctgccccctgccagtccgccttatcccgggaattccggaccc

SEQ ID NO: 127351 - DNA, 1081 bp, Homo Sapiens
ggaattcccgggatgcgggacttcttttggttttctttctctttggggcacctctggactcactccccagcatgaaggcgctgagcccggtgcgcggctgctacgaggcggtgtgctgcctgtcggaacgcagtctggccatcgcccggggccgagggaagggcccggcagctgaggagccgctgagcttgctggacgacatgaaccactgctactcccgcctgcgggaactggtacccggagtcccgagaggcactcagcttagccaggtggaaatcctacagcgcgtcatcgactacattctcgacctgcaggtagtcctggccgagccagcccctggaccccctgatggcccccaccttcccatccaggtaagcctcgaagtcgggacagggctgaacacccaggcaaggatgctgcgggaccctcggagctcccgattgcctcgcgtaactcttccctcttttcctctaatcagacagccgagctcgctccggaacttgtcatctccaacgacaaaaggagcttttgccactgactcggccgtgtcctgacacctccaggtgagtatctcctctcttggagagggaggtttaaacggcaagtcctggagttggcagacgttttgaaaaattgccactcactcggtttagggaaactgaggccagagagggacaagtgacttgcccatggttgcatcaaatgaatggcagagtcagtttccatgtgatgtgcatttaagccttaaatgcgcctggggccctgccctcccgcagtggccgagggtctggcaaagtagacatgggtccgactaaatacaagtctttctgttccatgttgtatagggaagctgtcttcggcagcgcccctccaagttagtgtccattccaagtaggaaggggtagcgcaagctccgcctggggtctttggccgccaactggggtgggggcaaccgtgggggcgcggaagttatcagctggaaggaaagaaccaagtttcctccctggggccgggcagtctgcgggaggacccccccctcgggaacctccgggggggaaccggctggctccctggggcttct

SEQ ID NO: 127352 - DNA, 786 bp, Homo Sapiens
  misc_feature (62)..(80): n is a, c, g, or t
gtgcctacctgaaaattaaccctcaactaaagggaataagcttgcggccgcatacgcggtcnnnnnnnnnnnnnnnnnnngtttaaaaatcgtttattatgcaaaatgttaacttttataaaaagtttaatatacatcgcattgttacagaaagtcaccttcctgtaaaaaaggtacaaaacctatatactctattatagagttcataaatcagggcaacagaacctttctccaaggagaccagaagaccagctctgccgccgccttggcatagtttggagagcagccactccttccacacctccacgctctgaaaagaccttagaacttgggggtggggtgggagcagggtgacgtcgcccagctggtggccagagctagctctggctcttcaggccacaagttcacagtccttcgctcctgagcaccaggtttagtctccaggaagggatttggtgaagtcaagtgggcagggcgaagttggggcccatccctgccgtccggcttccggcaggagaggttcccggggtcccaggcagaacgggcgccagcacctgcgttctggaggtgtcaggacacggccgagtcagtggcacaagctccttttgtcgttggagatgacaagttccggagcgagctcggctgtctgattacaggaaaagagggaagagttacgcgaggcactcgggagctccgagggtcccgcagcatccttgcctgggtgttcagcctgtcccgacttcgatgtttacctgtatgggaaggtgggggtcatcaggtggtcag

SEQ ID NO: 127353 - DNA, 1409 bp, Homo Sapiens
tttttaaggccaaatatctttattgcctccctcccatccccaattccctgttccccccaccaagtcctgctaggaaccatccttagattccaggcccagggactccctccgagtaccaggccggtatgctccctggccccgaggcaggcgagggtaggaagaaccgggtgtccggcctttagagcgctcccagcgaacacagtcccgagtcctgcggggtgggggcccctgccagctgccaggccccttctcttgtggaggaccttcaactccttggctatggggttctggctttaggtccatgggctccttgaggggcccctcaggaggtggcagttcctgggtgtcacgggtacctttaggggcgtggcactcccctccctttgggtgcctccgttcgggctgtcgccagggacctcgactgggcttggggggatctagcatagctttctgggtttcgcccaacctttgctgatttgacctggtccctggaatcttctcacatatgtgctgggtcgccacaggcagaggaggtggcaaagtggattggacggctggtgaggtggatagtttctgctgcaagggtgctgggtggttgggatcctttggagacatctacagctgactcaggttccgcaggggcaggaggctgctgaaggctgatgaagtatcggtttcgctcagccctcaaggtcaatgattcccccccgctcctgctgcctctggtagagccgcttgcgttcttcttgctggcgcaagctctctgcactgggctggtacagctccatgggctgttggggttcaggggctgctttcagtgaggcaagatcatacacgaggggctctctgcacactggacactgcacaccgactgccttctgtttggttgtagcatgctgccgttcctgttcctgctcctgtccttgtgccttcagctcttgctccatgtgctggatgtaccgagcaaggcagtggcagtggaagtagtggtaacagggtgttttggtaaaggcctccttctcctggaaaccatagaggcagatgacacactggccatgagggatgttgttatctgtgagaatttccttccctttctcaatgagttcatacagcatggcagtgcccagcccagccttggccacgtggcccagcacctgtaagattcgtgtggatctgttcatctgaaagtcctcggggatttcggatagagatctgtggcacctcatggggatactctgctgggacctgaagcaccagagtgaagcagacatactgtgaatcctggtcctctgcagtggcaggatgcaaagtgatgtagatctcccatggtgaagttctgccatttcctttaatcacctgtagttcatctagatagatggactccaatacatcaacttcagagggaagga

SEQ ID NO: 127354 - DNA, 1143 bp, Homo Sapiens
ttttgttattttaggcaacctttattacagaagtccactattttaagtgactttttgccaattttagatttgaagggaaggtctcaagttaagcttggaaccacttagaatccaagagggtagcaggaagatccaacccctcaaagcaggtggcatgggtgccactgggaggggatctggggcctgtcttgagccgtaaatcttcctccacctgagacgtgcaccccactgtaccagagatgcctaagactccaatccctgggttctggctgtgtggaaaatgtctctacacagtcaagcttcagctgactacatgtcaaagagagacaaagttaagagcagcctttcatggtgtcaagaagcagttagcatcttgacttcccctccactcactcgctgacctgctgcagcctccccgggcacctcaggcatagaaaatgagctcagggatctgcccaccctggaccccagtcccgttggtgctgtccgaggagcactggaactggaaggccacctttccacactgcacttccgtcatcccctcctgcccaaagtagctgagttcgctgccgtccaggacggcactggccgtgtagaaggtgtcttgttcaacctggaccgggtgttcaaaccagaccgggaaggtgttactggatccgtctgacatgaacttggtcaagttctgagccagaaccaccccgagccgcttgagctcaatcttcacgctgtactcagccttcccagagctggagccatacaggcccagccctgcaataaatacccttctgtccactgcaaactggatgctgtcgcagcgcccgcggtaccgccactggttgctgcggtaggcagaagactggaatcggtggcacctctgcggggcgaggcccttcctcttggtcaggggaaagtccaggcggggcttgttggtggccgtgtaccacaggaagatgctgtgggtctcctccagagtcaggatgtctgactgggcagcgccgttggcaaactcctctagggtcatggttggaattcggaccagatagagggctcgccccagaacatgcctcttgtttcgtggggtgattggcagcccctgcctcttgcactccgcctcggcccagttcaggacggcctcgaagaccc

SEQ ID NO: 127355 - DNA, 1627 bp, Homo Sapiens
ttatcgccaaaagtttccaggggggtggaatttcgccgggggattaaaggtgcatcaataccgtttttggaggggttttcaaggggggcgaaatggtttaatgaatttccaccagttctttgaataaattgcaagggggggtgtctatcaaatattttttattgaaatgacaataaaataaaaaaagaacagtgatcactttaaccaaacttactttacaaatataaaaatataaccaaaacttgtttcttttatacatttgccataaacgtaataccagaaaagttctcaaaaccaaactataaatgatgcttgaatactatgatgtgaacacaataaccaaaagtttaaatttctaaatacatgacctttccctcaacagaacagcataatcaatatatcttcccaacttatctctatttttacgatatgatccattactaagatacaaaatacacctgaactggcctaatctagagttacctaggttttagtaagtttttttccacaaaaacaagcttaataactataatacaagctaatattaaaatgtgttttatggctcaaatcaaattacagtattaggtttctcatcacgatttgaacaaaagcaaactgcttgaaatgagtccagtttaacccaaataatcagtgatgtataacaagtgaagtaagtatgggaaaatcaaatcttatgctacagaaagctgacttatactacagtcaacaaccactaagccttctttggcaatgaaacatacaaaattgcaaactctgatgcagtctcagtgattggcatatactgttccaaacactatgaactagtaaaaacattaagtttgaggatggaaaagctaccccaagcatttcatctcaagtgactgaacaagtactgtaaaaataaagtcattaaaaagccgagaacataagagcacaacatttaagaaagggaattttaagccgattgcttgctggcctgttgaatttgaagtacttctacctctcacttctaattaaacatggaagaaaacagactggctaatttggtcacactttgtccaaatacagtgttaacttaatggaacccttaaatatccgaaaataataagtgaatgctatttataagacaataaaaagttttaaattcttccaaatgtgctgttaacagtacaaattcaagtgcagcattattacgccattttaagtattatctacttttttaaaaaatcacagtggtcttcatcacatggcgaaaaaacaaacttcactcttctccaaagggataagtccatcctaaatgtaactacaaacaattgtataaacctttatagtttttccccctaatctactaaacatattccagtgtcatttagtagttttacatagaatctgcactatacttggatactcagggaaaataagatgacatatattgtagttttagaacgcaaaagagctttcattttagacaaatatacaacatagaagccactaaaaaatatgggtctattaatcaagagcccatttcaaaatgataagagcattcagtatgtacatctggaatgcacagtttctggaagtattagaacttagtgttaaacagtgcccttataccctcttctaatcc

SEQ ID NO: 127356 - DNA, 778 bp, Homo Sapiens
  misc_feature (251)..(320): n is a, c, g, or t
cgagcccatacatttctgtttattgtaaatgtccccatctcagtcctgctgttgaagcatcatcacaaagtgcaccaagacatgagcttcccttcgtttggaagttttcccagccctgttcagagcctcatgcgtgaattctggcatccattctcccaggcatccattcaccaggcatcctcagcccctgctgtggcctggccctctagggtctgccttgttccctgcctgcggtcagctggggaggccannnnnnnnnnnnnnnnnnnnnnnnnnnnnnnnnnnnnnnnnnnnnnnnnnnnnnnnnnnnnnnnnnnnnnctgatgaaagacctgggcacctggcctcgaaagatctttgcgtccaaacggggccttgagggaccctttgttttcacttcgtagcacagccagacggtattccgacgagaaaggatgggtctattataaaagttgtaggagaatgtgtctcgatacattcgctccactgtgtttctgaagtgaggcttcatccttggccggctagtcccgactaagatctttgtctggagcaccagggtttcactttctgctccaggctccaggtttcaggacagccctccctaaagtgacctcccagggcctcgtagtcatggcccctcccccttcctgctcaggcgctggtgtaggaggccctgggacgctttatcttcctcagtctctcaccctctttctggttttctctggggccctccccctggcagagggacctctgataaagacaggccgctactgtgcgg

SEQ ID NO: 127357 - DNA, 937 bp, Homo Sapiens
gggctccaggaaggttaaagcagttacccctttagttcctgttccaggttccagcttccacacgtccaggaagcacagcttttgcatggcggccttcaaggatccgttgttttaatttggagcctgggttgcatagatagccctgcgctggttctagcaggactccaggtgtcacttgtgcatgcgctccacctcatgacacaggtaagtctcatgccgtcctttgaacccaaggttcattgttaaagttgaaagtgaatgttggtggatccatcgagtgtctgagaatctcccccagcatgatgtgcagtaatatataatatttaggcagattattccaaggctcaaatagctctctttggctgtacacgaacttgctccaacagtgctgaaattcgtcataattcatgatcttcatggtggcacgcggaccgtctcttttctgacacaggctgcgaagcgcctcctggtaatctgggtcccagaagtagtagaggcgggcaacaaagatggtcagggtaaccttcgggtcctcggccaggaacgtggccatatcccttgtacactttgtgcaggggctccaggatatgtaccaggtgacctcatactcctggtcacgatgcagcttcctccacttgctgaaccagtggaagaatctcatctctgggtggtacttaagttcggaatacacctggcctcgaaagatctttgcgtccaaagggggccttgagggaccctttgttttcacttcgtagcacagccagacggtattccgacgagaaaggatgggtctattataaaagttgtaggagaatgtgtctcgatacattcgctccactgtgtttctgaagtgaggcttcatccttggccggctagtcccgactaagatctttgtctggagcaccagggtttcactttctgctccaagcttctggcc

SEQ ID NO: 127358 - DNA, 444 bp, Homo Sapiens
ggataaatgagcggtgtatggtgtatttttcaggtgcccaggtctttcatcagagccccatttcaagtgctcagtagcccctttggccagtgcgtcccaccacatgggacagcgcaggtccagtggcctccccagctgaccgcaggcagggaacaaggcagaccctagagggccaggccacagcaggggctgaggatgcctggtgaatggatgcctgggagaatggatgccagaattcacgcatgaggctctgaacagggctgggaaaacttccaaacgaagggaagctcatgtcttggtgcactttgtgatgatgcttcaacagcaggactgagatggggacatttacaataaacagaaatgtatgggctcgagttctggcctcttggaagtccactgtcaatgcaccagcaactttccagggcctgcgagctgcacagtcac

SEQ ID NO: 127359 - DNA, 676 bp, Homo Sapiens
ttaaaagtcattgctcatttaatcttggaggccacttggaggagcatggcgtctttgtctcgccctgggtgagcacaccgaggcccagagtttgatgattccttcaaggtctcaaagcttgccttcttcacagcgcttggtgatgcacgtggttgtttctcagtatggtttgccaaagggatgctctgattcaggaggctgaggtggggcctgggaatgttcatttctaaccttttcccaggtgatgctgaggccactggtccaggggccacctttggccttaagccgctaattaacaacatgagtcactttcatctggtccaggcttgtcgccccctcgatggaacacagagctccctctttccctcttggcctcatcaccagcccccagaacaggacccagcactagcagcactgaatcgtgtttgttggtgaactgatgcgtcgtgatgctgggtgagacaaggacggccgcgggagaggcggaactggccaagtctttgatgaccatgtgaagaacccccagccctgagggcgagaggccagacctccctgatgctgagtccagaccaggagtccagccaggagctggtcactggtggagctagaggttttcaagtgcatcctgggacttctgaccttccctcctgacagttctcatcccccagctgcggtg

SEQ ID NO: 127360 - DNA, 901 bp, Homo Sapiens
  misc_feature (86)..(100): n is a, c, g, or t
  misc_feature (169)..(184): n is a, c, g, or t
agggtgtcagatcattttattttgccaagttttaaaaatttacactaacaagtaattagcacactcagggcacaaaaatcttatgnnnnnnnnnnnnnnngcaatacctgtatagaaatcatctacagcacatgtttctcccgattatatacttctcttccatctgccnnnnnnnnnnnnnnnncaatgctcaggagagaaaggagagtttatttcacacaggttttcattaaaaaggtgaggtcagatcacctggaggttattcactagagctctaccccaaatcattcttctaggaaaaataagccccaaacatcatattattgtagactagtctgtttttatttacaatttaagatataaattagtaaagaattcgtgttaaacaaccaacaaagattgtataaccagcaatgttcaaataaaaaccaggcagaatttatttacaaaaagtttagattccattgcaatacaacttgcataaattactagaagctttatatcattataaaaataaatatcaaatttgtttccacttctgaagtactcaagttcttccatcacgttttatttctactgtgtacatcttttacaaataaactttacagtaaatcctatcacacctatagaatatataccgtggcaatgaagtgatcaattcaagatatcctgagaaaaacagattgttttcaaaagtcacacatacatcggggaaactatactatgccaacaaattcacatatgtccaacaatagtctgttccaattgttagagtctgtgggctgacagtgctgtgtggatccttctcttttacagtggcacaagatgtggtctggatttagacatctgtttgttgtatctgtaaatttatgagcttgggaagagagaatggcctgctgac

SEQ ID NO: 127361 - DNA, 506 bp, Homo Sapiens
tatatagtacatgtgtatatatatattacacactactgttgttttcttttgaaacaatagattattaaaatctgggcatttatatgcaatttagagccatttttactatgctagacacataatagacacatgctttgatgagcttgggctaccaaaacttggagtagcaaaaacctttatagatgatgtttgcaaaataagactgaagagacacgaggcgtactagtcttttatcagccctgtccaacctcccctccacccatgtccaagtggacaggactctgacattctcccggggctcacaacagtatctcaaaaaatatgttgctttgcaacgagtcagaattactaatcatagatcttgaagataagaaagatttggaaccacttcagatcaactcgtttttataatggtgttgttgtggaactgaaagattggggatgatttggttttttccttggtccacaggtaggtgtcacaattgctttgaaaaacctgttccgaa

SEQ ID NO: 127362 - DNA, 1001 bp, Homo Sapiens
tcaggtgtaaagaatattttatttcaatacttcaatattgaaatcagctatcacacatatccaccaactgatatttcattgtccatctctcaggagatattcaaagtgagattaatttaatgaagccttctcagcaaacctagaacactgtacttcatcttcaaatttaagtcatagcctttaataagttacttcctagtcattattttatagtatttatgaaatagtgcaatatatcaatgaggtatcatttaagaggcaaatactctatagatttggatttgtcatcccaattccttggcattcaataatataagtatctttagcggcgtcttcttcatcttctgatttcttcacaataaatttagcctgaaatcagaagaggagtatataagtaatacgaagagagatggaggaaagagcccacaactccaacttatgtaggcagagagttaatgtcaagcccattttattgaaaaacctacagagacacaaagatcaaatgattgatgagaaagaaacttaatagcctcaagataacacatttcattgtacaaccatggttcttcttcagaggtatacatacctgtgagttttgtccaaatatatatgcctgggccccttccacgcacactgaatcagaaagctcagatgtacagcttaggcaaataacagttttgaaacctcaaatggtaattttaatgcaactgtattccctatgccctaaaatttttctgaaacatttctacttttatcttgtcaagtcacgaattaccctttaatttctttacattttttcttgctaatttagttccctatatatatcgttcaaaagatccagttcagagaaggtatgtggggaggaggggtggtggtggtgattaacatcttccttcatctttaatgtactgggcttaacatcacatttttcacttagtaactaaagttggctttgaaatattttacctgtatcattgtattttgcttttgtttttgttctg

SEQ ID NO: 127363 - DNA, 1536 bp, Homo Sapiens
acttcaggtgtaaagaatattttatttcaatacttcaatattgaaatcagctatcacacatatccaccaactgatatttcattgtccatctctcaggagatattcaaagtgagattaatttaatgaagccttctcagcaaacctagaacactgtacttcatcttcaaatttaagtcatagcctttaataagttacttcctagtcattattttatagtatttatgaaatagtgcaatatatcaatgaggtatcatttaagaggcaaatactctatagatttggatttgtcatcccaattccttggcattcaataatataagtatctttagcggcgtcttcttcatcttctgatttcttcacaataaatttagcctttgctatttgttcagcaaaatgtatcgcggtttgcgtatggagtgtaactggtcctgtttttattctggaaactccattggctaatgccatgaaaacaatcagctggtcttgcagatactcatccacagtaccaccatgtctaagatttgctaatagcatttcggcagcttcaattcccaactttttctgcatttacacctggttttcccaagcgatgatccagcaaccaaacagccagtggaggtctcagcaataattattattccatttccattgccaaatgcttggtctttaggttcttgaacaggctggatgttaacatacaaatcccggatctcctttctgatgcatctaactgctgccgctgccatatcttttgctactttaaatggcaaaacaccagcaacgaaagctcttccatatatcttagtcacacagccacgctcagttaaatttatagggttcaattgtttaactggtgacattcgaacaatcacttcaccacccccttttgggtaatatccccttgttttaatgtcacaattaaatatgaaaccaaatttttcaacaattggcttgaagaccatcactgtataatcgatctgtggtgccatttcagcattagttccacctttcaaatgaagttctgatggagaagcagcaaagagaacacacggcattgagacctgcatcaagaggcacacactccctgctgtcttggtatctgctgtgtggattccacctttgatcttctctggtgtaaaggttatttctgttgagccaatttctgccccctccagttgcccatcacacaaatctcgaatcatttccagtccagataaatgttgaggcctcaggcctggcgtgctccggccggctcggatcttctgcacccgcaaggggaggcctaggagacagctcaaggccgtagagactctcaggatctggccgcccccttccatgatgctgccatcgacctccacccgcggccccgccatgggggacaccctggggcccagcccgcagcgacaaagcctccgccagagcgggagaaagaagagacgttggctcccgcccagtagttcagaaaccttggttcatgcctggggttgcaggagcctgacgagaaagcggaagaagcggcgcctctcgatcccggaa

SEQ ID NO: 127364 - DNA, 1280 bp, Homo Sapiens
  misc_feature (68)..(68): n is a, c, g, or t
gtccgggtggaagcgagggcgtgcgccgataatgagggagggtgcgaggtgcggtagttctcgattangttgtgttcgagtgtgagtgaggatgagggggtatggtcagggatggaaaggggcgtgggcctctgatatacgcggccgcgagagccgcgcgcgggatgtacgcggtgcggcctcgcacgcgacgagctgcagctattattccggaggagcgtgcgtgggggcgagggggtgggatgttaagaaaaatatggcggggaacactacacgggggtgcgcgcgtggccgcggcgcactacggcgggcggtatcgggcggattcacggcggcgcggttaatagtgggtgggcgaggagcgccggcggggtggatgcggggtggtaggtgcgtgtggatagtaggcgctccgggcagttgccgccatcgcgccggatatcgcgtcggcctacggtggcgtacaggccgtgaacaaggccggcggggactttcttctgcgacggcgtcacgggggtactggcctcttccgggcgatcggtcgcaagctcggagacacgcccactcctctctcccctgcggggggtggttgtccgggtaattattctggttgtggagggggtgaagccgggttcatacactaataagggggggtgggtgggacaacggggcaaatcggcggctttcagggggttacacggacaaaggggataataatagggggggcataaatggtgtcgtggcgggttatatggggtagagggggattccggcattaagggcacgggggggatggggaagaatatgtaacggggctgcggttctgaatccggggacccggggtcttgggtgggcgcgtgccgtcttctcccctttccagggcgtaggggatggcagaccacatgcgtctgggctgcggttcacggcgggcaggaggcaaagagagcagtatacgtgtcggacatcttattgaattgggggcaagggggccaccccgagccccgcctcccaggccgccaaggctgcagagagctcgcgcgggcgtatgattctggcggcgtgggggcccaggcagccgccgcttccagaaggttcggtggcggttgggccgcgccggtgcggggaaggcccgcgagccgcggcagccgcgcccgacccggtggcagcaccgagggaagcgtctggggcggcctaagtggcggagcagggcggcctcgtcggaaattcgccacccaggcctcgctacgttaggggttggtgttaaagcgtttgatacgggg

SEQ ID NO: 127365 - DNA, 1990 bp, Homo Sapiens
  misc_feature (47)..(61): n is a, c, g, or t
  misc_feature (64)..(65): n is a, c, g, or t
  misc_feature (68)..(91): n is a, c, g, or t
  misc_feature (94)..(98): n is a, c, g, or t
  misc_feature (101)..(206): n is a, c, g, or t
  misc_feature (1722)..(1766): n is a, c, g, or t
ctttcggggcggcgccccccacaaaaaaggtttaagaaatttttgtnnnnnnnnnnnnnnncgnntannnnnnnnnnnnnnnnnnnnnnnnttnnnnnggnnnnnnnnnnnnnnnnnnnnnnnnnnnnnnnnnnnnnnnnnnnnnnnnnnnnnnnnnnnnnnnnnnnnnnnnnnnnnnnnnnnnnnnnnnnnnnnnnnnnnnnnnntccagccaagcagcagctttattagtggtgctgggttcttcccataccctacagcgtgctcggaagcattcccgagggtttctgcccaacgcctcccggcgctcgggacaacactgtgtagcattgatactggaatgatataaataaagctttggtgtgtaggtttgcaggagagagtacaggttaacactgtgatacgaaaacttcagacaacaccagctctcaatgtgaattgggtttttggccaaggggggaacttctaagtgactggacactgggcccgttgccatggctactcgaggcaccagtggcaggaggagggagtctagggctgaggctccgcgtggccctgtcgcttcgccttcatctgcaggtaccgccctttgccttcctcaaagcgcttcttctcgtcctcggtctcgggcaccagctggggcacaggcagcgacctgccttcctggctcagcgacacgtaggtgaagaaggcactggcggcccggtagcgcttctgagagctgtccacaacagggtcggcgtccaccaacacctcgatctccatggacttattgctcgtgaaggtcatgcgtcccgagatggtgatgacgcagccttttctgatcttgtcatgaaaattaatggcgtccacggaagctgtgacgatgttggtcttgcagtggcgtgcagccacgatcccggcgacctcatccatgagcttcatggtcacacctccgtgcacaaagccgtgcagggtgcagtctgaaggccccaccaggtggatcaagctggactggctgtagctgacagtgttcggctctgggttgaggactggctggacgatgtccccgttcctccacttggtctccatgcgctccagcttctgggcttcataccgcttccggccctcctcctcctgctcctgccgggaatacacaacaggaggcacctcgaggaccttgtccacattcttcagcgacaggggcacataccacagggtggccttattggtcagctttttggcacctgtgaggatgttttcggacatcacgttgacctgcacctccacagagtgcttggaggtgtaggtgatctccgcgctgacatgcgccacctcaccgatgcacatgggagacaggaagtcggtgcgctcgacacgagccagggcggccacacagcgctccccgttctggctgttgcaatgccgggtgctgatgatggcgcctgcctcctcgatcatcttcaggatggtccccccgtggacattgccggccacgttggcatcatctggccgcatgatccggcagatctggatggcggacggcgtctcgacgtctgggcccgacatgctggggtctgcggcggcggatcgcggcgggcggctgcagaagggcgcaggtgtctggcaggcccggcgcggaatgaatgagcccggccgcgccataaagggggagggcagaggtggagcgatggggctggtgaggcggggcctgcgcgccgggggcgaatcgaacgcggcctnnnnnnnnnnnnnnnnnnnnnnnnnnnnnnnnnnnnnnnnnnnnncctcccaggccagccaaggctgcagagagctcgcgcgggcgtacgattctggcggcgtgggggcccaggcagccgccgcttccagaaggttcggtggcggttgggccgcgccggtgcggggaaggcccgctagccgcggcagccgcgcccgaccacggtggcagccccgagggaagcgtctgggcggcactaagtggcggagcagggcggacttgggccctcac

SEQ ID NO: 127366 - DNA, 946 bp, Homo Sapiens
tttatcctcatgttctttatttgcacagagtgaaatgtcagaagttacatgtaaatgaattcacagtcaataaagtccacgtctacctggaaatacaggctcggcctctgcactgtgcgcacacgggcttcacttgtgtctattcagatgcgcagggaagctttggcactgatttattgctcttgagtcattttccacagcttaacaccacccttctcagcacacgcctctgatgcacaccgctgcgccaaggtcacggtctgtgtctccagacacccttgatgagaaaatacattttctgtcttagaagcacatttcaggaaacaagagtggcgctgaccacggtcaccatgcctgttcacaacacatctcacactatttgtcgtttatttctgatctaaaaaactgaaacttttgacacgtacaccagaaacaacacattcaataacatagaagaaatgtctgcgaatgtcttttctatttgttttacacacttagttcatctaactggcagttttgtaaacataaactttaatatcaagattcaaactggaacaattttcttacaaagattgtgagttgaaatttgtcattttgtttgcacggtgccacaccagtcccccacccccaccccacagcctttcctgcctgtttcccacatcaagggatatcagtttcatagaataaaaattaaagtagctcaagcttaccagaaattacatttccacttttcccacccagctcatttctttaaaaactaatggggctattggtgcaaatttattcataatagaagtgaaccagagggccagtgggggctctttcctatcagcacatcacagagcagacagactacctgcagggagagttctgcacctcacgggcccagggccgtctcttcccagccctctccctcacatgctctgccagtctacacacactggag

SEQ ID NO: 127367 - DNA, 1056 bp, Homo Sapiens
  misc_feature (63)..(63): n is a, c, g, or t
  misc_feature (68)..(68): n is a, c, g, or t
tgattgggtgggatggattatgggggggtcttgggtgaggatattaatagtatggtatgaatnagganggttggaatcttaaataaaaggaataacattttaatgaaataaatgaaacagagcagggaaaccaaagagccaattaggggaagaatcctgaaaaagtatggcttcacacagcagcagcattgaagaaaacactatcgatttttcccagagaaaaaaactccaaaaatgtccaataaccaagtgcacagagttatggtcaataagactttgaacatgcatcacacatacataagtacataaagaaaattttcatttatttttccctcagatatacttcaaaataacatgtagacacagaatcacaaatatatacaaaacaaagtatcgcctggttatttcaagaagagttttccctcaattttcttagctgctgtgcataaaattcaaagctttcagggggttcaatgaaagggacaggctctccagcatacttcagcaaagatgcgtaacgctttagaaacagatcatccaattttgtattctttgcagtcaaatgttcatacagtgctttagcagatgtgacatctttctctgagacatagcttttcatgagggaattgtatgcttcttccttttcatttaattcaggaatcaattctaacacagatttcacagttgatgcctttccttgtttcctagaattcctaaggaggaacaacaacaaaatcggggtttgttcagcaattgcaccacatctctgtaggagagctctggcatcatccaccttgcctgcatccacaagttgaaggaaaaaatcagtgacaggtttataaattgcaaactgattggccaatctctccgccatgatgcttatcttttcaactgctggttccaactgctcctctattacttttctgaataagtatgccaagccgaagtattggggttcaatgactttattctctgaagtaagcatattttcaatgttttctattgcggcatctatgttattattctttatttgagccaaagcaatgttattgatga

SEQ ID NO: 127368 - DNA, 694 bp, Homo Sapiens
  misc_feature (625)..(625): n is a, c, g, or t
ttttgaaggactgaatgacaaactttattagaaacgctcttcattcatcagtcaaattcacattaaggtgggggcagtggggtggggaggaagaggcagtgctgtctggggctctgatatcccactgctgtgatgatttccagttaaaaatgagtctgggcagagagtgtctgaaacatataagaggtggcagcagcagtggcggcggaggcagcagcagcattcctgcgagaggaccaggctcggagcaggtagagaatgtgtctcccatatccacccttccagtcacaaggctgcccccatggacctcaagctgataaataaacagcacatcacacacacatttgaaacaggaaacaaacttgtagaagtctcctaaagtgaaaaaataatttgctcaaataaagctttgtgacagccatgccgcaccctgaatggacgttgcccagagaccctgacactccaggaaggccccccaacccaggacacatcagacttgggtgtcacaatgcccccagttcccccgttagcacctttggactaagtactgtcctctccgcattcctcttttaaaatgcaaatgctacttaaaataatggtaaggatacgctcttccctggggcanaccagtcagactcatcttccctgaagagaggtgtctgggcatccagagacctgtgagtcagtggctggg

SEQ ID NO: 127369 - DNA, 2360 bp, Homo Sapiens
  misc_feature (77)..(99): n is a, c, g, or t
ggtacaacgacggccacgtgccatagccgaaattaaccctcactaaagggaaaaagcttgcggccgcctgctcaggnnnnnnnnnnnnnnnnnnnnnnncacacggaaatgagaaatagaaaaccattttattcgcatggtttacatttacagtttattagctagtcaacatcaacatgcaaaaataagcactaactacaaacctctacgatacggttctctgtcagctacggtggttcatttgttttgaaaagtcatcagtacttctttcaactgaacgattaatttctgtaatggatagcaattagactctacagttatggaaccatccggcaaggcctctgcagaaatttggtcccgtggatttccacgttatacattctcgaagcaggaagtaaggcggcacacagagggtgtgatatcgaaacgacgcagctacgaacacagccccgcgatgtgatatcgaaactatgcacgtacgaacacagtcccgcggacacgacccgcgaggcaggcgggcgtcctcgaagccagcccccgacggtggcggcgccaggcgttttggcagcagctctcgaatgaagccataagtgtccctcgtggcgcggcatcgcgggtcactgcaggtcagtccggtgccgctgccaccttccccggccaggccagggccaacaggaagtggtgaaggaccagcccgttctccaagtctcatcgttcacagaaggaaagaaactgaaaacacagggaaatcacggactcctatattttaaacgttcttaagtttccctcggtgtttaggtcagtctttaaagaagagtttccttcgcaagttgaaagtacttttcagaagcatcaaatggttgacgtgttacaaatcctacccatccaaatgttttccaagtacaaaacttatgaaaccttattgttctgctcttcctaagagtatttatcgttgctcacggatctttggtcgcaagaaacagaaacgccgcggcaggctggagcgtgggacaggaggaaggcgtggcctccccgcccactgcagcccgtccccgaggcgtgcgcttcacgacgtggggcctacatgatgtacaccttctcggcttgtgagaagtggaagacttctttggttctcgggcacacgactttatcatcttgacggatagaaagcagagaattgtagccgtagacgtagccgttgggcagcatcatgggcggattgttctcgttcatcacgtcgccagaaatcttgcagaccaggcgggagttggcacagtgggccatgggcaggggctgcgccagcttgttcagggagcggctgcacacagggcagtcagggctcttggagctgccgtcctccttgtagcactgtggtgtcttgatggctgagaggccggcctgcagggtgagggtgaacacagaattgtttcccagctggtgtagtcggtagttgtcgtaccggaactgctggatcagcatccgccaccgtgcagggtccagaaggtccttgtacggggagatgtgcgtgtcgggcgggaaggccagcatgcccatggcctggcgcacctcgtccagctggctcccttctgcttggctgaagtgctttcttgcatgtctcacagcgtccagtctcttattctgccggatgagttcaatgaactcctggattctgaggctgaactccaggcagctcttcatcttccggagccgggacttgttgtcatggcaccaggccaggcaggtggccgtctcacgcctctccagggactcctccacctctttggccgtcaggaacatctcaatattcactaggtcctcgatgccgctctggcgcgccagcttgacagccgtgttgtagtagccgcaacgcagcaggtgctccaccatcatgcgatccatgcgcttcctcttccacacgctggccgccgcgggctggtcgctgctatgctctttgaggtgctcgatccggcgcttgcacagcttggcgctctcgtcctcggcctggatggattccaccgccttcctcttgaggacgctgagcttctccaccacgccgtccagcaggctgaccacggagtccacggcggggcagccgctcaacgtcttctccagctcggccaccaccatggtgacgtggctggtctcccggtcaatgttcttctgagcggcgcgaaagcgtttgttcagcgtctcgtagggcaccttgagggtcgggtactcctggaccttcagggtcatggacaactgagccgccgactcctgcaccgccatcttgaagcggccaaaacattagcgggcgggcctcgtgccgaattcagccacccaggcctcgctaccttaaaaccgtggggagttactgc

SEQ ID NO: 127370 - DNA, 758 bp, Homo Sapiens
cagggcctttaccccttggtgatgccagctttgtcagaacagtccccatctgggacttccaaggctgggagccaacccgagacaagtgagacagtgtcctccagggagtacccagagacttgggcgcccagcttcatttgccatgttgcgtccaatatccccaaggtccgaggcccagctgagcagtggtccctgcataccaggccctcgcgtgagcctcaaagccgggactgccgccctgaggcctgggccacctgctctccgtatggtccagggtctgttgagtcttcaaagctgcagatcgtgctttgcccagcaagttgtgtgggaaagtccagccccctggcccttcgttccagggagggcagggacttgcccaagatcacataagctggtggcaggccaggctctgccccggacacccacttggggctgtcttcttccttggccccaggggccctgcggcccaaacctagggctgggaacctgtccaaccgtgtggctgcaacacacacatccttccagggtaactgaggacacagcctcttctttgtgccagggccactcagcaggcctgggccaaagagggtgggtgcctacccgtggatcacacagaaagctttggggcagcccagccggtcccggacgctgtaggaacctcccagacgaggtgggagtgtgggttcttcattgtcccaatggcaccacctcagactttcacagatgcgggcggatcgccagctggttcacctgctgct

SEQ ID NO: 127371 - DNA, 452 bp, Homo Sapiens
cgtttgtccaaacatttattgaaatgccaggcattgtgctaagcactagagatataacagtgaacaaggcttatatggtccctgcccttacaaagcttacagtctagcagtgatcaataagcagtaacaataaagtgtgccaagtgtatgtctgggaaagaacagggtgtatagggaatggatagtaagggcacctaatctagagggcatcaatgaaggtttcctaaatgaagtggcatactgagaccttaaagatgaagataaatttgtattgtaccctaagagcaatggtgaaagcaatgcagtgacatgatcagtaagtcttttggagcaatttggttgtagtgtagaaaggaataaaaataaaaaacagggagactaataaggaggctgttgctataatttaggtaggttgatggcctgaattaaaatggcagcattggagaaatggt

SEQ ID NO: 127372 - DNA, 676 bp, Homo Sapiens
gcacgaggcatgttccatcacggcgccacaatctgtgtcccttaacttctcagggtcaaagacaaaggcaagcgttgctgaattttctctttaatggccattggaagagtctggttcagtttttcccaactctcttcccactcgtatttggggcctctgggttttctgaaggcacaaggactgtgactttgtaccactaacctgtggttcaaacctgggtgtgtttctggcatctccctaacccagatcagcaatggccaccctgctcctctgaggtcagcagaagactgggaagcagaggtgagggatgcaggccacactggaatgggaagtcttttccccactggatgtgcctgtctggtgggttttggaccttcccagactacatctctaggagaggcctgtttggagtagtacactgagagaccctggcctcttctgctggaagactgtccaagtcttggggtttcttgagctggtgattcctctgccatcctgctctctctcttcatctcaggcagcatggggtccacttttgtccccaaacctaatgttttaatccaaatgcaaattggttccacatttttactggagggtaatcagtttttaaaattcacacacatgtaatcgaaacgcaatactataaagttctactggtgagactcctgaaaaaaaa

SEQ ID NO: 127373 - DNA, 859 bp, Homo Sapiens
  misc_feature (739)..(773): n is a, c, g, or t
  misc_feature (777)..(819): n is a, c, g, or t
cacacacagataccagcttttaatcaaacagcagtttttactgagctccaggtggggctggcccagcatggccagtacagcaggctgccctcaagggccagtctgtggcatgacaggaaatgcaggggtgcacatgttggggctgccctttggcactcactggggtgggtcaagggagagcaaacaccaaggtcctctggagaccagaatcggccagtgcagccatttggcttctccttcaggaccagctgggtcagttcccaggccctgaggcaatgcctgcatcctgggtccgtggggcactactgctgtcactgctctgagggagaaagacgaccagcagcacaatcaggatgatgagcaggacaccaaccaccaccagccccacgcagatccggtaacggatgttctcccagcacttcttctgggccaggttctgtgtagtcttgttgaaggttgagctcatatccaggagttggtctgaacgctgctgcagttcggccagcttcacaccacgctccaggaccttgccgaagttgttacgcataatttccgtcacctcgttcgcctgctgctggcaccgctccaactctattcctgccatcgctgctgccgccgccgcctcgcccgctcccggcttctctgcctgcggagcggccgcagtgccagcggccccggaggaagagcccccggccgtaatggccgaattcccgggcatatgtccggtaccgtcgactgnnnnnnnnnnnnnnnnnnnnnnnnnnnnnnnnnnncggnnnnnnnnnnnnnnnnnnnnnnnnnnnnnnnnnnnnnnnnnnnaataaccgcgtagcgccctatagtgagtcgatagattcct

SEQ ID NO: 127374 - DNA, 560 bp, Homo Sapiens
  misc_feature (153)..(153): n is a, c, g, or t
  misc_feature (187)..(187): n is a, c, g, or t
  misc_feature (201)..(201): n is a, c, g, or t
gagcagtgccagcggcaagcgaacaaggtgacggaaatcacgcttaacaactttgacaaggtcctggagcatgatggaaagctgaccgaactggagcagcgttcagaccaaattccttgatatgagctcagctttcagcaagacaacaaagancccctggcccagaagaagtgctgggagaacatcnccattgccagatcntacttggggctagtggtgggtggtagcctgctcatcatcctgattgagcagctggccatctttctccctcagagtgacaccagtaatgccccacagacttaggatgcaggcaccacctcagggcctggggactgacagctggtcctgagggagaagccaaatggctgcactggctggttccggtctccagagaactttggttttttctctcccctgccccaccccagtgagtgccaaagggcagccccaacacgtgcactcttttattttttgtcatgccacagactggccctcgagggcaccctgccatactggccatgccgggccagccccacctgaagctcagtgaaagctgatta

SEQ ID NO: 127375 - DNA, 813 bp, Homo Sapiens
tttggggcacccttttgccctcggactcagagtttccttaaatgatcgtccaatgggatttagccccaacagttgcctggtttatgaaggacagccttaacctgcgctcatcagtttcagtgctgcttgccccactggtctactgactctgccattcattgtaggtaagatcatgccctgggtgaactctgttttgagggtgctgaatgtaaattccccattgcttctcttagaagtttcaccccttcttccttcagttaaggccacgagatttgtgtcaggctcatctttggcaaggctcacactaatctccacttcatccacgctgttttcatcagacaaattggggatctccacatgtcctttgtattgtactcctgacttagaagtacctgtccagtttagtttgacgctccattcataaaagaagataagtttccctttgcgattgttaatggatgcctctccatcaagcttactcacttccgtcacctcacacttgccttcttcattttgaacctgcactgccaggaacagtgttttcagcttatccgtggaccaatttgaagcatctctctccgtccagtgccagttgttgacgttggtggcgtccgcccgctcctccacgatccagcgtgggtctccctcaccccacttggccatcggctctcctatcgcggcgccaccagctccggagcagccgtagccacagcctcaggaccgcttagtgccagccgcccggcagcgcctggaaactactagaagcggccgccctcgtgccgaattaaacacccaggcctcgctacctagctc

SEQ ID NO: 127376 - DNA, 831 bp, Homo Sapiens
cggactcgaagttcctaagggactaccagggggattgacccaacagttggcctggtttttgaggaccaggctaacctgcgctcctcagttttcagtctggctgccccactgggtctactgactctcccattcaatgtaggtaagatcatgccctggggtgaactctgtttttgagggtgctgatgtaaattcccattgcttctcttagagagtttcaccccttcgttccttcattaaggccacgagatttgtgtcaggctcatctttggcaaggctcacactaatctccacttcatccacgctgttttcatcagacaaattggggatctccacatgtcctttgtattgtactcctgacttagaagtacctgtccagtttagtttgacgctccattcataaaagaagataagtttccctttgcgattgttaatggatgcctctccatcaagcttactcacttccgtcacctcacacttgccttcttcattttgaacctgcactgccaagaacagtgttttcagcttatccgtggaccaatttgaagcatctctctccgtccagtgccagttgttgacgttggtggcgtccgcccgctcctccacgatccagcgtgggtctccctcaccccacttggccatcggctctcctatcgcggcgccaccagctccggagcagccgtagccacagcctcaggaccgcttagtgccagccgcccggcagcgcctggaaactactagaagcggccgcaagcacctcctggcttgcttttccctccaccccctcctcgtgccgattacaccacccggcctcgctacctagcgcgtaagttt

SEQ ID NO: 127377 - DNA, 999 bp, Homo Sapiens
cgtgccagatccccccttcccaattgtcccggcccgtcctaattcccgagcctctccgcaccagggggactgtcccactcgtcggctcaaagctgcagacaatggtaaggccgcacaccagtcttgggtgtaacactccatagactccctctggtgacgtcaggaaggtgtccttaagagtgatttctaacaagtggggaattttgactccaacagtcttgcctgggtttttgaaggacaggcttagcctgcgctcctcagttttcagtgctggctgccccactggtctactggactctccattcattgtagggtaagatcatgcctgggtgaactctgtttttgagggtgcttgatgtaaattcccattgcttctcttagaagtttcaccccttcttccttcattaaggccacgagatttgtgtcaggctcatctttggcaaggctcacactaatctccacttcatccacgctgttttcatcagacaaattggggatctccacatgtcctttgtactgtactcctgacttagaagtacctgtccagtttagtttgacgctccattcataaaagaagataagtttccctttgcgattgttaatggatgcctctccatcaagcttactcacttccgtcacctcacacttgccttcttcattttgaacctgcactgccaagaacagtgttttcagcttatccgtggaccaatttgaagcatctctctccgtccagtgccagttgttgacgttggtggcgtccgcccgctcctccacgatccagcgtgggtctccctcaccccacttggccatcggctctcctatcgcggcgccaccagctccggagcagccgtagccacagcctcaggaccgcttagtgccagccgcccgcagcgcctggaaactactagaagcgccgcaagcacctcctggcttgcttttccctccaccccctcccctccagcctcgtgccgattcaacacccagcctcgctacctagcc

SEQ ID NO: 127378 - DNA, 2438 bp, Homo Sapiens
  misc_feature (488)..(556): n is a, c, g, or t
  misc_feature (780)..(791): n is a, c, g, or t
  misc_feature (1002)..(1036): n is a, c, g, or t
gagcgacgggggaccccagctgaggcgcggacgcgcgcgggtccgccctctcgctccgcaacgcgttgtcgcacgggccgtggtcgaacacccctaactcccgccccgttcctatgttattgggtagtggcacgatatttgggcgggcgagggtggtcagagtgcgggggtgcggtactggagttaggggaaaaagggggtggcggcgtgggtcggatcgcccgcgtgcgaggattgcctcagcgcttacacatgcacgagattcctgtggcgatacccacccggcacgcgagagcgtcactccagagctctcgcgacgggggtcgtggcaggtggtgtgattcgtatggagggagtacaggcttcgcctcagagggagtaggtggggctggccggacggtagacgagggataatgtcgggccgggcggaaagtggacctgggcgcacgtacaggggtcggccggaagaatgtgggcggtcagttgtnnnnnnnnnnnnnnnnnnnnnnnnnnnnnnnnnnnnnnnnnnnnnnnnnnnnnnnnnnnnnnnnnnnnnaatcgttggggttttcttatcctacgtgatccgccgggggggttgaagcatccgccctcgcccggggcgggagaggacgagcgagcggggggccgagccccgcgggggagtgctttgcccgcgagtaccgcagtaggcacgcgcggggggatgagtgggggcagctaccatcctccgacgcggggggggcgactggtcgcccccagtgcgcttcgggagtcccnnnnnnnnnnnncccgcagaccgtggtgtcgtccaccacggctttcggcccccgcgcggcacggaaggaaagaggggcggctgttgtccttgcgcatccggtccactccagcgggggtccgggccatccgccggggcacgtggtcggcttgtggtcgagtacatttaattggtttggcacgcgagggcggctggccggcccccccggcaaacgccgtcctgannnnnnnnnnnnnnnnnnnnnnnnnnnnnnnnnnntgcggttttttaaattatgtttatttagcatatgtacacataaaagagaaattgccctctgaacccacccagcagaaaacatgcacaaacccaaggtatatgtggaagggaggggccccggccccaagttagcagctgggacgatgcaatcctgtgagtcgcaagccccagtcaggagagagctggactgaagtgtccagcaggctggagtcccctgccgctggccctaaaataagcgtgcgccatagccaaaggtctgtttaatgccctcaaagtagtaccgctgccagccctgtcgtgtccgctcttcctcaggagcagggatgcctcgaccttccatgcacagctcagtctctccgttcttgtcgatgaaggtcaaggtgatggtggcaaagtgtccctctggccaagatttaaacctccacttcatcacaatatgtttctcagggaccagatcagtaaattccccagagacgttgccatctaccatgtggaactttccacctctgtctgcttctaatgttgcaggagcatgggtaaaggcctgcaccagctcttgggtggtaaacactctatagagctcctctggtgacgtcaggaaggtttccttaagagtgatcttacaagtggggattttgactccaacaggtctggcctgggtttttgaaggagcaggcttagccttgcgctcctcagttttcagtgctggctgccccactgggtctactgactctccattcattgtaggtaagatcatgccctgggtgaactctgttttgagggtgctgatgtaaattcccattgcttctcttagaagtttcaccccttcttccttcattaaggccacgagatttgtgtcaggctcatctttggcaaggctcacactaatctccacttcatccacgctgttttcatcagacaaattggggatctccacatgtcctttgtattgtactcctgacttagaagtacctgtccagtttagtttgacgctccattcataaaagaagataagtttccctttgcgattgttaatggatgcctctccatcaagcttactcacttccgtcacctcacacttgccttcttcattttgaacctgcactgccaggaacagtgttttcagcttatccgtggaccaatttgaagcatctctctccgtccagtgccagttgttgacgttggtggcgtccgcccgctcctccacgatccagcgtgggtctccctcaccccacttggccatcggctctcctatcgcggcgccaccagctccggagcagccgtagccacagcctcaggaccgcttagtgccagccgcccggcagcgcctggaaactactagaagcggccgcaagcacctcgtgccgaattcaacacccagcctcgtacctagcctaagttt

SEQ ID NO: 127379 - DNA, 751 bp, Homo Sapiens
  misc_feature (248)..(248): n is a, c, g, or t
  misc_feature (272)..(272): n is a, c, g, or t
tcttacaatggggatttttgactccgacaggtctgccctgggttttgttgaaggagcaggccttagccttgcgctcctcagttgttcagtgctggctgccccactgggtctactgactcgtccagtgcagtggtaggtaagatcatgtcctgggtgaactctggttttgaggggagcttgatgtaaattcccatgtgcttctcttagaaggtttcaccccttcttccttcattaaggccggcgagatnttgtgtcaggctcatctttggcanaggctcacactaatctccacttcatccacgctgttttcatcagacaaattggggatctccacatgtcctttgtactgtactcctgacttagaagtacctgtccagtttagtttgacgctccattcataaaagaagataagtttccctttgcgattgttaatggatgcctctccatgcaagcttactcacttccgtcacctcacacttgccttcttcattttgaacctgcactgccaagaacagtgttttcagcttatccgtggaccaatttgaagcatctctctccgtccagtgccagttgttgacgttggtggcgtccgcccgctcctccacgatccagcgtgggtctccctcaccccacttggccatcggctctcctatcgcggcgccaccagctccggagcagccgtagccacagcctccctcgtgccgaattcgccacccaggcctcgctaccttaaaccgtatgagtactgccg

SEQ ID NO: 127380 - DNA, 1636 bp, Homo Sapiens
  misc_feature (166)..(166): n is a, c, g, or t
  misc_feature (189)..(189): n is a, c, g, or t
  misc_feature (1424)..(1449): n is a, c, g, or t
acggcaatggtcagccccaggctgaagggaccctagggagagaccaggtacatgctgaactcacagagattggcccccatatcctgagctgacgtttcattcttttggggaggtggcggggcaggacggggaggaaagatgagccagaggtgaaagcaccatggancacaacaggggggactggctaancctggcacaaaagcagcacagcaggcccggggaaagggtgggggcaggaagcagccggcctccctctgaccctccctgtcgccttggcagggcattatgacagaggctgaaatgcaagtctggtggccaacagaacgtagcttcccacgttctcccttcgctgtctctagggtctcacagccacttgccctagttctccttctctggccctggaaccaggaggaccttgcccacattcttcttctcctgcatctgtttcatggcatcagccaccttctcgaagggccagactgagtcaatgtggggcttgatgtggccctggttgtacagagccaggaggcgggccaccacaccactgaccagctccacctcaccatccaggtagcccaggtggaagccacacacagcccggttggcctgcagcagctgcagagctgtcacgctgaactgattccaccatgtccgggccagggccatcaggttccgtttggggcccgtcagcaggttggccattccataggtgacgactttgcccatgggtttcaggaggttgtagcccttggcagtatctgacccacccagagggtccatgacaatgtccactcctttaggggaaatcttcttgatctcatccacgtagtcagtcgtgtgatagtcgatgggatgtgtgaccccattctccttcagtgcctcgtgcttgctggccgaggccgttccgaacactgtcacattctccactgtacggcacagctgcacggcagccatacccacaccccctgcagccatgtgtaccaagacgctgtggccaggctgtaggttgccgaagtcaaagaggaccatgtaggctgtaatgtaattgacgagcaaggcagcagcttcctcaaaggtcatggcctcaggaatcaggaaggtctggaccgagggcacagtcacctcttcctgccacatccctgaccggttcaacaccatcacccggtctcctgccttgcggtcgctgactccctcgcccactgcgatcacaacacccgcgccctccatgcccggagtgacaggcagaggcgggagacggtcgtacagcccctgcctagccatgaggtctgcgaagttgagcccgcaggcccgcagacgcagcgtcagctggccgggcccaggggccgggggcgctgccggccggctctgcagcttcaccttgtcgtagcctccaaagccggtgagcactaggcagcgcagcagtnnnnnnnnnnnnnnnnnnnnnnnnnncccttcggaggccgcgggatgctgggggtcgctcgctgcctcggttttcggaggcggcgaagaggcgtcttccccggtcgctgcctcggctacctctctctcgtcggacatggctgggactcccgacgagagcctcgtgccgaattcgccacccaggcctcgctaccttaggaccgttatagttacc

SEQ ID NO: 127381 - DNA, 864 bp, Homo Sapiens
cactcctttagggaaatctcttgatctcatccacgtagtcagtcgtgtgatagtcgatgggatgtgtgaccccattctcgcttcagtgcctcgtgcttgctggccgaggccgttccgaacactgtcacattctccactgtacggcacagctgcacggcagccatacccacaccccctgcagccatgtgtaccaagacgctgtggccaggctgtaggttgccgaagtcaaagaggaccatgtaggctgtaatgtaattgacgagcaaggcagcagcttcctcaaaggtcatggcctcaggaatcaggaaggtctggaccgagggcacagtcacctcttcctgccacatccctgaccggttcaacaccatcacccggtctcctgccttgcggtcgctgactccctcgcccactgcgatcacaacacccgcgccctccatgcccggagtgacaggcagcggcgggagacggtcgtacagcccctgcctagccatgaggtctgcgaagttgagcccgcaggcccgcagacgcagcgtcagctggccgggcccaggggccgggggcgctgccggccggctctgcagcttcaccttgtcgtagcctccaaagccggtgagcactaggcagcgcagcagtgggcggcgaggcggcggcggggcggccccttcggaggccgcgggatgctgggggtcgctcgctgcctcggttttcggaggcggcgaagaggcgtcttccccggtcgctgcctcggctacctctctctcgtcggacatggctgggactcccgacgagagcgcacagctggatggagagtgcacagctggggaaggcgcctcgtgccgaattcggcgcgccgtgacttcatac

SEQ ID NO: 127382 - DNA, 2002 bp, Homo Sapiens
aggtagcgaggcctgggtggcgaatccggcacgaggttttttttcagggtttggctttttattgacacaaacacacaaaggcagctgtggtaatggggtggtggggtacacaaaagcagaaatcgcacttcacacatttaggcctcatttagacaatgaggaggctgagcctgtccctccacctcccattgcaatggttggggcaataaccctccctaatcctagctcagtgagtagagggagtgacctccctacccaggaagtccccattttggttgcaatggcccaggtcctgaccatcccactctgtacttccctgctccatctccccacccatgtaaacagagttttgggctgagtttgataagctgcctctctgctttgagaaggcagtagggcctcccctaactgcaaggggaatgtgcttggatttttactttggtcccagtacaagaaacagacagcactgcctttcagagctctggctagtaaatgccacacatatctgcaaggctgaggaagcttccccgcctttctcctcaaccaccatagagacgggacatggcacagaccacgatgagggcacctgtttttgccctgcctccccaggaggcttggggctgccccacccaatggcacatacacagatttttggcagtgttgtgggactggggaggagagaaaccccagctccaccagaacaaggaaggcactggggagtacaggggaggagaaggaggtgggaaacaggatcctccctccccgccgccacacacacacaagcacaggttttcgttgctaaggcactgagaacaaatccagagaactcagtgaagggtgggggctctgtatccttcccagagttgtgacctaggggagtaggtctgattcccgccctgttggaagaggcagccttggttaagaatggcagaaaacctggagatggaagaagcccaattgtgcttaagaagttggggacagaggacgagattgggaactggtcaagcccagaggcgggcactggtcagcccaggctgaagggacactagggagagacaggtacatgctggactcacagagattggccccatatcctgagctgacgtttcaattctttggggaggtggcggggcagggacgggaggaaagatgaggcagaggtgaaagcacatggaacacaacaggggggactggctaaccttggcacaaaagcagcacagcaggcccggggaaagggtgggggcaggaagcagccggcctccctctgaccctccctgtcgccttggcagggcccagacatccaaatggtcacttcccaacctcttcagaggtcaggaagcggggaggggcaggggagagcggtcatcaccacagagaccttcgggggagggagggcagagcattatgacagaggctgaaatgcaagtctggtggccaacagaacgtagcttcccaacttctcccttcgctggtctctagggtctcacagccacttgccctagttctccttctctggccctggaaccaggaggaccttgcccacattcttcttctcctgcatctgtttcatggcatcagccaccttctcgaagggccagactgagtcaatgtggggcttgatgtggccctggttgtacagagccaggaggcgggccaccacaccactgaccagctccacctcaccatccaggtagcccaggtggaagccacacacagcccggttggcctgcagcagctgcagagctgtcacgctgaactgattccaccatgtccgggccagggccatcaggttccgtttggggcccgtcagcaggttggccattccataggtgacgactttgcccatgggtttcaggaggttgtagcccttggcagtatctgacccacccagagggtccatgacctcacttggtgctccatgggctcattgcctctcaggacttattttttcagctgtaaactgaggagtccagcttatcttctccagtggtcccttcctcta

SEQ ID NO: 127383 - DNA, 835 bp, Homo Sapiens
gaggttccatgacaaagtccactccttaaggggaatccttcgggagtctcatccacgtagtcattcgtgtgatagtcgatgggaatgtgtgacccccattctccttcagtgcctcgtgccttgctggccgaggccgttccgaacactgtcacattcgtccactgtacggcacaagctgcacggcagccatacccacacccccaagacgctgtggccaggctgtaggttgccgaagtcaatagaggaccatgtaggctgtaatgtaattgacgagcaaggcagcagcttcctcaaaggtcatggcctcaggaatcaggaaggtctggaccgagggcacagtcacctcttcctgccacatccctgaccggttcaacaccatcacccggtctcctgccttgcggtcgctgactccctcgcccactgcgatcaccacacccgcgccctccatgcccggagtgacaggcagcggcgggagacggtcgtacagcccctgcctagccatgaggtctgcgaagttgagcccgcaggcccgcagacgcagcgtcagctggccgggcccaggggccgggggcgctgccggccggctctgcagcttcaccttgtcgtagcctccaaagccggtgagcactaggcagcgcagcagtggcggcgaggcgtcggccggcggcaggccccttacggaggccgcgggatgctgggggtcgctcgctgcctcggttttcggaggcggcgaagaggcgtcttccccggtcgcatgcctcggctacctctctctcgtcgtacatggctggactcccgaacgagagcgcacagctggatggagagtgcacagctg

SEQ ID NO: 127384 - DNA, 666 bp, Homo Sapiens
cttttcaaagcctcatgtatctcccagacccttctcttgaagtccaataacaagaccaagtaagatgtttcaacaatgcgttggcaagagatgtgagatgacaacaggaacatacaagatactgtgaatctagatgttctgacccaaagatgtagtctacatagccccagcttggggtccaatccatctgtccctggcatgtgccttcatgtagtaggtgctttcctgatcccctttgcgagatgctgtgggtgctaacacctcagagctgtcctcttctctagagtggaggttttcaaagtgcatcatcagcattacctgtgaacttgctggaaatacaaatcctcaggccccacctcagacctactgaatcagaatctctgggggttggcacagcattctgatttaccaaaccctccaagtgattttgatgtattctaattttgagaccatctctagaaaagaattgctacctcttgtatggaggtacaaaagactgacctcttacatcaaggaacttcctttcccagagctcctcatggaatcaagctgaagtcagtcttcttctgagagcacattcttactcagtttttttcctctgtcctacgctgcttccctcactccccttctcctaagagcactccatcaatcaaccacttgcacgag

SEQ ID NO: 127385 - DNA, 501 bp, Homo Sapiens
gctgggggttaggattttaatataaagtttttttgtgggggtgggggagacacaatttgatccgtgctgagtccattttgtgttgctctgacagaagacctgaggctgggtctttataaaggaagaggttgatttggctcagattctgatggctggaaggttcaagactgggcaggtgcactcactgaggacctccctcatccctgaggctgctgctgcttctgggggagggcagaaggatgcagctgtgtgcacagagatcacatggtgctgaaggaagcaagggagagaaaaccaaattcccaaattcccaagggtgagcactcactcaccccttaaggcaggcattaatctatccatgaggactccacctccaagaccacacagctcctatgaggccccacatcccaacacctgccacactggggctcgaatctcaacatgaattttagtgaggacaaacgatatccaaaccattgccacccaaaagaagtgggctga

SEQ ID NO: 127386 - DNA, 1157 bp, Homo Sapiens
ccagtggtatcagtctctttattggatgtgagggccaaaagggactgtaactcctgtctcaggaatggggatagatgggaggttcttgaagccccaggcgaagctggtacctctggctacagcttgctctctgagacctggggcttcactcggatcacgccctcctgggcacaggtcacagctaggactccatcctgacgccacagccgcccatggaccagcccccgagagccaccggcccaggggctctcgcattcatagagcatccagtggtcagctcggaagggggcgtggaaccacatggaatggtccagtgagaccatgaagtgcaccttgtgctgccactggtgaggcagcagtgcagtgcccaagaaggcatagtcggagatataggcggccacgcagcagtgcatcttcatgtcgccctcgccaatatagccccgggctcgcacccagaacatctgtttgggctccattctctgcagctggctcaggggggatgggtttactggcttgatctcaatggggacctcctgagcagcaattcggttgagcgccaatgggtacctcttttggaggttagggtcccttaaatactggtcaatgagggtctcacagtcaagcagctcttctggtggtggcacagtgggcatggagaactggtgctgcatggggctgggctgggcctgctggaaggaggcctggcagatgaagatgggcttcccatgttgcacggccttcacagagcgcaccgagaagctcgaccctgttcgtgtccgctccacttggtacagtactggcagcttccgggtcccctgcccgaacaaagtagcagtgcagggagtgcacgtggacgtcttcactcacagacttggctgcagccaccagggcctggcccacgatctgaccaccaaacagcctcttggccggtacccagtaatgccttcctctgaagagatcctcgtccagcggctcgaggttgagcacggtcgtgaccaagacgctacggaggtccccagggggatcgccgcggtcgccacagccctgcccatcttctggggcctgcggggacgacatctagttcaatgctgcaggccctgcacacccgctccgcggaagacgcggagacatacacagaacctgactcttccggcccc

SEQ ID NO: 127387 - DNA, 824 bp, Homo Sapiens
ctgtcaatgagggtctcacagtcaaagcagctcttctggtggctggcacagtgggcatggagaactggtgctgcatgggggctggctggcctgctggaaggaggcctggcagatgaaagatggggcttcccatgttgcacggccttcacagagcgcaccgagaagctcgaccctgttcggtgtccgctccaacttggtacagtactggcagcttcgggtccccaaatggtactgggggcgggatattgtgagaagaaaaggatactgaagacacaaggagctgcggcgtcggttttaaggctgatccatcagctgtgtgcccttgggcaaatcactgccctctctgggctagctcccccgtgaaggcttagggcaggctgccgagcagggtctctcaggtcaccactatatttgctcagctgtgcagacctcgcagcgcggagaggaagggaggaagccagagcagagaggacagctctgttgggggcgagttctctcctaatcgtggcagagggtgcatcccacgcagagccatactagtcccggagccaggggccccgggcggcggcagtcaagatcaagtttctgccctaaaggaggggatgctgggcaggagctagccggctacctgaagagatcctcgtccagcggctcgaggttgagcacggtcgtgaccaagacgctacggaggtccccagggggatcgccgcggtcgccacagccctgcccatcttctggggcctgcggggacgacatctagttcaatgctgcagggcctgcacacccgctccgcggaagacgcggagacatacacagaacctgac

SEQ ID NO: 127388 - DNA, 691 bp, Homo Sapiens
  misc_feature (317)..(369): n is a, c, g, or t
agaaggcaatctcatcttttaatacattcctcacccccaacctacactgtccccctcagtggcccttattgcagcacatcctggctcagggcctttgcatgtgctgttgcctccagctgcaagcccttactcagccacccctgttgctcctgctcaccccttgacggagcacgacctgggcagtgtggccctcaattcaaatcacacatcccaccccctgctggatttcccacacagcagttaacttgcagcatactacatatatattttccttatcttgtaaactctgtctccctgccctagaactcaactgctgnnnnnnnnnnnnnnnnnnnnnnnnnnnnnnnnnnnnnnnnnnnnnnnnnnnnnggaggtgctcaattactttttgctgagaatgaaagtgatgaaggggttttagggggtgctttagcgggatgaaaggacagggtccaggagctgagtggggcagcagaacagcacatgaggggactgcaggtgcgggtggggacgactgccgaggaatcctggcgctgctttcttccaaatgtcctgggggaggtgaggtgttggggtgaacagtgtcaagttctcggcttccgtttgaaccctctcttcagctgcacagcttctgcagggccccctgggcctgaacccagcgcagccgccactggggcagggacaggccctg

SEQ ID NO: 127389 - DNA, 817 bp, Homo Sapiens
tccagaacgcttctagactgggaaacccctgtcgggcagcaataaacaatttgactttccaaatgatgaggaaagttattgaatttaccaaacataaatataaaaatagtattttgttgtataattaagacttatagctagagaagtagaaatgtacacaaaaaaacatttggtatcaataatttggttgtgcattcatttattcagtcaacaaatatttagctgagcactggctagctgccaggtattgcactaaggacccaaagatggaagagatgatgtccctgccctcatggagcttgcagtcgtgttgagcagactgtcaaacagatttaggtaaggcaatgtgaccagtgctatgatacaaacaggatgctacaagagtacttggaaagtgtgtatactgcaaactgagggccaagaaaggctccctggaatacgtggtacctgaattacatggtgaataacagatgcaataaagaaatgggctgagctaccagacttcccgtgtgttccatgtaccttaaatactttacaaagtttaacgatgataatgtgtgtggtatggtttgggtctgtgttcctgcccaaatctcatgctgaatggtaatccccagtattcgaggtggagcctggtgggaggtgattggatcactgggggtgagttcatcatgaatggtttagcaccatctctttgatgctgtccttgacactagtgagtgacattctcatgagatctggctgtttcaagtgtggcacctctcttcgctcctgctattactctttaagtgcttgggatacacgctctcgaggcgcc

SEQ ID NO: 127390 - DNA, 817 bp, Homo Sapiens
  misc_feature (84)..(153): n is a, c, g, or t
  misc_feature (399)..(407): n is a, c, g, or t
tttttataaattttgattttatagaaaggaccaattcaaaattggtcagatgccacacgctagaagcttccagaaccacgatgnnnnnnnnnnnnnnnnnnnnnnnnnnnnnnnnnnnnnnnnnnnnnnnnnnnnnnnnnnnnnnnnnnnnnntcaaggtcctggttgaccaaaggattcttaaagaaacatgtggctggggtgaggagaccccaatgcctgaacgagaccccagagtggaaggaaaaacaacccagaaatgcaaatccgaagtccctgcccacggggcccccccacgctgtcaaaagcgaggcaaagggcttcacagctttatgggggtggggttgatggcagtagcttaaataataacgggaggaggagggtttttatacttcagcnnnnnnnnngtctgcccccctcttcctctacgcggaagaggagagactggtagcttgaggttaaggagaaaacagtatttcccccccacttctttaataggcaaaccatctagaaatggactgtcataaaaaaatgccagatcccacctgtgacctgacagcccccaattcctagagaggtgagagctgtcgtgtggcaggttaggagaggtgccaaccttgggcgatgcggcttcttgggaaataacagctccagcgagaaagaattggggtgagggagaggatgggggccagaatggggggacccttaagtggtaccaaaattagctgccgtctgctccctgctggtgggtccttggggtggaaagcatggcagggagggggttggggctgaatggagaagaaagtgagatgctgat

SEQ ID NO: 127391 - DNA, 1007 bp, Homo Sapiens
  misc_feature (721)..(721): n is a, c, g, or t
  misc_feature (728)..(728): n is a, c, g, or t
  misc_feature (763)..(763): n is a, c, g, or t
  misc_feature (799)..(800): n is a, c, g, or t
  misc_feature (854)..(854): n is a, c, g, or t
  misc_feature (858)..(859): n is a, c, g, or t
  misc_feature (904)..(904): n is a, c, g, or t
  misc_feature (965)..(965): n is a, c, g, or t
ttttttgtgcactaactcatagatgatttattgccgtaagtaactaaacaagagaagagacaggctgtgggtttggtcaagacaatcagcattccctctccaaggttcgccagttgcatctacctaaagccttaatactttctggacgatatacacatgataaacacagcatacatgggtaacaacttgaccaatgttacactgattaaaatagcacataacaagggcgccagccagtcccgatgccctgaagtgacagaagtaatgtggtttgtatgatgtgctgagtacaaaacctttaaaaacaactttttggcattaatactaacacagaatacttccttgaacattctgcaaaagtaggtgcagagacagaattacttcttcatttccagattaccagtatctataggactattttgagaaaagctgggaggcggagcacctcccctccccaatgtcattttctttgtcaaagcagaagagtcgaaggggtttaggtggaggagggcagctgacagggctcctggagttgttaagtcaccaagtagctgcaggggatggacactgccccacacgatgtgggatgaacagcagccttggtttgttgcccagggtgtccatggatttgacccgaatgctccctggagggcctgtggcgaggacaggcactggatggtccaaaccctctggctggaggagtggtggagccaggactggngcttcangcatgagggctagaataactgactcttgcatctanactgggtcattatgacactttccagtggatgtgcannaacaaactgtcaggaactgggcctgggaggctcagtgagtcacaggagaggcangcanngcaaggtaggtacaacacacaaggaacagccccaacagtgtgganatgctgggttggatcactagttagacaatgcagactcgtcgatctggctcaggcatctaanggcgatatcgacagcaacgtctgggatgtacgtcatcacaag

SEQ ID NO: 127392 - DNA, 2586 bp, Homo Sapiens
  misc_feature (2459)..(2511): n is a, c, g, or t
tttttgggtatctaggccaatttattcagctggaaatcaatctgtccagggctggaccaggcgcctccccctcgatacagctcctggctgaagaggtcatcagagcagcagctgtccccaggccagtgtcacgtcactgcgtacagttcctcccgatcgttcttgcagatctgatagtggcaggggaatttctgcgagcaggcccagggctcggcgggctggtcaggtggcggcagcagcaaggctgcgctcccggccagcaggatgtgccagatgctgtgggtgtagtagtagttgtcgctagtcatcatggaggtgtagatggcgatgcccacagaggccatagagacgccgggcaggaggtagaaggcccagcgctgccacgaggtggggtagcactggcgccggtgcccgcagcggtaagcccacatggaggccatgatcacgaaggcaaagaggcagggccccagcatgttccacatgcccctgcggtccagctgcaaggacatggcgatgaccagtgtacccagaagaaacagcacgtatttcaggactgtcttgagccgtgccatgcacaggatggtgacccagatggccgccccggagcccaagaagtcgcagtactgcagcgtgtcgtagctgaggatgcacagcaccgcctccccgggctggtcgcaggcgtggtagaacgtggagaagaacatggtgtaggcgtagacggaggcctccaccaggaagaatcgccgcactgagacggcgatgggggccaggaacatgaggttgctgagcgtgagcagcagtgtggccgccctctgctgggccaccgtctgggctgtgctgttgtccgtgcagctccacccacgccagcctgccttgcagctgcagctggcatacaggtagctgtgtctgcggagcaggaggcactggccatagggtccacaatcgttcaaacagggcaccaggtacaaggtggtctccacgtggaccacagcctgctcacagtcctcagcattctcagggcacatgagctgcagggagaggtaccagttgtctgtctctgggtaggggatgatgaggttggccctgcgagaccaggcgctcagagacaaagggtagccctggaagaaggctgtggtgcagttgagcgaagtattgaagccaaggaagggcgaggcagcattcacgcaggccactacgacggtctcgttccgcatctctgtcttgttggcccgcagggagatggtgagggaacccccgctgtccatgccggtgttcaggcgcagccgcatcacggagggcgtgtccgaacacaccctcaccgagaccctgtccaggggctggaagtgcaccgacaccacgtccatgtcctcccgcgtgactgggtagtttgtgaggcagaaggggctgcggtccaccctgccactcctgcccaggtcctggtggtcggggctcggggacagcagaccagaggaggcattgaagctctggttttggctgctctgcagaaggggctggacggtcacgctccgtggcctgcaagctgtgagggcagctacagcactgaaagccactgtcccgaggggccccaccaggctctcagctgtcacttgcagccaccggtcccagggcggtgagggcagcagcaggcggcagggccagggggcaccggtgcaggtgagcaccttctggaagttgctaggcagggtgaccgggcccacggtgagacgcacggggcagcccaggctcccattggacacgcagtcccgcagctccagcagaagctcccgcgtgtaatcggggacaaagaccttgaggtagctgggatgggagaggagggtctgaggaaggggcacgtccggctccatgatggaaatctcgaccacccgcgtgaccagcagttcaggctggaagacgtaggcacaggtgggagccaagcccttcaactcgatcttctgggatgaggggggcaggtgggcggccacgaaccagtccccgggggccgggtgggaaacgttgacggaggcattgcttctcggtgcggtgctcagcggcaccccgacctggaaggagggctgcaccgcggtgtcgtccgggaagctggtgcccagcgggttgatgaccggaggggcgccggaacggaagtgcacggtgatctccgcgtcggtgcaggcagcgccgctctcccgggagacctgcaggagccagtgtagaagcacagcatctgggggcacgcggaagcggaagagcctggcactgccgtaccagctgtcgaaggacagcctgtgcggggccatgtgagaagtgctcggactccagccccacctcgctcttcccgctgtagccggcggaggcaggcgggggccgggcaagcagcagcagcagcagcggccccgccaccaccgcggccaccgcctcgcccccggtcccggtgccagcccggcccatggctccgcgctcgnnnnnnnnnnnnnnnnnnnnnnnnnnnnnnnnnnnnnnnnnnnnnnnnnnnnngcagcctctgccgcctccgcctctgccgccctcgtcagaattcggcgcgccgtgacttcatactcttccgcccta

SEQ ID NO: 127393 - DNA, 821 bp, Homo Sapiens
  misc_feature (686)..(686): n is a, c, g, or t
  misc_feature (764)..(764): n is a, c, g, or t
  misc_feature (789)..(789): n is a, c, g, or t
gatttctctgtattttatatctctttgttaagtttattaatgtatacgtttttcaaataaacattttgaacagcccaaatcaatcaaagccatgagatcacaaagtgttgcttcttgacacaacattagcttgttcagaaaatccaaaagccacatccaaagatcaatgatgctaccttaaagacatgagggaggctccttaagaccctagagacaccaaggaccccacagggccagtcatatgaacaggctcagaagccggcttgatcctcagcacctctgcaaagccatcaccaaaccagcaagtgacatgcgctatgtctacagtaaagtagaaaaggcggtcctggcaaagcttccggcggtacacagaccgaggatccgctgacagcacagcctcaatggcacgctttgcttcctctgctgactgaaaatatttaaatgacgcctgaccaacatcttgtgaactgagctgcccaaggtccatctcggcatgaggagtaaaccgcacttctaaagtggccacaggagcctctgtcacccaggcaggaaccatgctgcggggagctccatcagcccttccagcagggcagtgaggggccatgggctgtgtctctgccctgcttccttgcaagactgctgctccttccactctttctagcttcttgtctgtacctttctctganaagctcttctctgggcaatatgggccaatttgttcttctgccacgctggaactctgatcacgtcttgattccagacanaatcactgctatctcctgtgcatangaatgctgctgattctggtgtgtcactgtgtg

SEQ ID NO: 127394 - DNA, 1385 bp, Homo Sapiens
atgctttactgacagcctggaactaactgtgctgaccacacagttgtccaacaaaagtcatcacatgatggtactgcaaaaatattatttcatacctgtttcctaaaaaccagtcatactgacaaacactccacatacctgccttcacaaataccaaacttggctaaatctcaaagtaaaagttcatctctcattcagaatgaagaaactgaagataccttgtgaactgagctgcccaaggtccatctcggcatgaggagtaaaccgcacttctaaagtggccacaggagcctctgtcacccaggcaggaaccatgctgcggggagctccatcagcccttccagcagggcagtgaggggccatgggctgtgtctctgccctgcttccttgcaagactgctgctccttccactctttctagcttcttgtctgtacctttctctgaaaagctcttctctgggcaatatgggccaatttgttcttctgccacgctggaactctgatcacgtcttgattccaaaccaaaatccactgctatctccctgtgcataggaaatgcttgctgaattctggctgtgtcactgtgtgtcaggtagttttcttctgaagttctgtcttcaggacatttaggtttcctcttagtgctatggtggggttgtggctcatcacaccctgagagctgtcgctggtcacagctgtcagtcttgctgtcagactgggacacagtgtttggtgtatgttggttattctgtaaattaaagtctgctaaaggctccatcacattttgcggtgagtcatactcagctatgtagggcttgatgtctagtacgggtgtgccatgtatcatgtcaattccagaaaggtatatagctccaccttctaccttttccagcttggccagggtcagtcctattgcattgggacgatgagggctccttgtggaaaaaactccagtctttgcaccattcagcctaggaggctgcacttttgccttacagctcaaatgaccgtttttgtgaaaaacaaacaaaatccaaacatgagaaaactgttctaggcccatcaaggaatgttcaggattattaaagatcctctttctaatcctcaaacaggctcgagaatagctacaaatggatggctgtcttggagtaccattcttggccgagaaacaagattccaagtagccgactggctcagttaaaagattccctgtctccagagccggcttcacgcagccgcacggggtcgctgtaggccgaggccccggctcctccaagccgcgcatggctactggttgctgaggtgcccacccgacgcattcaaccttccgcttccgctctcccctcgtgccgattcgacacccaggcctcgtacttagcctatgtt

SEQ ID NO: 127395 - DNA, 575 bp, Homo Sapiens
gactttaaatgataaacttttattctgaatatactgtttttgcacaagatttaacacaacattttctgggattataaatattttataacagtattatacaaatttttacaaaatgtttttatcaggctaggtaattttcacaaaagtgtcaagagaacaaaataaaggggagaaaagatctattgttcacaaaagccagttggccttttgcatgaatgcacaccattttaataaaagtattcctaaaagcatgatccgacactcatacaacacaacaaaaaagacagctttactaggtcacattataaactcaactggcatctacacaagacagtatcccattagtttcagtggaatttgagataactgtgtgaactagaaataaggtagatgaagagttgtctaattcttcaaaaatctggaatttttttcaacactcaaaacattatattggtttgctctttacagaaatgtactgtgaatattgacattctgctatgggaaacaatacaagtttagatgaaaaaatatttaaaattttgggcaagtgaaatagttatttcattctattcttt

SEQ ID NO: 127396 - DNA, 680 bp, Homo Sapiens
  misc_feature (85)..(95): n is a, c, g, or t
  misc_feature (464)..(526): n is a, c, g, or t
acttttggaaaaaaactttattaaacactcaagagtatacttctcaaaatcacagaagagcctccaaatacaagtgttagaaggnnnnnnnnnnncaacaaaaagctaaaagccaatcagaaacagtttgggtgtggaggactggcggggggggacagggactgcacatgggaaggagccacttttgtattccataatttcatcttgttgtgctagaatgcatgctttttttcctccaaatgaggaattcatttcaaataggaatttcttttattctcctggaactgaaatgcttagtactatccctaacaacaaccatgggatttttgaagttatcccaaattcaatgcaaagcacttttatgtatcttccagttgtagattggaatagcaaaagtgaatgctatgaccaaaatttttgccctcctaaataaagacgtttccttctagagagcaaatctatcnnnnnnnnnnnnnnnnnnnnnnnnnnnnnnnnnnnnnnnnnnnnnnnnnnnnnnnnnnnnnnntatcaaatgcagtcatttctaaatataagccataattatagctttacctattgttcttattgttcctatgctgcttctacaatgttacatcaactatacttagctttactctcccaaaatcttggtgatgaagcttctgagtgtgctttccaat

SEQ ID NO: 127397 - DNA, 1523 bp, Homo Sapiens
  misc_feature (138)..(194): n is a, c, g, or t
  misc_feature (295)..(295): n is a, c, g, or t
  misc_feature (319)..(319): n is a, c, g, or t
  misc_feature (336)..(336): n is a, c, g, or t
taaatgcaaaggcactttttatgtatcttcccagttgtaagattggaatagccaaaagtggatgcctatgaccgaaaattttggccctcctaaataaagacgtttctttttagagagcaaatctatcataaaatgtcnnnnnnnnnnnnnnnnnnnnnnnnnnnnnnnnnnnnnnnnnnnnnnnnnnnnnnnnncaaatgcagtcatttctaaatataagccataattatagctttacctattgttcttattgttcctatgctgcttctacaatgttacatcaacttatacttangttttactcttcccaaaaatcttnggtgatgaagccttctngagtgtgttttccaatgtgccagaaccagaagggcattccaaggcttccccacatttcctccatttacggagacagctgtttcactaacttgcagcacttgtaaatgctttgaaagctgatcacatattatattcttgacttaatactttggtaagcctggatatctatctttctataaacctcacctaatctttgatgttactataaccttatctttgatttaacccatacacatttactcatcataatcttgatttaaactcatgctacgaaactgtagcacaaaagacatttctctttagtgtttcaggaaaatcagctcatggaatgctgccaaccaaagtatagtagattctttaaacaatgtaatgctttctatctgcagactcccacagacctcacatccagggctcccatccttcccaggttctgccaaggatgttggggtctgttgcctggtccatcaggcacttcacttgagtctcttctgaaagcccactctctggttcttgggcacgaatgttgtgatctttgcttcctcgtgccacagccacatagtctctgaaggcaggggccttctcatgacccaggagtagctcatcacaagtaatgactgctggattggcacctgctaactttctcttagcgtaacatattttctgtcgggggtaccaatttttttcagcaacatttatttcttgaatccatgaccctccttttttcagcattttctgttcaaaatttttccaatcaaaggagggctccttgacaaacacatccatggtgttggtgagcaggccagggtctgagcggaaggcccggagtgcgtgtaccatgatgctgtacataaggcccgtttctttcattggtaacatcagattgataaactggcgagttagccgaaaaggcatcaactcagggactggcagaaactgtgtagcggatccaaacgcatgcccaaagtcgatcccgatcacgccgccagtctccatggccaccataaagttgttcagatgtctgtctccaatcccgaggatccagtggctgatgcatatcagagcgtgagagctggcgaagtgggagcggagcgccaggaaagcctcagggcttgtactcatcctcacgaaggcccgctttaagagatcagcaggcactttactttctcgttttccaaaagacgtgactg

SEQ ID NO: 127398 - DNA, 1087 bp, Homo Sapiens
  misc_feature (816)..(853): n is a, c, g, or t
  misc_feature (958)..(1002): n is a, c, g, or t
ttttttttccgagtcaatattttattaaaaaacacacaaacacatgcacactggtaacaaaggcagagatggagaggagacacaagatctccttggggacaggctgaccacatagtgtttctacaggcacgcctcacttcaggaaagagggtatctctaagaccggactgacaagctagataaattaggacagggctttgtttcttaaggcacttcactcccctgaggagtgaagtagaagggatttaggcgggagtattcacaaaccccttcagctgtgctaagtggggttcatcagtacctgaggtggttctagaagcaggaaggcagaaaacatttccctggaggctgctttcctttcccagaatgggagggatgttctccccggaaggctggaggaagagtttccggctggctcaggagctcagggagctggcttcctgggagagcaggaagagggtgcaggcctttcctggtgcccaccagcctgacaggactttggcacaggaacacaggtccagaggcctcgcctggagtacacgtcctcctctctgcaaagctcctgaggggcctaggggttgtggcctcatcagacggctgcatctgtggactgggttacacacgagatcttataggacagccatatgcttgccatgcagaggaaggtggccatgaaaccaaagatcgctccggctaccagtccgctctggttgtaactcttggaagctgccacaatggaggcgatgaggaggagcagggtaccgattaaatagtgcagaagttccgacaggggcgagctgatacaggtgagcaccnnnnnnnnnnnnnnnnnnnnnnnnnnnnnnnnnnnnnnatcattatcaagtcgcaaatggtgaccacttcaaagtagctgtaggcgctgtagttggtccacagggagctccgcacacagatgaaggcaatcagcagggtgacnnnnnnnnnnnnnnnnnnnnnnnnnnnnnnnnnnnnnnnnnnnnnaatctctacgacgcgtggtcgacgatatcccgggaattccgaccgtaccagcctgctttttgtacacactgttcataggtcctag

SEQ ID NO: 127399 - DNA, 1236 bp, Homo Sapiens
  misc_feature (486)..(546): n is a, c, g, or t
tttggccccaggatttttggccccgccttttgtttttggaaaactttttggccccaggttactttccaatccagagggccccccaatacaagttttagaagggaaaaaaaccacaaaagctaaacccatcagaaccatttggttttgagaactgccgggggggacagggactgcacatgggaaggaccacttttgtatcgcataagttcatcttggttgtgctagaaatgcatgctttttttcctccaaaatgaggaaattcatttcaaataggaatttcttgttattctcctggaactgaaatgcttagtactatccctaacaacaaccatgggatttttgaagttatcccaaattcaatgcaaagcacttttatgtatcttccagttgtagattggaatagcaaaagtgaatgctatgaccaaatttttgccctcctaaataaagacgtttccttctagagagcaaatctatcataaaatgtcnnnnnnnnnnnnnnnnnnnnnnnnnnnnnnnnnnnnnnnnnnnnnnnnnnnnnnnnnnnnngcagtcatttctaaatataagccataattatagctttacctattgttcttattgttcctatgctgcttctacaatgttacatcaactatacttagctttactctcccaaaatcttggtgatgaagccttctgagtgtgctttccaatgtgccagaaccagaagggcattccaaggcttccccacatttcctccatttacggagacagctgtttcagtaaccttgcagcacttggtaaaatgctttgaaagctgatcacatattatattcttgacttaatactttggtaagcctggatatctatctttctataaacctcacctaatctttgatgttactataaccttatctttgatttaacccatacacatttactcatcataatcttgatttaaactcatgctacgaaactgtagcacaaaagacatttctctttagtgtttcaggaaaatcagctcatggaatgctgccaaccaaagtatagtagattctttaaacaatgtaatgctttctatctgcagactcccacagacctcacatccagggctcccatccttcccaggttctgccaaggatgttggggtctgttgcctggtccatcaggcacttcacttgagtctcttctgaaagcccactctctggttcttgggcacgaatgttgtgatctttgcttcctcgtgccacagccacc

SEQ ID NO: 127400 - DNA, 711 bp, Homo Sapiens
  misc_feature (623)..(633): n is a, c, g, or t
cgtcgctcggcaccccgatatttgtggttctggcacattggaaagcacactcagaaggcttcatcaccaagattttgggagagtaaagctaagtatagttgatgtaacattgtagaagcagcataggaacaataagaacaataggtaaagctataattatggcttatatttagaaatgactgcatttgatattttaggatatttttctaggttttttcctttcattttattctcttctagttttgacattttatgatagatttgctctctagaaggaaacgtctttatttaggagggcaaaaattttggtcatagcattcacttttgctattccaatctacaactggaagatacataaaagtgctttgcattgaatttgggataacttcaaaaatcccatggttgttgttagggatagtactaagcatttcagttccaggagaataaaagaaattcctatttgaaatgaattcctcatttggaggaaaaaaagcatgcattctagcacaacaagatgaaattatggaatacaaaagtggctccttcccatgtgcagtccctgtccccccccgccagtcctccacacccaaactgtttctgattggcttttagctttttgttgnnnnnnnnnnnccttctaacacttgtatttggaggctcttctgtgattttgagaagtatactcttgagtgtttaataaagtttttttcc

SEQ ID NO: 127401 - DNA, 532 bp, Homo Sapiens
  misc_feature (129)..(190): n is a, c, g, or t
cataaccaagatttgggagagtaaagctaagtatagttgatgcgacattgtagaagcagcataggaacaataagaacaataggtaaagctataattatggcttatatttagaaatgactgcatttgatnnnnnnnnnnnnnnnnnnnnnnnnnnnnnnnnnnnnnnnnnnnnnnnnnnnnnnnnnnnnnnatgatagatttgctctctagaaggaaacgtctttatttaggagggcaaaaattttggtcatagcattcacttttgctattccaatctacaactggaagatacataaaagtgctttgcattgaatttgggataacttcaaaaatcccatggttgttgttagggatagtactaagcatttcagttccaggagaataaaagaaattcctatttgaaatgaattcctcatttggaggaaaaaaagcatgcattctagcacaacaagatgaaattatggaatacaaaagtggctccttcccatgtgcagtccctgtccccccccgccagaccactaattcgggggcg

SEQ ID NO: 127402 - DNA, 901 bp, Homo Sapiens
ggggtttatgactgaaaaaatgactagttattatgaagacactactgttgaagatggatattttaacatggagtttcaacaaaattacttcttgagacagagctgatgtgttttttaaataacgtgattttaagcatatatttgaacaaaactaaaacatttagtattatgaatatgaaaaaagatcagtaaatcaatgtactcttctaggctgaattaaggtagactatttaaggtttcaaaaaagtttggctggggcagaataagttttacaaaacccatgccatccaaaattaagatgacatgtagcagcaagaagtattccaatgtctcataaccagttctcgcaagcaatgtgtattccttactttaaggaagtgtcaaacaaatagaaaaatctggaagaatttactaagtgtaataaattagaggtaaatcgtaataaaagaatttatgtctcacaaaaatattcacaagtgggagttttcttctaccaacttctcagagtccttctagccccctcttcacttctgaaagatgggatttaccaaaatctggtttacatttaacttttcagggacacatgacctgaaaagaaagatgtcagataatactgacattgcctcatgcactttctttgtatcagtccttcttctgtaagtaatcagaattgggtccaaatggcatagaatcaaacattatgtatcatgccaaataccacttcctgcccaacaaaatttcatttttctccagtaatgaagaggtggacattcttgttggactgtagcatctgtgccgcccgctccacaccaaccacggcagctaacctctgggcatcatatttggagtagagaacagtgcaggtccacgtggcctcttctcctctgttggtgcctctcac

SEQ ID NO: 127403 - DNA, 670 bp, Homo Sapiens
caggagcagctatataattttaatctaaagatttgggcatacagaaagcatttcacataaattctcttgagtctttaattatatgacaggacataaggacctcagaaaaataagtatcttcccatagatcttaacccttgatctctgcagcaaagatagtccctggtaatccaggtaatatggtctgtaaaatattaataaataggcctattgacttctgactaaaggactgcatatagcctgagaagcaacattatggcccagtggtcagtacttatatacatgggccttttgatcctacattttcctattacgtagttgggattggtagtttctaatcttctagtcctaagtgttatatttaagagagctacgtattacagtgggccttattcaaggttagttttgtcaaatgttgcagaagaattccagtaattaaagtaagtcattaattctttatgcttcagtttcctatctctaaattagcaataagctcccatgttcaacttcagccacattcaatttttaagaatcttcagaagaaaaaatgtttcacatatagttaacaagaatgttgcttgataaagagttggggctgagctcaaaataaatcctggtatacctccttctggttgctctggaaaggacactgatacataagggaagtaca

SEQ ID NO: 127404 - DNA, 393 bp, Homo Sapiens
acccaaggtaaatttttactttaataaccataaaactgatttttcaccttcatgaagtcattgtcttacagaagactcggattcaaatcatgactctttccctcagtagccagaccacttactctgtacctgtaaaaggaggtatgcggtgcttctaaagcatgcactgcatccattcattcacgtggtccactgggtgacgacggtctgtcctccccttaagcaaaaactggctctaagggacaggtcttttcttcacgcaaaaggtgagcaatgcccccagcctttcattctagaaagtgatgaggcgatgattttgtatccacaaaatgcattatcaaagctcaccactttagtgttcatttactaaagttagcagagatctagaatttg

SEQ ID NO: 127405 - DNA, 2953 bp, Homo Sapiens
  misc_feature (1951)..(1966): n is a, c, g, or t
  misc_feature (2109)..(2128): n is a, c, g, or t
  misc_feature (2159)..(2738): n is a, c, g, or t
  misc_feature (2744)..(2745): n is a, c, g, or t
taagctaggtacgaggcctggggtgttaaattcggcacgaggcgggacgccatagtgcgcctcccagcccgtctccccgctccagtttagaacctaattcccaattcccggaccgggcccagccctgggctcttactgtccgcttttgctgggacctgttccacaaatgggcgtcttctgccttgggccgtgggggttgggccggaagctgcggacgcctgggaaggggccgctgcagctcttgagccgcctctgcggggaccacttggcaggccatcccagccaagaaggccccggctgggcaggaggagcctgggacgccgccctcctcgccgctgagtgccgagcagttggaccggatccagaggaacaaggccgcggcctgctcagactcgcggcccgcaacgtgcccgtgggctttggagagagctggaagaagcacctcagcggggagttcgggaaaccgtattttatcaagctaatgggatttgttgcagaagaaagaaagcattacactgtttatccacccccacaccaagtcttcacctggacccagatgtgtgacataaaagatgtgaaggttgtcatcctgggacaggatccatatcatggacctaatcaagctcacgggctctgctttagtgttcaaaggcctgttccgcctccgcccagtttggagaacatttataaagagttgtctacagacatagaggattttgttcatcctggccatggagatttatctgggtgggccaagcaaggtgttctccttctcaacgctgtcctcacggttcgtgcccatcaagccaactctcataaggagcgaggctgggagcagttcactgatgcagttgtgtcctggctaaatcagaactcgaatggccttgttttcttgctctggggctcttatgctcagaagaagggcagtgccattgataggaagcggcaccatgtactacagacggctcatccctcccctttgtcagtgtatagagggttctttggatgtagacacttttcaaagaccaatgagctgctgcagaagtctggcaagaagcccattgactggaaggagctgtgatcatcagctgaggggtggcctttgagaagctgctgttaacgtatttgccagttacgaagttccactgaaaattttcctattaattcttaagtactctgcataagggggaaaagcttccagaaagcagccatgaaccaggctgtccaggaatggcagctgtatccaaccacaaacaacaaaggctaccctttgaccaaatgtctttctctgcaacatggcttcggcctaaaatatgcagaagacagatgaggtcaaatactcagttggctctctttatctcccttgccctttatggtgaaacagggggagatgtgcacctttcaggcacagccctagtttggcgcctgctgctccttggttttgcctggttagactttcagtgacagatgtttggggtgttttttgcttagaaaggtccccttgtctcagccttgcagggcaggcatgccagtctctgccagttccactgcccccttgatctttgaaggagtcctcaggcccctcgcagcataaggatgttttgcaactttccagaatctggcccagaaattagggctcaatttcctgattgtagtagaggttaagattgctgtgagctttatcagataagagaccgagagaagtaagctgggtcttgttattccttgggtgttggtggaataagcagtggaatttgaacaaggaagaggagaaaagggaattttgtctttatggggtggggtgattttctcctagggttatgtccagttggggtttttaaggcagcacagactgccaagtactgttttttttaaccgactgaaatcactttgggatattttttcctgcaacactggaaagttttagttttttaagaagtactcatgcagnnnnnnnnnnnnnnnnttttcccagtcctttttttaagagacggtctttattgggtctgcacctccatccttgatcttgttagcaatgctgtttttgctgttagtcgggttagagttggctctacgcgaggtttgttaataaaagtttgttaaaagttnnnnnnnnnnnnnnnnnnnngcctacagccgcgcctcgtgccgaattcttnnnnnnnnnnnnnnnnnnnnnnnnnnnnnnnnnnnnnnnnnnnnnnnnnnnnnnnnnnnnnnnnnnnnnnnnnnnnnnnnnnnnnnnnnnnnnnnnnnnnnnnnnnnnnnnnnnnnnnnnnnnnnnnnnnnnnnnnnnnnnnnnnnnnnnnnnnnnnnnnnnnnnnnnnnnnnnnnnnnnnnnnnnnnnnnnnnnnnnnnnnnnnnnnnnnnnnnnnnnnnnnnnnnnnnnnnnnnnnnnnnnnnnnnnnnnnnnnnnnnnnnnnnnnnnnnnnnnnnnnnnnnnnnnnnnnnnnnnnnnnnnnnnnnnnnnnnnnnnnnnnnnnnnnnnnnnnnnnnnnnnnnnnnnnnnnnnnnnnnnnnnnnnnnnnnnnnnnnnnnnnnnnnnnnnnnnnnnnnnnnnnnnnnnnnnnnnnnnnnnnnnnnnnnnnnnnnnnnnnnnnnnnnnnnnnnnnnnnnnnnnnnnnnnnnnnnnnnnnnnnnnnnnnnnnnnnnnnnnnnnnnnnnnnnnnnnnnnnnnnnnnnnnnnnnnnnnnnnnnnnnnnnnnnnnnnnnnnnnnnnnnnnnnnnnnnnnnnnnnngacctnngcgctacggatactgtccgctttctcccctcggagcgtgggcttctcatactcagctgtagtactcagtcgggtaggcgtcgctcaactgggtgtgtgacaccccgtcaacgacgctggctacggtactacgctgatcaccggtaaacactacgcatgcacacatgtacagtacaacgagtgttgcggtacaatctgatgtgcacacg

SEQ ID NO: 127406 - DNA, 795 bp, Homo Sapiens
ttatggccccgaacgtggagacagcttgagaaagagaacaccttgctggccaccccagataatctccatggccaaggatgacaaaatccctctatgtctgtagacaactctttataaatgttcctccaaactggctggaggcggaacaggcctttgtacactaaagcagagcccgtgagcttgattaggtccatgatatggatcctgtcccaggatgacaaccttcacatcttttatgtcacacatctgggtccaggtgaagacttggtgtgggggtggataaacagtgtaatgctttctttcttctgcaacaaatcccaattagcttgataaaatacggtttcccgaactcccacgcatgaggttgcttccttccaggctcatcttccaaagcccacgggcacgttgcgggccgcgagtctgagcaggcccgcaggccattgttccatctggatccggtccaactgctcaggcactcagcaggcgaggagggcaggcagtcaccaggctcactccatgcccagcccggggcacattccttggctgggatggcaccagcacagcatctccagctttcactcaggcacacaccagccacagccaggtcaccctggacaggccggcatcggggcatgggggcgtgtcgcattccatggcggggctgggggagaaaaaggagtagagcgtcttctggccagatcatccatggagctgaggaggcagcgaacgcgcagccacacacgggaaccggcgagcctcgtgccagattcaacacccaggcctcagctacctagc

SEQ ID NO: 127407 - DNA, 1218 bp, Homo Sapiens
  misc_feature (690)..(699): n is a, c, g, or t
ctgtataagggaataacctgcttgggttcccctattaaagtccggaatctcgtatgagatggactcccacccgtgcgtgaatgtattggcccaaggtaaagtataagagctgcgtccggactgttgttgtgggaagacacggttaagccactatcggggaagtgaattggggaaaataaatggtccctcgaagttccaacacacgggggggatgtttcactgtattcgctgttgtttttgtcagtttacacatacatcatgttaatattagaccaaggcacaaaacgtttagtgcataaacccagtttcttttaagatttagcattttattttagtctcttatcttagtttggaccacttgtacccagtactctacctactacagactatttaacttacccaacaaaatcaaaagaggttgctgaccagatttataggggacataactgtttatattatcaaagtgtttgcataaccaaaagtacaataataaagatgaaaatgcctcctatttcttttagaaaataatacttaataagcttgctgcatctttgatgtttttactactactgcatgacaatgaatatctgatagaaaaaagaaatgtatacttgaattatgatagctcatccatcacagtttaatctaaaaatgaaatttctacagaaacaggaactattttgacaaagnnnnnnnnnntccctcatccaaacttctttgtagtggtaaaggctgcaaatttgcagcgtttagaaaactacactatcaacaagctttgctttatggactgagatgtacaaaatctagaaagcagatgaaagtgaattatttcaaagttttagtaaaacttctgataatcagagttcaaagcaaatatggcacataacaactcaagcataaatcaagatggagagcctggagagtttcttaaattttccaaaaagctatcattccaacatgtaggatttctcccctattttaaccttaccagtttcaaaggaaagaaaagggagtggcttccatatagacagcacgtgcgcgagagcacacacacgcagagtggcaggcagagtgtctaattccttcttcccaccttccttcttcccaccacccaagtctcactttacttattaaaagcaaactgcagaactcctcattgcggacgcgtgggcggacgcgtgggtcgacgatatcccgggaaatccggaccgataccag

SEQ ID NO: 127408 - DNA, 713 bp, Homo Sapiens
taatttataaaggaaagaggttttattgatctacagttttgcatggctgggaaggtctcaggatacttacaatcatgaccaaaggggaaacaaacacatctttcttacatagtggcaggaaggagaagaatgagagctgagtgaagggggaagctcctttataaaactatcagattatgtgagaatttactcactatcatgagaatagcacaggggaaaccaccgcaatgattcaagtacctcccactgggttcctcccatgacatgtggggattattggaactacaattcaagatgagatttgagtgggaacacagccaaaccatatcagtcattccacatattgagtgatttctctcttctattcagtattcttccacagagagggacccatagtcattaccttcaaggaacctaaatcctggtgtttttatggttacgggtggcatataatatacaggtaagccaatgttacaggatgttgtgaaactattcctattcttccataagtagccactaggaccacggttgaaaccaagaggcactgattaccacctcactctaaagagaattactgagtttgtgttcactgctggggccagatctctttgcagggctatgttaggctttacacaatgtgaccctctagtctgtacaaggagaggaatgcagagggaaagcgattcactggagtctctcgtcagtgacctggt

SEQ ID NO: 127409 - DNA, 1039 bp, Homo Sapiens
  misc_feature (744)..(744): n is a, c, g, or t
  misc_feature (752)..(752): n is a, c, g, or t
  misc_feature (763)..(763): n is a, c, g, or t
  misc_feature (781)..(781): n is a, c, g, or t
  misc_feature (787)..(787): n is a, c, g, or t
  misc_feature (790)..(790): n is a, c, g, or t
  misc_feature (794)..(795): n is a, c, g, or t
  misc_feature (823)..(823): n is a, c, g, or t
  misc_feature (825)..(825): n is a, c, g, or t
  misc_feature (963)..(963): n is a, c, g, or t
taaacaaataaaattctttatttaaatttctcttgtggggaaaatatttttctttaaagcacacttaaaagtaatttgcatttacttcctgtaaagcatttccatttcacaattagcaaaactaaaaggctatgtctcttcatgcatttatttttgttagaaaaatgtcccatggtgctatcaaaccgattttaaccatcatcaagcttaactttgcctctgttgacaacatgactacaaacatgaatcaaaaaggagttaaggaattttaagccataaggtttcaattatagcttaccaattatgtaattagctgacaaaaatcaagtctgatgtagaatagctgtcatctacttaactgcagataatcatggcattttcatttaagatgatctgaacttatgaaataaaggatccagtcccaagaactcaataatctcttatgttttcttttgaagacttattttaaatattaactatttcggtgcctgaatggaaaaatataaacattagctcagagacaatggggtacctgtttggaatccagctggcagctataagcaccgttgaaaactctgacaggctttgtgccctttttattaaatggcctcacatcctgaatgcaggaatgtgttcgtttaaataaacattaatctttaatggttgaattctgaaaacacaaccataaatcatagttggttttttctgtgaccatgatctagtacattatttcctccacagcanactacctntccagaaggtnggaattgtatttgcacantcaggncanaccnnacactgaaagcatttacatattaatctnanttgacagaaacccagtgatactaggaatctacacagtcaagttttttctatcaagagggcaactcgggggaaaaagtgtcctcctctgtgctgtctgaaaatatcggtcaaacgatttacaacagactattcagatanagtcattttgttccaagtaactgcatgttaaggttgcaaaatccaacatccaggtgttggtgacacaacctgtacc

SEQ ID NO: 127410 - DNA, 483 bp, Homo Sapiens
  misc_feature (259)..(305): n is a, c, g, or t
  misc_feature (324)..(407): n is a, c, g, or t
cttggtggtgaaattacagatctttatttaatttttcttctttgtgcttttgtgtatctcctacattttccacaatgcacatagcacttttacaatcagggagtaacaacaaaaaatgcaatgtaaatcctgagaggagctatcacctgcatttgggctcttccggggatggtccaggggaagtggattttagcacagcctggaaggttgggagaatgtgaactagggagaggagccaggtaaagccttttttgttccnnnnnnnnnnnnnnnnnnnnnnnnnnnnnnnnnnnnnnnnnnnnnnnatctgtggtcacatacagnnnnnnnnnnnnnnnnnnnnnnnnnnnnnnnnnnnnnnnnnnnnnnnnnnnnnnnnnnnnnnnnnnnnnnnnnnnnnnnnnnnntctttaaaggtgacatgggaggctcttagtgtttgaaagtctaggaactcaggaaagtttggttttagtctggatc

SEQ ID NO: 127411 - DNA, 756 bp, Homo Sapiens
ggtttcgtttttttggccctagagagtttattacaaaataagaaagagaagtctggggaaggttcactcatcatagaattttggcagttcattgcccaagatgactcgatggtccacaccggcagctgtaatagtgaccaggtagatgacacccccgcttgagccatcccggctcatggccagagcaatagcgtctgtggtgaagcgcctgcactcctcgggagacatgcctggcttatatgctgcatccacataaccatagataaaggtgctgccggagccaccaatggcaaaaggctgtcgagtcagcattcctcccagggttccatatacctgacctccttcacgttggtcccagccagctaccatgagatgtgcagacaagtcctctcgatatttatagctgatatttctcaccacatttgcagcagccaaaacaagtggaggttcctccagttctatcccatggagctccagctggtaggcggccatgtcggccacggcttgggcatcagcagctgaaccagagagtgcacagtagatgcgctcgtgcagcggggacagcttgtcaaacactcggttcaccaccgcctcgcctgcagacactcgggaatcagaacccatcacaacgcccccgtcaaactccactgccatgatggtggtcccggtgtggacttctcccgcccggggtaagtccccggttggtgctcccgcccgcagcatccctgcaaggcaccgctctcctcgccgcctccc

SEQ ID NO: 127412 - DNA, 633 bp, Homo Sapiens
  misc_feature (236)..(268): n is a, c, g, or t
ctttttgttacggcatgaagagaaaaaatagacaagatgaacgcaaatgcattttcacattcaaaaataactgcaggcctcctagtggctctctacatgatcataaatgaaacaagttttaaaagaaagattaatgctgacttgtgaaggtgtcaaacaagaagcggtgagatggagatggaatgttagaaagattgcacgtcgatgacaaagaagcacttacggcttccatcacnnnnnnnnnnnnnnnnnnnnnnnnnnnnnnnnnaaatcttaaggatgctattgaagggttttttgataaagtagccaacagcaccaaaaaataacagaatggatttcctaatgaaatcaggcacaggtctccctcatgtgacccctccaaggcaggcagtcttttccgtcttcctcgctcgcttttcttctttcctggaacagatgcatagtgatgtgctggtggagagcccactcgctcccgtctcctcgttccacctatggttaggaaacaacgtccgccttcagctgccacaaccgcccagagaaacaaaacgggggtgccccggcttcccagatcacaagctcatctggcacacggcagaagacgacagccaaagcaaagccatttcaagtttc

SEQ ID NO: 127413 - DNA, 1025 bp, Homo Sapiens
  misc_feature (596)..(613): n is a, c, g, or t
  misc_feature (675)..(697): n is a, c, g, or t
ttttttccaaaaaactttgtttttattattaaaccttgtagtacaaacctgaaaagtaaacaaaaaactcgcaataaaccacatgaagtctccctcccaagggaggggtgcagagcagcgctaataaattaaatgtcaaactgtaagccataggcagaagtttactgtcaaaaagagggaaagtacacagcaaggccatagaaaccggacaaccacattggaaaacacttgactgtttctgtaattgttaaatattccaaaacagttcagtcttctgcaacaacaaccaacaaagtggatcataggacgttcctggcagtcaccactggcaagctcagtgcaatatgggtagctacgggattgatgaatccaattatgaaacaaagaacagcttgtgaaaacagtttcccttttttattccacacatactgtacacacaaccggagaagggcaacagctactccattattatttttttgttgttgttcagtgatgtaagcagcacttataaatgttacaagaaaaaccctgtaagcatccaatccaaccgatgaagaaactgaaatgtaaggcttttcttcatcttgtcttctcannnnnnnnnnnnnnnnnnaccgagaaaaaggctcaagtatttaaaacaatttacaggcatatgtacaaaagggatgggannnnnnnnnnnnnnnnnnnnnnngttacaacatgaagagaaaaaatagacaagatgaacgcaaatgcattttcacattcaaaaataactgcaggcctcctagtggctctctacatgatcataaatgaaacaagttttaaaagaaagattaatgctgacttgtgaaggtgtcaaacaagaagcggtgagatggagatggaatgttagaaagattgcacgtcgatgacaaagaagcacttacggcttccatcactttttcggacgcgtgggtcgacgatatcccgggaattccggaccggtaccagcctgcttttgttgtacaaactggttctatagtgtcaccatagcggtt

SEQ ID NO: 127414 - DNA, 886 bp, Homo Sapiens
  misc_feature (227)..(249): n is a, c, g, or t
aagttagccatttattatataaattgaatacttcttccatattgtggcttttagatagattggcagacctgtccccaaccccttccctgttgaccatggacaatggagggtttgctgtataaacttgattgaagggtttgcctttagctggggtggattactcagggacctcaaaggtattggtgatgatttatttcttgagcttggtggtgagtatgcaggactgnnnnnnnnnnnnnnnnnnnnnnnagcaagccttacacattttcttttgtatgcaatatttaataaaataattttggataatttggtttttagcattaatcaacaactttttttacatcctcaatatgccccaagacaaattattgattcagcagtttttagctgaatcttttatttctgaatgattggagagaacggcagtatccatttctggagaatagttaagtacttagattgaggatgtctttctttcatgacattaagcaatgcaatatcatctgcatccaagagccaacttaacatgttcagtctaatgagccttggtagtcgtaacacacattgactcaaagacttgactgttgtggcctgagctttgatacactctgtgaaatgcctggagatgtccaactcctgcaagtttggcatgttgtccagtgcttgaaagaaatttctgtatccttcctctgtaatcttgtgattgattgaaagctttaggttctcaagtttctggaaacctccactgattgctactttggcaatttccaccacgctgtcatcattcaaagtcttgaaaaatgagaggactcggagacaatgaagctgctgacactgctggatgatcagtttggccactcgataaattccatccccagtaggaagg

SEQ ID NO: 127415 - DNA, 1362 bp, Homo Sapiens
tggtgatttattttttattatgttaaaggtgacagatcttggcttaagaaaaaccagatttgtgactaaagaaaacattttcttggagctttgcattgttctggcttaaatttccttttaaaaagtaactttccgtaagttaaagttagcactttcacaaatactagcagagttactaaatgaaatattaacatcaaaacaaacatgattaacgaagaagtattttattattttgctgcaaagctgttgcttcactgtataaaaatagcaccagcaaatgcagtgtatcgcaaaattaagatagtggtgttcctcatctgacactgtacaagcaacaaaacctcttcacttccagttatttccaatggaaagatcattaagtatttcatcccaaatccaggtatggatacatgcaagttacaatattatataaggcttaagaataacaatgttatctttgaattatgtaatttttataactagtttttaccatggataatttcatgaattctgaacactagagcctagtctaaaaatcataggatattgtgaaaaagacgcatattatatttatctataatcattagaaagttaaagggcattttctttcattagcagtgttaacagtagtttgtttttccccatcggtaatactaaaagtttctattctaagtcttctatccaccactaatttaagacaactctgctggcttgcgttatttcatactagtttatttaggagttccattttcactcctcaatagattttatgtatttctcatatgcttcttcactcataagttcatctagttctgaagggttactcagtgtcatcttgatcagccaaccatcttcataacaagatttgtttacaagtcctggattttctgcaagagcttcattaatttcagttacttctcctgataaaggagaatagagttcactagcagctttcacactttccaaagcaccaaactcatcttgtttgttcaattttgtcccaacttcagggagactacaataaacaacatctcccaacgcttcctgtgcaaaattgctgattcccactgttccaatgccattttctgttgttacccattcgtgtttctctgtgaatttacgcaccgagagcagagcgggtccagtgcgcagcgtacggacggcgcccacccccagctgccagggcctcggcgggcagggcgcggcgggtaacgggaccgcgcgcagggtgcagagcagggcccgcacgctccgcaccactcgcagcgccatgttcgcaggggtgcgggggtcgcagcgctacgcctcggccacccgcgccgggaggcggggcggggaggggcagttcgcggcatcccggga

SEQ ID NO: 127416 - DNA, 500 bp, Homo Sapiens
ttttgtacaacaggcttttactccaaaataaagtggcttgtactgtatttctcctctggagccttgccgctggctccataggaaaattctgcctcacatagatacctgaggcattggattccctaaacaaaattgtagatccacttgtactgcaggcctctgtagtccaaaacgtttctctttctctgagtcccactcacagctgacatccttcttgacatttgcattttatttagaatacacatccaaatatgttttatgttgcctctaacattcaaaagagcctctaacagtcttcctttccctatcccttccttccatttgaaagatgtttgctccacatcactttctagtgcattcgtatactccctgaaggtaggaaacgcacatttttgtcactgggtcgatgtgtctctcctgaactctatgggaactgccatttttctctagagcatatcaaccggatgctggccatgtcttcgataagttatgtctgtttg

SEQ ID NO: 127417 - DNA, 381 bp, Homo Sapiens
  misc_feature (89)..(97): n is a, c, g, or t
aactttatttttgggaaagtaacacatgaagtagttcagtcatgtcaggtttgtctggggtggaatggaacagtcaggtagttgaaagnnnnnnnnnagagatgaaaagcttgtgaactcctgtaaaacatgctgtatttgaaatacatctgttaaaacttaaaaactaaagtgtgattttttttgttgttgttaagtttattgaagtttattcccttaatcagtgaaggacaacccttatttattacctagagcagttgtataattcgctgttagaaattttggtattgggacagtggataagcaggttatcacatagcatagaattcttaaaagatacatgtggggaaaagtagtctcaaataaaagctaatttctttg

SEQ ID NO: 127418 - DNA, 727 bp, Homo Sapiens
gaaggtcggagagcatctttattgtgggggaggggcccggcccccaaagttctgacaccaaagacagacaccagacaggcagctgcagacagtgagttgtgtggatgaccacggcctgtgtggcggacaggggaccaggagccatcgcctcagactctgcccttctgtgcaagggctagtgccccgggctcaggcatgcaggaagcggttgaaggcgttgtaggctgactccaggtcgaacagcatctgacgcacctgtgagtcgtccagctcatctgacgccgacatgccgctcagggtctgcagcctgggagtgcagcacagggcatgtgggggctgagggcctcaggggcactgcggggctccgcctggctgggagggtctcgggcactgcggggctctgcctggctgggagggacacccaccactggctgaccgtctggcggccctcaaagtcgggtgggaggtggctcatgcggtgcatggtctccatcagctctcgcaggtcgggctggatctgaaacacacacagcggctgggaccccgacgccggctccatcccctcctgcctaggccccctgccagcccaatacccgcacctcatccatggcgcggatctccaggcgcagcttgtccatgaccgtgatgaagagcgagacacgtctgcgatgcagcggttgaggttgccttgtcgtccttgatggtgatgggccgtctccttgatcgc

SEQ ID NO: 127419 - DNA, 946 bp, Homo Sapiens
ttttttgaaggtcggagagcatctttattgtggggaggggcccggcccccaaagttctgacaccaaagacagacaccagacaggcagctgcagacagtgagttgtgtggatgaccacggcctgtgtggcggacaggggaccaggagccatcgcctcagactctgcccttctgtgcaagggctagtgccccgggctcaggcatgcaggaagcggttgaaggcgttgtaggctgactccaggtcgaacagcatctgacgcacctgtgagtcgtccagctcatctgacgccgacatgccgctcagggtctgcagccactggctgaccgtctggcggccctcaaagtcgggtgggaggtggctcatgcggtgcatggtctccatcagctctcgcaggtcgggctggatctcatccatggcgcggatctccaggcgcagcttgtccatgaccgtgatgaagagcgagaccacgtctgcgatgcagcggttgaggttgcccttgtcgtccttgatggtgatgggccggtcctccttgatccgctccatggccagcgggcagtccaggcggaacttgcggcagaattcgtcaatagagctgatttctgagccctggacctgcctgaaggcagctttgtattggaccaggagccgggagcaggctgcagtgtactcgctgggggagacacagtccttgatgtaggccttctccagggcttgcattgtcttcaccaccgcaaacagctctgccatgttgtcgtacttctccctctcccgggcgttcttgtacaacttcacttcctcatacagctccggcttgttcccaggggctcctatgcccggcgtggctgggatcccatgaaacatcctctaggctctggggggggcacagcactgagacccggcacgaggcctcgtgccgaattcaacacccaggcctcgtacctagccta

SEQ ID NO: 127420 - DNA, 845 bp, Homo Sapiens
tggtccagaggcagagcagctttcccagagatgtaccaggcgacaggcaaaggcaggtctcgatgcaaggaaggaggggcttgctagtagctttttggggtgtgaggcccctgagcacgtagtggggcttgctagctccggctcccaggtggagacccccggcccccaacccctgcccaccctctgaaccacagcgaccagccctctgttgtgatgcgcgcatccacagctcatggtcctgtgcggtggcctgtgacggtcttgtcacttcattgaacgaagcccccccaaaagatcctgggacatccccaagcctctcgaccgttttttaaggttgcctgtgctgggggatgagggtgggggagtgggccggatgacaccccaggagctgcgcctctgcccgcctccctcaccagcccccaggacttccctggctgagacccaggggcaccctcctcacgctgggtgggccccacacaagtgggtgcctcccagcctgacagacgcctgctcttgctgcctatggagcacccaagccccccagggcaggaacagacctcccaggacgtgggctcttactcgctgggggagacacagtccttgatgtaggccttctccagggcttgcattgtcttcaccaccgcaaacagctctgccatgttgtcgtacttctccctctcccgggcgttcttgtacaacttcacttcctcatacagctccggcttgttcccaggggctcctatgcccggcgtggctgggatcccatgaaacatcctctaggctctggggggggcacagcactgagacctggacggctcgcggtcgggaagatggcgccgggggcg

SEQ ID NO: 127421 - DNA, 782 bp, Homo Sapiens
  misc_feature (75)..(95): n is a, c, g, or t
  misc_feature (758)..(758): n is a, c, g, or t
  misc_feature (766)..(766): n is a, c, g, or t
ggttttaacgacggccagtgccatgctcgaattaacctcactaaagggaatagcttgcggccgcggctgtaggcnnnnnnnnnnnnnnnnnnnnnccagttgacacatcatccatttattatccttcagagtctaaaacttcctcgtgatacaacgtatagccacccattccagcctgcttattggaacttctattcccatctggtggcaaacatttctttttacatttgttttactatcaaagatttagagtcacaataaatacaagtgacagcctccacacccaaagagcctccccaataccctgcactagtgtaaccgtctattacactttaaggattataaaattgtttgctgtccttttttaaaagctcagtccaagttctttaggttaacgtcatgtgcagcatagctcagcatcaaaaaccctacggcagagcagcaaggatcatcccttctgtgatgagaatatttgtatagagaagtctctcccctgcctctacgtccaataggagagcaggagccacggggcccagcggggctgccactgggttgcctcattccctctgccctgaagcttttgcttcaccgaggtccgtggagtacaggtaagaccaggcacaactagcactgtgggctgttccactctgagaagggccgctacagacctcgtcagaggggtggttcctggtcaccgtagagttcctgggatgaggtcaggacggccatagctgtgggaggttccaagggcacttggncattccanaccctacccccaacct

SEQ ID NO: 127422 - DNA, 743 bp, Homo Sapiens
  misc_feature (628)..(628): n is a, c, g, or t
gtgggttcttgtgtttacagtttatttaatggaaaagagattggcctattctggttttgatgcctgctttgccccgggatgagaaggcttccaacatgtcacttagaagaaaagacaagggttttccctggtttctgacaccagaggggcttaggcttcttcatccacagcagagttttctgggatttctttttttagagaaagaggacttgtttgaggggttactgagttgacagaggaatggtttccatagatgggaacaaagcggttgtcaaaagctagaggagtttgttccgggagctggatgacggggctggaggacagcatcatcctgttttcagcttccatctgaagacccaagttacccatcctggggtgagtgcccacctcagaagtcaaattctcccctcttaaaggcatagtctgcccttcaggggtgactgatatgtttctggaggggacagtcaccttttcacgggccacagccttccttctaggggccactgtattctgtctaagggtctcagtctgaaaatggacaggggtcatagtcgttcctccagggctcacagactgatgactcacaggggtcacagactgatgacccacaggggtcagggtcttttcnccaggggtcacagactgataacccacagaggtcagggtcttctgtccagtggtcacagattgatgacccacaggggtcagggccttctctccaggggtcatggactgatgaccac

SEQ ID NO: 127423 - DNA, 776 bp, Homo Sapiens
  misc_feature (614)..(614): n is a, c, g, or t
  misc_feature (722)..(722): n is a, c, g, or t
tttaattataagatgatttttaaatttatttttattttaagactaagcatcctctttgacaatccaaaaacataatccttgctcactctggacacacacacctaaaacagttaaaagtgattcctcaatttgcaataacaaagtaggaaaaaaagaatacgttctcaagctgtagttcaatttttctgtcctcttttccaaaaaatgttactttgctaccaagcctcccaccaatgataaggaaagacaatttttcaaaaagccaacaaaacccagaaaaaggaacaggtatcaattcaaaattatcacccagaacactgctgttgcaaagaaagagtatgaagccaaattcccatagcttgttagagaagatctttaaaaataattcagaaagttaggactggaactactgtagtatagacaggttatactgtcactatatgcatatacagtggtaaatgcagatataattcaagaacattcagcttgggaatatattaagctttctcctattccagcagaggaaataaaaacatgtgttcctggaattaatattaaaatcatccttacaaacagaaggtagggcaaaggtaaagagagagaatgtggaacanaagtagcaaagacaagccattttgaatctaggttctaacacccaggaaagctgaatagaacttaaattcttctgagccagaatcactaaattctagatttggcctganaccagtggaccatatacaccactaataaatatcaagtgccccacagtgtttgtg

SEQ ID NO: 127424 - DNA, 746 bp, Homo Sapiens
  misc_feature (730)..(730): n is a, c, g, or t
tttttggaaataaacaagctttattttcagtttcaacaggtaaggcgatacctgcttcatcgtgtgcttttatgtaaatgccaaatagcaaaataacagctagaaaataaacagtttgtcagtttggagatcaagtactttatctatcttgagtgttatctatcttggaatttagccaggcctaaaagtagcggaagtatcaggaaatgctatagagagccaatctccagctgcaggttggtgggcctggcactgaccagatgcgggtagctcaaagcaccgagcgatgcaggcgccgtttctgcattgcctgcagcctcttctgcctctcggcaaagttgttcttcggggtctgcttcagtgcgggcaggatggcatgctccgccacaggtgggctcagaagcaggcatttcttggagaggctcttggtggagaccttggggaaatgcgtggcttcttggtccctgggaaagctagcttcctccgggactgcctggggcctctggctcccttccaggagggacttgaggtgctgcagctcttgggtctgcaggaggttggtattccacagcccgcggatgagcacttcgcactgcctaagtgtggtgggctttcgcaggggaaggggcaggatcattggggggtgtgccgccgcccccatctgcctgccctggtgctggctgttcccatacaggcagctcctgcgttagaggctctgctttctcctttnctggctgccttgtacc

SEQ ID NO: 127425 - DNA, 1338 bp, Homo Sapiens
tttggaaataaacaagctttattttcagtttcaacaggtaaggcgatacctgcttcatcgtgtgcttttatgtaaatgccaaatagcaaaataacagctagaaaataaacagtttgtcagtttggagatcaagtactttatctatcttgagtgttatctgtcttggaatttagccaggcctaaaagtagcggaagtatcaggaaatgctatagagagccagtctccagctgcaggttggtgggcctggcactgaccagattggggtggctcaaagcactgagcgatgcaggcgccgtttctgcattgcctgcagcctcttctgcctctcggcaaagttgttcttcggggtctgcttcagtgcgggcaggatggcacgctccgccacaggtgggctcaggcatttcttggagaggctcttggtggagaccttggggaaatgcgtggcttcttggtccctgggaaagctagcttcctccggggctgcctggggcctctggctcccttccaggagggacttgaggtgccgcagctcttgggtctgcaggaggttggtattccacagctcgcggatgagcattcgcactgcctaagtgtggtgggctggcctgcccttgtaccccaggaactttgtccagcttgctgttgtgaagtaggggctcctcttccaggtccgccttctgggagacgtcagcttttgaatcttgcttgttgaaggagccgggctggggcctggccttgcctgaattagagatggacttgacagactggaagcttgacatggagaggctgtctgcaggagagcgcacagtgtcggcgctaccgcccgcaagacgcccacgcttgcctcctggcctgtgtgtccgtgaggagccctccttcagcctggcagggctgggtcctcccggctctacccacactccgttgatgcagacccagcgagcgcccaagggagcagaggccctggaaaggtggtttcctgaggggccatctttcttctgtgatgtctgattcattatgagcttgtaatggagatccttgttttcccgcttcagatgctcgatctcctcatggagcttggccagcatctccgagtgctgctgctgcaggaactgcaggcttttctccaggtccaggttccgtttctgcgggtcgctctgcctgagctgcgggctctgcggcctcaaggactggacgcccacagaggggcgctggcgccggcgccgagagcccggggtcggcgagctggggggccgcgtcccagccgccacccccgcaccgctcatatcgccatcgccagcctcgtgccgaattcgcaacccggcctcgtacctagccga

SEQ ID NO: 127426 - DNA, 1027 bp, Homo Sapiens
  misc_feature (88)..(88): n is a, c, g, or t
  misc_feature (897)..(905): n is a, c, g, or t
cactgagccggggtgcagtggcagcgggagagtacctggcgatggcgatatgagcggtgcgtgggtggcggctgggacgcggcccccnagctcgccgaccccgggctctcggcgccggcgccagcgcccctctgtgggcgtcagtccttgaggccgcagagcccgcagctcaggcagagcgacccgcagaaacggaacctggacctggagaaaagcctgcagttcctgcagcagcagcactcggagatgctggccaagctccatgaggagatcgagcatctgaagcgggaaaacaagggtgagccggcgcggggccctaggccggccctgcctccccaggcacactcaacactgcctgctcccgcagcacagaaacacagccatcaactccagcacacgcctgggctcagggggaacacaggacgatctccattacaagctcataatgaatcagacatcacagaagaaagatggcccctcaggaaaccacctttccaggcctctgctcccttgggcgctcgctgggtcttgcatcaacggagttgtgggtagagccgggaggacccagccctgccaggctgaaggagggctcctcacggacacacaggccaggaggcaagcgtgggcgtcttgcgggcggtagcgccgacactgtgcgctctcctgcagacagcctctccatgtcaagcttccagtctgtcaagtccatctctaattcaggcaggccaggcccagccggtcttcaacaagcaagattcaaagctgacgtctccagaagcggactggaagaggagccctattcacaacagcagtggacaaagtctggggtacagggccgccagaagaaaagcgaggccctatgcagagttgctgttggggaaaccgacaggcgcattnnnnnnnnncccccatgtttgcctccttgaagccccccttggggaggctcgcggggggacaccttggcaccagggcatcctggggagccgcgggatcggactctcacacagacggggtgcacaatcaagtc

SEQ ID NO: 127427 - DNA, 782 bp, Homo Sapiens
ttttggagactgcgtcagccatctttattgcgctctaaagaacagctcgagacacacagagacagtggattttcaaagaggtgttttcttgacccagttaaatttttattcagtgaaaaaagttgacattgagacaaaaattatcttaaagttgtgcaacaatacagtaaaaccttcagcagatttcagtgacttggaaacttatcgaggcaattgaaattataaatacttaatttcgctttggagagaaacaagtatacagtgtttcactttaaataagagtagaataggcctttattttgccgcaaatacttttgattttgcctaaagtttctaatagttcataacaagagtctttaaatgagaagtgacatagaatatttgaggataatggtccactccagcattcatgcttattccatttgagctattacacatgaaactcataccattcttgggttattacttggctgtgacgatttaattcataatatggctgctcaaaattagtgggcagaaacatacatacaacccatcctccctcaacccattttcggtgctggtactccatctgaaaacacacttactgtccatgtacccagcagtacatatctcttcctatctattccatatctcagtcttgcatagaaagtagtctatataaacttaatgcactggcttttattacacaaaaattgtacttgaaaggcagcacacactccagttaagaaaaataacacaacaggaatgtcaagatacaatcccaacacaagattctgcac

SEQ ID NO: 127428 - DNA, 714 bp, Homo Sapiens
tttctctaagaaacacaaaagcacagattcctttatttaacatgtatccagcatatactaagctggccactctggcagactcttggggccccaagaggaatacaacctgaatctcacatcgaagcttcaaagaccctggctttctgccccagctgacccctaagctgtagcactcacccaggtgctcctcaatcactgtattgtctgtcagagggatggtcttattcttgaccttggcttgtccacgtttcaaaatgagttctcggacagacttcagatttggaaatccccaggtcacataaggttccactatacgcagcatttttagattctggggggtgacttttacaaagacaccactaaaaattttctttaggcgaagtcttgcaatggttctctgcaccagtaaactcacgccgtcaatcctttcgatgcgtacaacaaaggccaaggaatgtttatctggcaattccaaggcatgaggtttcccttctagtcgtctgagacgcaccttgtcacgtttctgccgccaggaatcatgtaggaatgattccagtcgcttaaacctgagcccttttcctttcttctgctccttctttgccaaaagtgcctgctttgcctgggtggctttgagggcttgataagccttcctctttttcaggagattttctggaaccaaagggatttttctttgctcttgctccgccatctttc

SEQ ID NO: 127429 - DNA, 1244 bp, Homo Sapiens
  misc_feature (325)..(344): n is a, c, g, or t
gacaagtgaacatttatttttatgcctttcttcctatgtgtatttcaagtctttttcaagacaaggtcccaggactctccagattcacttatgtccttgggcttggtcgactgctgcaggagtctcagggagccttctacaaatgctagagtgactcatttaccaacattaaaccctaggatacatgcaacaaagcaggactccttcctccatggaatgtgccgatttcagatgacgcagcaccgactgtagaaaacgctgggaattttttccttggaactcgactgtgatgagaggtgcttgacatgaacatatgcaactgtcnnnnnnnnnnnnnnnnnnnngaccctttccagtttctgaagataaagcaggaaataatcttctctgaagatacttgataaaaatttccaaaacaaaacacatgcttccacttcactaataaaaaatttaccgcagtttggcacctgggtctaattcagctgacggatgagctgattgatgcgttcaccccgatagcccaggtgtgccccatctccttgaggaagcccactctatttttggtagcatgacgggccactgagaggtggaaagggcacaagaaccatgagatctcctggaaatgcttccctgggaaggcaatttcatgaatgaggtcttccaagcaaatgacgccaaacttccccaggtgctcctcaatcactgtattgtctgtcagagggatggtcttattcttgaccttggcttgtccacgtttcaaaatgagttctcggacagacttcagatttggaaatccccaggtcacataaggttccactatacgcagcatttttagattctggggggtgacttttacaaagacaccactaaaaattttctttaggcgaagtcttgcaatggttctctgcaccagtaaactcacgccgtcaatcctttcgatgcgtacaacaaaggccaaggaatgtttatctggcaattccaaggcatgaggtttcacttctagtcgtctgagacgcaccttgtcacgtttctgccgccaggaatcatgtaggaatgattccagtcgcttaaacctgagcccttttcctttcttctgctccttctttgccaaaagtgcctgctttgcctgggtggctttgagggcttgataagccttcctctttttcaggagattttctggaaccaaagggatttttctttgctcttgctccgccatctttctagtggtgcagctactgatcccc

SEQ ID NO: 127430 - DNA, 906 bp, Homo Sapiens
ctttaagccctataactcttaggctatgcatagccccatgtcctaatcaggcattcactgatcccagcaggtctccatctatttgtaccagcctcctctattcctcccaatctcaaggttactcttaaatactagtaaatgcaaaaagaacttgtaaagtggcaaggcatggcctatcaaaagtcagcccaagggcagttttcagccctgcctcacctgggtctagttcagctgacggatgagctgattgatgcgttcaccccgatagccaggtgtgcccatctccttgaggaagcccactctatttttggtagcatgacgggccactgagaggtggaaagggcacaagaaccatgagatctcctggaaatgcttccctgggaaggcaatttcatgaatgaggtcttccaagcaaatgacgccaaacttccccaggtgctcctcaatcactgtattgtctgtcagagggatggtcttattcttgaccttggcttgtccacgtttcaaaatgagttctcggacagacttcagatttcgaaatccccaggtcacataaggttccactatacgcagcatttttagattctggggggtgacttttacaaagacaccactaaaaattttctttaggcgaagtcttgcaatggttctctgcaccagtaaactcacgccgtcaatcctttcgatgcgtacaacaaaggccaaggaatgtttatctggcaattccaaggcatgaggtttcacttctagtcgtctgagacgcaccttgtcacgtttctgccgccaggaatcatgtaggaatgattccagtcgcttaaacctgagcccttttcctttcttctgtcttgctccgccatctttccggacgcggggtcgacgatatcccgggaattccggaccggtacc

SEQ ID NO: 127431 - DNA, 1259 bp, Homo Sapiens
ttttttggttcaaattaatggttttatttccatctgtaacactagcagaggagtccaaagcagactgatatccatggatatagtttaaatgtaacaaagaaagagttgaactatgtacattgaaaaaaggaaagacattttttcataccaacctttccctagttcgcagtttctgaatagtagaaacaaaacacatttttaaatctttctatcaatttaatttaggacgaagtaacacaacttttataattaaccactgaagttgtctttaaggacaaaacttaaattttaaaatgggtgttaccatattttatgagtggactgactccaaggttgccttgctccaagtctgggcatcgtgacattgccgtgatgcccagaagaaagttaatggcaatgatgtccagtcagagggcagacatgctacacatcacaatgatgagagctgcggattctgccctcttcaactccaagtagaaaattattattttcattcaaactaactggaagtgagccaaacagttaaaaagtcagaatgaagaataaaacaattttcttttcacatagaggagggacactccttcagccccgtctaaagtgaattctgtgctgagtccctgctccttcagaagggtaaactgaaggtcagttattgctaacaaagccagaagtggcccctttcccgccctgaagatgtttcacacgaaaaggccgtttgtttggcgtgaggccctctgaggaaggacgacagtggaagaggaggcatgccggcactgtaaggcctctctcgttagccacccccaggccctgtgctgtcaggggcagcttgggccactttgctgcccctgagagaacctgaggctcccgcgtacctgtggagcgaaggagaggttgtcatctgggcccctgtttcaccagtcaaaacctatggagcagtcagaagcccgaagcatccaagcccagtggccaggaagcttctgaaataaacggcactgggttgggaaggatgagaaagccaagacaggtgggccaggttctccgaacatggggcaacagtgacctgggcaaaagcctggaactgagcggctgataaggccacaattactgccaccacctctcagtatctacacgggggcagacgttaggcagtgggaactgaggactggagggcgtgtggcaaacacgggatggattttatcagaaaagagaggacacccaaacacgtgcctgccctatttatcttgcatgtcctgtgccag

SEQ ID NO: 127432 - DNA, 972 bp, Homo Sapiens
  misc_feature (62)..(62): n is a, c, g, or t
tccttcaggtacgcctttgggggttaaacggacggtctgtcccactcacgggagtcagacancttggctcaggcttcatgtccctcaggagggttccctcgcttgggccaatccttcctcatgtccagctcacctgttgccaggtgtcatcagtcctgggcgtcattccaccctgggtatggagtgtttagtccaacctggatagggtgtgttaagacctccaaattgagtttgtcggggatccactgaggtatggttctctccggtctgtaaatgtttggcaaagaaactgtcaggaacaggggtcagcttctcatagcgtgggttccgctgacgtttatttctggcatcgccaacctcggggatgctcagccactcttcttctgtgacttctgccaacttcctcttgaggtctgagaactgctgttggattttggggcgttccatacgatatttctctatttcgttctttctccctttgctcccgtctttcttttcttctttcatccatccttttatccagggctgcatagatagcatctgcttcctcatcatctttctcgtagggtccacttgagaagaggctcccagcatagccattaaactcatcgtaattggtgtcatttagatcctcgtcgtcatcgtcagcagcctgatttttcttcatctggtccccaacggttctcttgcctgggggtgcatggcgatcatccacagggtcatttgcatcacgggcgggcccaatgtctgaccgcgtggtgaagccagtggcgccccggcccagccccggcacgtagccgaggggcgcgggcatccctaggaacggtttcttcttcttgttcatggtggcggcgacgaccaaggctaggaaggaaaggaatgaggcagcggaagagggaaagacgcagagactctaggcttcgacgtccgatgcactccgtagcaaacctcgtgccgaaatcgccacccagg

SEQ ID NO: 127433 - DNA, 2547 bp, Homo Sapiens
  misc_feature (227)..(227): n is a, c, g, or t
  misc_feature (241)..(241): n is a, c, g, or t
  misc_feature (243)..(243): n is a, c, g, or t
  misc_feature (247)..(248): n is a, c, g, or t
  misc_feature (250)..(252): n is a, c, g, or t
tcttcgagacgccctcccttagggggtttggtagcggagacggttggcgtgttacacgccgggccggtttttcgtgttgggagaagtcccggccgcgttcgtccaataacccgggatcttcctaggaaaccaggttaaggcccaggtgccttgaccttacggggcccggcgggccaaacgaaagggtttagaaacgttttcgaggggcgggggcggcggacaagagnatttgggtggcggngnttgnntnnngagacacgagacataaaaacttttaatgaaggaggacacagctcagagcccttccacatgcggcccaaccctgccccacggagaccggccatggcaaccgctcaatcagaaggtgttcttgatgcggccggccaccagcctaaggatgtccccgatcttcttctgccagttggcgatgtccttggacacggcgcaccacagctccccatgccgaggctctgcactctcacagcgcttcctcacctcctcctgctgctcctcagtgccatgctgcagctcaaacttgtagaagaaggcccaggcatcccccaggtccgagtcaatcttcacagtgcggtggaaccactccctggccttggtgatcttccgctgactccaaaacagcttggccacggccaggagcacatgggggtcatgctcacacttcttcagggcatccacgctcttggtcctcctctggggccttgcctcgaggaagatggcctcagaccacaggataccggagttggggcactcctgcagcgccttggccatgagtgtatttgcgatgttcttcagccccgcacggtactccagccgcacggactccaaccacagcccagggttctttgggttcttcagacgagacttttccaaaatggcccgtgctcgagtaagctgcccaatcttctcctccagccgagagagcaaaagccacaggggtgtggagtggggacacttcttcaacccctggttataggcttcccgcgccttctccatcatctccttctgctcctcgatctgccccttcatcatccacagcttggggaagtcctcatagtgccgcagggcctcctcgcacagatcttgggctgccctgatgttgtcttgcacccactccagcttcacagacttcatgaacacccgggcggtgggggcactgctccgcgccttggccagcagcctccgggcccgctcgtactcatcattctcggactccagcttcacggctgccagccagatctcctcactgttggggttggcctggaaggccagggccaggatgctccttgctgcaggcacatcccctgccagccacttggacttggcgcccatgagccacagcacctctgctttggggcagtgggccacagccctctgcaggagtgcttccagggactcccgagtgccatggttcttctcgaagtacgcggcgcgcagccacacactcttcttgctggggaacacctgcagggcgtaggcgtagatggctcgtgcacactccaggggcattgtgggctacacaactgtcagcatcctccatccaggtatgcttccgatcttcctcctcaatcccaatcccaatcacggcacgcatgacggcctggcaggtggccacactcccagccctgtcacattcctcggcatcctggatccactgctcacggttgatctccacaccgttggcccgcagcgaggtgatggctcggtcgatgatcttctccaccatctgcgtgttcccattggcttcctccagcttagcagccgtgatccagatatgtcggtctgtaggaatgttctcccgcgccttgttcaagaccttgcgggcattttcataggtctccagccttgccagagcaagccagagctccacgctggtggggcagcactccacagctcggctcagcatgattctagcatcttcaggttcttccagctcaacggctgctttccacaagcgaaccgagtttggaacatgctcgagggctttccgaagaacccgcttctttgcacgaatgtccgtttccagctctgcggctctgatgtaaatcctgacagactgtgggagatgacggacagcttgggctaccacggccttggctgtgtccccaggctgcaacctggctgcttccagccagacatcttcactcttggggcacatctccgtccccttcatgataaggttccgagctacttgtagcttcccagtgacttcttccaggcgggctgatgcaatccaggctggcgggtgatgagggttcgtctcccgaacagacttgaggagcagtcgcgccttcttgatatcattgatgtctcctccgtgtgtcgggatcatggaatttaaatccgtcaggtagcctttggggtcaacgacggtctgtccactcacggagtcagacacctggctcagcctcatgtccatcagagtgttcctcgcttggccaatcttcctcatgtccagctcacctgtgccaggtgtcatcagtcctggccctcgtgccgaattcggcgcgccgtcgacttcatactctctcc

SEQ ID NO: 127434 - DNA, 1316 bp, Homo Sapiens
  misc_feature (101)..(101): n is a, c, g, or t
gtcactcagacacgagtcagtgtgcacatccagtcgtagcagattactctcagtctcagtcacgtgcttccacagcgacgagttgacatgttgaggcttcngagaacccgctcttgcacgatgtcgttccagtttgcgctctgatgtaatctgacagactgtggagatgacggacagcttggctaccacggcctggctgtgtccccaggctgcaacctggctgcttccagccagacatcttcactcttggggcacatcttccgtccccttcatgataaggttccgagctacttgtagcttcccagtgacttcttccaggcgggctgatgcaatccaggctggcgggtgatgagggttcgtctcccgaacagacttgaggagcagtcgcgccttcttgatatcattgatgtctcctccgtgtgtcgggatcatggaatttaaatccgtcaggtagcctttggggtcaacgacggtctgtccactcacggagtcagacacctggctcagcctcatgtccatcagagtgttcctcgcttggccaatcttcctcatgtccagctcacctgtgccaggtgtcatcagtcctggcgtcattccacctgggtatggagtgtttagtccacctggatagggtgtgttaagacctccaaattgagtttgtcggggatccactgaggtatggttctctccggtctgtaaatgtttggcaaagaaactgtcaggaacaggggtcagcttctcatagcgtgggttccgctgacgtttatttctggcatcgccaacctcggggatgctcagccactcttcttctgtgacttctgccaacttcctcttgaggtctgagaactgctgttggattttggggcgttccatacgatatttctctatttcttctttctccctttgctcccgtctttcttttcttctttcatccatccttttatccagggctgcatagatagcatctgcttcctcatcatctttctcgtagggtccacttgagaagaggctcccagcatagccattaaactcatcgtaattggtgtcatttagatcctcgtcgtcatcgtcagcagcctgatttttcttcatctggtccccaacggttctcttgcctgggggtgcatggcgatcatccacagggtcatttgcatcacgggcgggcccaatgtctgaccgcgtggtgaagccagtggcgccccggcccagccccggcacgtagccgaggggcgcgggcatccctaggaacggtttcttcttcttgttcatggtggcgcctcgtgccgaattcggcgcgccgtcgactttcatactct

SEQ ID NO: 127435 - DNA, 666 bp, Homo Sapiens
tcatgctatttatacatttattgggtttgttaattattccataggaaaacagatgaaagacttttgtagaattcaattctgcttcaccatacttagggttacaagaaggcaattatactgatgtaattgacagactgaattaacctcagtcatcacatgtgatttttctagagtttttttaatggtgctgacattctcttcaatatgtccatgcttagcttgggtttctgggggacagatgagtagctagtactacccatctaaaacataatgttcactagttggaataatggtgtgatatgatagtcttcaagatgatgccctcaatttctttcctccctgcatgcacatgctggctgtttacattgacaggtaagagtcgaatctcccatttcttgaatctgtgctggtcacaatgacttgcttttccaataggatgcagcaaaagtcgtattctaggacctccaaggctaggtcctaaaaagctttgtagtatttgcctgtgtgtcttgggacaaactaccacgttgtgagcactccaggtaacatggagaggtcagataggcatcacactcagcagccaatatgcactgccagccatgtaagtgacccgtttagactctttagcctaattgagctttcaggtgacttcagcagcagccaacc

SEQ ID NO: 127436 - DNA, 1506 bp, Homo Sapiens
  misc_feature (41)..(41): n is a, c, g, or t
  misc_feature (49)..(49): n is a, c, g, or t
  misc_feature (146)..(146): n is a, c, g, or t
  misc_feature (236)..(236): n is a, c, g, or t
  misc_feature (250)..(279): n is a, c, g, or t
  misc_feature (281)..(285): n is a, c, g, or t
  misc_feature (312)..(312): n is a, c, g, or t
  misc_feature (323)..(323): n is a, c, g, or t
gtgtgacgatacattcaccagaacagttgactggtcgaatnatcgatcntttaggattgcctcgagccaagaatcgcacgagttttttaaaggacaaatataggatttatcactttgagtaccttttaaagtctagtttatatctnatgtgccttagtcactagatttcccccaatatatttctgtgtaagcactttaaagatacaataatcatttttataaaacccacctgggtntaggggcaaaagcnnnnnnnnnnnnnnnnnnnnnnnnnnnnnnannnnnggagggatgtggttgccatgatttgtnttaaagtctcntataacaaaaatgaacatgtcagtagccaattgtgttgggcaaaagggtgtatttaatagaatctgcaggcagatttccaatctgcctgccctgccctaccctccccctttgggtttgtttgaggtttcattccacaaataagcagcagataaaatactttacaaggtacagcacagttgtattgaagaaaaaaaggacccaactcttactttaggagtattaggcctggacttcccctgccccatgcaataaagcaagttttatatacactccccatatttttttctaacattttcttatataaatttaaatattttacaaaaaaaggcttttttcctccaaacatataaatctgagtgaaacatagattccccacccgagaacttgtttcttcactaaaatataaatgttgtctgatattaagggtaaatgtcttttgaccactggagatcactgaagtctgaattgcaccgtggagaaggcacttgtgttttctgaggtctccagcaagtatctcagtgagcactcatagaattgctgtctgtcctccagaacccgtgccaaggcctccgagtgcccagttactgaggcagctggggaaaaacgttgagtaaacatgattctacaattacggagataaaaaataaaaacagcatggactggttctaccctagaatcaaactacaacaaaatccaaagtgttcattcatgtagattcaaaatgacttcattctgtcataaattataaaatacaaaggtggctgttttaatgacaaaactcaaaacagtactaaaaggggtttgtgtcaatggacaaaagtcagtccctctaggtagggccccaaggagcatcacccaggttgaagggtggttttcctactgctgggccagaagtgctgtcctattggccttcatcttctccagccgcttggccaggtggctgttggtcatctccatctcctcaatcttgtccagtgctgttcgtaactctcgttgtagcttccgtttttctgctttcaattcatcttcaactttctcagcattctcagcagcagttttatatctcagaacctgtccctcaagccggctaatactttgctccaaggtagttatatcctgttctgcttttgaaagcttaaatttgtattcgctaatttgtctattggcatctctctgcatttc

SEQ ID NO: 127437 - DNA, 705 bp, Homo Sapiens
gtgtcccctcagcatttattttctggatggtcacaacgtattcaatgtgtccttgagacagccacccagcccttagggtggtccctgcgtgtcctggggcgggcgacttcctgagggtgcagtgctggaaacagagactgcttcgagcctggccaccttccctcctgtgccggctgcttctaggagatgctgtgggacggtgcccggcttcgcggtgactaccatgccctaaggagcagagcctccaggatgcccccgggctgcgctggacgctaagaccccagcacctaatcacagtcagcagcttccctccactgacagtgatctgcatggtccattcctggcggcctgggggcctcgctacagttcaacctggctggcttcccgcttcctccccaggggagattagtgtcgtgtgtaaacttggacaagtcactgggtcctctctccagggagtgcctggagaaattcaacccccagctcagctgcagcccttcctgggtcagctctccacccagagaccccggagcttgcccgcagactgcccggcctgccccagctctgggaaagtgaactccagagtatgcagacatggagatgcgcatgctgatcctgggcatgagggctgggctgcactcgtccattctgtgcatactgccttgaatttttcatatccatcatagaaaaaagtgattaaaaataaag

SEQ ID NO: 127438 - DNA, 1237 bp, Homo Sapiens
  misc_feature (48)..(58): n is a, c, g, or t
  misc_feature (1121)..(1155): n is a, c, g, or t
  misc_feature (1193)..(1193): n is a, c, g, or t
aaacctatattatctttaataagaccgtgtctggttcattggtatgcnnnnnnnnnnngtcccacctcgctcttacctcagaaagatttgtcgaatgagtgaaagatgaacaagtaggccaatggagacagagtgagggtcttggtggggataagtatgtgtagaatctggattcagtctgcagtgaatagggtaaaatgggtcatctggttgtgaattggcagaccccatttgaaggaaacaattttgatctgtgacatttaaaaatatttattgacttctgtttgctactttcctgattgcatttaaggttaaatgacactagctaggaagctacagtttcctggaatctttcaggtaattaagcctaagcctgggtaaggggagggcacaggctaagactgacgagagaagaagacactagagagagcaacaaacaaaatgatcttgaaaaacatgctttttgagagcactggaatgatttaggggtgggtacagtgggagagtgaggtgggagaagaagagtgtctggtaggtgtgctcactgtcttcttggctgagaatgtttaattggaagagtgggcgctcagagctcctacaaaggcagagcaaagcttcttagctgacattgtttgagaaattgctggcaggctctggaatgcttgtttggctttctgtggtgcctttggtgtcttgttttcttcacattgcccttgaaatgatcacaggggcactgcttctttggcagcccagacactgtcatgaattttcttctcggggctctcaggaaccaatctttgcactcacattcttggccgccttcctggagccatctcctagaagcctggcctcggtccctgtggcctctggcgacccctggattcaggctgctagagaccatggacatcagcattagtggcagcaacaggaggagggaagagattagaactttcatcgcaactgtcggtgcagctgtaagttgcttgaagaatataatggaaggttccctgctggaggctcctgatccctggggatgactcaggtcaggatactcagcctggtggtctatccccggccgtaatggccgaattcccgggcatatgtccggtaccgtcgactgnnnnnnnnnnnnnnnnnnnnnnnnnnnnnnnnnnncgccgcttcctcgctataatagcttcggctgcgctcgntcgttcgactgaacgcgagggcccatatgaggtatatagttctt

SEQ ID NO: 127439 - DNA, 997 bp, Homo Sapiens
  misc_feature (721)..(721): n is a, c, g, or t
  misc_feature (779)..(779): n is a, c, g, or t
  misc_feature (830)..(830): n is a, c, g, or t
  misc_feature (862)..(862): n is a, c, g, or t
  misc_feature (960)..(960): n is a, c, g, or t
ttagtgttttggtcttttattcatggtcagcagagttagaaaaataaaacagaacgaaaacatcaccaccccagtgggccggtgagtctggccaaaatggggaaactgaggtagcccagagtcacagaggaggcctggcccctagcatcaaggcaccagtgaagggaggctgcggactccctcccctgcacggtggggacagccacccagagttagtgtgctggggtccctctgccaaaggaggtgggcgtgatgcccaagcccaggatccccttcaaacctcccctgggctccacgtcccaagggcagggccacgggccacagtggcctcctcttcctcctcctccaaggatcaggataggccgcctgcctgggccctctctacctagccctggaggcaggggcatcacagatcagtgcaggtgactggagtgaccccatgaaccagcagcgtggggcccaggtctcgggttagagtctccagtagcgccaggtagcgggggtatcgggcgggatcggctggcggccgaggcaagtacaggaaggtgagggctgtgatggggccctcagcatccccaccctccggcccacccggccctcctcctgtgccgcgcccctgctgggcccgaaccagggcgttggcgctgcgtgccagggcctctgcctctgcgtctcccgcccactgttcacaaagtcccttcctcctccgctcgggttcccnacagcccgggcccctcgcccacaccactcctggactcagccggatctcagttggtcancagtgccgcagcgccctcggcgccccaagcgctcccgagcccagcacaganatcggagcggcgcatgcagcggcacatgccanatggtgcatctgcacagagagcgcaaatcaataccggcaccggggcgcgcagtgagggcaactcaatgtgactgaagtgccaacccgtcacgtcaggngcagccgctgcggcaacaatctgtactgagctcgcac

SEQ ID NO: 127440 - DNA, 2774 bp, Homo Sapiens
  misc_feature (2486)..(2525): n is a, c, g, or t
agtgccagcatactcagcgtgcccgttcgggaggcggaaaaagatgagcgcgctctgaagcaggagattcacgagctgcgagggcgcttggagcggctggagcaggtgagccaagcctgctgggtggggcgaggccagacgtcactgtcaataccctgaggcatctcttcctttctagtgggccggtcaggctggggcctgggtcagagcggtgctgcccgtgccgcctgaagagctgcagccagaacaggtggctgagctgtgtgtctggggtgaccggatcgattctctcagcgaccaggtgctgctgctggaggagaggctaggtgcctgctcctgtgaggacaacagcctgggcctcggcgtcaatcatcgataagaagcctctacagcacccctgccccctaatttatacagaaaccggacccactaatcctctgggattggccgactgtgagctgcagataaggctatcagccaccaaagagcaatgaacaatggaaacttcagagagctgaagaaagggggaggcctgtgttcttggcctgcccctgagtcttctggctgggggcaggttgcctgggcaagaactgcttcttcaattccttaacaaatgcaaccaccaacacccagatctctctctctctttattttcagtttttttgctgttatccagataattaataaaaaccaaccacgcaaaactgggtcccaccctctccttttgctcccagcctacctccccagttgtgggaacaggtctggagtgagaggcagggagtggctaatgccaccaggaagaaatgaaaactggctcagagagggggaagcctcaacagaaaaagaaataaattaaaagccctcctatcccctccagccagggttcgttcctttccccaactccccagggggcagaagtgagtgcagcacctgatgtctgcttcttccccttgtgtctggtgagatggtgcagcagggctgcagggggctgggtggggtcatgtccactgaagaactgtactatggggacagaaaaccagaaatgtggagactgaactggtatcccagagagtgcacgaccctgggcatctgggcaagggcaggcatgagacctctgaattagaagggtccagcccccactgacaggaggctacactgggagggaaggtgaaggtgctgaggaaagctcccatgatgagcctgggagtgcttcaggtatcagcttccagccagagggcgagaagtcctcctcacaaatggatgagtccattgaatccatggactttggagtgggggggatttgttccaaagaatggatgagtccactggccaatgtggggtagaggggtagagaagaccacataggaagagactccactggggatggaatgttcccctcccttgtgtaggctgagtcactggagatgagggggaggcaactgtcccacagacaagacagtaggaggtgggggtcaagagtggagactgcaccgaggcaagagtccatggatggggccaagagggggcaggagtggcgctgtatccacattcacttcagaagttgaagattccaaagaggagaataagtggggagaggggagacaaggaagagggtttggccctgcttcagggcccactgggtgggtaggtgtggggaggaagatggggacagatgggaggagagctcagagccagggttcacccaccgcccccaggcttcttcagatagtcaccaccaccccggccatcagtggagatttcccggaaaacagtgagcatggagtgccggactctgtcagccagagctgggacgtcatctggtgtcagcccttccgtgggcactgggggcagcacccgcacctgacattgtcccgaggtgaagcgacgctccttcttgcagtagaagtcttggtaggaggacatgactatggggacaatgggaacctgggcctgcactgcaagatggaaggcgccacgtttgaagggcagcatggagccattgtggtttctcgttccctcaggaaacacccagaccctcacgtcctgggtgagcagggtctgggcgacctcagacatgacactgatggcatcccccgtgcgcttccggtcgatgaagatgactcctgccagccagcaggccagcccggcagagccagcccacagtagctcgcgcttggcaatgggcacacagcggcctggcagtacctccatcatcccaagcagatcgagagagctctggtggttggagacaacaacatagggctgcgagggagggaagtggtgagcccctcgcacctccactcggatcccgtacaggtatttgatgtggagcagcattagacgcaagatcttcatgttctcgacgttgcgtcctcgcacggcacacacagggatggcgagcacagccaggaagaggatccagccattgtagaaggccatcttgaagaagtacttggcactggggctgcagaaccacagggtgggcnnnnnnnnnnnnnnnnnnnnnnnnnnnnnnnnnnnnnnnntccatgcccctggccacaaatccattctggccacctcagaggggtagggggcctggggggctggccccctccccagccaggctgcggcagcggtggtggcggatggctgtgtctctgtctctgtcggggtgtcggtgccaagggggcgacgggatttgggggtgtcctagccccggccgatggaggggagatgagggggaggcaactgtccccctcgtgccgaattcgccacccaggcctcgcttcttt

SEQ ID NO: 127441 - DNA, 776 bp, Homo Sapiens
  misc_feature (455)..(496): n is a, c, g, or t
tggtgatccggtgtttggcgacctctagacttgacacttgatggcatcctcccgtggcgcttccggtcgatgaagattgactcctgccagtccatgcaggccatcccggcaagagccagcccaacagtagcttcgccgctttggcaatggggcacacatgcggcctggcagtacctccagcatcccaagccagatcgagagagctctgctgcttggagacaacgacatagggctgcgagggagggaagtggtgagcccctcgcacctccactcggatcccgtacaggtatttgatgtggagcagcattagacgcaagatcttcatgttctcgacgttgcgtcctcgcactggcacacacagggatggcgagcacagccaggaagaggatccagccattgtagaaggccatcttgaagaagtacttggcactggggctgcagaaccacagggtggnnnnnnnnnnnnnnnnnnnnnnnnnnnnnnnnnnnnnnnnnntccatgccctggccacaaatccattctggccacttctcagaggggtagggggcctggcggggctggccccctccccagccatggctgcaggcagcggtgcgtgagcggattggctgtgtctcttgtctctgtcaggggtgtcggtgccaagggggcgacgggatttgggggtgtcctagccccggccgatggaggggaggtgggagtgggaggttgggcccatagcggtaggaatggtggggggctgtccccccagcaccctccctccctccctttctgc

SEQ ID NO: 127442 - DNA, 778 bp, Homo Sapiens
  misc_feature (438)..(479): n is a, c, g, or t
tggtgagcaggtctgggcgacctcagacatgacactgatggcatcccccgtgcgcttccggtcgatgaagatgactcctgccagccagcaggccagcccggcagagccagcccacagtagctcgcgcttggcaatgggcacacagcggcctggcagtacctccatcatcccaagcagatcgagagagctctggtggttggagacaacaacataggtctgcgagggagggaagtggtgagcccctcgcacctccactcggatcccgtacaggtatttgatgtggtgcagcattagacgcaagatcttcatgttctcgacgttgcgtcctcgcacggcacacacagggatggcgagcacagccaggaagaggatccagccattgtagaaggccatcttgaagaagtacttggcactggggctgcagaaccacagggtggnnnnnnnnnnnnnnnnnnnnnnnnnnnnnnnnnnnnnnnnnntccatgcccctggccactaatccattctggccacctcagaggggtaggggtcctggagggtctggcctccctccccagccaggctgcggcatgcggtggtggcggatggctgtgtctctgtctctgtcggggtgtcggtgccaagggggcgacgggatttgggggtgtcctagccccggccgatggaggggaggtgggagtgggaggttgggcccatagcggtaggaatggtggggggctgtccccccagcaccctccctccctccctttctgctgtctctctgagggctggggctgct

SEQ ID NO: 127443 - DNA, 682 bp, Homo Sapiens
  misc_feature (615)..(615): n is a, c, g, or t
  misc_feature (627)..(627): n is a, c, g, or t
ggccgcggctgtaggctttatttcctttattttaagattcagtaggatagccaaattcatagagaataaaattacatgaaagagttacaagctcactgttttaaagacttgacatttttcatttagttttaattaacagtaataagtcacctcctgtttttcaatgttcaccaaaaaaagaaacatagaatagggggaaaacatgcttatatagccaaggtacagatccagatgatgtaacctttttagtattcgcatgacttgaaaactgggcagatcaatagataatcgaagtgctttatctgaagggagagggtaaagacagtgtgaccaggtttgttttcagggctgccgaatgagcctcacctaacagtgtccatgggtaattcgctaaccttaacaaagatgggaagaagtgagtgctctgatgtcttctgctggctctccataagtactgtaaattttttttataaataaaaactgtgaatatatatgtacaagttgtaagtatttccccctttttatttttgaaaatcaagaagcttgatttggtgtggtgcaatggatattggataaaaatttgaagacaaaattgtttagttacatactcagganttataaagaaanatataaaagaatgctcatgatactgaagtcaaggtcactagtaataaactggcta

SEQ ID NO: 127444 - DNA, 627 bp, Homo Sapiens
aacccatgatcttttttcctgtgtccaagtgactgtgttgcaggcggcccggctctggcagggactggtggggacgcggggagcggcccaggcccctgccccgccgggctcagcctcccatgcgctcgcgcttgcctgtgtcccgggcttgtctgtgaagtgggcgtgaagatcgttgccaccttccaacctacctcacaggggtgttgtggggacaccatgatctctggattgttcatgtcgttgtgctgcgccgggagccaccgccctccggagacagggcagctcccctacgaccctagcgcctccgccctccgcggcccctctcctctcttcctgctctgtccctccttctccatcagggagcagcgtgacttcaagcgaagtcccgcgagcacctggctaagacagttaacaaagcacggtccttccaagcctgaagccagcgcaggtttgggagggggcttcctggccccccccacggtgttccagcccctcctctcttccgccccctagtctcccacccttccctccccgtagtgaccaattcctatctcttccctctctgaggataaagcaattcattttctcccaccctcggccctcttgtttttaaaataaactttt

SEQ ID NO: 127445 - DNA, 848 bp, Homo Sapiens
  misc_feature (117)..(131): n is a, c, g, or t
  misc_feature (161)..(191): n is a, c, g, or t
  misc_feature (416)..(425): n is a, c, g, or t
  misc_feature (563)..(571): n is a, c, g, or t
  misc_feature (711)..(711): n is a, c, g, or t
cctttttaaaagtttattttaaaaacaagagggccgagggtgggagaaaatgaattgctttatcctcagagaggcaggttcaggaaggctggggggtgaagaatagagactttttannnnnnnnnnnnnnnattttataagttctgctttgctctttgtgnnnnnnnnnnnnnnnnnnnnnnnnnnnnnnnggcagagatttagatctcgctatcttctctggctggctcaacatggaaggatcccaattttgaaagaaaaagcatgtgagacacagaacaggcgagagagtgagggcccggcatgcccccaagtcccccccaccctgcttgccgcgagggctccccagtactccccacggcagccatcgctctctcgccaaacaaaacagaagcccccaaacagaacaaaatggnnnnnnnnnngatttttcacagatgaagaagttcacattcattcgattcattgagcctgcggagagggaagagataggaattggtcactacggggagggaagggtgggagactagggggcggaagagaggaggggctggaacaccgtnnnnnnnnnccaggaagccccctcccaaacctgcgctggctcaggctggaaggacgtgcttgttaactgtctagccaggtgctcgcgggactcgctgaagtcacgctgctccctgatggagaaggagggacagagcaggaagagagganaggggccgcggagggcggaggcgctagggtcgtaggggagctgccctgtctccggagggcggtggctcccggcgcagcacaacgacatgaacaatccagagatcatggtgtccccacaacacccctgtgaggtaggt

SEQ ID NO: 127446 - DNA, 883 bp, Homo Sapiens
  misc_feature (113)..(125): n is a, c, g, or t
  misc_feature (141)..(239): n is a, c, g, or t
  misc_feature (349)..(363): n is a, c, g, or t
  misc_feature (393)..(423): n is a, c, g, or t
  misc_feature (648)..(657): n is a, c, g, or t
gtccccgggttttttcctttgggaaaacacactttatggcccacagtttccctcttccctttgggggggccccgcggcccccaaaaggaaaggtttttaaaaaaatttttttnnnnnnnnnnnnncggcccccacaaagannnnnnnnnnnnnnnnnnnnnnnnnnnnnnnnnnnnnnnnnnnnnnnnnnnnnnnnnnnnnnnnnnnnnnnnnnnnnnnnnnnnnnnnnnnnnnnnnnnaaaagtttattttaaaaacaagagggccgagggtgggagaaaatgaattgctttatcctcagagaggcaggttcaggaaggctggggggtgaagaatagagactttttannnnnnnnnnnnnnnattttataagttctgctttgctctttgtgnnnnnnnnnnnnnnnnnnnnnnnnnnnnnnnggcagagatttagatctcgctatcttctctggctggctcaacatggaaggatcccaattttgaaagaaaaagcatgtgagacacagaacaggcgagagagtgagggcccggcatgcccccaagtcccccccaccctgcttgccgcgagggctccccagtactccccacggcagccatcgctctctcgccaaacaaaacagaagcccccaaacagaacaaaatggnnnnnnnnnngatttttcacagatgaagaagttcacattcattcgattcattgagcctgcggagagggaagagataggaattggtcactacggggagggaagggtgggagactagggggcggaagagaggagaggggccgcggagggcggaggcgctagggtcgtaggggagctgccctgtctccggagggcggtggctcccggcgcagcacaacgacatgaacaatccagagacc

SEQ ID NO: 127447 - DNA, 765 bp, Homo Sapiens
ccattaaaaagaaagtacaaggaaggtaatttaattatagtccaactcttggctccgcagttaactttcacatagtaatagaaatagtaatctgagtattttttaacctaataactagggatgggggagggttgctgacaaaagagagctaaagcctcatgtatgacaacagggagtcaacaggtaatgtctaagattgatatatcaagcaagagtcatataagcacattttaaaaatagctgaatgaactggaagtgactgctgggtaggggagcagtactagagaatgggagagactgttttcttgttacaaactgtgtaattccacattagtaagtgggtatgtgtttttaaataagtatgttttagaaagacaccaattctccttgtccttaatgttcacaatttctctctagtgtgtgcactgggcaccctgcactgtttcttgcttcatgttgctttatgaacacttactgtcctcatggcacggttcatgtatttcttagtggtaggtacataatattacattatataaacttacatcaggtgctgggcatatgtctcccatttcatcctcagaaatagctatgacaagaaaggccccgcctttcctgctaattttcacgatgtgaccactgccctgggaacttcccacccacatgactgatttgggctccaggatgtagaagggcatctatatgggcagttctggacttctgcctcccgtggcacttctctggagccccagaaacgcctctcctgcc

SEQ ID NO: 127448 - DNA, 527 bp, Homo Sapiens
  misc_feature (11)..(11): n is a, c, g, or t
  misc_feature (425)..(425): n is a, c, g, or t
cccagcactgntgaagttatataatgaatattatgacctaccactaagaatacatggaccgtgccatgaggacagtaagtgttcataaagcaacatgaagcaagaacagtgcaggtgcccagtgacacactagagagaattgtgaacattaaggacaaggagaattggtgtctttctaaaacatacttatttaaaaacacatacccacttactaatgtggaattacacagtttgtaacaagaaaacagtctctcccattctctagtactgctcccctacccagcagtcacttccagttcattcagctatttttaaaatgtgcttatatgactcttgcttgatatatcaatcttagacattacctgttgactccctgttgtcatacatgaggctttagctctcttttgtcagcaaccctcccccanccctagttattaggttaaaaaatactcagattactatttctattactatgtgaaagttaactgcggagccaagagttggactataattaaattaccttcctt

SEQ ID NO: 127449 - DNA, 329 bp, Homo Sapiens
ataccattaggaaaatgggaatttttttataggcctgccatacttctactttgccaaatagcactttattatcaagatacacccatggctcatttcagactcactgaactttttttatatgaatgcacagtcgtcatattttgggcagtctgtgagttcttggtaactcatccccttactacaaaagcactaagtgaacaatacaaaagtataaaagcacaaatttgaacttacatagtttagtttaagtatgtttcactagaaaatcaaatatttagatttctcacattgaaaatgcttaggattgaggtttagctgcttcctttaaa

SEQ ID NO: 127450 - DNA, 1154 bp, Homo Sapiens
gcagcagatgtctctgtcatgtgtccatggggggcttccccccagggcattaaaacaatttggaaattaagaagcagggccccgcgcaaggcggggagccgcagcaccaggcgcccgaagggttgggctgggccgggtattgcgcccgcacatactcggtgagggcccacctgcgccttctcctgcaggctctcaacgtgggccgggtctgagaggccacaggcgtcgggcgtgaagagcgcgatggccttgaggcagccatactcggccgagtcgacctgcaggccggcccagcttgtccacctgctcctggaaggcgcgcacctggtccatgaaagccacggcgcgctcggcggccataggcgcggcgtggaggccggcggcggccagtagcggcgccgtgtgcaggggcagcgccgcctgcgccgcgttcagcacgaagagctcgctccagctcaggcgcagcagcgccacctggtcggccaccggcagctcggggaagaagggcgcgtggcgcgcccactccacggtgctgaagagcagccgcgccgccagctcgcacacgttgtcgatgcccagcaccgcgcccgccgcgccgccccctgcgccgaagcgtccggccgccgcagggtagggctcagcgcgcagcagctgcgcgatcagttcggacaccggctgccccgggaagaggtctccgccgctcgccactgccgccagcgccgagcccggggggctgcccgaggaggcggccacggcaccaggcagcgagtgcgggatgcggccgcgctgcaccgcctccttcctcatgcccacccggaagcacttcttgagacggcagtactggcactggttccggtggtgctggtcgatctggcagtcacggttggaccggcaggtgtagctgaggttgcggcggatgcttcgcttgaaaaagctcttgcagccctcgcaggtgaagacaccgtaatgcttgccgctcgacttgtccccgcacaccacgcagtccacctgcagccccggccgctcctcgtcgcccggctcggcgtcgctggcggcaccggggggcgaggtccgagtcgtcctcggccgcgcgcgggtagccgcccgccttgtccctcgtgccgatttaacacccagcctcgtacctagccgga

SEQ ID NO: 127451 - DNA, 1653 bp, Homo Sapiens
  misc_feature (75)..(84): n is a, c, g, or t
  misc_feature (939)..(995): n is a, c, g, or t
taagatataagcatgttctgttatgtccgtataggtcctaagtagcgaggcctgggtggcgattcaagacgaggnnnnnnnnnnaggtaggaaatgtctttattattggccttgagtcatcatgtagtgtctgacataggttacgtgtccagaggatctgcctggcacacgctagctacccctgcccactggagcagcccctctggccgacgccaggcctttgtccatcatgccagggaagccaaccccaccatcccacaagttcatgctaggggtgctgaggaacaaggctgtcctaggattggaccctccatcctggacaggggtcctggggaggatgaggctgaggcctggatgatcagtctctttttggtttcatgatcatttaaaaaacagaaaagacaaacatttcacagtctttaaaaaatagaagtctgaggagagaagccagagtcctgggccccgggaggcccctcgaggcctcagcattccctgtcccttgaggtctgtctgcaggcctggccacagcacacgtggccccgtcatggtcactggcccgagccgtagggccagttgaaggtactccccgacagcagcatgtctctgatcagtgtctcaatgggcgtcttccccaccaggcgcatgaagaacagctgggagatgagggaggcagggaccgcgcgcagggcggggagccgcagcagcaggcgcccgaagcgctggggctgggacgggtactgcgcccgcacatactcggtgagggccacctgcgccttctcctgcaggctctcaacgtgggccgggtctgagaggccacaggcgtcgggcgtgaagagcgcgatggccttgaggcagccatactcggccgagtcgacctgcaggcggcccagcttgtccacctgctcctggaaggcgcgcacctggtccatgaaagccacnnnnnnnnnnnnnnnnnnnnnnnnnnnnnnnnnnnnnnnnnnnnnnnnnnnnnnnnncgtgtgcaggggcagcgccgcctgcgccgcgttcagcacgaagagctcgctccagctcaggcgcagcagcgccacctggtcggccaccggcagctcggggaagaagggcgcgtggcgcgcccactccacggtgctgaagagcagccgcgccgccagctcgcacacgttgtcgatgcccagcaccgcgcccgccgcgccgccccctgcgccgaagcgtccggccgccgcagggtagggctcagcgcgcagcagctgcgcgatcagttcggacaccggctgccccgggaagaggtctccgccgctcgccactgccgccagcgccgagcccggggggctgcccgaggaggcggccacggcaccaggcagcgagtgcgggatgcggccgcgctgcaccgcctccttcctcatgcccacccggaagcacttcttgagacggcagtactggcactggttccggtggtgctggtcgatctggcagtcacggttggaccggcaggtgtagctgaggttgcggcggatgcttcgcttgaaaaagctcttgcagccctcgcaggtgaagacgcggtaatgcttgccgctcgaccctcgtttttgatcgccacccaggcctcgctacctaggacgtttgcgggcggtgggcgggagggaaagaggggag

SEQ ID NO: 127452 - DNA, 1335 bp, Homo Sapiens
  misc_feature (1247)..(1275): n is a, c, g, or t
ttttttgtgcttttgacactttatccgtttttatttaaaaacatgctaaaaacatggtgttccataaagccaggaccaggatgaaggaacgcacagatacggcaatgcaagcagaaagtgcatctgaaaccaacaagcgtgctcaccctgctctccctcccgtgctgcccgggggcaggcaggtgggcaaggagggggcaggaagccccccaggcctcacctcctgagtccccaatcagggcagggaggccaggccccaccctggactattgactcactgcagtggggaggaggaaagtgtggggcacgggaacacaagggctggccggactctgagaagctgagggacaaagaatggaccccaagcacctcacgcccagctcccatcctatgccacgtccctgctagttagcacctccaccagtgggtgggcaggggctggagaggaggggacagccacttccatccacccagactgctcttgggccaccaaagcctggaaagatggccatctagttccaagtcaaaccaggacacctgcaagagggtccggggcagggccaccttccagagagcctgagacacaggcccatgctggagggagaggggggtgacacggctcaagctgggggaggggtgcagggggagacttgcaccgtgacacctgcttccaccacccaagagcagttctcagcctgtgcccgctcacccccactgcaggatggctgcagagaaaggctgagtctgcagcggatgcccccctgcagtcctctacaaaccctgagggactttctgagacaagtgtgtaaattgctcacatcagacctgattgaactgactctggcaaagggagccgtgagtgagggaattctctcaggggaattctaccccagtgagatcacagtcaggagaaactgaagagaggctgtgccaccttcactggcatcgctgggtgtggccctctgagtggaaggggctcgaaggaacacccactctgtgcacacagacttccgcccaatgtagactaagccaaataacaaaacggccaagcgcagagtgagtaaagaaggcagcgtggggacctgtagatgaggctctgcaaacagacggatgaggtgggggctggtgggagcactgtggcaaaggctctggggccagaggccacccctgaagtactccagaaacagaaaagattttcagggaggttgcacatctcccaatgcactaggcttttgctgttgatattnnnnnnnnnnnnnnnnnnnnnnnnnnnnngaccgcgtatgcggccgcaagcttattccctttagttgagggttaattttagcttggcac

SEQ ID NO: 127453 - DNA, 1621 bp, Homo Sapiens
ttttttttcttctacaaatgtagaggtttatttcaacaaaatgtgtaaagagtgcatctgaagctcctgctcatcacagtatgtgtccatcaaattctgagacaagtgaaggctgttttgtgaacgaagagaacagataatatggcggtctccgtccaagcaggtcttggtcaatatccatcatttatactcctcctgccttagtagccttgcatgtttgaggggctgtgggaatgtcagattgctcatgttctgtgcctccaacttgaaaaaatccttgtccagggtaagacctacagtaaggagctctggggatgggggaggaggcattacagggttctagagaggaaacatactcgtttgtgtcataatttggtggggagaggggaggtaaatgagtgtaacccaccctgcctctgaagacatgcctggacaggcctcctggggggtgcaggacttcataccacttgtagatatgtgggatttgatttattgcaaaaaagcatagaagaataatctggtcaaaaatgaatccaattcttactaggtaagcaaatagccagcaatggtcaatgcattttcctggactgagaattgtcccccaccactttatgcccttttctgaaggtgctgaacacctgtaccttccaccagggcagccgggctgaggctctgactcctgggggctgtccgctccatacccagccatacagtgcccacctgcaacccagaaccattgaaaagtccagccaatctatccgcacagattcctcctgaagaaggggaggtggagctcgttcttgtgtgcaaactacagggttaaggctcagaactgtggcttgtccaagaacgttcataccactgcttctcaaatgtcttagtgatttcctccttggtcatcagtgacaaatgcagttagctgcactaaaggaaccggatgctacaccagccctgatcacctgccactcttgctttaggaacagaggaatcagtaagttcttttcttgaataaactagttgttgaaagtaaactctctccaccacctgaggaagcccctgatgccagtcaggaggggccagtaagcctggaggacagcagcaccatgactgagttgtaaataatcttaaggtcatgtggattctgtgtttcctggaagcttccctcatcaggaaggccagctcctggtgctgagggtgtagctgtcaccagggtcctttcagagctgtggggagacctgctgcctgtctacactctggggaagagagtagaaccgttagctgctaggacagtaatcctggaactagggaagagtgagtgtggaggcaccattaacctctcaaaaccatccaagctccaggcttcataggaacaactttccaagtcctcaaaacaaacagactatctatctatctcactggctctccacatggcataaataactagtttccaccagtgcagaaagggcagttctcttctggctcctcctctgccaactcaggcttcaccacctgtggaactgctggggcccctcaagcactggccttgcagctcccagccacatgcgacagctagtccagcagtgacgtgcaggcgagaggcaggccaacaactacctttccc

SEQ ID NO: 127454 - DNA, 927 bp, Homo Sapiens
  misc_feature (212)..(220): n is a, c, g, or t
tttttcaactttttatttagaaaatttattttatttaaaaggtatatatatacataagtcccaagatataaagttctaaacatagatttaaaaagagcaaaatggaaaaaatataaatatttgctgttcctgtttatatcttttgtgcatttattgtcttttctaaggttggcatttttctttattttgcaatttgatccatacttacagtnnnnnnnnntctaaatattatagaaaggtataaagcaaaaagtaagaattcccttcactccatcttctcctcagatattggtgaatctcctcccaaactttcaaccacatagatgcatttttgttttcaaaccagaaagccattaacactaactctttaaaggctgcggctgaattggcgagatgaagaattatgtagattaaggctgctgtctccctatagaattttttgagggattccacctttttttaaagcacatccttcctgttccacacactgaatctgcctggtttgtctcaacttgcttttaactattaggcctgtttggcagaggcaatataaatttttaaaaatgtaagatgtttaaaatgccattagcctttagcacctggaatttgaggcagaaaggtatgagttaggcaacctttcttgccataatcccagttttgacaagcctcaaacacaatgtacaatatttaagacacaaattcattaggtatgggctcaggacagcttgctcttatttaatacttgcgtgcttgtggttttgcacaatggatgggtattagagtttgcccttggatacttggcattgattagactgttctgaaatttggttatgcttagtcaaaaaattctgtttattgttcttcagcaagaatagatgtaaccactttaaaaatagttacattgttttccagattaagtaaatattt

SEQ ID NO: 127455 - DNA, 664 bp, Homo Sapiens
gtcaataaagttttattggaacacagtcatactcattcactttcagaaggtctatggtcactctgcagccacaatggcagagctgagtagtcgcggcagagaccatttggccagcaaagcctaaaacacatactgtctgcaggggcttcctgggtggagggggggtgaaccttcctggtcagatccctctgggttgagagctcttccccctccagggaagagcttgcccacctccgcatcgcagctcacttttacggagcactttctctctgttctgtgccacccgagcccatatccaggcccagtgagctctgcacattggtcatcccctcactgcagggggaggcccagataccacccacaggacacatttgtgtgtgaagtgccacactagggcccagaagggacagctccccaccaggtagggacaaagcaggggtaaagggaacacatgggccggcctatgagctggacccttcaggatgggaaatgcgtgggccgggttgcagagggggttggtgaggggctcggggacaacacaggtgtgttcagagacagggcgggtcattagatttgatggaggcttggggtccctgagcttaggaagcccccatggaaaccaagtcacaggcatccagggtgaggaaggctgcccacaggcatc

SEQ ID NO: 127456 - DNA, 433 bp, Homo Sapiens
ttttttttgagattttaaaaacactttatttaataaaagttaaacatacaaaactgaaataatacacatcctaaaaattaccttcttccattaataggaagacccttttctatgcatgtatttggcttaaactcaactcaggataactgtgatgatgttcacttacaccaacaaatgcagacaacctgatctaattaacaaaaattacaaacagctaaatgaacataatatacagggaaattatcgtcagattaatgcacaagaaatacaagaaatttttaatgatgaaatattcagtattcttgttcattaatttagccttgtgtttttacaaaaatagtatctacactgtatacagggctatacatcagctttttgttctcccatataaacatcacacatccaaaacatggtaccactgccgtaaatggga

SEQ ID NO: 127457 - DNA, 1567 bp, Homo Sapiens
gggtgccactggcaccactgggtggatggtccagagcctcacccacagaggggatgcaaagggcaggtgagtcaagaaccgcataggtctccagtccccacggggctcccaggccggggaaaggttcccctgaggtcactctgaggccagggacgtcacccaaggctggtggtcagtgtgaagggctccgtgccaactggtcagctgtccttcacgcacatatccgtggccacctgagacctgctccacgacccttccaggcagagccaagagttcgccccaacccttccccaggcccagtgtgaaaaacagactcacaaggggcttcttggcctgcagcttcatttgcgagagcgccgaggcaggacacagagcacagctgtgctggaagtgtggggagaacccggacagctcagtcctgccagcagccgcaaagagccgaggctgccaggcccatttatgtccctcatgtctctagattttctcgtcacccagcctcaaaaatatatgtgtctgcaaccctcagtctctctgccgtttcttgattcctttccaaacctcagccggggccctggcctcagccccccgtccctgcgtctgctcctcttcacagcagctgctgctggctcctccgcgctcggcgccaggccctgggtcctcagacgcatcactgtcatcagtgtccgagggcagccgggtgctggccacaggcctgttggggtttccaaactctctccctgaatccacatcgaagggatcgatctcctcctcctgggggctctccttggcattggccaagaactcctgctccgcctgcagcacctcctccgggctgccgcaggccgcgtacttgtccaggagctggcggttcaggtccaagaagcccttgccccatttaaacttccgcagcaaaatgacagcaaggtctggaaagcctacgatgcagaaggtggcagcaaacgcttccacgcaggaaagtctgtagggccggccatagttcacggggttggcggccaccaggtagggcaacaggcgcaagtggctccctcgcatcttcccaaacggtgtctcgtccagcctggcccaggagcagtcgatgacggcgaccccagactgcgccaccagctgtctgtctgcgggggacgcgtactgcttgcccacggggctcagcaccagaccgccgaatctgtggcccaggcgcaggcagcgcaccagccccaggcgggccagcttgcggcccgtgcagcgccgggggtcgcagtggcccaactcccacatggccagcgtgcagggcagcgccgccgggcccgggccgccctcgccgtcagccgcccctggctccacggaagcctgcagcgcggcgccgacctcctcggcgaaggcctccagggagcgcgtcgggaggtgccgagggcggccgccttccgcccccggcccgcgcgctgccctcctgcggcccatggcgcggacctggggtgccgggactccccaccccacgggcgcgcccctcggcctcccaatgggctcctcgtgccgaattcaccacccaggcctcgtacctagcccc

SEQ ID NO: 127458 - DNA, 748 bp, Homo Sapiens
ttgaccatttcccacaatcttttattaagaaaaattccaaacatacagaaaagttgaaagaacaagtacactgttcactgaaataccagccactgcagattcaacaatgaacattttggccttatttgctttgtgtattttggggggaactatttggaattaaattacacatttcttgaaggcattcacctatataatccagcatctatctcctaagaatgaggacattttcccatgaactgcagtaccgttaaatggctattagaggaatggttggtctttgtgagggtctcacgtccaggaacctcatcaaagcgtgctaggcccttagcagagagggtagaaccggctcgccggctccctcaccttctctcccatcccagaaaggcagaacaggggcaacacaggattctggagagctgtccagatagaggatcacaaacatgagctccacctgggaaacacagacagccccaatcccacccccacaacaagagcaggcaacctgggtccaaattcagaggacaccacagccggcagagggctgcagcatgccaggtaggacggaagtcgctgggggtggggatgagcaccagcccctagagcctggaatagcacccggcgtgggctacagccctgctccacccacctcacagctgctcggctcacccatggcactgccaaagcagcaggcttaagccgccaaggcgggcacatgaagcctccatttccaggtccaggggtcagg

SEQ ID NO: 127459 - DNA, 536 bp, Homo Sapiens
ccataatacatctgaatgtattttaatataaaaataacagctttcccccaattctcgctctaggaaaatgtgctatgctcaccttccctctacccctgtcccatcaggcccagagccaaggccatagggctgctgaatacacatgtgagggggccgaggggaagacaacagtaccaggagggcaggcagggcacccccaggctggccagtggaggggtgggggtatcgatcccgccgggggctggcttggttgctggtgccctgagcccttctctgcccgcctgggtgttgccttcactgatggaggtaggcgtccagccagatgtcaccagacttcttcagggacctgacgatgtccaccagcgcggtgaggaagggcttcacttcgtagctgaggccgtgcttggcacacagcgacttgaccagcggggccacccggctgtagttgtgtctcggcatcctggggaagaggtggtgctcgatctggaagttgaggtgcccgctgaaccagttggtgaaaagtgagggctccacgt

SEQ ID NO: 127460 - DNA, 678 bp, Homo Sapiens
  misc_feature (87)..(87): n is a, c, g, or t
  misc_feature (160)..(230): n is a, c, g, or t
  misc_feature (232)..(232): n is a, c, g, or t
atttgggggggaatttccaaagccctttttcattggccccgggattttcctttgggaaacaaggttagggccccagttcccctttcnctaattggggccggcgggcccaaacggaaaggtttagaaaagcttcttggagggcccgaggcgggccgaccannnnnnnnnnnnnnnnnnnnnnnnnnnnnnnnnnnnnnnnnnnnnnnnnnnnnnnnnnnnnnnnnnnnnnntntttttcattgttactatatagtttatttaaaccagactatgataatacagagaagagactgaggtggcagctgcccagaatctttgtggattacagatgcaaagtagttaggagtccttggacccacacttcagttacagacagacaaatcagctgcataaatacagagaacataagacacaagacatttcacagctttctgcatttccattttaaatgtatgtatgttacaactttacatattaagttactactccacatattttgtgacaatggctaaggatgcaatggccccatccccctgacataaacagactctggtctgcaacacagaacatttcagtgggataccaaacaagcccttaacacgtaacatacaaaaagatctttaaaaatcagattaatacaatgttcttcatgttatataaggaagaagaaagggaagt

SEQ ID NO: 127461 - DNA, 727 bp, Homo Sapiens
tcaggatttaaccatggtttattgcagacctattgtgtgccaggcatgagcccagtgctcccacaaacagcgtctccaggtacgagaagtgtaatttcgaccctggaacaccttcctgcactcagacagaagcatgtgcagactgctctcagcaacgccacctccttcactccctggccattgggcccccttctctctacctgtcccctgtcactccacttcctgccccaggccttctcttagggattttccaggctttggggagctgctgctttcagtttctggctgtggggtctcagcaggagtttgttccaaaacccagtagaaataaaatccttcaagagggagatgattcgtgggctgggtggattccagtgaccagaggacgtgcaaactctgccctaatgatctgggaacctagcccatccattgagctttctgttttcacccagtttcacttccctggttctcttccgagccttgcacaatgctgggagacaggcctagaaaagtgccaccatgaggatggtggaagacacacataagatgccggcctggggaggctactctgggtcattacagcaggagcggggagagctttcttcactgccctgcccctaggctgaggacgactaaggccaggtcttcccaaccttggggctgtccttgtccatagcctgagtctccaccccgctccttatattcctcaagctcccctccaatccac

SEQ ID NO: 127462 - DNA, 682 bp, Homo Sapiens
tttttttgccacctacagatttattaaactttatttcctctgagtctctgggcagtcagcagggatgtaaggcgaagtggcagtagctgaaggggcctgagcagagctggtgctgggaggggccggcatggacaggaagaagaggaggagatttaaatatccagggctgaaagccagttaatagttctccttcatctgtttttgtattttgtgtagcatctcctgcatccgccgcagctcctcatctttctctcggataagcttctcagtttctggatctgtccctggtgggacagcagggatggggaagtcggtaccactttcccgagtcagtttgttgcgattccgttccttcaccaccaggcgggtcatgctctggatgcactgtgcccggtagttctcataatgtgtctcccgtgtcacatccttcaggtcctgcatgtgggtacgtaccagcattgtcctcagcttcacaaagtcgcagtgccctgggttttccacttccacgatgccccaggggtagagtcgaccccgaactcgccgccctctggcctctactacagtgttgctgccaattactgcaaatgggatgctttcctttagggctgggcctgcatttgaagtctatcctcacagagtcacagttctggaattgatgatctgattccaaatgctcaatctc

SEQ ID NO: 127463 - DNA, 621 bp, Homo Sapiens
  misc_feature (176)..(288): n is a, c, g, or t
ccccagagggcaggtaaatgtattcagagcacatggcgagtaagaggcaaatcttctgccagcaagtccaggatttttttcaccagaggacattgcttggtccccagagctcaggaccctgtgttttgtctcactcccacccacagagctcctgtatccaggcatcaactccaacnnnnnnnnnnnnnnnnnnnnnnnnnnnnnnnnnnnnnnnnnnnnnnnnnnnnnnnnnnnnnnnnnnnnnnnnnnnnnnnnnnnnnnnnnnnnnnnnnnnnnnnnnnnnnnnnnttggggggggcatgtgcctgtagccctaactaccccaaaggctgacgttgggggatcactttgaggatagccactggccaaagcagggaacagagacagagtgaagagctctgtggggagggtggggcacagggtggagaaccttcaaagtccaaagagtatgacttgttgggattcaatgctgtaggcagtagggagccatggaaggctcttatgtggagaaatgacagccggacattattgagcaagccctgtcttcctgagcattattggtgttcctctgagcacgccaggcacgtgtgtgcagggagctggtgcaaatgcctctgtgtg

SEQ ID NO: 127464 - DNA, 363 bp, Homo Sapiens
caagtttttggtttcgtgggtaggggggggttttcacacaacacaggaagctttattcatccgctgctggtccaaagagtgggtcgcagggtcactcactttaatatgctgtcatcttctgccaattctctggcaatccgtttcagttcatcctgcttcttcttctcttctgctgctatcctcctctcctcttctgcccgaggttttaggtaattgtagcgcgtggctccgtaggccacaccgaggaacagggcggagtagcggccgagcttgatgagcggagagacctgcaccggtggcaccatcttgtccctgacctccgcaccggaagcacaacctgcagacggagcaggatgccgcccc

SEQ ID NO: 127465 - DNA, 483 bp, Homo Sapiens
  misc_feature (425)..(425): n is a, c, g, or t
  misc_feature (435)..(435): n is a, c, g, or t
gactcagactttttattgtactcaagtaaaaacctgctggacccacagcaggtggcacagaaaagaggtaggagggggtaaggacactgaggatcaggtctccagcaggtctgtccagtgtgcctcttctaattctgagtcttctacttctttctcagtgtccatctggcacagcagaatcaggtctccccaaagcagtgacttctcacagcaagggcattggccctctaggggcagaagctgccctggttcttcctgaagaaactcctctgccaggcagatcacatgggcccttagcaggcagccagggtgggggcaacacaagggcccctcttcatcccgaagggcggccacggaggacgggaagccgtgcacgacgagcaccatctcccagggccctcgcccgctggtccgccaggccccgncttttttgcnggccccattgggctggttaacccaacaaggcaggttgacagtgaaccc

SEQ ID NO: 127466 - DNA, 928 bp, Homo Sapiens
ttttgactcagactttttattgtactcaagtaaaaacctgctggacccacagcaggtggcacagaaaagaggtaggagggggtaaggacactgaggatcaggtctccagcaggtctgtccagtgtgcctcttctaattctgagtcttctacttctttctcagtgtccatctggcacagccagatcaggtctccccaaagcagtgacttctcacagcaagggcattggccctctaggggcagaagctgccctggttcttcctgaagaaactcctctgccaggcagatcacatgggcccttagcaggcagccagggtgggggcaacacaagggcccctcttcatcctggatggtctgggcgcacagggagcagcaggcccctggatccccctggtctggctcaggctccgcgtcatcaaagggacctgcgcggcgccttggggccggggcctggggcggtggaggcccgaaggccaaaggcacgtgcggcggcggcgggaggcaaaggtcctggcggaggtctgggcgcacccagcgcagcgtgagcgggaggcgagcccagggcggtgcgcgcagcatgtgcgccagcacgcgcaggtggaaagcgaaggctgtctctcctcgcaggcgaggccccacgtgcgccaggcggcgcgaggcgtgcgggtgctgccaagcccactcaaaccgaagggcggccacggaggacgggaagccgtgcacgacgagcaccatctcccagggccctcgcccgttggtccgccaggccccgccttttttgcggcccccattgtgctgctggacccgacgagcagtgttgacagtgaaccccacgtagccgcgacccccgcgggacccatcgggccttggggttcgggaaccacagcagggggttgatccgtgacctagggtccaggggttcaggcagta

SEQ ID NO: 127467 - DNA, 957 bp, Homo Sapiens
ccccatcattccccaagcgtgtttttccacaggccttcccattaggccaaactgccggttcttccgaagaactcctctgccagcagatcacatggccttagcagcaccaggtggggccaacacaaggcccctcttcatcctggatggtctggcgcacagggagcagcaggcccctggatccccctggtctgggctcaaggctccgcgtcatcaaagggacctgcgcggcgccttggggccggggcctggggcggtggaggcccgaaggccagaggcacgtgcggcggcggcgggaggcagaggtcctggcggaggtctgggcgcacccagcgcagcgtgagcgggaggcgagcccagggcggtgcgcgcagcatgtgcgccagcacgcgcaggtggaaagcgaaggctgtctctcctcgcaggcgaggccccacgtgcgccaggcggcgcgaggcgtgcgggtgctgccaagcccactcaaaccgaagggcggccacggaggacgggaagccgtgcacgacgagcaccatctcccagggccctcgcccgctggtccgccaggccccgccttttttgcggcccccattgtgctgctggacccgacgagcagtgttgacagtgaaccccacgtagacgcggccccggtaccgggggttcaggcagtagagcaggtagacgccgaaaaagcgccctggcctcgccgcgacccccgcgggacccatcgggccttggggttcgggaaccacagcagggggttgattgccgtgacctagggtccaggggagggctggatcgctagggctgcagggtgcttgcttcggaacaagctctcggggactatccggaggcagcctgcaggaagccgtagcgccggtacgtgcccctctcctgtctcctcgtgccgaattcgccacccaggcctcgctaccttagagaccgttatagttactgccgtcg

SEQ ID NO: 127468 - DNA, 1034 bp, Homo Sapiens
  misc_feature (287)..(313): n is a, c, g, or t
  misc_feature (386)..(398): n is a, c, g, or t
gtagggcgtgcgtgtccggcgcggggggcagatccgttccctaaaaccggataggtgcgattacaaacagatgttgcgggggatgtattttaataacggtggtgtgagattatgttgttcgcgtccaccggaccggttgttacataggagaggcttttcccttctccaatgcctcacccgaggaggacggggttacctctgttttctgagtttcatgtcggagaggaagtggtgttcccttttcgcctgtacctacatattaagggccttggctttcaatacccggnnnnnnnnnnnnnnnnnnnnnnnnnnnttttcttgccattccacgccgcccccagcgtgcccaccaggagcccttatgttggaacccagcctggatcatnnnnnnnnnnnnnagctagctctttccctgagttccgccgcggagatgccccgggcaccgcctccccgtcacgctcctccccgtgcgacaggccccgtccccaccacagacgccccgcctctgtcaccagtcctggccggtccttctcaacaggcctgtgccccgcggggtccgcctcctctgggacgccttcctcccggcacagaaggcctccccctctcaccagggccctcgcccgctggtccgccaggccccgccttttttgcggcccccattgtgctgctggacccgacgagcagtgttgacagtgaaccccacgtagacgcggccccggtaccgggggttcaggcagtagagcaggtagacgccgaaaaagcgccctggcctcgccgcgacccccgcgggacccatcgggccttggggttcgggaaccacagcagggggttgattgccgtgacctagggtccaggggagggctggatcgctagggctgcagggtgcttgcttcggaacaagctctcggggactatccggaggcagcctgcaggaagccgtagcgccggtacgtgcccctctcctgtctggaggcgggtgtagaagtccgaccgcggaagccagactgctgtccagtcggcgagcgatcccggga

SEQ ID NO: 127469 - DNA, 778 bp, Homo Sapiens
  misc_feature (406)..(418): n is a, c, g, or t
gccatgtgatagaagaatgatttattagaacaaattccatgacaaatcatataaaataaccattttccgaaagacagccacaagaccacctgagaacgaatgtacagtgaaccctccgagaagcccggcaaacaaggaccagttcccaggcaaaggctggagggggaggaacaaaggagctcagtgtggggaggagcaggaacttgtgaacttaaaacattgcacagccactgccgaggggtgggaaggagccgtggatgaagcgtgaccacttcatgtccaggggcaggcggggtgggcaactggggcatgcaggggtgggcagcagcccggtggaccgggctagcacctcctccatacagacagcaggctcttggggcggggaccagggggggacacctgccannnnnnnnnnnnntcacacacacacgtaaacatcaggtgggccgcagggctcagaggaacagaacccgtacacccaaccccagctcagctaaaagtaaacaggggacacacaccacccgcttccagcctccagtccccagtgccgctcccccagcagctggccctgtccaggtccgactctcataccattgccaggcagggtgtggagctcacccacgccagtctggtccatgtgggacacccccacgtccacccccaccaaccacggccaacgggctctttggcttagaggctccggcaacacgggctgccccagcaggggccacggcagaggcaccaagctctgctcacctgccatgttcccagctgaaag

SEQ ID NO: 127470 - DNA, 1001 bp, Homo Sapiens
ataatcagtttagttatatctttttgttaatattcaaatgaacttgtttaagtatctatgtacagtaatgcctcattcatctagaggtaatctggcagtcttgtgaaaaccgaacacaactcagaaacttggaatcgttttttttaaaaatgcctctgagcaacccatataagtcacaaagtctgtgtgttagagcttatgcatttgtttttatgagagattttaataaatttaattatttgcttgtccagactatagcatattagctgtttagaagggatggcttgaaaggaaggagactgaaaaacactctgagagcatacactgtccaaggccattagtgtaaggaccgctacccagcctagaggacatcactatactacatcatctgatgattattctttattatgcctctaggtaattaagtaaaggtgaaattgcatacacagatatgtagtacatattttaaaagttttatcttaaattgattaaaactttttaaaaagctttggtattaaaagaggtaaacatcagtttcctcaaacattttattcatgttgaatgcctttttgcaatgatgactgagttgttatcatagtattttaaaacctgtatagtgttttagacttgttaaaacattgctgtctagtgtacatctagctaaaagtgtggtttatctaaaccgttttaataagcaagatgactgggaaatctctgccccttttctgagcagtatgcctcttcttttagaattaaatgaatgctgcacaggtccagatgtgtgttgatgtagacttgaaatgtctccacattttggaggacttcctcagcccttttcattgagggaaaatatatttgaatttctgttttagattgtatcgggtcccagttgattcatgtgtacaaagttatgctacctaattacagaccattacccaaatatcctaccaggctttccatctgaatagtaaattaaacagttgttatcaaaatgaaaaaaa

SEQ ID NO: 127471 - DNA, 1003 bp, Homo Sapiens
  misc_feature (536)..(545): n is a, c, g, or t
  misc_feature (873)..(882): n is a, c, g, or t
tttttttcatggaaaataatataactttattgtgtgcagcctttccacaccaatttagtttttctatgaaataagatttcaagtggtaaagttactgttaaggagacacactggaaaaagctgaagagtttttttgtctgaaactggaaaacagaaaagtctagggggaaagatgtgagaaaactactataggctacaaagaccacaaaaacagttttggggattagaagggggtgacattgagtgagtgtggggaagagaagggctgggcaaattatctcagaagagggggtagtaggatttcaggtggatgtttaaggtatttgcttggcagatataatctaggaatctcctagctcttgcatttcctgctgtctgtaactttattatgtagtataataattttttatttagcacaaagttcatttggactagagaatcggaaggtgctaattttgtccccggctagcaaagtcatacctgaggtatgcgctggaaaacaactggaagacctaggcaggggaattcaaagttgnnnnnnnnnnaaattttattatcctgtcttggtttccttattgaatagatttccacaggaaaaatactgtgagtttactgatctgctgcagaattggaatttagactcacacataaagagagttaaagatagatccaaagggttcacttaaaataaaaatcaccaagacagaacagggctactgaaaaagtcttcttcccccggggttaagttttcctcataacccataaaggtttttggagcaaacctgtcctccaaatgctttctatcccaaaacccactcccttcttttgggagatttctggaacccctttaaggtttccaaattcaacttcccnnnnnnnnnncccatgggctcctcaaccgagcccattttggggaatggcctccctctacactttttgtgggcaactgggtttacttaacaaaagcgcaaagtcccttaacccttttttttaaaaacccgag

SEQ ID NO: 127472 - DNA, 2097 bp, Homo Sapiens
tttttttgcattttaaaataaaaatactttattgatgaagtcagacagcagctaacagtttgagaagcttgggaagaaatcactttcacatgggggatatatgcaacctagaacatatttggctaagtcataaaattaacatttttagtcatctgtaaagtgctgagacatttatttctggtgactgcctgtgttaggatttttttcttgttatccgtccagtaagtgaaacactgaaatacacgttcagcaggatggcgctcactaagtatgcaccttgacatgatggtgtgcactcattatgcacgttctcacgcggggctggctctgcaactgcagaatagaaactgatgcgttctgcagaggaggcgtctgcacaacagacaggctggcccgaggtcacgcctcttggcctgagtcccgctcagtgacagcagccagcatggcctagcaccaggagtcattcggagcgtgcgtgctaaagcagacacagcattccacgtcaacaggggcaagaagctgcacgaaggaactaagcaagacttctctgcctatcttcctctaatacttaagcacacaccttttctcctgtggatagtcactctatttatacgagaagggaggaataatttggtgttgatgcttgagtccaaatgttgataggcactgagcattttggttcaaagcaaacattatttgtgaaatgctacagataatacattgactgaaacattaactgttaattttttaatagaaaaatgcaatacaaaaatattactttgttaaaatatacagtacacacattataccactttggaaaacccagctcacttctgaaagcaaatcatgctaactggactggtaggtgttacctggcttttaaaattgttaacaaattttactctgaaattcaaaaatatagaatataaataaaagtcgtgaatctgaatcaggtaaaacttttaagaattgttaataaatgcctgcactactgaatacatatattttctcataaattcttagtctgcaaattctctaatatgatacaataggtctgacgctgatgaagtttaacatttagtattcatatatggactacagcagtcaaaaagaatgtggtattttcccagaactgcactcaattactcgaaaattgcatcagtcttctgccttcgtgagaagtgcttgtaattacttctgctgtacagaagagaaggaaggaattggcagggacaccaccattacgctattgcacgtttctcccccaaatactgtttttaatttattccccaacccagtgtagaacacagcttacccactcaggctgtaggattagctgagaagtcacccttgattgcaaattctgacagcagaaggcggccgtcctgcttatatattcagcagagggatctgccagaccatgacggtcggcgccagctcttcctggtggggctgccgggccttcctgtgcacccggcggtggccctgccctccacagaccaccagcgccgagctggccttggctttcttggcccggcgtgctttgcttctcagcgagacaggatccttcaggagatcatagatggtgctgtcctctgatctgtgctctagagagctggagccgtgagacaagctcagggacccagatgaggaggacaggtcgcttttctgagtcatcgatcccagtgaatctcccaaccagatggctgcgtcagggtcaccctggctcagagatgaaccagctcctccactcggaagtgcgtccttctggtcttcgtcctgaggctcggggccaggagccaggctgtccctggatttgtccttgtctttctcgtgcagagccgtggccaggacgatgaatttgacaggactgttgtgtgcatggtaggagaccatgcctcttccggtcactttgggaatcccttgcagacgtgggaccggcagggccacgaggactcccaggctggtgccgaccatcagcaatccgtggcagacgagcaggctcgtcaccgacagccgctggtgcccatcttgagtccggtttcatttcctgaattcccttacggtgtagtccatggtcttcagaaaagttacacg

SEQ ID NO: 127473 - DNA, 713 bp, Homo Sapiens
agtttgtttaaagactttatttgaaaccaatgtcacagcacgttagtcataaaaatcatcagaatcatcggtgttatggtttctggggcgtaaagcagcctcaatttctgagttactgtcatcagactcatcccagagggctggaaaataaaaccagacagttatttaacatttttgcattctggttaagagcttacaaaacagcacagcacggaaggactggttaagcagagtgtcagtctgcaaaatgcataacagggacaccacatgatgtacctgaccagacacacccaaatgcatgtcatactgcacaaattacacattgcaaagtgtgtcctctgcactgttatggaaaacaatttgcagaatacttccttttcccttctgttgtgcccaactctttattataggatagggatttaaggtcagggttacatggaagcagggttccctggggtgttgtatcagcctgatgccgccccacctcagctgcccctccactttcatctcccattcttctttatgagagcagagaggagaagggaaagacgtggcagaggaataagcagagatggttaccctgagacaggactttggtccacatcatttacttgagaggtgatcccaggaaccatggggacagtgacacaaggaagacaggaagccaatgaagggtatgatgacgagtgggtgcctggcagtgagtggacagg

SEQ ID NO: 127474 - DNA, 891 bp, Homo Sapiens
ttttttagtttgtttaaagactttatttgaaaccaatgtcacagcacgttagtcataaaaatcatcagaatcatcggtgttatggtttctggggcgtaaagcagcctcaatttctgagttactgtcatcagactcatcccagagggcattagattttaaattgatcacgggtttctttttgttttcatgccttgacaaaggacttccttcactagatgaaaaactagcttccgaagcaattttgttagctgtctttgtctcgaatgcaccgctgccaatattcaaacctgacaagtgtgacacagaagcatctgtcttttgaaacctgttttcagtttgatttgtattatcctgaagggtggccttcttcagcaactgataggcttctgtttctgtgattgggatatctgcagccacattttctttcttgctcttgtctccacagccacttgaaacttcttgttcccttgtaggaacactgttgagccatacagcaggtttggcttcctttattccactattgtcattcagaatagatggcaagctgcaagatgattcactactgtgaatagctgacctacggccacactcttctgtaagggcttttctcaataatgctgttgcctcttctttgacagaattatcatgttctttcaaggtggcaacatgctgacccacctgtgccctcggtacgtctgagtctggtgtttgtccaggttctcttgttggtgcgttagtggaggattccttttctgaatcaggagagcttagggtttgcaaatacatttttttcagtggatagggcactctttcttgctcagcatggattaattttaaggcccccggccgtaatggccgaattcccgggcatatgtccggtaccgtcgactg

SEQ ID NO: 127475 - DNA, 516 bp, Homo Sapiens
atacatcaattaatacatattttgttgcccagccctgtgtgatcctctctctctctgcagtatgcataatgcatagaagcatagtgaagacttggaaaagactttcagcaaaggaattgtttaaaaataaacagaagcctatcagttgctgaagaaggccacccttcaggataatacaaatcaaactgaaaacaggtttcaaaagacagatgcttctgtgtcacacttgtcaggtttgaatattggcagcggtgcattcgagacaaagacagctaacaaaattgcttcggaagctagtttttcatctagtgaaggaagtcctttgtcaaggcatgaaaacaaaaagaaacccgtgatcaatttaaaatctaatgccctctgggatgagtctgatgacagtaactcagaaattgaggctgctttacgccccagaaaccataacaccgatgattctgatgatttttatgactaacgtgctgtcacattggtttcaaataaagtctttaaacaaacaaa

SEQ ID NO: 127476 - DNA, 547 bp, Homo Sapiens
aactctgggaagtaagtgtaaagttctggcctccagtgaatcaaagtgcttcttctctaatgcgttcattatgaaaatattagtctcattgtcttttctttttcagaacttagactgtttctttattttgcaggcatgaaaacaaaaagaaacccgtgatcaatttaaaatctaatggtgagagagataatcggacactagattttctttttctgttttaaccaaaaaactctgtgacatgcatttgttgtttgcaccctcatgtgagtcctgacgcgggcatgctcacagggactgccattgcagctgtcccttgggtggaacctgagggcttctggaggctcagttcttcacagacaggaccacacgggtgccatggaccacaggggcagagcattgtaatttgcaagtatgaatttgcaggggatcctggcctccatgtctaattaattatcagcaccctgtattttaccaatgaaatgtttcttgcctctctcctcatcctcagaagcacccattgctcataaccgggcaggccctcgtgccg

SEQ ID NO: 127477 - DNA, 1211 bp, Homo Sapiens
  misc_feature (135)..(225): n is a, c, g, or t
  misc_feature (953)..(953): n is a, c, g, or t
  misc_feature (1007)..(1007): n is a, c, g, or t
  misc_feature (1010)..(1011): n is a, c, g, or t
  misc_feature (1017)..(1018): n is a, c, g, or t
  misc_feature (1131)..(1132): n is a, c, g, or t
  misc_feature (1162)..(1162): n is a, c, g, or t
gggggggatcccaccccttttcttggcccgggtttctttgggaacccctatggcccagttcccttccccaaggggccccggcccccaaagaaagtttttaaaaagtttttgggggccgggggggcccccaagggnnnnnnnnnnnnnnnnnnnnnnnnnnnnnnnnnnnnnnnnnnnnnnnnnnnnnnnnnnnnnnnnnnnnnnnnnnnnnnnnnnnnnnnnnnnagacatgaccaatttattcagagaattcaaatttcgtttggcaaagtatatccggggcagagagtttgggataattatgtcattggaagcaatcacattatctacagcaaattgcctggggtagtatctgaaggaaaggcaaaacttttaaaaacaatttagtatgtgggggggtgataatcataaatatttgcaaaggtaacaaaacaaacaaccagcttatacaaccaaggcacaaaatatgctaatgctaataatcctttattcaatttagctcaacacacattaagtacttaatttgtgcaagagactgggctatgtgctgggggtgaggtggaaatacaaaaacaccaagatgcaatccctctcaagaactgtataatctagtaagagcacatacagagatggtgcttgcaggtaaaaactgctctgaaaccatggggagagaagagtttacttccttccagagggtgaagtcgggacccatttaaatttggtagtatgggtgaggaaggtcataacacgctaagtaaactggtgtctaagcatgtgacggcaacagctaatggtctagttcctccatggctttaaatgcatgaaagggaaaagagtattcaaaggtatttttattttatctcattgttagcccagtataaggcaggatgacaaaaaataaataaaagtatgaagaggcaagaacatagattgaaaactccatttcctagttntagtggtaactcaatcccttgtgcatatacatctagtttctgaagtcacactgncannagggannacaagaaaacaagcctagcagtgcctgtcatcatggcagagactgtctcttctgtgggactgaacagctagctttggctactgccggtagtggacatatggacatggaattannagtccataacgtgcctcctacacgagatangaaggtggctgaatagatatttcagtgacggagggatgaatatttttgg

SEQ ID NO: 127478 - DNA, 1102 bp, Homo Sapiens
tttgtgcgtgagcgtgttccccttgctttttatccgtggtcttgtccctacgttcgttggcggtcccttggagtctttctgtgttaatggctcccacgactcacctcgctcccgcttccgaatctgtggagatgtagtaccgagtcatccccggcaatggagaagacaaccgctggatctgtttctggttttctgtagaatccaaagtcgaagtccgctggccactgatacagggtgagggcgtgcgtcctcagagaatcaatcgctggtcctgcttgaagacaggaagcaagacgttgatccggagcctcgggcagggaagggggggaggtagggacacgtcacctgtccttcagccacccggttacccgggatgttggttagcagccagtggaggtactcagcatctggctccagcaggtgcccatccaagctagtgagtagcaacgtccacaaggagccctcttctgcctcataggtcacctctggcgcttgggcagcctcggttggagtcacctcattgccacagtacacaggcatcaggtcatcctcacccacagcgtaggccacgtgcagggggactcggggcacaaaggtggcaccgtggaacaggtctcggtagaggccgtaatactcagccagacgctgcttgtggtaggggccacaggtcctctcccactcggcccgcacggcatccagcgggacactggctgtgcggaggcgggcagcccgctcctcttccacattggcccgaagctcctggatggcctgtttccgttccagtagctgttgggtccgggagactttgggtggaggcagcccaatatcaatcttctctttgggatctgtcttctccccgaaatactctcggtaggtccgccaccagtgcggggcctgcgcctcctgctctgcccggcgccggtagcggtcgaagctccggtacttctccagccgctccaggttgctcaagtcgatgtcactgttgggcatcggccccagcgggggtgtccggcggcccaggacggccgaggtgctgaagccccgccatctccgacactcgcctcgtgccgaattcaaaacccaggcctcgtacctagccgta

SEQ ID NO: 127479 - DNA, 1026 bp, Homo Sapiens
cagtactataacggtcctaaggtagcgaggcctgggtggttgaattcggcacgagggcggcgcctggtggcgagccgcgctgtgcgagtgtcggagatggcggggcttcagcacctcggcgtcctgggccgccggacacccccgctggggccgatgcccaacagtgacatcgacttgagcaacctggagcggctggagaagtaccggagcttcgaccgctaccggcgccgggcagagcaggaggcgcaggccccgcactggtggcggacctaccgagagtatttcggggagaagacagatcccaaagagaagattgatattgggctgcctccacccaaagtctcccggacccaacagctactggaacggaaacaggccatccaggagcttcgggccaatgtggaagaggagcgggctgcccgcctccgcacagccagtgtcccgctggatgccgtgcgggccgagtgggagaggacctgtggcccctaccacaagcagcgtctggctgagtattacggcctctaccgagacctgttccacggtgccacctttgtgccccgagtccccctgcacgtggcctacgctgtgggtgaggatgacctgatgcctgtgtactgtggcaatgaggtgactccaaccgaggctgcccaagcgccagaggtgacctatgaggcagaagagggctccttgtggacgttgctactcacttagcttggatgggcacctgctggagccagatgctgagtacctccactggctgctaaccaacatccgggtaacgggtggctgaaggacaggtgacgtgtcccttaacctccccccccttccctgcccggaggtccggcatccacgtcttgcttcctgtcttcaagccaggacaagcgattgacttctctggaggaagcagcccttaacctggtaataagttgtccaagggaccttcggtttggttctaagaacacccagaaacatgatccgccggttgtcttttcagcgggggaagcccaattccccgtggttgggcgt

SEQ ID NO: 127480 - DNA, 1143 bp, Homo Sapiens
ggcgcgcccccctggccggtccgccccccggcggcaagggacgcaagcctggcccaacccccaagtaggacactccaagacctttgcccaaagcactcggcgctggcacctgccagtgaaaagaacttcaccccacaggacagccacctttcaggactggagaagggtgcccactctgacccaaagccttgacaccctggcacaggcaggcaggcaaagggatgcgtagagaagcagccctgcagagttgcctgtccaggcaacaacctcaaccgaacatgtgccaagtccggccaggagggcacaccacagacagcaggctggtcacaggaatgtgctaagacagagcctctttttccttcattttgttctattttctttgaaattgtcatggtgtcgtcttccaggaaatcaaagagacagagaacaacaaattccaacccaggagtgtctgtgacactgagatgggatgtgtctgtgtttgcacagggcagggaggaggggcacaagtgagtggttacctcggttggagtcacctcattgccacagtacacaggcatcaggtcatcctcacccacagcgtaggccacgtgcagggggactcggggcacaaaggtggcaccgtggaacaggtctcggtagaggccgtaatactcagccagacgctgcttgtggtaggggccacaggtcctctcccactcggcccgcacggcatccagcgggacactggctgtgcggaggcgggcagcccgctcctcttccacattggcccgaagctcctggatggcctgtttccgttccagtagctgttgggtccgggagactttgggtggagtcagcccaatatcaatcttctctttgggatctgtcattctccccgatatactctcggtaggtccgccaccagtgcggggcctgcagcctcctcgctctgctcggcagccggtacgctggtcagaagctcacggtacttctccaagccgctccaggttgctcaagtcgatgtcactgttgggcatcggccccagcgggggctagtccggcggcccaggacggccgaggatgctgaagaccccgccatctccgacaactcgcacagcgcggcatcgccaccagggcgccgccatcattccctccggcctg

SEQ ID NO: 127481 - DNA, 1001 bp, Homo Sapiens
  misc_feature (35)..(35): n is a, c, g, or t
atcaaaaaatgcgggaagggttccgctgggccagnttgatatcacgggtgagggggcgtgccttcctcagagaagtcaaatcggctgggtcctgctgaaagaagcaggaaggccaagacgggtggatgcgcgagcctcgggccagggaaggggggggaggtaggggacacgtccacctgtcctttcagccaccccggttaccccgggatgttggttagcagccagtggaggtactcagcatctggctccagcaggtgcccatccaagctagtgagtagcaacgtccacaaggagccctcttctgcctcataggtcacctctggcgcttgggcagcctcggttggagtcacctcattgccacagtacacaggcatcaggtcatcctcacccacagcgtaggccacgtgcagggggactcggggcacaaaggtggcaccgtggaacaggtctcggtagaggccgtaatactcagccagacgctgcttgtggtaggggccacaggtcctctcccactcggcccgcacggcatccagcgggacactggctgtgcggaggcgggcagcccgctcctcttccacattggcccgaagctcctggatggcctgtttccgttccagtagctgttgggtccgggagactttgggtggaggcagcccaatatcaatcttctctttgggatctgtcttctccccgaaatactctcggtaggtccgccaccagtgcggggcctgcgcctcctgctctgctcggcgccggtagcggtcgaagctccggtacttctccagccgctccaggttgctcaagtcgatgtcactgttgggcatcggccccagcgggggtgtccggcggcccaggacggccgaggtgctgaagccccgccatctccgacactcgcacagcgcggctcgccaccagggcgccgccatcttccctccggcctgcgacactgcggccgccactaggacccgggcacagcctcgtgccgaattcgccacccaggc

SEQ ID NO: 127482 - DNA, 1407 bp, Homo Sapiens
  misc_feature (1380)..(1380): n is a, c, g, or t
tttccggcaagaaatcatgtttattcacattccccaccccaccacctgagagtcactttcactccaagccctgggcctgacgggagggggccaaagaggggggctgcctaaggcagggcccagaccccacagtgtgggcctctggagctgtgtctttactcttgctgccgatcaatcccatgctctgaaatgcgcacactctggctccttagtagatgccataggtgggctcatgactgtccctgtaccggtccaggtagcgcaggggctgccggtgggggaagcgcttctgcttggggtggtaagggggcggccgcacgaactcaaacaccggctcccgcatgtccagaagctggtggaagatgtaggtgacggagtcatcccagcggcactggaagaaggacaagccggctggagtcatggtttcttggtgtttcttgtagaaatcaaaagtgcggaaggtccgctgggccagctgatagcagggtgaggggcgtgcgtcctcagagaagtcaatcggctggtcctgcttgaagagcaggaaggcaagacggtggatgccggagcctcgggcagggaagggggggaggtagggacacgtcacctgtccttcagccacccggttacccgggatgttggttagcagccagtggaggtactcagcatctggctccagcaggtgcccatccaagctagtgagtagcaacgtccacaaggagccctcttctgcctcataggtcacctctggcgcttgggcagcctcggttggagtcacctcattgccacagtacacaggcatcaggtcatcctcacccacagcgtaggccacgtgcagggggactcggggcacaaaggtggcaccgtggaacaggtctcggtagaggccgtaatactcagccagacgctgcttgtggtaggggccacaggtcctctcccactcggcccgcacggcatccagcgggacactggctgtgcggaggcgggcagcccgctcctcttccacattggcccgaagctcctggatggcctgtttccgttccagtagctgttgggtccgggagactttgggtggaggcagcccaatatcaatcttctctttgggatctgtcttctccccgaaatactctcggtaggtccgccaccagtgcggggcctgcgcctcctgctctgcccggcgccggtagcggtcgaagctccggtacttctccagccgctccaggttgctcaagtcgatgtcactgttgggcatcggccccagcgggggtgtccggcggcccaggacggccgaggtgctgaagccccgccatctccgacactcgcacagcgcggctcgccaccacctcgtgccgaattcgccacccaggcctcgctacttaggangtgttgtcgcggggttctaagaaaaaa

SEQ ID NO: 127483 - DNA, 662 bp, Homo Sapiens
  misc_feature (263)..(271): n is a, c, g, or t
ttttcataagagaattagctgtctttatttttatttgagaaggattagcataatatagaaagactatgtatatgagttccttaagacatggcaggacccttgccttttaatacatatttgaaaattataaccatgttgttcaaatcccaaaatactctgggaggagataggggccaaaaaaagaaaataaatcctttttcatggatggtagaattaggatgtttccagaaccagcactgtgcccatcgtagtaggcactgaannnnnnnnngtaaaagaacattaggatagctcctcaagagaggatgttgttttccataatgaacttcttctggtgctgctgtgagacctccaactccagtaggccactgatgtgtttgagctgttctgaatattctcttctccccagggagcagggggctcttttagcattgacagtgaggagtatgaagcgatgcctgtggaggtgaaactgctccccaggaagctgcagttcttctgtgatcctaggaagagagaacagatgctcacaagccccacccagtgagcagcagaagacaagcactctgataccacactttaggccaccggtgggaccaaagggaacaggtgcctcagccatcccagcagtgtcgtcagagggtcccagggcattttcatgg

SEQ ID NO: 127484 - DNA, 550 bp, Homo Sapiens
  misc_feature (405)..(464): n is a, c, g, or t
tgggattcttgggctgaaaagtggtatggaaatacagaaggagaaaagccaatttgaaatgtttaactactaaagaactagctcatttatttttataaatgaatgaagggtgtcaaattgttgtgatatttaaattgtactggatatgtttaaaatagtgatgtaacagtttttattttaaaataccaatatttacacgacaccagcaaatacatactttgtcaactatttaacttcccatgaaaaattttagataccaacttagataaaattttagatatcaacttagatgggtgagggtatacatgatttttcaaaatacttttgggggcacatgagcagaatactttgtggactactgctttaaaacacgatttctccaagtacagttgagggacaacttannnnnnnnnnnnnnnnnnnnnnnnnnnnnnnnnnnnnnnnnnnnnnnnnnnnnnnnnnnncaaatttgggttattaggtttggggtagacccaaataagttttcaacatgtaccccaggtggctctcatgcaaaccatttaggaag

SEQ ID NO: 127485 - DNA, 2226 bp, Homo Sapiens
  misc_feature (186)..(245): n is a, c, g, or t
  misc_feature (340)..(357): n is a, c, g, or t
tttcaactatttaacttcccatgaaaaattttagataccaacttaaataaaattttagatatcaacttagatgggtgagggtatacatgatttttcaaaatacttttgggggcacatgagcagaatactttgtggactactgctttaaaacacgatttctccaagtacagttgagggacaacttannnnnnnnnnnnnnnnnnnnnnnnnnnnnnnnnnnnnnnnnnnnnnnnnnnnnnnnnnnncaaatttgggttattaggtttggggtagaccccaaataagttttcaacatgtaccccaggtggctctcatgcaaaccatttaggaagcactactnnnnnnnnnnnnnnnnnnctagcattttccggtattgtagccgtggctgaagagggagacaacctcacatatgtttctggactggaggttagaactgaaataaaagctaaacaggagccggagctcacaaaatagcagcacctgtggaggagcctagacataggaaaaaggtcaccagggcgaggaatgcaactttcctggaattcctagcacggtcaaaagaagagaaatggaagggcctaggcaggctaagcccaccgtgggctctccactgtggttgcactttggaagaaaccagaagaaagtccttttccgtcttgaaccagcctgaggaaagtccgtgtttaggagggccaaccgtcacaccaaaataaaacatgcgctaatggaagccgattgcaaagcaggtgacagagcacactttgggaagcactgctggagtgggggcagaggggtacttgccatgaaaatgccctggggaccctctgacgacactgttgggatggctgaggcacctgttcccttttggtcccaccggtggcctaaagtgtggtctcagagtgcttgtcttctgctgctcactgggtggggcttgtgagcatctgttctctcttcctaggatcacagaagaactgcagcttcctggggagcagtttcacctccacaggcatcgcttcatactcctcactgtcaatgctaaaagagccccctgctccctccgggataagcaaagtgcactggctggcttggagacacctccgtgccctccacgtgcagcttggggtttctcacctttcgacttcctatagttataaagtctcctttgctgatggtgtcaggttcaatgcaagatattcagaaagtcttctttgcttgtcgggtcaagctgattattccgtgttgtgatggacagttcaatggtggacagctgcacatctttccagacctccgggctcacctcttgggaaagggcatcctgtggttgtgcccagtaggacgcaagccttcgtaatattctcctgtacaaagaaggcctttgtacaggggtctcctctggttcattgggaggtctctctgtaggtcccgtgtatgagatagaggcttgatgagtctgaggccactccttaagagtgctgaaaaagtgggctgctttgatttttagaggcccaagataccagtacttgctaactttgacgccagcatctctgaaagatccccatcgaaggccggtcattgcaaatacaggctgttccttttcacccttgatctgcaagacatcaagtggaactgtctctcctttcacaatggcaagtgtggcatcagtaatatgttggactttgtttccactttcggcaaagagggtatgactcaaactactggtctctcccagtgggataaatccaatgggaatcttactgaaggtagcctcatctgttcgtcgaagaacaccagtaacaacctcctgcagtgtcccatctcctcctgcaacaatgatcacatccgtgttttccatcagttccaggagtttcttggcttgtccctcataatctgtcttaacaatagtcacatccatgccagataaatgtaaaatcggggcagcatttttttcaaatagagtcctggcttttcctttgcaagctgcaggattgagaaaaacagtggccttcttcacttgtgcattgggaggaatgagttgattgccaaacacctgagcttcttgacaggctgctctccttaggaggttatcacagtgttttccatagagccaatggcctccccaggtcagcaggcagagcccagctgtagttttcttccagtgatttcgaagcgttttaaagaacaccgtcatcttctagagatttgcacggctggtccagctcgcggccc

SEQ ID NO: 127486 - DNA, 696 bp, Homo Sapiens
tttaaaaaaaggtttatagctttttcttttcccatgtcacaatgtccacttcctaagaagggtttaaaatactatgaaaactttctttttggggaaaatatctatttggtgtttgacacatcagtaggtactttaaagacctgaattttatagtagctttaggagttatattttataaaaatcagttatgactttatatttccagacaatagagagttcagtacatcatgctcttgtgcctctgcctgcttttcctgcgttcccaccctgtattccccccgcctttcgggtttccagggcttcgagcttgatcttttgaaagttttattctattaaatttttgctatatcttctggttttctgaaaaagctttagaatggtttctataccctttgtatcactgcatttttccatatcatctccggttcgatcgcgtccagatggaaaacggaagcagaggcttctaatcgtcgcatttactggctccagtgcaacacatccatctgaaaacactcggaagtctggtgcttggagagggtgccattgtctcttgtacataaggtcatgacgtgtctatgtcaaaagttcttatatatttcttttataagctgaaagaaggtctatttttatgtttttaggtctatgaatggaacgttgtaaatgcttgtcaaacaataaaaataacgaaaagtgaaa

SEQ ID NO: 127487 - DNA, 739 bp, Homo Sapiens
  misc_feature (691)..(691): n is a, c, g, or t
acattattgcacagagatttctcatcaatgttcttcagtttttatgtcttttcctaaatgtgaataagtgctatggataaaatacaaatgtagaaaataacagcagcatgatttgtcaaagttaatccctataatttagtaagaaaaaatggatataaacaaaataagtgctctttctaaactgtactaaattttcaaaaatattgttttaatgcagtgaaggtcctgaaaagcctattgaaagcgatgctgagtcctgttttcaaaagtgtcctgtttgggttttcttggtgaagagcagaatttcaagtgaagtaatcgacggactaatttaaaacaaaacagccctcggcttccctattggcctgtgagggcaccggctccgggaccctgacctgggaggcagcgagtggtgggggtgcctggcccccatctacacgtacacaggctggcagccttcagtctgatccaccagatcagagctttctaaatctgagctctcagcctgtgaagcttctgctcctgaaggctttgggcatcgaaaggggtagccattgtcatcaaagaaccttcggaaggtgaattcgtaaaatgcgtgctcaggatgcttgttattgggcgaggtgagtgtgtcccaggccttggtgctaccttcgctggcatcgttccaagggctttcttcatctacggngtcgaaattcgaggtgtccatggggtggctgatggtgggaacgtaggg

SEQ ID NO: 127488 - DNA, 776 bp, Homo Sapiens
  misc_feature (183)..(195): n is a, c, g, or t
ttttcaccttttattatgattttattatatactctcttttactagaattttgcaaagtaaaatattgaataagaaccaactttatttttcctaagttctaccccataggaccaggtcatattaacaattgcttgatgcacaataatccgtgactcaataaatactttacaaaaataatgcagnnnnnnnnnnnnncttaaaacataaaaaactaagattccccagattgaccctcccccccttttatatttatttattggggatatattggtagatgaaaaaattgttaaaatagtattaaaataggtgaaatgcggtccattatctttttcccatttgttttgttgttttcctttggaaaagtgctacttcttgtttttacatctgaacttggctgcagtcttctgaacctgctaggacatgagcagaaattctactgttttggggccggtttagcagaatgatagcattatgataatattgatcttttattttaaagcctatttaaaaccagtcctcagctttgtccctaaaatatcatattccctacccagtctgaagaagagacttttggaatctgagactccagcaaggtgcctcatgaccaaataacatttggtttaaggtgggcgtttacatgttttgatatatttccattgcattatttttaaagaaataaattccaaaattccctttctcttccacttccctaagtctctttctttctgatctctcacagacgtgattagtttcaccacaactccagagaaaaggtt

SEQ ID NO: 127489 - DNA, 387 bp, Homo Sapiens
tttttaaataacctgtcactttattaagtgacatgatttttaaaatgcaatcttattcttcaagctttgcaagtttgtacttgtaattagcagtcagacattctttaaaaagaaaaggaagatccattaaggttgtaataatgaaagcagaaacatcttaataattaatctatcccattgttacaaaacacacttaaagacacaccatttaaagcagaaaatagccagattcatactcaacatttaactttttggcaccttgaggttgtttctgtctccctgtagtaaaatcagtattattttacccatgaacatcagtcttcctgtcagccttaaatctgaagcccacttctccacaattttgacatattttagtctttgctctca

SEQ ID NO: 127490 - DNA, 1298 bp, Homo Sapiens
gcccacagccatggcggagcctgtgcaggaggagctctcggtcctggccgcgattttctgcaggccccacgagtgggaggtgctgagccgctcaggaccagaaaataacacagagaaaaatgaaaattggtaaggactgacatggctggctcagtagcttttcaagactttccccctggactaccaacatgtttctttcctgtggttccctgcaccagagaggacccgagacagatgggaccgtgttcagaattcacacaaaagctgaaggatttatggatgcggatatacctctggaattggtgttccatttgccagtcaattatccttcatgtctacctggtatctcgattaactctgaacagttgaccagggcccagtgtgtgactgtgaaagagaagttacttgagcaagcagagagccttttgtcggagcctatggttcatgagctggttctctggattcagcagaatctcaggcatatcctcagccaaccagaaactggcagtggcagtgaaaagtgtactttttcaacaagcacgaccatggatgatggattgtggataactcttttgcatttagatcacatgagagcaaagactaaatatgtcaaatttgtggagaagtgggcttcagatttaaggctgacaggaagactgatgttcatgggtaaaataatactgattttactacagggagacagaaacaacctcaaggagtacttgattcttcagaaaacctcccaaagtagatgtggactcaagtggaaagaaatgcaaagagaaaatgattaagtgtactgttttgaacaaaagtacagacagaacacaaaaggtttctggcatttgaagtcaaagagtattcagcgttggatgaattacaaaaggaatttgaaactgcaggacttaagaagcttttctccgaatttgtacttgctctggtaaaatgaaatggaagacaggaatcttttagtaaaatagcagtgttttttgttgtttttgcattggatttggggagtggttaattgaaatagtcaattttaaagtttctctgaagcaaaatgataggcatcattctaacttcaggaacaaaagccagttctgttttatgaaatattaaacatgaagaaaacttgtatattctaatgtttgccaggaaaggctaggttcagtagatgagacattatttaaaagataaatttaaaaagatggtaaatgaacacttgtttttatagacaatatttgtttgaaactatgtaattttctggctaattttcttgtaattaaatgattttttaa

SEQ ID NO: 127491 - DNA, 769 bp, Homo Sapiens
  misc_feature (500)..(611): n is a, c, g, or t
taactttcaacctgatcagccagatatatttgtggtgatttccccctaaatgactaggaaagttcagcatcttcatgttactggacatttaaaaaaatcaactttatttgtccaattttctaagtcaggtctcctggaagcagcatttcaaattaggattcttgtgtaagtgacttactgagagtcctctataagggaatgagaaaaaacagaacagggcagaagaggcaaatatgtggtttcaggagaaatccacacacagcgtaatcccatggggtgctcaggagcataaattgtaccaccgaggccagtgggccaggctgtaatgtcctgcatcagtcactggccatgggccaacctcagaggagacaaaacttcccaggtatcttcaggtaaagtgactctcatcagcccaggacaatcctcttttaaagaagggtcaaagcctgttcttgggagtatgatctctctgatgagagatcaaaagttgtctttgttgnnnnnnnnnnnnnnnnnnnnnnnnnnnnnnnnnnnnnnnnnnnnnnnnnnnnnnnnnnnnnnnnnnnnnnnnnnnnnnnnnnnnnnnnnnnnnnnnnnnnnnnnnnnnnnnncacttggctttcttggaagctggaagacaatcttcatctccttctgatggccaaggtttcttcactgtagagataattccagaagcagtttttctagtttctccatggagaagcgctgctcggcagttggtggacaccgcagccttggcgtcactttc

SEQ ID NO: 127492 - DNA, 395 bp, Homo Sapiens
ttttcgtttgttgttttaatggattgcaagtaaaactgtttttatagactattgatttctagctccaaatgaaaacagtaaatcacacaaaggttttatttttgttgtggctgatgaactataaaagggaagaagggagtgctgacagagactggggcattcttttcagccctcacacttggctttcttggaagctggaagacaatcttcatctccttctgatggccgaggtttcttcactgtagagataattccaaaagcagtttttctagtttctgtaaaacaaacagggaaaccactgtgcttgaagttaagacataatttaaaatgaggtggtttaacatattactttggcttacagcaatagcaaatgataagccataatgaactgctat

SEQ ID NO: 127493 - DNA, 917 bp, Homo Sapiens
attgaggaccattggtaattcgagacgttgtctgttcacagtatgtaaatggcaaatttgtatcaaaagatatggcttcccaacacatcttgttctcccttacattattcttcccttggtatttttctttcccttaaaatttgcagagctcactgaaatggcagaatttgttcctatgctatgaggacattgctgctttaaggaaaaaggagtcagtttgacaattccagtgtactactaatgatagagctgccagatgcggaggaacatcctgagaattatagaaccatacctttcctttgcagatttgcatcaaattgagggcactggaaagttgtataccgttctcagttgtggagtctttgatagcagggctatagacaagttcaaaagccaggcctcggtcaatcgccacattaataggaggtctgtttgaagtaaaatggtagtttctctgttacagttatgcagactgaaatccacatctaaatgtgtgcaagcaatagtgaaaaagcttttctgtctgttggaaaaactgcaacgaacagtcatagagccgggcccttgaagaagttgctctcaaaacagttgcagtgagatggatccgagacaataattgttaatctagttaaaattttaattggtcttgattttccctgtacaattggcaaagttgtgaagagttcagaaacagctactggtttttcaatgttcctgtttcttttccttaaagtcaacgatatgagttgatagcaacaactgaatagccaaggtgagcggctgtctccacaagtccgcgcagagccttcaggtcagaacccgctcgcaggtccaaatctgcaaacaccgccatgctgaagtcccatccccggccgtaatggccgaattcccgggcatatgtccggtaccgtcgactg

SEQ ID NO: 127494 - DNA, 927 bp, Homo Sapiens
gaaaacagtaaatcacacaaaggttttatttttgttgtggctgatgaactataaaagggaagaagggagtgctgacagagactggggcattcttttcagccctcacacttggctttcttggaagctggaagacaatcttcatctccttctgatggccgaggtttcttcactgtagagataattccaaaagcagtttttctagtttctccatggagaagcgctgctcggcagttggtggacaccgcagccttggcgtcactttcagagagcccaaacagcaagcctagatttgccacgtcatatggccctcttatttctaaaggcctttctgcagcactagatataattacattctttcctttgcagatttgcatcaaattgagggcactggaaattgtataccttctcattgtggagtctttgatagcagggctatagacaagttcaaaagccaggcctcggtcaatcgccacattaataggaggtcttttgaagtaaaatggtagtttctctgttacagttatgcagactaaatccacatctaaatgtgtgcaagcaatatgaaaaagcttttctgtctttggaaaaactgcaacaacatcatagagccgggcccttgaagaagttgctctcaaaacattgcagtgagatggatccgagacaataattgttaatctagttaaaattttaattggtcttgattttccctgtacaattggcaaagttgtgaagagttcagaaacagctactggtttttcaatttcctgtttcttttccttaaagtcaacgatatgattgatagcaacaactgaatagccaaggtgagcggctgtctccacaagtccgcgcagagccttcaggtcagaacccgctcgcaggtccaaatctgcaaacaccgccatgctgaagtcccatgaccgtccgccc

SEQ ID NO: 127495 - DNA, 1061 bp, Homo Sapiens
  misc_feature (44)..(70): n is a, c, g, or t
  misc_feature (489)..(917): n is a, c, g, or t
  misc_feature (1021)..(1022): n is a, c, g, or t
attaccctcactaaagggaataagcttgcggccgcctctcaggnnnnnnnnnnnnnnnnnnnnnnnnnnncagtgtagaccgtctttattggcaggtgttaagagtgcaaaatatcaacaaacccaggggaatacgcaagggggtgggagtatggctcccctaccccatgtgagagccctgtaaccaagccagtggggtgggaacgttgacttgactgtggcaaattcaggctcagcaccttccaaagaacaagctcccaggcaggagggctccttgcaacacaagggggaaaggagtggcaccctggaaggggcctgggctgcgacccaccctgggctgcttggctcctgtatactgcccacctcaacccctcaagaggaaggcttcacagctgggggtatgtagttcagagaaccgggctaaacccagccctccccaaacccaggtatctgcctcgggcctcagtttcccctcgtgccgaattcttnnnnnnnnnnnnnnnnnnnnnnnnnnnnnnnnnnnnnnnnnnnnnnnnnnnnnnnnnnnnnnnnnnnnnnnnnnnnnnnnnnnnnnnnnnnnnnnnnnnnnnnnnnnnnnnnnnnnnnnnnnnnnnnnnnnnnnnnnnnnnnnnnnnnnnnnnnnnnnnnnnnnnnnnnnnnnnnnnnnnnnnnnnnnnnnnnnnnnnnnnnnnnnnnnnnnnnnnnnnnnnnnnnnnnnnnnnnnnnnnnnnnnnnnnnnnnnnnnnnnnnnnnnnnnnnnnnnnnnnnnnnnnnnnnnnnnnnnnnnnnnnnnnnnnnnnnnnnnnnnnnnnnnnnnnnnnnnnnnnnnnnnnnnnnnnnnnnnnnnnnnnnnnnnnnnnnnnnnnnnnnnnnnnnnnnnnnnnnnnnnnnnnnnnnnnnnnnnnnnnnnnnnnnnnggcgcgtgctggcgttttccatagctcgccccctgacgagatcacaaatcgacctcagtcagaggtggcgaaccgacagactataagtacaagcgttcccctgnnactcctcgtgcgtctcctgttcggactgcgcttacggac

SEQ ID NO: 127496 - DNA, 682 bp, Homo Sapiens
atgtatagcttgagcttcgccagggcacaatcgggcacagcttggggtagagcagcccccaccccacctgagcactgcagcctgcccacagcacaggccagcagacctgcctgcccatgccgcgtaaccaggtgggctttgccaagctgctctttgtggaggatgacaaggccgaggcccagcagtgcacacagcagggccagcagctgcagcacccagtggcagcgtgctcggcctttccgtgagagggagtgcagcagcgaactctcaggagaaaacaccagtagtgcctcggtcatcaggaaggagaaagccaaagacataagcaccgggtgccaggagaacaggctggagccaggcctggcaagcacagccacaaagatggtaaagcccagggccacaaggtgggcggcagcgccagaagcagtacgcagagctcggtagatgtgtgactcggtctccgcagaaagggccatcgtcagccgtgctagtggttgtagcctgaaagcatagtagcgtgggccaggatctcaggtgcccactgttcactcctcactggagaaaaggctgcaaggcaggaatgccaccctcttccaataagttatggtaggaaagaacagtaccaagaccagcaccaggaatggtcacaacatgccagtcgacggccggcggcctgtcaacg

SEQ ID NO: 127497 - DNA, 2657 bp, Homo Sapiens
ttgctgttccgaaatggatgtctttatttacagaactaagagtcaacctctagacagtatgacaagcctcctagtaggagggactacccacagcaatgtgtccatccagtcactaccagcctcacttccagcagatgatgatgttggggtcattttcaagccgctcatccagctcatggtagctcatgcctgtcttgcagcagatctcgtcatagctgtggcagcctgtataaagccgggcagggtggctctgctcttcccgagtcacccgcacaggatacttctgtagtcgcctgatgaggttcttcataagcccgaactggatcagcttccgttcatcaacatgctgcagctgctgggggtggcggccaatgaggtctcgcacggtagtgccagggctcaggctgcagtatagctggaacacatcccggagactggccctcttgtgcccttgcttggtcacgtaggatagacatgcctcttgcagggacttgtcatctaccaggtcctggaccttgggcgttgggcagtatacattggagtactggaggatggacaccagtgtcacaacgccgtagtacagcaggttctggatagcaatgcgcaccaggttgagctccacatctgcctctgctgaaatcttctggatgtggcggaacccatcaatgtagggcaggatttgttgtgtagtgaggtcccactgtgagttgaagaaatcctccttgtctttggtaaagacaggtacatcatactcctgggccaccggagggtctggccgctgctcaatcaccttcaagtggatggtgttggactcatcaatgggcagagtgcaccggcctgaggcatttagctcctccagcaagatggtcatgatgggcaccaacttctgcttgctctcctccatggacacgaagctgctctctagctctagtgtggtcagatagccagccagctttttaacaatgggctcgagggcgcaggtcttggcctgggcatcacacacgaagcccaggttgaagaggagagcattgcggctgtacttcttgtgttcgatgcacacaggacagccgatcagcttcttttccatagctgtgacagtgataagcttgttctgcagctctggcttggtgatgatgtacacttggactgtgtcaaacagctctcgggagatgaagtcttcagggacctgataggtgatcttgggtcccagcgtggggtggaactcgctgaagaatatgcattcgatgcggcagccgctgcccatggcaataaccgggcccaggcccgtagctcctcgttcctcgcgcagaggcgtccccacctcctgtgaacacttgtcagagacagcctcgaggcctgtgtcgctggggcacgcaagcttgccaatccctctgcccaatggcgcctgcgcagcgcgactcagaggcgtggctggggcgggggacggctcgtcccaggaagtcctgggtgggtagacgtcgcacccggaagtaaagcggctccgtgacggagcggcggtgcgcgcggcagggcccggagtatcccgctttctttggaggaaaccaccgcatcagatctgcgctgcggcagaggcagccttttctccagtgaggagtgaacagtgggcacctgagatcctggcccacgctactatgctttcaggctacaaccactagcacggctgacgatggccctttctgcggagaccgagtcacacatctaccgagctctgcgtactgcttctggcgctgccgcccaccttgtggccctgggctttaccatctttgtggctgtgcttgccaggcctggctccagcctgttctcctggcacccggtgcttatgtctttggctttctccttcctgatgaccgaggcactactggtgttttctcctgagagttcgctgctgcactccctctcacggaaaggccgagcacgctgccactgggtgctgcagctgctggccctgctgtgtgcactgctgggcctcggccttgtcatcctccacaaagagcagcttggcaaagcccacctggttacgcggcatgggcaggcagggctgctggctgtgctgtgggcagggctgcagtgctcaggttggggtggggctgctctaccccaagctgctgccccgatggcccctggcgaagctcaagctataccatgctacttctgggctggtgggctacctgctgggtagtgccagcctcttgctgggcatgtgctcactctggttcactgcctctgtcactggtgcagcctggtacctggctgtattatgccctgtcctcaccagcttggtcattatgaaccaggtgagcaatgcctacctataccgcaagaggatccaaccatgagctcttcccagcctaggggaagcctggatttgcccctccatgtaggagctgggcctagggacctgttgaactctctcagctgagtcaggggacacctcaggcactgggacagttgggcatttggaggcccgtgtgtgaattcctgctcctcatgctggagtgcctcccatttccttcccctttctctgtcatcccagaggaacataggcatcatgtgtctggatgaagctggggctgcaagactgcctctcctgcaaggcagctcatacttgtactgtatgttcagaaattttaggagag

SEQ ID NO: 127498 - DNA, 1002 bp, Homo Sapiens
  misc_feature (574)..(574): n is a, c, g, or t
aggctggaccggtccggattcccgggatccggaagtaaagcggctccgtgacggagcggcggtgcgcgcggcagggcccggagtatcccgctttctttggaggaaaccaccgcatcagatctgcgctgcggcagaggcaggctacaaccactagcacggctgacgatggccctttctgcggagaccgagtcacacatctaccgagctctgcgtactgcttctggcgctgccgcccaccttgtggccctgggctttaccatctttgtggctgtgcttgccaggcctggctccagcctgttctcctggcacccggtgcttatgtctttggctttctccttcctgatgaccgaggcactactggtgttttctcctgagagttcgctgctgcactccctctcacggaaaggccgagcacgctgccactgggtgctgcagctgctggccctgctgtgtgcactgctgggcctcggccttgtcatcctccacaaagagcagcttggcaaagcccacctggttacgcggcatgggcaggcagggctgctggctgtgctgtgggcagggctgcagtgctcanggtggggtggggctgctctaccccaagctgctgccccgatggcccctggcgaagctcaagctataccatgctacttctgggctggtgggctacctgctgggtagtgccagcctcttgctgggcatgtgctcactctggttcactgcctctgtcactggtgcagcctggtacctggctgtattatgccctgtcctcaccagcttggtcattatgaaccaggtgagcaatgcctacctataccgcaagaggatccaaccatgagcctctttcccagcctaaggggaagcctgggatttgccccctccctgtaaggagctgggccctaggggacctttttgaacctcctcctcagcttgaagtcagggggaccaccttccaggcactggggaacaagttggggccattttgggagcgccccccggggggga

SEQ ID NO: 127499 - DNA, 1430 bp, Homo Sapiens
ttttttttgagctcttcaacattgttcttttattatctctaacatatttagattgtactctaacaaaaaatgttattcaaatatagtactttgatgtttgaacaaccttttcttgatcacttcttcgcaataaaaatatgacatatgtagtaaaccttaaaaaatttcgtgtaactttatggctctacgctggaattcttctgaagtgagtaatcatcacaatcatctttagtatataatggatcaaaatgacacgattgcaaatattgataacacacagttataaaaggtgaaattctattgggaacacatctcttagtgagatagatggggctgacccaccaattaattcatttatctggatgaatagttcctactggtagattaacagggttcattttcaattctgttgttttcacagatacaagtgctgagaaatggttttacataaataggtgagaatgctagtagttttgttgtaagcatgtcaatcaatcgtttggtttctttccgagttgcatgccaaaaaccaaatagtgttccttcatcagctgacaattcatgggccaccattaattttgttgaaagcaaagaactggaaaccatctgacttgaaaagaatttgttatcctgttattagagtcattcactttctctagtgacttttaattatactaattactctcagaggcatttaggcagggttgagaaattcaagatattaatttcaacacatctttagcatcacaaatatcacagtaatttaaatatattttagttgtagctatttagctcactttattgtaaataataattatgctaattagcaacgatagtatgtttaaccaattaatcatcagattaactttcggtcagaataatggacttcaatttttaagtcaaagcaatgtacaggcgtcccagtcaccatatttcacttctgaattccaagagagaaatggcgttgcgccttactgacgcaaatatgtacctagataaagtaagacgctttcatttcaggtatgtctaacccacgctatccttgctttgttccagggcactctcgcagggaaaacgccgcctctgactacacttggggtggttaagacgagatcttcaaatgaaaattctcaacgctaccgtccactctctcatacgcttgaattccgaacaccccaatactggccaaaagactccatttctcatgcttggtcttgcttttgaggtagctctaactcagaggcacgatttttagagcctgggaagtcggctgctgtgtcagtccttcctagcctcctcaggcgggagcccgcggcccactcagtcagttgcggcccactcagtcagttccggcgcaccagtccccagactacctgtcgccttgcttgggggaacggaaggcagataacgcgcagcccagtcagggtaag

SEQ ID NO: 127500 - DNA, 635 bp, Homo Sapiens
gtacttacgaacttttaaactttaataacttaagttaaaagagcaaaagaaataatcagttaaaattacctgaaagttgtgtattaacatttataataactattacacaatttctatattgtattaaagatcctgattgaccaaaagaaatcatgaggtaaattatgcacatggataacaaaattaagactataagaaatataaagaaaacattgcccttttgaactatttacaaatttttaaatcatacctgtaacctaatgttactaaagtttaaaatttttaacataccaagtgcctcaagagttttataatttattatataaacaacttgatacatttacttattcacttattaaacatttaacagagtaaatgtcatttttcagtagtctgaaaaagaacgaggattctgataattttgggggggttttttgctttccattaaaacaatagtggttgcaaagctatcccttattttaagaaaagcaataaaaatgtaaagatctgcaaaattagaaagcagaaaactaatttattctaaatattccgaatcctcaatctttactaagtaaatgtgtgagattagagccatctaccggttgaagtgtgatgttacacaacccaactgttgg

SEQ ID NO: 127501 - DNA, 589 bp, Homo Sapiens
  misc_feature (82)..(93): n is a, c, g, or t
gctgtgaattcagttttatttggcataattaacagagaaaattttaagcttacatagaagattttggttactgttatcctgnnnnnnnnnnnnaaactgagatataattacatactatataattctttcaaagtgtacaattcaatgatttttagtacattcacagagttgtgcaatgatcaccactatctaatacagaacattttcattacctcacaaagaaatgccacacccattagcggtcactctcattctccttgcccagcccctggcaaccactcctctcctctctgtctctatggacttgcctatctggatatttcctatgaaaggaataacagtaggtgaccttttatgacgggcttctttcacggagcataaagctttcaagttcatccatgttgcagcctgcatcagtgcttcatttctttttatgggcaaataatattccactgcatgcacacactacattttatttattcattcatcttgatggccatttggactgcttccactttttggctattgcgaataacgcttccacaaatattcatgtacaagtgcctgtgtgcacatgttttccattcgc

SEQ ID NO: 127502 - DNA, 799 bp, Homo Sapiens
  misc_feature (687)..(687): n is a, c, g, or t
ataatgttttattataaaagtaatatatgatctttatagaaaaataaagaaaataaaaatcatcaataattttatcacccagaaacaatcacttttaatgtgctggtagaggttagtctattttaacatttctgaaatcatatagatttacatgattgttctcacgtaacctgtaacataagcatttcccaagttgctattatctgttaataacagtggtttgattaattggattggctgtgtggatgtggaacggaagagccttgatgtcaagaagagctgaagcacagaaggtgcagtcggtcatttgggaccatattgtctgtggctttcaggacagggagcttcaggactcaggtagatgactctggaagaaaccttctcttttggaactgcagcatctccctgtcctccccaaggggaatttaggccaggaaataccagatcttccctctctgattttcttctcaaatcccaatgcaagacaatggagactaaatacggttctggtcatcaggctcttccagagcatccgggtgcatgagaagtgaataggtgattgtgttctcagccccaactttgtcagcctcatcaggattagtgggattggctgtgggaaaaagaagaaatatcagccagagcactgctggagaagagggcctgcctgtgctgatgctgaggctgcanaaccaacgcccaaactagagccaaagcaagcactgctgaccctgtcttgggcctctaggccaagcactgggtaaatatgacctcattgatcgatgcatagggtagcccagca

SEQ ID NO: 127503 - DNA, 924 bp, Homo Sapiens
ttttttttccaaaacaaagtgaatgctttatttgctatagaaggaaagggaagaagacatggaaacaagaatacaagttcattagaagaagagtattcagttctaagaagaggggcactcaccctacactccaaatctccctctctcctctccctcacatcttatccattactaccttctcaagactttcatcaccgaaaagaaacagaccccggatagttcagtctacaccccaatcaatacagccctgaaaaggtaaacagaatgttttggttataatgttttattacaaaggtaatatatgatcattatagaaaaataaaataggtcatcaataattgcatcaccttgaaacaatcacttttaatttgttgttagaggttagtctattttaacatttctgaagtcatatagacttacatgattgctctcatgtaacctgtaacataagcgtttctcatgttgctacatctgttaataacagtggtttgactaattgtattggctgtgtggatgtggaacagaagattcttgatgtcaagaacggctgaggcacagaaggtgcagtcagtcatttgggaccatattgtctgtggctttcaggacagggagctttgggactcaggtagatgactctggaagagtccttctcttttggaactgcagcatcccttcgtcttccccaaggggaatttagtccaggaaataccagatcctcacctctctaattctcttctcaaatcccaaggcaaaacaatggagacttaatgtggttctggtaattgggctctttgttcttctggagcttccgactgcataagcagtgaataggtgatttgttctcagcatggagaaggcagaaaccagcagtagggatccacagagagggcataggaaagaagatgttaaagaggctggacattg

SEQ ID NO: 127504 - DNA, 766 bp, Homo Sapiens
ttttttttaaggagagaatatcaacaaaatttctcattttacttcttgctaagacgacagcagggaattgtaagcagatggatgggcaatccccaccttcagcaggggaggccaaggccccaacacacctggggagaagagctgggggcagtgaatggctgaggctttcttggggagctgggccatcttcttcggttttacttcctgaggaattcacaggcttccaggaggggggaggttgagcactttttcagattagtaatgcctgcgacatactgtggtcccaaatatttttcatatgttgttttgccatggagtctggccagacactcagtgttgtcattgaacagaaggtttttggtttcagactggaataagcaaaacttgtccgggcagtcagatccatttctcccaaatttagcctgttggtggagcaacacctgtttcaggcgttccaccttatccatccgagacaccacggcatgattcggggccatggcaagatggcagcttctagcctcagtcacaggcttccgtttgccatcgaggcacagcagcgcaaagtctgccagcttcaaatccttagcccatgcgtcattgttatttccatcagtgttctgcaagacagtgacatctttcacaaatgcaacgtctccagcattctcagccaggcaccggaaagcccagtgtagccgtagtatctctcgttgctgttgggcacgcacttattctcacctgctcgtcgcgatacacagagcacagagat

SEQ ID NO: 127505 - DNA, 1000 bp, Homo Sapiens
  misc_feature (240)..(248): n is a, c, g, or t
  misc_feature (556)..(567): n is a, c, g, or t
  misc_feature (932)..(958): n is a, c, g, or t
gggaaaataaatcatgattgttcaaagctgctgggacgttagaattaggccatgatactggtctcattttaactacagtggtatttggcactagtgtaaacttccatataaatcactcttttggaacaacaaagggggagggagaaaaatcacggcctgttaaatgagtaccaaagccgcccaacagtaatgagatgttctcatccttgattctcccagcctcaaacaacacagcttacnnnnnnnnncccttgctcagaaagtacctgtaatttaacaaacagactgcctgtaggtatagtgcaattacaaatgctctaatcattgtacatacatctctcttgatattgcagcatccatactggctttgtaatcattaattttttggcagattgaatgtgctgtattgatatgtatctatgtaattgtattgtatgtctatagctaattcacgttttgaataatgttattttatttacttttttaagagaggagaatgtaaatttgtcagtttatttctgactagggatattttctttccatttagaaaagaagnnnnnnnnnnnnccttactgtcatacagagcggtactagcgtcgtgctgtataaaatcatttgcacattcctgagtagaggtatactgattataagacccaaaggtaatttcatagcaaaatacataaaatcagtcggagcttttatacaaacatggaaaccaactttgtagaacttttgccatttgatctaggattggaatatgagcttttatacaattcatattcttatttggcaaatgcacagtttagtattacctctctgatggcctttactagaaaggcagttttagaagctattgtgatccactaaggaaatgttttaacagctagagaccactgcttgcctgaaagggcgttcttaaatttggtgcagcnnnnnnnnnnnnnnnnnnnnnnnnnnngcctacagccgcggccgcaagcttattccctttagttgaggg

SEQ ID NO: 127506 - DNA, 1610 bp, Homo Sapiens
tttgagcgttgaggaagcaatttctttaattttatcggaatccaggacacaacaagaaaaacacccaaaaaccacatggagacagaagacgagacacaactcctcccccactgcctccctgctctagagtggggacaaagtgggggtgagacagctggggggagacctgaacctcagtccagccctacaggctccaggcctgcagggaaggagggtaacggggaggcagggcccagccccccagtgtggggaaacagctgagggaaggcccccctcaaaaggctccacctcctcaccagcactcctgcccagggacagggagcccacagcagcaaggggaccccggggccatggccacattcatgactgagaagcagctgagtggaggcaggagacacgattatctgggcagaatcagttggggcaggggcctgggagggccccatgggccaaaccctgaggtcacaggagggggcccaaagcggggctagtgagtgaggtcctgagtgagtgggtcagcggctgggcccctttctccagctgcctgtagcccctccaatactgctgccaggggggcccgcctccagggaaatggataagaaagcagcctgcccctgctgcagacagagccaggtggctaaggccaggaaggaaggcccggccaggccttgccacctgccccccgagagcctgtgggaaaaggacaggtcaggaagggtggggacaggggctcgaccggctcagatccaagatggtgccacgcttgcttgctgagtcccccatgagctggggtactgcactgggccagcgactagttagacaggaggcagcagcttctcaagaaattccttcacagctgccatctcctgaggacaggagctgtgcatgacacccgggtatgtcttgaactggaccctggcaggtgtgacaacagaccggagcttctcagccgtcagggccccaaaccgtacgggcaccatggggtccagctccccatggcactggagtatggccaggtccttggcactgccattagctgcctgggggaaggcccggtgcagaggcagccagcagctcaacgccacgatgccagccagagggtgggggcaggtgagggccgtgtagagggacagggccccgccctgtgaaaagcctcccaggacgattcgattggcagggatcccgttcttcatttcatgctcaatcaaggccttgatgttctctgctgccttcttgatgccagcctcgtcctctggggcatctggactcagccccatcaggtcaaaccaggagggcatcaccatcttcatgttgagggtcacagggatcctaggcgcatggggacagatgtacttgacgtgagggagccggatggtggagagggcgtcagcccagctgtgccctgtgtctccaagtccatgtaaaaaaataaccgcggccgtttcccgctcagctccagacacggtggcagcatcggtgagcaggggcacagacatggtgttaccacacatacaccacacggctccacggcgggggcctccactcctgggacttccgagccgcttgggcattccctcgtgccgattacacaccaggcctcgtactagcct

SEQ ID NO: 127507 - DNA, 909 bp, Homo Sapiens
ggtggggacaggggcttcgaccgggttcagatcccaagatggtgcccacgcttgcttgcttgagtccccccatgaggctggggtactgcactggggccagcgactagttagacaggaggcagcagcttctcaagaaattccttcacagctgccatctcctgaggacaggagctgtgcatgacacccgggtatgtcttgaactggaccctggcaggtgtgacaacagaccggagcttctcagccgtcagggccccaaaccgtacgggcaccatggggtccagctccccatggcactggagtatggccaggtccttggcactgccattagctgcctgggggaaggcccggtgcagaggcagccagcagctcaacgccacgatgccagccagagggtgggggcaggtgagggccgtgtagagggacagggccccgccctgtgaaaagcctcccaggacgattcgattggcagggatcccgttcttcatttcatgctcaatcaaggccttgatgttctctgctgccttcttgatgccagcctcgtcctctggggcatctggactcagccccatcaggtcaaaccaggagggcatcaccatcttcatgttgagggtcacagggatcctaggcgcatggggacagatgtacttgacgtgagggagccggatggtggagagggcgtcagcccagctgtgccctgtgtctccaagtccatgtaaaaaaataaccgcggccgtttcccgctcagctccagacacggtggcagcatcggtgagcaggggcacagacatggtgttaccacacatacaccacacggctccacggcgggggcctccactccctgggacttccgaggccgcttgggcgattctcctctttctcccgcagacacactcttccccctcgccgccc

SEQ ID NO: 127508 - DNA, 1258 bp, Homo Sapiens
  misc_feature (514)..(514): n is a, c, g, or t
  misc_feature (1033)..(1033): n is a, c, g, or t
tctgcgggagaaagaggagaatcgcccaagcggcctcggaagtcccagggagtggaggcccccgccgtggagccgtgtggtgtatgtgtggtaacaccatgtctgtgcccctgctcaccgatgctgccaccgtgtctggagctgagcgggaaacggccgcggttatttttttacatggacttggagacacagggcacagctgggctgacgccctctccaccatccggctccctcacgtcaagtacatctgtccccatgcgcctaggatccctgtgaccctcaacatgaagatggtgatgccctcctggtttgacctgatggggctgagtccagatgccccagaggacgaggctggcatcaagaaggcagcagagaacatcaaggccttgattgagcatgaaatgaagaacgggatccctgccaatcgaatcgtcctgggaggcttttcacagggcggggccctgtccctctacacggccctcacctgcccccaccctctggctggcatcgtggncgttgagctgctggctgcctctgcacggggccttcccccaggtggatgtccccactgaccccccccgccctttgtgtctgcatcctcgtggccttggggactgctgcagcactagctttgcccctgagtcctgtccggcctcccaggcatttaatggcagtgcccaaggacctggccataactccagtgccatggggagctggaccccatggtgcccgtacggtttggggccctgacggctgagaagctccggtctgttgtcacacctgccagggtccagttcaagacatacccgggtgtcatgcacagctcctgtcctcaggagatggcagctgtgaaggaatttcttgagaagctgctgcctcctgtctaactagtcgctggccccagtgcagtaccccagctcatgggggactcagcaagcaagcgtggcaccatcttggatctgagccggtcgagcccctgtccccacccttcctgacctgtccttttcccacaggctctgggggggcaggtggncaaggcctggcccgggccttcctttcctggcccttagcccacctgggctctggcctgcaaccaggggcagggctgcttttctttatccaattttccctgggaagggggggcccccccctgggcagcaataattggaagggggctaacaggcaaacttgggaagaaaaaggggccccaacccgcttgaaacccactccacttcagggacccttcacttcactatag

SEQ ID NO: 127509 - DNA, 934 bp, Homo Sapiens
tttccaggttgagattctttattctggaggtaggaagggggtcagcatgctcaggtgggaagggtccagcccagctcctccagccccccagtgcatgcccagccccaataagttacccagttactcagctgccctccctcctgggtccatctgtccttctgttccaccctagacagggccaacctgactcaacacaagggctgcttgtccccagcctgtgggcagtgccacacggcaggctaggggaggggtgaagcagcaggaccatgccctgggcctggaggggcagaggggccacttctggctccaagggtcaggacttggaaaaccacatcctgggcaggcctggggcccagtcccacaaggtctgtgcctgaaaagaggtggtagttggggtggggccgccatcacacctcaattgctgggtctgagccccggccctgccgctgcagctgctcctcctgcttcatcttgggcttctctgtccgagtatgccacaccagtacccgagtgcagttggcagcccgtggctccaggtccttgggatccacaaggtggctcagaagactgctctccaggtggccccggggagcggtggaatcaaattgggcattgggcttatctaacagcaagggcagggccacggcaaatccagccatatccacagggaagggcctgctgggctcccatgctgtgtggaagccactacccggccgtcctgtacctgagggccctcgaatcgcaggccgcccaccagccccacaggccacactgagacaccacgggtccagcgcatctcctcaaacagctcccggctgtaggtgttgtcatcgtcagcaaagtagacgactccttgggtccctggtggtggtgggtccttctccccacccacagcaccccctctgccccggagccagtccagggccttgttccg

SEQ ID NO: 127510 - DNA, 1135 bp, Homo Sapiens
ggtttccccaaaggttcaattttgcgcaagccccgggggtttcccgggtcccttgggggattcccaaaaaggggtgggctttcaagaaaaggatttgttttttcccaaggtgggcccccgggggaaaccgggtggaattcaaaatttgggccattggggcttattctaaacagccaaggggcaggggccacgggcaaatcccagccatgatccacagggaaggggcctgctgggctccccatgctgtgtggaagcccactacccggccgtcctgtacctgagggccctcgaatcgcaggccgcccaccagccccacaggccacactgagacaccacgggtccagcgcatctcctcaaacagctcccggctgtaggtgttgtcatcgtcagcaaagtagacgactccttgggtccctggtggtggtgggtccttctccccacccacagcaccccctctgccccggagccagtccagggccttgttccgctgctcgacaccacggggatgaacccagccaggctcgccctcccgaagccgctgggctttgggcgtgaggaccaccaggtgtgtgaagaggaggccagaggcagccagcagccctgagaccagcggggtgggaccctcagcatcctccaccagcagccaatgcagccggggcaccaggctcagtgtctgggacagtcgtaccagctctgccttctgtaccagcctggcataggtgggggtaacaacatagatagtaggcagggcctcgggttcagggggctgggcaggggcagggggtggccgtcggagttccgcttgcagctgggaaatcctcagatccttctgccgtagctgctcggctgctgcccgcaggggaggaaggcagtcacatggctggccgagctgtaccagcgcgtagaggaggccggcgatcgacaccaggaagtaggcgagaaacacgttcttcagcttcagcttcatggccgcgccgccgcccgcgcccgagcaggcggggtctgcaggggacgaggggttcccgccccaaaccccggctcctgtccgcaggccccgcccctgcagcggctccgccctgcgtcccgccttcctcgcactcccctaccagctcccagctggggctggcagcgccga

SEQ ID NO: 127511 - DNA, 726 bp, Homo Sapiens
  misc_feature (700)..(700): n is a, c, g, or t
ccaaagaactgggtgacctttttcttcaaattttcatctggcttatttgagggtcatttggtagtgaaccatgtgatcataaaaaaattgttttcaatttagaacatatttgcaaagtattttccaggtgtgacaaaacaaaatccagattaaaacggttctcttccatttcatcttcagcacttgttttcattttcatcattgaaactggttatcaggcaatcaaaaataacagaaaatgtaagtattccaaagtgttaataattcatttaaagatactgctctctaatgtttaagtatgagaacattattttaaaaaggatgctcaccactgtcagtaaataactgaatccttttcaaaatgtggaaatagccaccagatctcattattgtgtaattcatgtacagtaagtcatcttattaatctaccatgcaaggtgagtttactaaagctatttacaaattactgtaacaaaattgcagaaacctagactctgctttagtctggagtgtcagtgatatttcatgctacagagcatagctctctaaaactccttatgcaatttagaatttagtgcagcaatcttcccgactcttaaacttcaaaaccgcatagttatatgtagtagccatcatgtagatcagcagggcaatgacggtggcaccagctcctgcacaggccacaatgaacaggtgatangacatgtagaactcgtttgtgttgca

SEQ ID NO: 127512 - DNA, 1177 bp, Homo Sapiens
acatttaaaattttaatgccaaacaattatactacaagttgaattcccattctcttttttctgccgtggaaactgcctgtttcactaaactctgctgcacacagaaaccctacacaaagtcctggcctgtggactgtgctggtgtggacaggcaccacgttttggagccaggcctgggcgaagcactgagcatggggcctcacgtggcctcacgcagcctgtgtctgggctggagcccaggagaaacctgcccttcagatccggatgacggggcagcccataggagtgagcccgggaggatgctggagagccatggagggagctctgggcaggacccactgctcagggacaaggccagaggcgccgagggagctgctaccttcagggcctcatccaagttcccgctggctgcgtggagtacctgctgggccgcgtgcgtggagtagcccatccctttcagaaacctgatgttctcgaggcggcgtcttttcttctctttttcctccttccttatttgggccagttcctttaggaaaacagcaaagtcccatcccaagtgtagggactgagatttcacagcctctcagtctgcgctctgcaggattctccgcatttccaggcaaagccaaaaaaccaaagcaaagcacagggggccctctttctacctctcctcacccagccaaatggcagaggtgccacagaggcagaggggtggtggaagtgctgcttctgaggcaggcagtggaagtgagatgcccgtggggcaggaaggaggtgcctcgccagccccgccatccaccatccggcatcaggatgggctgctcgccaacccagcactcccactgcagaggtcgcgggtgtgaggtgcatggattctcttctaggaaccaggtaggaaccgggtaggagagcttctgcacgcggtgggaaggccttccagccttcgatgaatcgcccagggattcaagttaaaatgtgatgtggaatcaggggctcctgggcaatgccaaagctggtgacccgccccccacagcctggggagcaaggactccagggccttctgaggcctgtcattccattcggaacccacagagtgcccagagacaaaggtcatctaacctcttggttctcaaccctgtttctcacagttgcctgctattgctgcaggagcgcacga

SEQ ID NO: 127513 - DNA, 1316 bp, Homo Sapiens
  misc_feature (55)..(56): n is a, c, g, or t
  misc_feature (126)..(126): n is a, c, g, or t
  misc_feature (172)..(172): n is a, c, g, or t
  misc_feature (251)..(251): n is a, c, g, or t
ccacctggaggagaaaccagtcggggccccccttccaagggccggttccccctgnnccccttccccaaggcccccgttttctacagggacccccggtccttcccgtttccggggtaaacccccaanctggggaaggggttaagggacgcagacctgggaggccagatgaaangtcctgcgccaggccagaggaagcttcttccccgagaccatgcatgaaggcccctgggacccttcctggacttgtcccntgcccaccccttcgtacacccaaagaggacttgtaattcagataaaaaagtaagaacagaaagagctgcattacccttttcataatgatagcatttataagcagaaaattagcgctatttctgttcattatttagtttttctttgttgctgacttcctattttctacataggataggtactctgcaataataatttcttcatcttccagagttgagtcaagatagtcttcctcatgctctggaatgtcttccagtatctcattgacggcctctgtctccatgtcttcgtctgttgaggcactagaggttcctgcggagtcagaaggggacgtggctggcggggacaaagagtcttctggcgacagcggcagctcgggaggcaggcttcctccgttgtgagcaagggtctgggcggccagctggacgttgcctctgaacactctcagcgcagcttcggccacgagtgcatcaaaacccatgtacaccaatcggtcaatgttttcctgggaaggactttcttgacggttgtcggtttcaggattggaatcatttaaccaccacatctgaggattgctgagcagaatctgctgggccgcgtgcgtggagtagcccatccctttcagaaacctgatgttctcgaggcggcgtcttttcttctctttttcctccttccttatttgggccagttcctctctgcggttggtaatatgagtgggcgcatgattcacgttcctatcacacgcccttcatgccaagccgggcttcctggggagtgaaacccatctggaacaatttggcactttttgatggatcacctcgtgccgaattcttggctcgagggcaaagtccctatagtgagtcggattaaattcgtatcatgtccagctgtttctttgtggaattgtatccgtcacattccacatatagagcggagcataaggttagctgggggctaaggtgaggaatacatattcttggccacgccgttcagtcggaacgggggcagtcttatgaccggaagggggaaagggttgcgatgggtctcgttctgtatgattgagcggg

SEQ ID NO: 127514 - DNA, 1178 bp, Homo Sapiens
  misc_feature (566)..(619): n is a, c, g, or t
tttgattcagaattacttttattattattagtggcagagactagctagtggcccttaaacagctttgcccttcctgggtgtacagctaaactaagtttcctggcctttcatgtgactggggtcatgtgactgtttccagccagtgaggtgtgagaagaagagaggaagcccatttccaggccagatccctcaaatggcccattgagggtcattgctgccctttttcttcccttgctgactggcagtttgtagaacaggggatccatctaagtaccctaagagaaggtagagctacagactggaagagtctgaacctctgactcatcccatggatggctgcccatttgagctgagttaggagagagaaatcatttaatgtggtaagccagtaagatttaagagctgtttaacatactattttgttatgttatgagtagcattcagattgcagatccagcttctgaataagctcaagaactttaacttctatccctatggcctatgcccaggggaagatgggacttaaagggtgtttgtagaaatcatggtagaaaaacttacatacnnnnnnnnnnnnnnnnnnnnnnnnnnnnnnnnnnnnnnnnnnnnnnnnnnnnnnctgcaaggttgtggtttcctgagcaggatggattgggcagacaaaatcagcaatgcccctgctcctgagagaggcctcgccatccctgttccataagtcttgagtctgcactggttctctgagtcatattggatccctgatcatctgcagcctggtgtcctaagagcaagccacatagctggggggcagaggctcagcggctgggataagggtgttctcataagggttggagtaggggccatcggataagcccccttgggctccctgggagtcccctgagctgtagtcagttgagatgccagagtcagataccacaaggtacaggtactttaggtggggtggggtagggggcagctcagggcacagtgtccatggacgcaagagctgggagctggggtccaggatagtgtactcaaagctggcagcagaggctccctctgggctgggcttcgaggccaaagcagatgagcaggaggatgcttctgagccttcatccatggccactatgtccacactgccaccaggccctgggaggtcctcactgggcgggttccggggc

SEQ ID NO: 127515 - DNA, 909 bp, Homo Sapiens
ggggatgtcattatcttaggggattttggccaagggccagacagcaatgactatgatatcctgaggaaagaaaagttccaccacctgatccccgcgcacaccttcaccaacatcagcaccaagaaccctcaaggctcgaagtctctggacaacatctggatcagtaaaagcttaaagaaggttttcacaggtcactgggctgtggtgagagaaggcctcacgaacccttggattccggataactggtcttggggcggggtggcttctgaacactgcccagtgctagccgagttctacactgaaaaggactggagcaagaaggacgcccctcggaacggcagcggggtggccttggagcgaagtgaagccaacatcaagcacgagcgatgatgacaccaaatccatgtgtccaccccgggacccaggagggcacagccaaggaatgagccctgtggggtgacgcttcagggcagagctgccttttaatttttattctcagagcatcagcacttgaggccttgccccacgccttctctgtggaccattcaggacctccagtgggggtggcgtgccaggcgcgtaccccaccaggtgggcaaagcagaaacctgcggggagcggagacgccttttatctctggatgccacagacctgagcagcattgggctggctgtccgctgctgactggatggcagcacaaggacaatatgagcagagggaggagaagaaggggtgctcaggctgcgggccacagtccagcagcgccagaagcactcatttttgaccaccaggctatgacgttcctgctgggcattacagaaagcttttaactgtgatcaggcagtctgctcagatacattgagtggcgatttttagttttgttttgaaaaaataaacagattaacctgc

SEQ ID NO: 127516 - DNA, 2126 bp, Homo Sapiens
  misc_feature (768)..(778): n is a, c, g, or t
tttcattttgtatttaaaaaaatttatttgtgatctgtacatgtgataaagtggggtagacctttaaagccaacaaaacaaaaatccaaagtaaaaatgtataaatacaatatatattttcttacaaaaatgggagatttacaaaatatacatactgtacttatctctattttacaaatttcacatgcacttaaaagatacagcacaaaagatgccaaaacctgtgttggagttttaaaaatctgacagatgagatagttttgaaggttgaagaaacacaagatcgattttaatgtaaaaagcagttccactcaagtgaacattacatatataaagtaacttgtacactttacagtaccctctatgattggcatttaaaaactgttctgagaaacaggatagtgttgcaagattggagggtagtgtcaaaggtgggataaaggttagctcccatgattctctgctaagctttaccccatcatgcaaaagaatccgagttctattacagaaaaaaagtacatgatttaagattaataaatttaagtcttccagcacatttcaaagaactccagaatcactttgaagtttaccttcttttaatgactttctttaaagatggggcccatggttcaaaccttcctcttcgttcactatggtatctgctgatcgcctcccaacccaaccacacagagacagggtcagcatatggatgatgtttaataaacagattgatggaaccaagaaaacaggacaaaatggctctttgcnnnnnnnnnnnaattaactttcctttattatgaggctgaagacattatgtttttttacctcaaaggatccaaatgggagaaaaaaatagaaaagaaacctaaatataggcttatagcaagaaaaagtaaatgaagggagagatttccctgaatattttaacatagtctgttggatcatgtgttccgaattaaatttatttaaaacagacaacaaaacctcttacatttcctttagcgaagtcagaacctctggcttaacggtgtgtgacagcacactgctcttcacttttccttaaaaaggaatgtttatctcaaccaaattaacaaccaacgggaaacctcagatttgcgctgctttgcctataaaagttgctttcgtcacagttatgcctttccacagggagacacttttgtttcctcttttgtctcttacaacaaagacaaggggaaaaatgcatttcctgttttgaaaagcaacaagtcatcatttcttttgcagggtattagaccaaataaaacacccgtctttctgcctcctgccttccccagaaaatgaaaaagtagcaaaaatacctactccacgtctccttggccttatctcaaaatgttatcatcatttcttttgcatcctcacattaggattctagcaggcaggcctcccaagacttccaaatgcttattttacaagacctgaaagcagtacgggaggaaaaacaggcgggagggggcaggggaggagagaccgtaatgtctgaccctggaaattaacccatctgggctccagtttggccccagtgaaaagagattatggtttgaccactgcttgacaagcacaccgcaggaggccctccctctttccaacaaagcagccaccgcagacagggctgtacctttcccggggcctcacaggggtctggacaggccactcgccctgcagcagggggatcgctcacagtccccgttcagcctcggagccgggagaaactcacagcagtctctgctggtctcaaccttctattaggcacaagctggcccgtacctttgacgattcacatcgccgttatcatcatcttcctgcaagtctttgcctgaaatcttttcatccaaaccgctttccacccaggtcttcttttccaaatcacccctcgccccaaatctgcaaagaacttctcacttccaggtcacttctcagtagagggggagaaagttacagaaacaggcccccacccagcagttcttttccctaccgtgcctctcctcttgcaagagggctggggtgggaaaggtggggaggggccggggctcataccgcagtctcccccttgctgctgatcccgggaattccggaccggtaccagc

SEQ ID NO: 127517 - DNA, 611 bp, Homo Sapiens
ctgcaccttttgaaatgagcatggcggcgccctctgggtcctcgtgtcgtcctgtctctggtgctgcatccagcacggtggcgaacagcagaactaatcttttgcaagttatcacagtggagtggagttccgctctgtttgcttttgccccgctctggcttaccagaggtcccctggccttggccacagcatacctagcctagtgcttggcacctcaggcacacaataaatatttttgaaatggatcttctctggtatgtcttgagtgtactagtcttctgttttttcctcttcatcctgcagccagcttcctcccatgggtcttgttttaatgatggtatgtgaaaagctccttagctgcttgcaaaagatgagacatcaggcttgaagggttgggatttcctgtgaacatctgtactttcggcttcacgccctttcccccatctcatgactcaggctttgtaggagtcagggcactgattttcatagctcttggagttgatactttgttaggtgagtggtgggggataggaagacagttccactaaggggatgtctctggctcagcatattaaaaaattggggaattggtgcttctaattgtggttggt

SEQ ID NO: 127518 - DNA, 908 bp, Homo Sapiens
gagcctcccgggccgcataccggggagaccgccgaggccgccagagcagggccgcctggtccaaccggcgtcgccagagatcctgcggggccttctgggccgagcaggcggcctatctcgggcagggctggacgctgggacccggagctgccgccgtctctgtcaaagccaggataccccatcgtgggaagaagcgaccgacgcgcgagtcgcgctccgcagtgcgagccgggaggaacccaggctgctgccctgcccagcccgaccctgccccggccccgcgtgtccaccgtgcgcaattggtactggcttttgcgatacttaggaaccctgggatacggttcgtatatgatgccagtgtgataatgcttttgcacggtttatagagcatagacagagcagttactcttgcagattgcaatatctgtgtttgactaggaataatagtatttttttggaacatttacaaaattatattttttaagaaaacaatcaaaacaagcattgggggattggggcaaggatggaaggagcagtggggcagtttccagagctcaggcgagccatggggtttgctgtggggtctgccctggccaccacactgtgtgtttgggtccttgaggtttgtacgtttcatctttgatgaccaggaagaaatcccagcaccccagccacaggctgtggctgctcccagcagaggtggggccggcagagaaggggcctcctccacccagagtcctggccttggcccgctgtcaccttcaaagctgactgtgccccgctgcgggaggggacggcaccccagtggtggcagagcttgggggcctgggcaggggcccgcttggcgggccgggcaacacgtcaacattcttttttgttcttggcattaattattgctgtcttttttt

SEQ ID NO: 127519 - DNA, 1067 bp, Homo Sapiens
  misc_feature (54)..(73): n is a, c, g, or t
  misc_feature (908)..(908): n is a, c, g, or t
  misc_feature (960)..(960): n is a, c, g, or t
  misc_feature (1024)..(1024): n is a, c, g, or t
agctaaaattaaccctcaactaaagggaataagcttgcggccgcctgctcaggnnnnnnnnnnnnnnnnnnnnaataatctagaatttattttttctagaagagacttagacaaatccaatatccatcaaggtaacacgagtctatctctgagatggaaagtgtcttcctctccctgaatagagactttaaggatcactagtgaatctgggaataactggagagatactcccaattcatctagaatgactactaacaatggcactatatttcctttgagttctgcagtttagggcatagttagaaaagatttaagatgtcctttcccaacattctttccaatccattagcgtagaataactccagttcctggatgttccagtattgtagtttcaaaaaatggtagaagtactggcaggaaaagtcagggtggattccagtgaatttaagcccctgctatagaatctcttctgtgagcataataatggtgtctgggtatctgcatcacgccgagcctcctgctttagttggtggaatttgtgctgcgtccagccatatactccacagttgagtagaccctgagatgttgccgttagagcctggagaacataaagggccatgtgaagcttggtgtcctgtggcttagtcagctttatgatcattagaatgacagctgggccccagcagcaaaagaaggccactgggtagaagcgcacccgttggtccacaatgtgaatcactgcccactgttcactccccagaaagccagttgacttcacaaacttcttatacaatgtctgggctcggataagtaagaccattatggtaaggaggctgagtacaaagctgcccaggaaatggcgatacataaaataaatgtgctaagacaatgtgttggcagaggtgganttcagcatggtgatgtggtgatgatcaaataactgtggtctgatgagttggnacatcactatattccagaagataagggtcacatctcgtgcgatcttgctcgaggcaaatctaangatcgataatcgtacagtaactgtctggtgatgtatcgcaatc

SEQ ID NO: 127520 - DNA, 617 bp, Homo Sapiens
  misc_feature (557)..(557): n is a, c, g, or t
tttttataatttaaaaaagaaaattattttattatttggaaaattaaatcaaagcatatgttctatgtttcagagtgtcatcctaactatgtaaaggatatatttggcacatatgagttttctggccataggggattgatgaagcctatactagttgtagagtgagcataattttcacctaataaatacaagctcttttctctctcttatcatttgatttggggaagtgcaaaagtctgaggcagtaattatattgtcaagatctcctagctactttcttagttctaggaccacaagaagtgcctctctgccccatctttcccaggtcctgggaatactgggcccatccccttcatttcctcatctctccacaaaggaaggtagggtggtaccataccataatggtaaggaggctgagtacaaagctgcccaggaaaatggcgataccataaaaataaagtgtgctacagacagatgtgttggcagaaggtggaagttcagccatggctgatggtggtgagtgcatcaagatacacttgtggctctgactgaagttntggaaacattcactagtatttcccagacagaatacaggtgtcatcaatagcagaggtatc

SEQ ID NO: 127521 - DNA, 807 bp, Homo Sapiens
  misc_feature (759)..(759): n is a, c, g, or t
cggtagagatgtttagttcaatatgattttatttaaaaatgtgtacagctgaaggagggatctgatcttttgttaaatgaaaccaattttcacggtatatatttggccattttagcttcgtagtgaataataacagaaaaggaagtttctgttcaagatcctcactccagcacactcagccaggtgcctggcaagatgacacatttcctggtctgaagctcacagccaatcctctcactgaagtgaaacaccaattctccaggcatacacacacatacgcacatcttattttcactgctctacacagggacctgagaatccttaattttaaagttgggaaaaacgtgaaaggattccttaactcattgtctgcgacaaatccaactacctgttaactcttaacaattgcaagtataaaatacttgaaatttacaagatgctccatttaatggaacaactcaaatgctaaaaaattaggtcaaataacatgctttaatatttttaaatgttacttaaaacttattgagacaagatacgcagcacattcttggtattataaactcctactgacgactgctacttgatggccaaaaacatttaaagaaagagaagaaaccatactggtatacaacaatatctgcagggaatgtcatgttttacattttgttaactgaaattaaacctgacaaaaaaaccaaagatctacaaaaccgacacccatgtcattttaaatgatgaggtagattgtttcctatgcangtaaagtgaagataacaaaaaaatccatacaacttccaaatcctcttt

SEQ ID NO: 127522 - DNA, 649 bp, Homo Sapiens
tttttaaacatccatattcagtttatttttaaacagaggggcacgtacccacagagaagcaggactgagaaccatcatgggggcttgcttgaagtgatctgccccagccttctgacttcagagtgtctcatgatccaatggccatggggacggagctgccccttgataggatgcacttaagcatggtcaattcccccttcccccaaaggaaatggagaaaaggagccaagaagtcaatgaatccctggaatattgtcccagaatccttccagggatggtatacgactggccaccagtccacaaatgtgactggtaagggatctagtaacagaggatggagttgggcagaatattatcctggatgatatgcacccagcactagaatacacctttcattagaatgaagagaacagacaaagccctcagaaaagatacaaaggcagagacattgattagaacattatctcataacagaggtggggccattacccaccattattgtaaaataactgtaactaaccaaaacacatacaggcttctttaatggagttaataaaactatggcacattgggaatcaggggcagaggtactgttcccagacggaaaactgggataaagggagccatgctgacagggccttattccatt

SEQ ID NO: 127523 - DNA, 681 bp, Homo Sapiens
  misc_feature (231)..(290): n is a, c, g, or t
  misc_feature (298)..(470): n is a, c, g, or t
tttaacatgtataagcatatcattttattttcatttaagccaactatgctgtaagctatttagacaagatgattcacattttatacttaaatacaaatttcagaacataaagtatattttctgtttttcaaatccatattttatctgaaatacatttcctgcaacaaaacattattagaagagttaaattatttatttaaaaaaaattttttagagacagggtctcattcnnnnnnnnnnnnnnnnnnnnnnnnnnnnnnnnnnnnnnnnnnnnnnnnnnnnnnnnnnnngctcaagnnnnnnnnnnnnnnnnnnnnnnnnnnnnnnnnnnnnnnnnnnnnnnnnnnnnnnnnnnnnnnnnnnnnnnnnnnnnnnnnnnnnnnnnnnnnnnnnnnnnnnnnnnnnnnnnnnnnnnnnnnnnnnnnnnnnnnnnnnnnnnnnnnnnnnnnnnnnnnnnnnnnnnnnnnnnnacgagctaccgtatctggccaaaattattttttaatggttgtagtggagcaaattttcctcattatgtacctacagggaattagcacactcttaacggttcttgaatacaacaaagaatgtggtattgatgagtacacactatatataaattcagccaaacatccacatccaaacatccaagctgtaagactgacttttaacttaaaattt

SEQ ID NO: 127524 - DNA, 1181 bp, Homo Sapiens
  misc_feature (218)..(277): n is a, c, g, or t
  misc_feature (285)..(457): n is a, c, g, or t
agcaaatcattttattttcatttaagccaactatgctgtaagctatttagacaagatgattcacattttatacttaaatacaaatttcagaacataaagtatattttctgtttttcaaatccatattttatctgaaatacatttcctgcaacaaaacattattagaagagttaaattatttatttaaaaaaaattttttagagacagggtctcattcnnnnnnnnnnnnnnnnnnnnnnnnnnnnnnnnnnnnnnnnnnnnnnnnnnnnnnnnnnnngctcaagnnnnnnnnnnnnnnnnnnnnnnnnnnnnnnnnnnnnnnnnnnnnnnnnnnnnnnnnnnnnnnnnnnnnnnnnnnnnnnnnnnnnnnnnnnnnnnnnnnnnnnnnnnnnnnnnnnnnnnnnnnnnnnnnnnnnnnnnnnnnnnnnnnnnnnnnnnnnnnnnnnnnnnnnnnnnnacgagctaccgtatctggccaaaattattttttaatggttgtagtggagcaaattttcctcattatgtacctacagggaattagcacactcttaacggttcttgaatacaacaaagaatgtggtattgatgagtacacactatatataaattcagccaaacatccacatccaaacatccaagctgtaagactgacttttaacttaaaattttgaaaataaatttaaaaatgccctccaaactactggtaacacactcctttatggttttacgcagcaggttccaggaattacagttttctgtgcttccttaaatctttctcttggggtagccatcaatcatcttctttctcaatataggtctttgcattaacccgcgccatctgcctggccaagtacctgtctctagctgacattacagtttcttcattgttccgctttgcaaacttgctcactgcctcaggtggtctctcttgttctttacccttctcttgcccttcctctgtgagtctgtgttttgctcccagtgatgattcagaattagagggtttctcttggtttctttctttgtcctttgccatgtttctcattttgttggatctttcttggtcaagaaatttatcctttgccctagaatttgggctgctttcctttctgtcttgatttctttctgaagactgaacacctacctctcgtttttctctatctctgtatttatcattattt

SEQ ID NO: 127525 - DNA, 1330 bp, Homo Sapiens
  misc_feature (52)..(77): n is a, c, g, or t
  misc_feature (1220)..(1254): n is a, c, g, or t
aagaacttcgtttcagtttatttttgtcctcagttcagtatcctctgaaacnnnnnnnnnnnnnnnnnnnnnnnnnnaaatcccaaagcacaggcctccagtgtggggaaggacagtttctctgtgtgccttgtggagtctctgggacagatggacagggtttgctcagggtccagatggcagggttgtgggtacaggaaatgactggggccatgatcctgggggcctcttactccagtgcccacccctgctcccattcatgccatggcccctcccggaggcagcgggggaggaggtacctgaggctgaacagccctgcgggtcgccccaccaagctcaggaggatggccagctgcttctggcccaggcagcactgggtcagcctggagacagaggtcagtcactgaggtggctctggcagggtgcccccacccctctgctgtcctcacgggctgggtgggtcactcacgtgagctccgtcagctgcagggacttgctcaagccggtggccaagcctggacacgtgctctggccgggaagctgcgactcactttagccttgagtgtccttcccaggcctggtcctctctggagaagtgaatccggaagctctgctcagagcccaggcttgcagagagaagggcctggggaagcacggtgcccagacatgccagcttcctaggcacctatggcacccacaagggcacagagagggaagcggggctgcacccacaaggacaagggaggatggaggcctcagaaccagaggagacccccgaactcattctgtgagcatggcaatacctggccttcccaccccatggcctccatggtccccatggcacccgggcatcaggggatagaaattatgatcccatgcccaggaaaccctgagattcagagaaaggcagaggttgctccaagccacccagatggaaggccacaaagtgtgggtgccttgcttctcccatcatcagccaggggcacctgttggccagcagaaaggggcttttcggggaccaacatccccttacttcactgaggcctcccggacacgtgggcaggagggcagtgtctccagcaggtacagggcactttcctgagaaatgctgttgtgactcagactagaagggaaatggagatgagaatgggagtgagggcaggacctcccccggccgtaatggccgaattcccgggcatatgtccggtaccgtcgactgnnnnnnnnnnnnnnnnnnnnnnnnnnnnnnnnnnncgccgcttcctcgctcactaactcgctgcgctcgtcgttcgctctgcaagtgagggccctatagtgatctatcatg

SEQ ID NO: 127526 - DNA, 905 bp, Homo Sapiens
  misc_feature (812)..(812): n is a, c, g, or t
tttttaagcactaataagtgtttattaatattaggaagtgattgataaactcttggaagtaaatgtgctcactgaaaaaatagtgaataagaaggtaaaggacaatgtctttggggaatctcacaattaagggtcaggaaatcaggaataactaatataagagccagaaggaccagccctgagaggtaggaaaaacagaaagtaacccccagaatcgttatactcaggcactggtcaaaatactgactactgaggtctgagaaacagtcactggagagagggatttcctactcccatccagttcatgggtactccatacttgatgttttcttttcttatgtccagtaagatttgagctcactcttaaagcttttccacattcctcacattcataaggtttctccccagtatgaactcgcttatgtccaatcagagctgagccctgacggaaggacgtgccacactcactgcaggtgtatggcttctcaccagtgtggattcttttgtgctgcctcaggactgaactatgatggaaggccattccacatacctcacatttgtgaggcttctctccagtgtgaattcttcgatgattggtcaagtttgacttcccactgaaagctttcccacactctaaacatttgtaaggtttctctccagtgtggattctctgatggatggtaaggcagtgcttatcttggaaggttttcccacaatccctgcattgatagggcttctcccctgtatgctctcgttcatgagccctgcgcttacagttatgacgaaaggctttcccacactcctcacacctngtacgtttctcttcagtgtggatccttctgtgtttggtgagttctgccttgatgctgaagtcttttccacactggggacacccatagtgtttc

SEQ ID NO: 127527 - DNA, 795 bp, Homo Sapiens
ttttttagggtaatcgttgaagattaccaaaggtttatttggaatgacacagcactgaaaacataattgttacagatgatttgtggatacagcatacaccatctattttactttagaacaatctgtgaagatgagttgcataaatagaaagaggtggaaatatagaggagctgtttttatagtgttcttttgggggtagatgaatatgccccatctttctacccaatctcataaaggcagaagagaagactgcttagctgcccatcccaactagcctacctccagccacagcggctggacagctagataaatcaggccctgccttctctgagggtgcctcagtgtagtcgtgctatctgtcatctcatcctgaaaactgcacagtacaaacacagatactgttgactcttttggcaatgggatggctggttttgccattaggcaaaactgcaattgtaatgccagacagaataagagcaatgcatgtatcaatgacaattgagaggcaaagagctacaatggaaaggaaagaagcaactatgtatatgtagccttctgcatacacatagatccaggagtcatgggaactagcttgcgtgactgtgtgtccatatatatatagatgtgttggaaaagaacattgagaacttttgcagcagtttagttttaacatagtaaacctgaaagggagcgagagcacgtgctcacacctgggcaggggaataagataatcttgtactacaggataattcatcacatcttctgcagggcagccactcaatacgatacacctga

SEQ ID NO: 127528 - DNA, 973 bp, Homo Sapiens
  misc_feature (176)..(205): n is a, c, g, or t
tttttgatggactttaagatgagctttaatttgtttgttttccttaagtgcatttatcgatgtaaacagagcatgttagagattcccggggagagcagactattgctgatatgttggttttaattcaaaagaaacgatgatgccaatggtttggattgacagcagcttaaggaggnnnnnnnnnnnnnnnnnnnnnnnnnnnnnnggctggtgacacccccctggcgtggttgacctggtcccagtcgcagtccctatgggacagcagagctgtcaaaacagaacccaatgatgacggctgaaaatcaagccagactgctgtgcggtcagcttgccgccgtggaatgccttgtgtcttggccatgtccagccaagggtacaacgtgcttgttcccgatcacccaggtttgccattggaagtcaaagacagaatcgcttcatggcactacagatgtggaaaaataaaaatctcagctagaaagaacgtccgatttggagatagcgggaggacacgaaggagtgggggccattttggtgctgagaggagggtgccccaacttcaggaggaccatgtgacggctgtggttgttttcggggtcacttgcagcacacacagcgtccccttgatgctcgatggggaccgcagacgggcctgcagacctaacccctggctgtggacaggagaggctgctccaggcttctttccttctcaatgctttacacaggatttccttcatttgtgctttcctttggtttaacagttaaaaaagaagagtaagggggcaaaatggtttgtcacttgtccaaaactgagagaagaggtggaagtgggcgccaaatctcctgggtgatgcttcctggtcctggcgatcggttgccttgctcagggtttgggagctgttgctcctggaaccaccgctggccttctgggacctcgcttccgtgtttgggaacagtaagcatctgctaatca

SEQ ID NO: 127529 - DNA, 538 bp, Homo Sapiens
  misc_feature (246)..(281): n is a, c, g, or t
cccttccacacaggcactattataattttcagtgccatgttaaattggattatttcatttactttaagttaggaattactgtgtaatttattaattcatgattctcataacattcagcataagtgtagcaaagttgctaataacggaaggggatcatagtggtgttgaatgtaactttgaagtagggaatggccttttaagtctgagagagaacatttgaatccttttcagggatttgtgtagggnnnnnnnnnnnnnnnnnnnnnnnnnnnnnnnnnnnnagataagtgtatatacataaatacactcttctaaagttgtatatacatatgcacattacatacattttaatttattgacaaaattaaccaaattaagatttggagatgtgggatgttcttgttttaaaatagcatgtttgaaaccatcagtttgtgtctaaaattagctgtagcacatggatgttgtccatattaagctatttgctgtttgaattatagaggtctacagtatttgtgttggcatagtttttgtaaag

SEQ ID NO: 127530 - DNA, 843 bp, Homo Sapiens
  misc_feature (729)..(729): n is a, c, g, or t
  misc_feature (777)..(777): n is a, c, g, or t
tagcaaaccaacattcctttaatatctctatatcatagtgacacaaatgaggaattactttacatattgccagtttatttctttgaaccagtttaacaatatcaacataattgattactaaactgacatgatatgtactcaatggagacttttctttccattctcctgtttagtgcagaggaggttctttggtgccttcctaacaacagctcatctatggaagttatactttttataccattcaaactcagtgctaaggatttaaaataaatgctgccagctgaagacacatttttctcctcctttccttcctcccttccttccatcattctcctgtatgtaaactcacggtacctagttggttaaggatgagtgttgctataaagataacacagcacgaaagagcctatctttgtttccaaagtgatgaaagtattctagggagatttccagttaatgacttctcatttgggagataatcagtactttctctttaaaaatgtattttcatgtaactcactggaaataatgggttcttatttcgggcaagaaatgtattgtcaatttttgcctggacatcactttcagacccgtgaaatgaagcccaggccgaggctggctggaatctggatggtttctagtgcgagggaagatgggttgaaaggaaaggtgacaggaaagatgtgtttagcatccatgagcagctggggagagtctttcctgtctcgntaacgcatctgtatagtacgaatgaacgacacagagatctttcttcanactcattaactggagtatacaatttcacactttcacaatctgggcagtagttaaagcattgcacat

SEQ ID NO: 127531 - DNA, 717 bp, Homo Sapiens
gcaggaacagtggtttattgaccaggcaggcctccccagcccggccactgctccccaaggggctcgggctgtgtgggctggccttggcagaaggtggacaatcctctaggtccaaggacatgggggtcacagaggtgggggccttgggcccacacattcgaggagagttcccaaaagtttccagtggctgtcccaggcaggtatcaggttcggcccacacctgagtgcccatactctgggcagggctgggaggcacctgacctcacctccagcagctctgcaagtgtggggtgaaaaaaggtgaatctgtgtgaggatggggttggctgcagctgtggtgatggcctgggcgggggcggggggtgctggaggctgagggtgtgctggcgggtgctaggcagggcgatggaagaggttgccagttcggagccgcctcaagagctccagccacagcaactgccgctcccgatgggtgcccttcatgaggctgctgttctccagggcacggcgggacaagtagggcagcacctccatcacggggccatagggcacgtacttgtacacggggtagccggcctggcccagcgggaagctgatctggtcacacatgcctagcagctgtccaaagtacacctggtggtcagcaggatgcaggcccagctcctccatcctgcgcagtgcgaagcgcatgtgtctcattgtgggaggcacatcact

SEQ ID NO: 127532 - DNA, 946 bp, Homo Sapiens
  misc_feature (447)..(447): n is a, c, g, or t
gggatgagacttctctgaccctgtctgagccactccctctttgttgcccagagctgaccctgtgtgagggcaaagggctctcagctgcaggaacagtggtttattgaccaggcaggcctccccagcccggccactgctccccaaggggctcgggctgtgtgggctggccttggcagaaggtggacaatcctctaggtccaaggacatgggggtcacagaggtgggggccttgggcccacacattcgaggagagttcccaaaagtttccagtggctgtcccaggcaggtatcaggttcggcccacacctgagtgcccatactctgggcagggctgggaggcacctgacctcacctccagcagctctgcaagtgtggggtgaaaaaaggtgaatctgtgtgaggatggggttggctgcagctgtggcgatggaagagggttgccagttncggagccgccctcaagagctccagccacagcaactgccgctcccgatgggtgcccttcatgaggctgctgttctccagggcacggcgggacaagtagggcagcacctccatcacggggccatagggcacgtacttgtacacggggtagccggcctggcccagcgggaagctgatctggtcacacatgcctagcagctgtccaaagtacacctggtggtcagcaggatgcaggcccagctcctccatcctgcgcagtgcgaagcgcactgtgtcctcattgtgggaggccaccatcaccttggccttggcgttgtgcttcagctcctccaacacgtagtccaggcacctgtggtacatggcgttggtggcctcgtacgtggggttgatggggtcctcatagccgatctctgccgcacgggctcgctcctgggccaggtatgcgccccgcaccagcttggccccaaaacaccagccctcacggcgagccagctccacgtcc

SEQ ID NO: 127533 - DNA, 847 bp, Homo Sapiens
  misc_feature (176)..(178): n is a, c, g, or t
tttgcagtcagacagctcttttattgactttgtctgcttggtgcgggggttgggggggtgtcgaggctctagaagcggccatgcccacagaagtggtacacagaagcaggcacagccagctccgagggccttgaggctgcctgggccatacagcacactcgcgcgtgcgcgcgcgnnnccccacacacacagtcaccttcctccaccctgggagccagcccccaggaggagtcttttcctctaaccaccctggggtcctctgacatgcctagtcctgctacttgcccagacctgatgccagcaggcctgggcgctgctctcttgctacctggcctggggcaagggaggatgacaaggcctctggggtgatgagagtgcctggcagacagctgtgcccccagcaccggcccaaggccaagctcgcatccaagcagcagccgggctgccataacgccaccacacctaccaagcgcagcaggtgttgggggaggccagctctgggcgcaggcccctcagccctagtgaaaatagtgacatacaaaaatatacacattttaacaccatataaattactgacacgagacacacagtgagacggtgcagggagtacggtaggaactggagaggtaataacttaggggcagggtggcggcggtgcaggctaaccctccctgaagccagcagccttagcagtgggggacatctgcccagggggtggggccgggcacagcccgttgtacctgaggactcggggacataaattagcatctcagaggctagaaaccgtccaatactgctgtgtccttcccaagggagctgaggaggggaccctgggtactagggggca

SEQ ID NO: 127534 - DNA, 1030 bp, Homo Sapiens
aaggaacttgctggagatgacattgcgctgccagctcctgccggtccaaagggtagccaagggcgcacaaggcccccgtagatggcccacgttgctggggggacagcagctcaggggaagtcacagtgatcaaaggaagccagcaggaggcacttggcagcctgcttgtacttcctggcggccagctctgccaagcctgcggcacacttgagcttggtgaggatggcctgggtctggctgtcacgctctcctcgctgctcggcaatctctggggtggactcagccttgctgacgtagctgagcacatgagaccaattctgcaagtagacgctgaccttgatgacattgaggcacatgttgatgacgtgtttggcgctggtgcagtagtcccgggcccgggaatagcacttgagggcgttgctgaggtccccacagtccaggtagtggtcgcccaggtcgtcgtggccgcgccggatgctctctttgatggagttgcccttgtagttcttcaggtctgtgtccagcttctccagcttcagcagcgccttcttccgcgtggcctccacccaggccgtgtccagggctgggggctccacgccgctctcagggatggcgtcgggtgcgttctgcagctccctggtggcctctgagagcttgcggtggatctcctcgtacatgtccacgttaaaggttctctgcacgaaggagagggccatcttcagggcctccacccgcagcgtggggcagtgatcagcaatgaactgcagccgttcgatgcgcatcaggccgctgtagctggccgcgtactgttccagatccaggctggggttctccaccacgtagttgacgtcaggtgcattctgcgggtcttcctgggggtccacgtcgatctgcatgggctccacggccccctgcaagttaaacacctgaaccggcagcggcatcttgcacccaccccgccgcggcgtgcctcgtgccgaattcgccacccaggcctcgctaccttaggaccgttagtagttactgtccg

SEQ ID NO: 127535 - DNA, 1839 bp, Homo Sapiens
tttttttaacgctgagtctgctctttaatggacaccgcccacttgtctgcacctgactgaggcgggaacaggaggggtctgggaaatggtgccactgggcctgggtgccgcacagtctgctccctggggacagaaacccacagggtcgagccctgcaggcctctccttccaggaagggccacaactagcagccgcctgcctcctcagccccagggagggcacacaggctgggtggcacccagtggccaggccccttagctgggccgcaggcagcactgagccgcctggaggtccgaggtccgtggaggtggggagggggtgcagatgtcctggaggccaaggttcacccctcacatgttggtgctcatccgggactggctgttggctggagtcagctccccctggctcccttctctgggcggggacttgacatggatctggttgcggagcacagctgcccgcagcatcatggccttggcgcggcgctggaactccttgcccatcaacagagacttctcaaaggtggtgctgcgctgatccacgtcccgggcgtataggatcttgctgtgtgagtccacacgggcactgatcagcccctccaggattagctgcgtcagctcgtcctccagggcggccaccgtggtattgaaggctgccgccatcctatgcatgtcggctgacacgtaggggctgaaatactggatgagggcacggttgcgaatctgggtgtacagggtcctgacatggggggccagatacatgtccaggagcaggttgtccttcatctcgtccagcatcttgagacatgaggcgtacttggactcgtagaatttgaagatgatgtctcggacctgtggctccagctccaagaacaacttgaaggagctgctggagatgacattgcgctgcagctcctgccggtcaaaggtagccaaggcgcacaggccaccgtagatggccacgttgctgggggacagcagctcagggaagtcacagtgatcaaaggaagccagcaggaggcacttggcagcctgcttgtacttcctggcggccagctctgccaagcctgcggcacacttgagcttggtgaggatggcctgggtctggctgtcacgctctcctcgctgctcggcaatctctggggtggactcagccttgctgacgtagctgagcacatgagaccaattctgcaagtagacgctgaccttgatgacattgaggcacatgttgatgacgtgtttggcgctggtgcagtagtcccgggcccgggaatagcacttgagggcgttgctgaggtccccacagtccaggtagtggtcgcccaggtcgtcgtggccgcgccggatgctctctttgatggagttgcccttgtagttcttcaggtctgtgtccagcttctccagcttcagcagcgccttcttccgcgtggcctccacccaggccgtgtccagggctgggggctccacgccgctctcagggatggcgtcgggtgcgttctgcagctccctggtggcctctgagagcttgcggtggatctcctcgtacatgtccacgttaaaggttctctgcacgaaggagagggccatcttcagggcctccacccgcagcgtggggcagtgatcagcaatgaactgcagccgttcgatgcgcatcaggccgctgtagctggccgcgtactgttccagatccaggctggggttctccaccacgtagttgacgtcaggtgcattctgcgggtcttcctgggggtccacgtcgatctgcatgggctccacggccccctgcaagttaaacacctgaaccggcagcggcatcttgcacccaccccgccgcggcgtg

SEQ ID NO: 127536 - DNA, 799 bp, Homo Sapiens
  misc_feature (118)..(127): n is a, c, g, or t
  misc_feature (748)..(748): n is a, c, g, or t
cagaactaatcctttaatgcatgtttaaacatttaatctagaacttgattacaaagtaatttaatgaagaaaataatctgttataattcttatagatgtttattagtttttagatttnnnnnnnnnncagggcttataattaaagcaattgactaatgatctcacagcctcaaggttgtatgcaaacctagattagaaatactttgtctctaaaaataacaaaatgaccataacattttttttcttacaagtttgaagtggtcaattatgggtaacacatacattcctaaggaaatctgaaatggtcttgaagaataagtttctttgaaatggtaagtaacacaaaaagtgtacttctttttttggaaaatgattcacaaataacccctttaaaccaacaattggtgatttatattctggtcaggattttggagtctgggcaatgccattacttagctgttttgactatgagaacttttacaaatttattctgacttctatgatctttaatctcttttctacacctgaaaaataataaagattgtaaactagatgtcctcaaagattcttccctccccagtgatacatgactatacttgggactctctaaatgccctgctgtcaacagagctatcctgaagcttactgaacacaaggtggtgctttcatatgagcttctttctagttcttttgttaattaagaacaagtttttgttttttgtccccagtttagccaaatgctcctganatagaaatgcattagtaaataagagcttcatttttaataggttttcccttt

SEQ ID NO: 127537 - DNA, 570 bp, Homo Sapiens
tttagtcagaatcagactttatttaacaatctgaaaatgtgttcttccggctttaagtcttgcaaaatgggtcgtaagtcaaagacagatttgttcactatcctctgagtgtgtgtggttatgtctctgtataggcaagtgtctgtgtctatagatacttttgctttttatagtgattaaagctccactttagttaatgtataaagtcttattctaataatgctaaaaccagaattaaatattccctgagtctaatgttctcttctccccagcctgcctccctccatccctcccgtaaggctgctcctccgcctccattaatgccaggtctttagacagcaccagcattcctactgagaacccagggatggatgctggctcttatatccctctgacctatacccctctggttgaaaagcttctctggcaaggtttggggcaggaggagtcttggtaatttctcttcaaagttgtggattttcacttgtggatacctcttcttgaggttcaagtgctgtgaggttgttgttttctggtaccatggagacttgaagctggtcttggccctac

SEQ ID NO: 127538 - DNA, 1178 bp, Homo Sapiens
  misc_feature (115)..(205): n is a, c, g, or t
  misc_feature (845)..(845): n is a, c, g, or t
  misc_feature (1035)..(1035): n is a, c, g, or t
  misc_feature (1040)..(1040): n is a, c, g, or t
  misc_feature (1045)..(1046): n is a, c, g, or t
  misc_feature (1138)..(1138): n is a, c, g, or t
  misc_feature (1144)..(1144): n is a, c, g, or t
agtgccccaccccaaagggcatttcgcaggggtttcgcttggtagacagggtaatggccccattttggccttgccgggttgggcccgcgggcccaaagggaatggtgtagaaagnnnnnnnnnnnnnnnnnnnnnnnnnnnnnnnnnnnnnnnnnnnnnnnnnnnnnnnnnnnnnnnnnnnnnnnnnnnnnnnnnnnnnnnnnnnggaaatgaacgtaaatttattgaaactggttttggggcaggggatgggtggacagctgggggttttccaaagagaactgagggaggagccagcgcccggccaggtgggagcgggtgcctggccacagaccctatctcaggcccagcttcttcttttccttctgcttcttgcggaccacgtccagattccggtccttccacatgctcttgcgaagcttgatggggcgcgagcccacatacttcccattcatctcacgcatggcgcgcacgtagtcgctggggtccttgaagctgacgaagccgtagcccttggtcttgcctgtgcgcttgtcacggatcaccttggccttaaggaaggatgggaagcggctgaaggcgcgtgccaagatgtcatcgttcacctcattgcccagatccccacagaagatccggaagtcatctgcatcccactccagcaggctggggtcctcccagctgctccctgccgctgtgcgaatgcaccgtttcaatttctctggcttccccttcttcttgtcttcacccaggggctctgggacctcaagagccatgaggcctgggggtggctctggccgagggggccggggccgaggacgcagggacaggagttcaggaatgcgcancgggggcaggaggccgcggacgacctccaacgggaggggcaggggctcaggctcgggcaatggcatggccagggccagcggcaggctgggccccatgactgcagggccagctggggcactcctgcccccacggcacagcgcgctagctcctccagccccagcgcgcgcacactgctcctcttctcttcangccancccanngctagccactctcgggtgctgcggtctccagaggggctcatgcaccatgagccacggggcctggagcgagcattgtgcacacatggtgtcangggcancaagggggccacaggctgtgagggggctaggcaa

SEQ ID NO: 127539 - DNA, 446 bp, Homo Sapiens
tgctgttataaaaaatagtggcacggcactttttattttctttaatcagaaaaataagccctgcgcttctgggatggaggccccaggtgagcaccggaggaaggggcccgggtgggtggggagcgagggggcccggaggccaaagcagatgctgcaccagaggctggtcaggacccgggagggcctgcgggggtggggtcctcatgagcaagtgcggggtgctggaggtcagcagctgcctggcctgggagccagggacacccatccccttcctgacacctgaggcggcccagctgggcaagaccaggcctgcaggaccagagcctcctgtcacgtggcgcaggggtccaggtggtcaacgctgctctctggaggatcactggttagagcctgcccagctcccctgaggtctggagacagtcaaagcccccccaaacaccccctcc

SEQ ID NO: 127540 - DNA, 1059 bp, Homo Sapiens
gatcggggtggctggtggttgttggggggccgcgctactcgctccttttccccgttcccctgcctctttgctctcgcctggcctcgtgccgtctttgtgtgccgtttgcgttctcaggtgctggcgtggccctgcgccgtggcgtgtggtctgcgtccgcttttcgtcgcttcttctgcccctgtgcgttgtggtgtccctggtgctcctctggcgccgcccctcgccgccttcggtccccatgccttcgtttctggggctttgacgtggctggtgcttcttgcccatctacttgggctgttcctgtgccgttctctgtgtggagtccatatcgggggtgccccttgattccccttcgcccattcttgctcgctagcccgctgcgcgcgttggtccaggcgtgtgcgccatggtctgggtgtgtggggtgatggtggggcctgtgtgtaggggggccggtagtggccagtaggttctgggtcccggcctgctgcccgccgcaggaacatggcttctcgagcctctgggctgtccaggtgactccgatcaccagggccaaagccaacagggcctacaaaaggagggccacccaccatgggaggaactactgtggctgcagcagctgctcgggcctccagagtctgctggacctgctggtatgtgttggtcgcgataattgggcggatcacaggagccgctgggacctgcatcgcttctactgtggggaccgtggggacagtgggcaccgcaggcacagcagttgggattccaggtactggagcccccagaacttcctgctcaaacagggccatctccgcctccatttccttcaagcgttcctcgccgcttttgcccgggatgccagcgccaggacccgggaccacgggtcctcctgcacccgggagtcccggggctggccccgccccagccatcgctgccgtcgtcgctgtcgccgctactacagtctctgcttagccgccgccgctggttctgctgtctactctccccctcctcgtgccgaatttagacacccagcctcgtacctagccgtaagtttta

SEQ ID NO: 127541 - DNA, 869 bp, Homo Sapiens
tttgctcaaaaaccccccgcagggtgtttttattaaagcctgacggcagtactataacggtcctaaggtagcgaggcctgggtgtgcgaattcggcacgaggcttcccggacgaagggggagagtagacagcagaaccagcggcggcggctaagcagagactgtagtagcggcgacagcgacgacggcagcgatggctggggcggggccagccccgggactcccgggtgcaggaggacccgtggtcccgggtcctggcgctggcatcccgggcaaaagcggcgaggaacgcttgaaggaaatggaggcggagatggccctgtttgagcaggaagttctgggggctccagtacctggaatcccaactgctgtgcctgcggtgcccactgtccccacggtccccacagtagaagcgatgcaggtcccagcggctcctgtgatccgcccaattatcgcgaccaacacataccagcaggtccagcagactctggaggcccgagcagctgctgcagccacagtagttcctcccatggtgggtggccctccttttgtaggccctgttggctttggccctggtgatcggagtcacctggacagcccagaggctcgagaagccatgttcctgcggcgggcagcaggccggcccccgccctatggcccatacggaacacctcaccaggcccatcgtgggccaccactctgactgggacccctggaccacccatgatgctgccaccaatggctcgggctccagggaacaccgctgggctccaatggctgcactgagggccccatcatggaaagagacaagaagcaccccgaagagctgggacataggcctggggtagggcctgaaagagaaggaagacg

SEQ ID NO: 127542 - DNA, 1655 bp, Homo Sapiens
  misc_feature (942)..(997): n is a, c, g, or t
tggtggccagctccgggtggttaaaagagaactgagggaggagccagcgcccggccaggtgggagcgggtgcctggccacagaccctatctcaggcccagcttcttctttgccttctgcttcttgcggaccacgtccagattccggtccttccacatgctcttgcgaagcttgatggggcgcgagcccacatacttcccattcatctcacgcatggcgcgcacgtagtcgctggggtccttgaagctgacgaagccgtatgcccttggtcttgcctgtgcgcttgtcacggatcaccttggccttaaggaaggatgggaagcggctgaaggcgcgtgccaagatgtcatcgttcacctcattgcccagatccccacagaagatccggaagtcatctgcatcccactccagcaggctggggtcctcccagctgctccctgccgctgtgcgaatgcaccgtttcgatttctctggcttccccttcttcttgtcttcacccaggggctctgggacctcaagagccatgaggcctgggggtggctctggccgagggggccggggccgaggacgcagggacaggagttcaggaatgcgcagcgggggcaggaggccgcggacgacctccaacgggaggggcaggggctcaggctcgggcaatggcatggccagggccagcggcaggctgggcccaatgactgcagggccagctggggcacctcctgcccccacggccacagccgcgctagcctcctccagcccagccgccgccgccaccactgcctcttccttctctttcaggcccaaccccaggcctaggcccagctctcggggtgctgctggctcttccagagggggcctcagtgcagccatggagcccagcgggggccctggagcccgagccattggtggcagcatcatgggtggtccagggggcccaggcagnnnnnnnnnnnnnnnnnnnnnnnnnnnnnnnnnnnnnnnnnnnnnnnnnnnnnnnnctgctgcagaggagagagcggaatctgctctctgtagcacgtgggggacgaaggctggacgcaggataggggccctctggggggccacagctgcccgccgcaggaacatggcttctcgagcctctgggctgtccaggtgactccgatcaccagggccaaagccaacagggcctacaaaaggagggccacccaccatgggaggaactactgtggctgcagcagctgctcgggcctccagagtctgctggacctgctggtatgtgttggtcgcgataattgggcggatcacaggagccgctgggacctgcatcgcttctactgtggggaccgtggggacagtgggcaccgcaggcacagcagttgggattccaggtactggagcccccagaacttcctgctcaaacagggccatctccgcctccatttccttcaagcgttcctcgccgcttttgcccgggatgccagcgccaggacccgggaccacgggtcctcctgcacccgggagtcccggggctggccccgccccagccatcgctgccgtcgtcgctgtcgccgctactacagtctctgcttagccgccgccgctggttctgctgtctactctcccccttcgtccgggtgggctcccgaggatgacgatcccgggaattccggaccg

SEQ ID NO: 127543 - DNA, 2310 bp, Homo Sapiens
  misc_feature (376)..(376): n is a, c, g, or t
ggcggcgacgacgtgccacgcggcgctcgttccgttgctgagggcgcgcgatcagtggtctccaccacggcgcgcggggagaggagcgatgtggtcgcctacaaagtgccctggccagatgtgagctcgggttgcagtatcgccgcgcgggcgggagcgggcgcggccgacataagcggcgcggggtgacagagcgagggggcgtgcggctcgccgcgccatattaagtgtcgtaggaaggctctgtatgtctgacgccagtgtgcttgcggacatagagagggatgatggtgattatccggacgtgttgaccctcgcggccgagcgtgtcctggcgtccgctctccgtcccttttacacattggctggtgccatnaaccaggcgtaagaaggctcggcacagcataatagtcggcgccggcgcaccgtcggctaggtaaacactctagggcgcaacagcaacgcgccgagcgcggaaggggggcgtctccctgtcaccaggcgcgctgttctcattgtgaatctagcccttcgttcatcttgaattggcgccggggggcgcacgcgcccaacagcaacagtgcctcacacctcggcgatgcgccgttaggagggctgggttatgggcccggcgggcgaggctacgctcactgcggggcgggtggcggcagaaggggtggggtgtggagcggtcctccctaagatcccgcgagcggggggggcaagaacaggggggagacaggcggggtgggtggtttcaggtctgagcgcgctgcgagttggccgatgctggggggattttctttttttctaattgagcaactttattcacataatttctacaccaagaactcgaggttatctctgatggaaccaatttcactaatatttactttaagggcagagaagtcaaccaagtcctcacagtctcaagaatcaaaaacaaaacaaaaatacaaacagagagcaagtgggaagataaataacactccgaaataacctagctacacacttttagtttccaatttttctagcatgaaatcacttttctcttccatcctgtaagacgtgttctctcctctctcttctgagttgggctgtgaagagctgccctggtctcccggtctgacggtgttgtccaccccatctgaggcacccagggaattgccctggcgtccggagccctggggttctgatagcctgggtctttttgcagggaactgatggtccctcgtgccatccctcgtgatggcacgagcaacacatgtagatgaaggagcctcaattgcagttgagcccagtagactttttctgcaccccaggggtgatgatggcaacttctggaaaccctggaagtgagggtctggatttaattttcctaagaagccttctgtttgatatcgaacttccatacttgctttatctgtagacactccaatacataaaggcactgtcatctgcccaggagatttgaggcaatacttttgatgaagcttgtcaaattcttctttaatttcatcgtaacgattccttccgtggcctggcacttctttatctgggactgaaagagttttgctgggtgacactgactttctaaatattccagaactatttccctgaacgtgaaggtcagatgtctgctgcgggcgagttgcgctgtgtgtggggttggtctttggaagtgatgaagatgaatcgctcttgggcaggcacctacctgcttccagagatcttttgcctaggttttcaaaagcctcacttaaactttttgcttttgctttgctggaaggtaaactcagcctgcgggtttctaagccctgaaggccaccaggactcgcaggaccccctctgtacatgttcatggcccaggagtccgggaggcacatccggcgaggctggttcctgggactcaggcaatattcccgatgaagctgatcaaatcggatttcaatctccctctgacggttctctccatggccctgtcgtattgttggtctggaaactatttttacaggagaaattaaccattttaatgtcctaaatctattttcctcatcaagattatatgttgcactggagtcgaagtaaatcaaggaagaatacttcgagggtgtcactttgcgctccttccaacttggatctaacttatggatttggggtctgttgacttcaagaaaagctttttccaattttaaacctgtcttacggcaagaaacatctaatacgttcttgcaatctcttaatgcccctgtccctttcacaggctcagagcagggtatgaagttctccttggagctcctctgagaaccc

SEQ ID NO: 127544 - DNA, 1054 bp, Homo Sapiens
aaaaatccattacatttattaataatatatcttagattctcatcctgttcttttaaatggcgcccactggtctcatacagaggagctgtgtgactttctggaattatagaaatatccgcatccagccatgtgctgagcagaccaatgtaaaatgttcagcaggttttccaatgtctcttggatatatttaatcatctctgcagaagaactcaaaatctcagagcagctccactccagatccagggcaggaggcagcctccagggagggaggctgcgtttacgagaatctgccttttgtgtgtgcctggctgggaccagcctctgggaaagagaagcaccaagacgtgaacagggctgtgggccgatggctttagcagccacataatccctcctttgatgtccagggtcagttcgagcctggtcccccaggctaggaggagacgaatgaaagaatcttgctgtggtctttcctcgttaaaataacatttcggccaccacctgggctgaggacctatccatctgctccttggtccgctcgaagcacctacgggcgagctgctgctgtctggcgtcctcactcaccatcagctccccgtatgaaggtatcttgctgtggtctttcctgatcctcctgaaggaacctctccacacttttgtaggctttcgtgaacttgtgcttaacaatgagttcacaccaccgatggcgaacctctgcatcctgatcctggaggtggtatgtcctctggaggctttgcagagttcgggggctcagagtcttctgctccaagagatgctccagaagcaagaccagctggtctggaagaagcttttcaaacacctcttccttctccctgcgcttccgttttcggggtctccggttcactccaatccatttcgtgacctcggcgcgcacttgccgcgcaagcccgcactccgccccggcgcgacgctccctctgcagcggctcgcccgcggccggggaggacgcagcggcggcgccggagcccgcgccctgcgcccgcccggggtccgcatcacctcaggcgcggccgca

SEQ ID NO: 127545 - DNA, 1033 bp, Homo Sapiens
  misc_feature (848)..(848): n is a, c, g, or t
  misc_feature (853)..(853): n is a, c, g, or t
  misc_feature (872)..(872): n is a, c, g, or t
  misc_feature (880)..(880): n is a, c, g, or t
  misc_feature (909)..(909): n is a, c, g, or t
  misc_feature (987)..(987): n is a, c, g, or t
aaaaatccattacatttattaataatatatcttagattctcatcctgttcttttaaatggcgcccactggtctcatacagaggagctgtgtgactttctggaattatagaaatatccgcatccagccatgtgctgagcagaccaatgtaaaatgttcagcaggttttccaatgtctcttggatatatttaatcatctctgcagaagaactcaaaatctcagagcagctccactccagatccagggcaggaggcagcctccagggagggaggctgcgtttacgagaatctgccttttgtgtgtgcctggctgggaccagcctctgggaaagagaagcaccaagacgtgaacagggctgtgggccgatggctttagcagccacataatccctcctttgatgtccagggtcagttcgagcctggtcccccaggctaggaggagacgaatgaaagaatcttgctgtggtctttcctgcaaaggaaacagcagtaacattgattacccagtcaccgggaggaattcttgtgagcgcgcacctctgtgtgcctttgctctccactttcaagagaggactttaatcacaggacaaggagaagacccaggcccatttcagtctccgggacgggtcacagcgagccgtgtgacgctggcctgctcacacgtggccatgacaccagcaggctgtactcaggctttgcgtacacaatagctgctaggagtaccatttcagacacgcacccactctaactgttctcagaaagtctcagctcacctcgccgtgggagagctgggccctgcctcccttacacatgggggcaacgggccctgctggactgtgtcctgcttcangctgngagctctactttctgcacnggtttccnagtcacaaccccagccgcagagacatganatatgcacgtctgcgcggcggggtgaccaggtggaccgctgttgcgcgatggagccacttctgactccggactaaaanaggtttttcaagtcatctgtctgctatgacatggtaaagatgatca

SEQ ID NO: 127546 - DNA, 779 bp, Homo Sapiens
  misc_feature (679)..(679): n is a, c, g, or t
  misc_feature (732)..(732): n is a, c, g, or t
ctgtgaccatgcagtgagcaatgtcaagtgttaatggacgctggtcagggatacaccgattttatttttaaaaaagactttattctctagacaagacaatgaaaccatcttccttgtatagagggcaaggaagttgcataaacgcagaatgtttcagcagctttgggttcactcatgctcattttcttcttagcaatcagcatgtgaactggaggacacaaaagcattaacaactcccgcagtgcagaaaggatgagttaccgacatcaaaggaagatgaaggagaagtacttcttgacccatgccatgctgccacagtcccctaaaggcagaagtataaaagcccgagtgcatgatgttattctgagacaaccatattccagccaaatgcacattaggctggaagtgatctcaggaaaggaatcaggtaacagctttccatgtgatcaatatgaaagtcaatgccatttatctcaaaagcatgaatggaatccgttagaagcattaccttctaacaatgggatttatggcataaatgacatataagaaagcagcacatgccttgcttcattctgagccaatgaagaagtataggtagaaaagattacagtagcatcctcttagcaacaactacaccacatagacaatcacagaatccattgctctgccaggaattcanttagaacttgccatgccccaaaaggacatgatgcattatcttctatgttgcanatagaaatatgggaatatttctcactgataccaagtgagaatatgga

SEQ ID NO: 127547 - DNA, 814 bp, Homo Sapiens
cactgcattcatatggtttttattctgtgcaaattctactatctgctgagactgaacttctggcaacaggctggctcacaatggctactttgctctctgcttggaacgcactgttagttaatgaggtctgagctgccacagaaggcatctgcagagtcaccatgttaacagagtctttatcctgtatgagatcacgtgtatgtgataagctatgactctctgagcaaggattttccaatttgactgaacctacacatttctctcttgcatgcagcattcccttatgataaacaaggcatgacaagtgggagaaagctttcccacaatcagagcatccatacggtctctcccctgtatgagttctccgatgtctgttgagacatgatttatctctgaaagctttcccacagtcactgcatgtatagggtttctctcctgtgtgaattctctggtggttaatgagacctgacttgtgtgagcaggattttccacactcagtacatacaaagggtgtctttcctgtgtgaaatctctgatgggatattaaacatgtcttctggctgaagcctttcccacattcattgcatacatagggtttctctccagtgtgagtacgtcgatgaataaggaggttgcccttttggatgaagccttttccacattcattgcatatatagggtttttctccagtatgaattcgctgatgtacaatgagatttccttctgaatgaagcttttcacaatcacggatataatgactctctctgtgtgagcttctgatgtgcatgagctgtgatttcaccggaatgtttgt

SEQ ID NO: 127548 - DNA, 936 bp, Homo Sapiens
  misc_feature (58)..(67): n is a, c, g, or t
  misc_feature (226)..(234): n is a, c, g, or t
  misc_feature (285)..(319): n is a, c, g, or t
  misc_feature (321)..(322): n is a, c, g, or t
  misc_feature (326)..(386): n is a, c, g, or t
cccctggaggagcgttaaaattcctctggaggaggggtgtgtgccccaaattatgttnnnnnnnnnnacgaaagggaaagggttccctttccccaaaaaatttccccaaagggtaggccaggtttttcccccaggccaaggagcggtgtgtaaaaaaagaggcggcccaggggcccttagtcttataaaatagggccccctttatagggggccccctctttgcccnnnnnnnnntgggttcggggtaaaacttgggccccctccaggggtatttttaaaagcggnnnnnnnnnnnnnnnnnnnnnnnnnnnnnnnnnnntnntccnnnnnnnnnnnnnnnnnnnnnnnnnnnnnnnnnnnnnnnnnnnnnnnnnnnnnnnnnnnnntttccaggtctgcagagcatttattccgtcccagtggggaggggcagggatccaggtggccggagggcacagggcctacgtgtaccacatgaagccgtggctggcatggagagcctcctctgtggtgcgcagcccgtacagctccccgatcaaggggggcacccagcgggttgtgtggaacacagactcccccaccttccagtcgggcacgtccttcatgatgatggcctcctcctccaggttctcccgaagcatctgcaaggtcctccggtcggtttctgcctgtaacagtggcaacagcgcgatgcgagcctcgaagtcctcgatttgtaggcgcctgcgctcacggttccacttcattatgctccagtgcccgtagatcagggttccaatccctatggccagcatgctgtagcccgacagtcctcgacgcggcaagttccgtttgtagtcgatgggcccatagccccccggcggaggcatgtcctgcttcacctttgacgccgccatactcgcagcggacgcgtggtcgacgatatcccgggaatcc

SEQ ID NO: 127549 - DNA, 1076 bp, Homo Sapiens
  misc_feature (391)..(399): n is a, c, g, or t
  misc_feature (415)..(498): n is a, c, g, or t
cgttggctgctgtcgtgtgcgtcgcgtgcgcgtgggtggtgtcgtggcgggtgtggtgcgtgcgggtcgtgctcggttgctggtggcttgcgcgttatctgtgctaccctgcttattgtcagactactcgcgggcacgttgtggcgcaggatgggcggggtggcacactgaacccgtgtgttttgtctccggctcgtggtctgctggggggtggttgtccgttgtgtcccgccccggggggggtgcctttcccagagtcccgcacgtggcgttggtttccctgctcctcggcctgtgttgtgcgcggccgcttcgcctctcggttttttaggtcgctcgccccccttgggccgcccctcttgtagaggaaaaggtggtggtggtattgtgnnnnnnnnnggggggtttctgttgnnnnnnnnnnnnnnnnnnnnnnnnnnnnnnnnnnnnnnnnnnnnnnnnnnnnnnnnnnnnnnnnnnnnnnnnnnnnnnnnnnnnccaggtctgcagagcatttattccgtcccagtggggaggggcagggatccaggtggccggagggcacagggcctacgtgtaccacatgaagccgtggctggcatggagagcctcctctgtggtgcgcagcccgtacagctccccgatcaaggggggcacccagcgggttgtgtggaacacagactcccccaccttccagtcgggcacgtccttcatgatgatggcctcctcctccaggttctcccgaagcatctgcaaggtcctccggtcggtttctgcctgtaacagtggcaacagcgcgatgcgagcctcgaagtcctcgatttgtaggcgcctgcgctcacggttccacttcattatgctccagtgcccgtagatcagggttccaatccctatggccagcatgctgtagcccgacagtcctcgacgcggcaagttccgtttgtagtcgatgggcccatagccccccggcggaggcatgtcctgcttcaccgacgcgtgggtcgacgatatcccgggattccgaccggtaccagcctgcttttttgacaaactgttctatattcacaaatgcgctt

SEQ ID NO: 127550 - DNA, 1443 bp, Homo Sapiens
  misc_feature (320)..(347): n is a, c, g, or t
attggatctcgatgctagaagaaaaatggcacataacagagatccagatacaaatgaacatttccacaaacatcttgcaaaacaacatcaaagtgaggaatacaaccatctttgtttcaagaaacggggtctttttcaaagcacttaattagctttctgaagccagtaacaaacctagatttgtaacaaatcccattcccacaggcctgagtctgctaggctccgcagccgtcttcttggttaaatcaaagcaggtcgtcattgtggttaataacatttgaatacatattttaaagcatgtgtaacaatgtgagtcaccnnnnnnnnnnnnnnnnnnnnnnnnnnnngcatttgaacaacaacagaaacaaaaccccaaagcaaataaagtttgaaatgtaatgtaaaaccagggccctttgggggccttgctagagtgactgtgttgtttcagagagtggtgccaaatgcccttttcaagtagtttggggatgagggtgagcaaagacataaagtatcagaaactacaacactgaggtagcacccaagctggttgccctttgaccccttgaagtgcttttagattgagaccgtctaaaagcacattcttggaattttagaactttgatcatcttaactttgagtttacaaaaataacagataacattttattttgagcatgttcttttcaaggtctggtgcctccagaacaggtgaaatagagggattcctcttaggcaaagcaaccatacacttggatacaagccaagctccaggcccggaagtggaagagtaccgctaacatccaattatccacagattggatggttgggggtgaatatggcagtgcagaaaaagagggaaagaaagcaggcattttctctccccattgggtctacttagctgacatgctgcggaaaataaattgtaagaggactttgataatgtgttaattatgcagctgcattttccataggccatctgcataatcccatctcatagagatgctccaaactacctgaggacatttgggttctgaaacactgtcactctagtctcatcagaaaatcaaacatggatgcaacttggcaatgaaaaacataaaaatgtcaccacaatagccgttgagcttgaatgacagaaatgaaggacggagatctacacatctacttagctcttgacttcgggttttaaaaattcagagttaacaaaggaaaatccttcgaattctgattggtcaatattcctgatgacttcctggtcgggaggtgttaggactggtggatggcgggtgaaaaatcggtcgaagttttcagcatttcgcccacaagcttttggcttataagggggctggatctctttgcgttcaagtttctcccaatcaatataccggaaaaatgcatgctctttgatatcacgttcgccttcaggtccacaaccccc

SEQ ID NO: 127551 - DNA, 846 bp, Homo Sapiens
ttctagttcacagaaagaccatttttaatatgaaaagagaaaaacaatttgaaggccccacaatttgttgtgtaacaacataatttcaagtaaagtgaatgtgattaaaacatcttgatttcacaaagccattcagaggaggcttcgacaaacgcaaagcgacccaaaccctggagggtcacatcccggctgctacaaacctcggcggggcggccccgctcttgcggccgggacagcgcagcggcagcaggggccgcaggggacccgcagattggcacgccgctccccatccccgcagcgcgtctgcaccggagactctgcggggattgtagccggagggcgggccgggctccgaggcgctgctcaggcattggggtttgtcctcatgagctccacgtcggcgtgcaccatctccctcaccagctcatcgaaagcgacccggggcttccagttcagcttctgtttcgctttggtgcagtcgccctgcagaaagtccacttcagttggccggtagtacttgagatccacagtcacgtgaactttgccggtctctttacatctgcccacttcattttcattctttccttcccacacaatggtttttccaatgtgcaagaatgatttctcgacaaattcccggacactatggacctccccagtagctataacgaagtcctccggctcgtcattctgcaacatcaaccacatagcctccacatagtccttggcatggccccaatctcgtttggcatccagatttcccaaactgaaacattccagttgtccaaggtaaatcttagctactgaccggctaatttttcgagtaacgaaattagctcctcttct

SEQ ID NO: 127552 - DNA, 570 bp, Homo Sapiens
ttttgctagttcacagaaagaccatttttaatatgaaaagagaaaaacaatttgaaggccccacaatttgttgtgtaacaacataatttcaagtaaagtgaatgtgattaaaacatcttgatttcacaaagccattcagaggaggcttcgacaaacgcaaagcgacccaaaccctggagggtcacatcccggctgctacaaacctcggcggggcggccccgctcttgcggccgggacagcgcagcggcagcaggggccgcaggggacccgcagattggcacgccgctccccatccccgcagcgcgtctgcaccggagactctgcggggattgtagccggagggcgggccgggctccgaggcgctgctcaggcattggggtttgtcctcatgagctccacgtcggcgtgcaccatctccctcaccagctcatcgaaagcgacccggggcttccagttcagcttctgtttcgctttggtgcagtcgccctgcagaaagtccttctctgctgagccttctagagcagaggctgtctggatcctgctgaatgtctgcaccgtgggcttgcaatg

SEQ ID NO: 127553 - DNA, 785 bp, Homo Sapiens
  misc_feature (765)..(765): n is a, c, g, or t
ctagtcccagagccagtgtttattagcaagatggaacccaaaggcggctgtggcctgggcagcaaaaggccaccaggagcccccacccatctacccaactgccccccagagctaattacatccacacccatcccctgaagtggtggacataagggagccctggggagcctctaccggccccaggcctctaccacggaccccctcccctcagagctggggcctcccgtcagctctgcctgggcctggcccctctgctatgctcccagcctctgagtcaaagtggcacagggaaagctaaggaggtagagtggggtggccctgccctggccaggcggggaggggagaaggggctgaaggggctgtcccacccaggcaggatgcctcttctcctatccccaataaatagagaataaatacccaggaaggggctggtcgtggctgagtgcccccaacccaggcaggggctggcatcctgtgatggccccttcttcccttctctgtgtgctcttgaggccaccccagtctccaaagtggtcctcgcatccatgtctatgccacagcacaggctgacaacacacatcagaaaaggtggacagtccgtgccccatccgagtagggcttgctccctccctttgtcctgtagatcttggcggaggctgtccagcaggtagacttccagctgagtctggggactgtgtggtcctggcctggccccaccaactggctgggcctggttaggcaggctctgttttctgccgtctctgnacagcatgggtctaagtttt

SEQ ID NO: 127554 - DNA, 695 bp, Homo Sapiens
  misc_feature (256)..(280): n is a, c, g, or t
  misc_feature (282)..(328): n is a, c, g, or t
aacgtctttcatcctttattgtattggtgcgattatgaaatattattatggcttatactttagcaagaaagtaccaggaaggttattattaatcgacaatgaatgccgttgataccttcatgctctttgaagacaggatgctccggctttgaagcgctacatttctacattgctaacctacaggaacctatgttgaggtggtcccaccgaaatacacggctaatagttcatctctttcctccaggaaccttcaggnnnnnnnnnnnnnnnnnnnnnnnnngnnnnnnnnnnnnnnnnnnnnnnnnnnnnnnnnnnnnnnnnnnnnnnnggaaccttcaggttttactaagcatccttaccctaattatctaaatctttgagacgtaaattatttgatgtggctaaaaatcctcctgctagaatttaggtccaatcctttaatgttcggatactcaaattctttaacgaaactgatcactgagctaggccgacacaagtccgccaaaatgtccgcagaaacgttaagaaaagctgtcataaggccagcttgaaagacatcataaaaggccttcgctgtcctttgagttaattatctaacacccgaagagagtgccagttctagttagaatccgcgcgtcaggttctccaacagtcagaagggcttgtgtgagggcagggaagattttaaccccgtt

SEQ ID NO: 127555 - DNA, 1134 bp, Homo Sapiens
ttttttttgagaaagtagtaaggatttttattgtcaaaacgagatcataatagaagacacaaataaattaattgttctcataattttagactccagggcctctctatggaaaggccagcttcttatacagacaaggtactatccaaaacaaaaagcaggtatttgagacagtgttcaagacaacaagtgaacttgtacacagtgaagagaaataaaaaggtggcttccgtatttccctccctcagtaaggttatgtgttgcataaagggatgaggctcattttggtgaaaaatgctttcatacagaaaattttgaattgagtgacctccccgcacaggcgttccaggccctgacctgaacaaggaaatcaaagtaagttaacaccactggcttcacatgaacctcaagactataatctaacggtatctaccatctcctttactttaaaaaagtttaatgtccatttacctataccaaatcagtagacttaattttctctcttaggaagtttttaaccaaattacagctaaattaatctcactttaaagtgcaagaaaggctctgctagagtagtgtttgttctgtggcatagaaagaggagcatgcctcctccggcactggcctaagaggccccacatgaagaactagctgcaagacagtgatccattaggtctgccaaaaagcagggggactcaaggttcagcctagaaagaggggtccctgccaagtctggcttttacctgtacccaggtcccaaacaaaccttgggtcccctaactgataaggctggagcacagcaccagtcatcaacagggccaaagtcgtcttagcgagtcagtgagcacctctaagccatgatttgtcaatgctcacatggatagtggtaaaggaataaagaagcctgggttttggaacagtacaaacattctttacctagtaagcagtgatcaaagttcttacctagggtaaatgatgaaaaaaataggtaatgaggtccccatacacccgtgctgagaatattagtctaactttaaagcagtacaaaatggcttcttccacacaacaagggcaagctttatactaatgtttctcaaaaaccaattacatctccagctctagcctcaatttaatagg

SEQ ID NO: 127556 - DNA, 647 bp, Homo Sapiens
  misc_feature (44)..(53): n is a, c, g, or t
ttatacaaaagcatttaacaagcttaaaaaatgaaactcaatgnnnnnnnnnngaaggtttgaacacagtcaaataacctgagaagtgacagatggaaaagcaacagaatgcaagcaccttgtaaggtctgtaatctttggatttactgtgaaaagtttcagaacatcatagactcttactgccacattgtccatagaccctggaaaataacagtgaaattcatatgtatacacatatatatgaatacacactcatgcatgcacactgtcttcacacacccctcctcaccacttaaccggagttacataaatgcttctcagatatgtcattgcatttgtttgttttctgcatctcaactaagttcagcggcttgcgcctgtgacattaattatgcaagattcaaacaaccaagcaggcacattttgggggtgagttttaagaaatctgtgacctgaaagaaattctgtggggactgtctgggttatccagtttattccgtgattatattctgtttttaggtcttgacctatttttaagctgtttcctctctgtatgcttttcagaaaaaaatccttattctgaaatactaatattttgattctacatgaactgtgtccctcaaatgtcttgatatcagctatcttta

SEQ ID NO: 127557 - DNA, 1623 bp, Homo Sapiens
  misc_feature (1494)..(1528): n is a, c, g, or t
  misc_feature (1532)..(1571): n is a, c, g, or t
tactcctgcggagacccacacagtcacactggacacataacttctggggcagccccgcaaaacacaccagtggttctataaacccttcttggtgctccgcgcatgcgcgtacacaaacgtctattttaaaaaactcgtcctcgagggcctcttgtgcttacaaccaatgagtttacttcatatttgtatttattttatttttcctttgggtcaaaagaaagctctttattgattgactcagcaatgcagggctggcacccatcagcttcaaaccacatcttatcgcatccactcctgtccactcccgtccactttgccctcttccaggctgaaatcttgctttcaggcaagggcttccggccagccttgcattagttctcagctatggtcttctgaacccagtcctggatggaagtcaccttcacatacacaccatactcagccacagcacagctcttatcaaagcttaagatcccagtcgcataccaggtgtcctcctccaggtcgtgaacggcaaaggcactgcccgcatcgccatagcaggtgtcttcttggtacttagacatgccagcacagaaggtgtgttcattcagtatgggctgcacccctacagggctcttcggtgtcttcttttcggggactgtgctgccttcataatgccttatgcattggtcttggtcagccacaggcagcatgacatacttcagatggtcagtaaatttaaaattggcatttcgcccccagccagaaacataacccacacgccctacttctgcataatcctttgaaggtaggcagatgggcatcactctctcattaacagacaccttctgtttgagtttgatgagcccaatatctacctgggagtagttagggtgtagaacaaccttctcaatctctacaagctgctttttccccacatagagtgttaaagtaggggcaatgtctttcgctgttgcattttctgaatggttcaggaagagatttttagccgtggtcagcagccattgttcattgatcagcgtggcacctgtggtgagattatggtgggaaaccatcttagcctgccagggaaagctgcctttggcatccaggtgtccacccaggatccgctgcactgggtttgccggattcttgggcttcccacatactgcttcacattcaggaagtttatctccaacagccttatttatccactgcttcccattgtttaaggtgtacactccatctccttctgtgcgcagtttgtagtagttcttacactggtagcgaaccgagtgctccacatagccatgtgcaatctcggggggcttcgggcagccgtcatctgcgatatccgtgacatcattgcctgagtccactgcaaaaagctgtccccagagcaggagggcaatgacagctcccagggcactcatcttggttggtcttgcctctggaagagcccccggccgtaatggccgaattcccgggcatatgtccggtaccgtcgactgnnnnnnnnnnnnnnnnnnnnnnnnnnnnnnnnnnncggnnnnnnnnnnnnnnnnnnnnnnnnnnnnnnnnnnnnnnnnccttgcagagacaggagggctgaggccggccccccttaatagaggtgagggg

SEQ ID NO: 127558 - DNA, 749 bp, Homo Sapiens
ttttcaggaggaaaagggcctttatttccatacatcgggtaaacaggggagagcacagcccagtgagtacaaaccaattgcaggagagaaggggggcggcagatgggagcagcaccaggcactgcacttgggctcccaagtctggtggagttctcagggataacctttttagggtgggggctgggacctccagaccacatggtgttgtgtctgggataagtgtgtgggggcagggaggttggaagaatgacacgggctcaggacacagagtgaggactcatgtctaatgagcaccggccaaaacttccatcttcagtttttctgatcacaagtcctcaaccccaagccttccctctcaagttgagtttatggtccagaccacctggacagagcaggagggaggcagtgcttggatcagccctgaactgctgtagttggaatgggtttaccttaaataggtcattgcacataacacgctgagacaaagagggtggggtgggggctggaggtgcggatggtccacacacacacttgtctgcgtaggcttgctcaacccagcccagcagcaccggagagcccctccgcacctcattcttaagaacctggacccggctctcctcaccagcgtctccagctgcacagagaaaggactgctctctgaagggtgaagatggagatgacattcccgagtcgttcttgggagcccagctacactacagcccctccactctcaggatgcactgtgatgg

SEQ ID NO: 127559 - DNA, 1182 bp, Homo Sapiens
  misc_feature (978)..(978): n is a, c, g, or t
  misc_feature (1022)..(1022): n is a, c, g, or t
ccagccccaccagctactggaagtcccttgcccctgatcggtcagatgatgagcacgaccctctcgacaacacctccagaccgcgatactcccacagttatctgagtgacagcgacacagaggccaagctgacggagactaacgcatagcccaggggagtggttggcagccctctcaccccagggcctgtggctgcctgggcacctctcccaggaagtggtggggcaccggtctcccccacccgactgctgatctgcatgggaaacaccctgaccttcttctgtcaggggcactttccaggctatgggtgtctgatgtctccacgtggaagaggtgggggaaagaggagtttctgaagagaactttttgctcctctgtctcaaaatgccagactcttggcttctaccctgtgtcaccgtgggcagtggcaggtggcctggcactgcatggagccagcacgttgacctccctctcagctccctgctcagggacggtggacaggttgcctactgggacactctaggttgctgggtccatggggaggattgggggaggagaagcagtgccttccctctcgtgtggggtgggggctctctcttcttggtgcctgctgtctttctactttttaatttaaatacccaacctctccatcacagctgcatccctgagagtgggagggggctgtagtggtagctggggctcccaagaacgactcgggaatgtcatctccatcttcacccttcagagagcagtcctttctctgtgcagctggagacgctggtgaggagagccgggtccaggttcttaagaatgaggtgcggaggggctctccggtgctgctgggctgggttgagcaagcctacgcagacaagtgtgtgtgtggaccatccgcacctccagcccccaccccaccctctttgtctcagcgtgttatgtgcaatgacctatttaaagtaaacccattcccactacagcagntcagggctgaatcaagcactgcctccctcctgctctgtcccagntggtctggaccataaactcaactttgagagggaaggcctttggggtttaaggactttgtgatcagaaaaacttgaaaattgggaagttttttggccggtggctcctttaaaacattgaatcccctcacctctggtgtccccggaagaccccgggggtccc

SEQ ID NO: 127560 - DNA, 1028 bp, Homo Sapiens
  misc_feature (155)..(175): n is a, c, g, or t
aaatttacaaataaccaaaaaattttatattttcctaccttgaacacatttcttcaaagggttagcttgaaaaatacatgtctaagattacagaatattcaatagttacttttagggttttaacattattttagattttaccacagagtttaccnnnnnnnnnnnnnnnnnnnnncctgctaaacatcaaataccacttgtccactgggaacaattcagctttctatcagttgagttggttagatcacattaagttgttatgtataggtattgaccagaagcctacaatgagatacagattttacactaagattgaaaaaatttatggtaccagctctttttctcttaactttctacactaagagaaaaatacattacttggcctacatcttaaagcattcaaaataggccctctgtaagtttttaacaaattgtatttgtatttaggtctttaagaaacaacctgagatgatggtaagtgtctcattcctcatttgacaaatgaggacaaatcactccttgagaactaaggtcatttcaatccatagcacccctgacctagtgccatgattcaaattcacaactcttgatagctaagactttgactgctccaactagcaaatcacatatagccattccctaactttgtgtttcccaaatctagctgtgaatcagaattaccacaggatgccttagccctacccttgatctactgaagcagaaaattactgccttaattctgtgtgatacaggtcagcctgccttttaatatttggatatctaaagtgagagcataaatgatgaagagaccagtttataggactatttctcacaccgtcatgtaaagttggtatgtgtctttgctccattaaagtatttctgacctcaatcttaaactttgctttgtcaaacaaaatcatgctgatttcaaatccaattagaaaataagtatgtacagtaaaaagtaaacttgggcttcaattaatgaaactttaacagaaacatggctagagaggaatctcctccta
